(19) United States
(12) Patent Application Publication
(10) Pub. No.: US 2025/0302929 A1
(43) Pub. Date: Oct. 2, 2025

(54) TUMOR NEOANTIGENIC PEPTIDES

(71) Applicants: INSTITUT CURIE, Paris (FR); MNEMO THERAPEUTICS, Paris (FR); INSERM (INSTITUT NATIONAL DE LA SANTE ET DE LA RECHERCHE MEDICALE), Paris (FR)

(72) Inventors: Sebastian AMIGORENA, Paris (FR); Marianne BURBAGE, Paris (FR); Alexandre HOUY, Vitry sur Seine (FR); Joshua WATERFALL, Paris (FR); Marc-Henri STERN, Paris (FR); Benjamin SADACCA, Paris (FR); Antonela MERLOTTI IPPOLITO, Paris (FR); Yago ARRIBAS DE SANDOVAL, Paris (FR); Christel GOUDOT, Le Blanc Mesnil (FR)

(21) Appl. No.: 18/549,993

(22) PCT Filed: Mar. 11, 2022
(86) PCT No.: PCT/EP2022/056332

§ 371 Date: Sep. 11, 2023

(30) Foreign Application Priority Data
Mar. 11, 2021 (EP) 21305299.6
Mar. 2, 2022 (EP) 22305237.4

(51) Int. Cl. A61K 39/00; A61P 35/00; C07K 14/82

(52) U.S. Cl. CPC A61K 39/0011; A61P 35/00; C07K 14/82

(57) ABSTRACT

The present disclosure provides tumor neoantigenic peptide sequences and nucleotide sequences encoding such peptide sequences; a vaccine or immunogenic composition capable of raising a specific T-cell response comprising one or more of the neoantigenic peptides, or comprising nucleic acid encoding one or more of the neoantigenic peptides; an antibody, or an antigen-binding fragment thereof, a T cell receptor (TCR), or a chimeric antigen receptor (CAR) that specifically binds such neoantigenic peptides; methods of producing such antibodies, TCRs or CARs; polynucleotides encoding such neoantigenic peptides, antibodies, CARs or TCRs, optionally linked to a heterologous regulatory control sequence; immune cells that specifically bind to such neoantigenic peptides; and dendritic cells or antigen presenting cells that have been pulsed with one or more of the neoantigenic peptides; and methods of using such products in particular therapeutic uses of these products.

### RELATED APPLICATIONS

[0001] This application is the U.S. national phase of International Patent Application No. PCT/EP2022/056332, filed Sep. 11, 2022, which claims priority to European Patent Application Nos. 21305299.6, filed Mar. 11, 2021, and 22305237.4, filed Mar. 2, 2022, both of which are hereby incorporated by reference in their entirety.

### INCORPORATION BY REFERENCE OF SEQUENCE LISTING

[0002] This application includes, as a separate part of disclosure, a Sequence Listing in computer-readable form (Filename: SequenceListing.txt, Size: 91,513,022 bytes; Created: Mar. 27, 2024). The contents of the Sequence Listing text file are incorporated herein by reference in its entirety.

### FIELD OF THE DISCLOSURE

[0003] The present disclosure provides neoantigenic peptides encoded by transposable element (TE)-exon fusion transcripts, nucleic acids, vaccines, antibodies and immune cells that can be used in cancer therapy.

### BACKGROUND

[0004] Harnessing the immune system to generate effective responses against tumors is a central goal of cancer immunotherapy. Part of the effective immune response involves T lymphocytes specific for tumor antigens. T cell activation requires their interaction with antigen-presenting cells (APCs), commonly dendritic cells (DCs), expressing TCR-cognate peptides presented in the context of a major histocompatibility molecule (MHC) and co-stimulation signals. Subsequently, activated T cells can recognize peptide-MHC complexes presented by all cell types, even malignant cells. Neoplasms often contain infiltrating T lymphocytes reactive with tumor cells.

[0005] However, the efficiency of immune responses against tumors is severely dampened by various immunosuppressive strategies developed by tumors; e.g, tumor cells express receptors that provide inhibitory signals to infiltrating T cells, or they secrete inhibitory cytokines. The development of checkpoint blockade therapy has provided means to bypass some of these mechanisms, leading to more efficient killing of cancer cells. The promising results yielded by this approach have opened up new avenues for the development of T cell-based immunotherapy. Checkpoint inhibitors are, however, effective in a minority of patients and only in limited types of cancer.

[0006] A major goal in immunotherapy is to increase the proportion of responding patients and extend the cancer indications. Vaccination, administration of anti-tumor antibodies, or administration of immune cells specific for tumor antigens have all been proposed to increase the anti-tumor immune response, and can be administered alone, with other therapies such as chemotherapy or radiation, or as a combination therapy with checkpoint blockers. The selection of antigens able to trigger anti-tumor immunity without targeting healthy tissues has been a long-standing challenge.

[0007] The search for tumor neoantigens has mostly been focused on mutated sequences appearing as in cancer cells. These antigens are unique to each patient. Tumor antigens (the ones preferentially expressed in tumor cells) are, however, self-antigens that represent poor targets for vaccination (probably due to central tolerance). Identifying shared true neoantigens (absent from tissues) is a major challenge for the field.

[0008] A few prior reports regarding transposable elements (TE) in tumors include (Helman, E. et al. (2014). Genome Res.) (Schiavetti, F. et al. (2002). Cancer Res., Takahashi, Y. et al. (2008). J. Clin. Invest.). (Chiappinelli, K. B. et al. (2015). Cell, Roulois, D. et al. (2015). Cell). However, the relationship of TE to the antigenic landscape presented by tumor cells has not been investigated in depth.

[0009] New tumor neoantigens would be of interest and might improve or reduce the cost of cancer therapy in particular in the case of vaccination and adoptive cell therapy.

### SUMMARY

[0010] The inventors have now discovered that non-canonical alternative splicing events between exons and TEs, also named herein JETs (junctions between TEs and exons) can be a source of tumor antigens and more particularly a source of tumor-specific antigens. The present disclosure therefore provides tumor neoantigenic peptide sequences and nucleotide sequences encoding such peptide sequences; a vaccine or immunogenic composition capable of raising a specific T-cell response comprising one or more of the neoantigenic peptides, or comprising nucleic acid encoding one or more of the neoantigenic peptides; an antibody, or an antigen-binding fragment thereof, a T cell receptor (TCR), or a chimeric antigen receptor (CAR) that specifically binds such neoantigenic peptides; methods of producing such antibodies, TCRs or CARs; polynucleotides encoding such neoantigenic peptides, antibodies, CARs or TCRs, optionally linked to a heterologous regulatory control sequence; immune cells that specifically bind to such neoantigenic peptides; and dendritic cells or antigen presenting cells that have been pulsed with one or more of the neoantigenic peptides; and methods of using such products. The present disclosure provides tumor neoantigenic peptides comprising at least 8 amino acids, optionally wherein said neoantigenic peptides are encoded by a part of an open reading frame (ORF) from a fusion transcript sequence comprising a transposable element (TE) sequence and an exonic sequence. While in some embodiments, the tumor neoantigenic peptide is at least 8 amino acids in length, and/or up to about 25 amino acids in length, antibodies, TCRs or CARs that specifically bind the neoantigenic peptide may bind a peptide sequence of at least 4, at least 5, at least 6, or at least 7 amino acids.

[0011] According to the present disclosure, “neoantigen peptide characteristics” include neoantigenic peptide derived from fusion transcripts (splicing variants) wherein:
[0012] the TE sequence can be located in 5′ end of the fusion transcript sequence and the exonic sequence can be located in 3′ end of the fusion transcript sequence, and the part of the ORF of said fusion transcript sequence, which encodes the neoantigenic peptide, can overlap the junction;
[0013] the TE sequence can be located in 5′ end of the fusion transcript sequence and the exonic sequence can be located in 3′ end of the fusion transcript sequence, and the part of ORF which encodes said tumor neoantigenic peptide, can be downstream of the junction such that the open reading frame is non-canonical;
[0014] the TE sequence can be located in 3′ end of the fusion transcript sequence and the exonic sequence can be located in 5′ end of the fusion transcript sequence and the part of the ORF of said fusion transcript sequence, which encodes the tumor neoantigenic peptide, can overlap the junction; or
[0015] the TE sequence is located in 3′ end of the fusion transcript sequence and the exonic sequence is located in 5′ end of the chimeric transcript sequence, the part of the ORF which encodes a tumor neoantigenic peptide, is downstream of the junction between the exonic sequence and the TE sequence, optionally wherein the peptide sequence which is thus encoded by the pure TE sequence is non-canonical.

[0016] The TE sequences can be selected from the TE class I: Endogenous Retro Virus (ERVs), Long interspersed nuclear elements (LINEs) and short interspersed nuclear element (SINEs) and MaLR sequences or the DNA transposons of class II.

[0017] The present disclosure notably provides an isolated tumor neoantigenic peptide comprising at least 8 amino acids of SEQ ID NO:1-38907 and 38916-41099 and optionally comprising a transposable element (TE) sequence and an exonic sequence, wherein said ORF overlaps the junction between the TE and the exonic sequence, is pure TE and/or is non-canonical.

[0018] Most particularly, the present disclosure provides an isolated tumor neoantigenic peptide, according to claim 1 wherein the peptide is from any one of SEQ ID NO: 1-38907 and 38916-41099, including a fragment thereof, and comprises at least a portion of a TE-derived amino acid sequence or is from any one of SEQ ID NO:1-38907 and 38916-41099. In some embodiments, the neoantigenic peptide overlaps the breakpoint between, the TE-derived amino acid sequence and the exon-derived amino acid sequence. In other embodiments, the neoantigenic peptide is derived from a pure TE sequence. In yet other embodiments, the neoantigenic peptide is encoded by a non-canonical ORF downstream of the junction between the TE-derived amino acid sequence and the exon-derived amino acid sequence.

[0019] In one embodiment, the tumor neoantigenic peptide is 8 or 9 amino acids long, notably 8 to 11, and binds to at least one MHC class I molecule.

[0020] In another embodiment, the tumor neoantigenic peptide is from 13 to 25 amino acids long, and binds to at least one MHC class II molecule of said subject.

[0021] Said neoantigenic peptides are typically expressed at higher levels, or higher frequency, in tumor samples compared to normal, optionally said neoantigenic peptides are not expressed in normal tissue samples (i.e. normal healthy cells), or not detectably expressed in normal healthy samples.

[0022] In some embodiments said neoantigenic peptides are expressed in at least 1%, 5%, 10%, 15%, 20% 25% or even at least 30% of subjects from a population of subjects suffering from cancer and notably from a population of subjects suffering from cancer, notably from lung cancer, more particularly Non-small cell lung cancer (NSCLC), even more particularly from lung adenocarcinoma (LUAD).

[0023] Typically, the neoantigenic peptides bind MHC class I or class II with a binding affinity Kd of less than about 10⁻⁴, 10⁻⁵, 10⁻⁶, 10⁻⁷, 10⁻⁸ or 10⁻⁹ M (lower numbers indicating higher binding affinity).

[0024] Typically, the neoantigenic peptides bind MHC class I with a binding affinity of less than 2% percentile rank score predicted by NetMHCpan 4.0

[0025] Typically, the neoantigenic peptides bind MHC class II with a binding affinity of less than 10% percentile rank score predicted by NetMHCpanII 3.2.

[0026] The present disclosure also encompasses:
[0027] a population of autologous dendritic cells or antigen presenting cells that have been pulsed with one or more of the peptides as herein defined, or transfected with a polynucleotide encoding one or more of the peptides as herein described;
[0028] a vaccine or immunogenic composition, notably a sterile vaccine or immunogenic composition, capable of raising a specific T-cell response comprising
   [0029] a. one or more neoantigenic peptides as herein defined,
   [0030] b. one or more polynucleotides encoding a neoantigenic peptide as herein defined, optionally wherein the one or more polynucleotides are linked to a heterologous regulatory control nucleotide sequence; or
   [0031] c. a population of autologous dendritic cells or antigen presenting cells (notably artificial APC) that have been pulsed or loaded with one or more of the peptides as herein defined,
[0032] optionally in combination with a physiologically or pharmacologically acceptable buffer, carrier, excipient, immunostimulant and/or adjuvant.
[0033] an antibody, or an antigen-binding fragment thereof, a T cell receptor (TCR), or a chimeric antigen receptor (CAR) that has been selected for its binding affinity to a neoantigenic peptide from any one of SEQ ID NO: 1-38907 and 38916-41099, including a portion thereof, e.g. of a length at least 4, 5, 6 7, or 8 amino acids, or a composition comprising such antibody, antigen-binding fragment thereof, TCR or CAR.
[0034] a polynucleotide encoding a neoantigenic peptide, an antibody, a CAR or a TCR as herein defined, typically operatively linked to a heterologous regulatory control nucleotide sequence, and a vector encoding such polynucleotide, or a vaccine or immunogenic composition comprising such polynucleotide or vector;
[0035] an immune cell, or a population or immune cells that targets one or more neoantigenic peptides from any one of SEQ ID NO:1-38907 and 38916-41099, including a portion thereof, e.g. of a length at least 4, 5, 6 7, or 8 amino acids, wherein the population of immune cells preferably targets a plurality of different tumor neoantigenic peptides as herein disclosed, or a composition comprising such immune cells or population of immune cells optionally in combination with a physiologically or pharmacologically acceptable buffer, carrier, excipient, immunostimulant and/or adjuvant.

[0036] Typically, the antibody or antigen-binding fragment thereof, TCR or CAR binds a neoantigenic peptide, optionally in association with an MHC molecule, or optionally expressed on the surface of a cell, with a Kd affinity of about 10⁻⁶ M or less.

[0037] In some embodiments, the T cell receptor can be made soluble and fused to an antibody fragment directed to a T cell antigen, optionally wherein the targeted antigen is CD3 or CD16.

[0038] In some embodiments, the antibody can be a multispecific antibody that further targets at least an immune cell antigen, optionally wherein the immune cell is a T cell, a NK cell or a dendritic cell, optionally wherein the targeted antigen is CD3, CD16, CD30 or a TCR. In any of the embodiments relating to an antibody, the antibody can be chimeric, humanized, or human, and may be IgG, e.g. IgG1, IgG2, IgG3, IgG4.

[0039] The immune cell can be typically a T cell or a NK cell, a CD4+ and/or CD8+ cell, a TILs/tumor derived CD8 T cells, a central memory CD8+ T cells, a Treg, a MAIT, or a Yδ T cell. The cell can also be autologous or allogenic. Methods of preparing such immune cells are also contemplated, for example, by delivering a nucleic acid or vector encoding any of the antibody, TCR, or CAR described herein to the cell, in vivo or ex vivo.

[0040] The immune cell, e.g. T cell, can comprises comprise a recombinant antigen receptor selected from T cell receptor and chimeric antigen receptor as herein described, wherein the antigen is a tumor neoantigenic receptor as herein disclosed.

[0041] The present disclosure also encompasses a method of producing an antibody, TCR or CAR that specifically binds a neoantigenic peptide as herein described and comprising the step of selecting an antibody, TCR or CAR that binds to a tumor neoantigen peptide of the present disclosure, optionally in association with an MHC or HLA molecule, or optionally expressed on the surface of a cell, optionally with a Kd binding affinity of about 10⁻⁶ M or less. Antibodies, TCRs and CARs selected by said method are also part of the present application, and thus any references to antibodies, TCRs or CARs herein also means an antibody, TCR or CAR that has been selected by said method.

[0042] A polynucleotide encoding a neoantigenic peptide as herein defined, or encoding an antibody, a CAR or a TCR as herein defined, optionally linked to a heterologous regulatory control sequence are also part of the present application.

[0043] As per the present disclosure, the neoantigenic peptide, the population of dendritic cells, the vaccine or immunogenic composition, the polynucleotide or the vector encoding the peptide can be used in cancer vaccination therapy of a subject; or for treating cancer in a subject suffering from cancer or at risk of cancer; or can be used for inhibiting proliferation of cancer cells. Typically, the peptide(s) bind at least one MHC molecule of said subject. Treatment as used herein includes both prophylactic and therapeutic treatment.

[0044] As per the present disclosure, the antibody or the antigen-binding fragment thereof, the multispecific antibody, the TCR, the CAR, the polynucleotide, or the vector encoding such antibody, TCR or CAR, or the immune cells, as herein defined can be used in the treatment of cancer in a subject in need thereof, the subject suffering from cancer or at risk of cancer, or can be used for inhibiting proliferation of cancer cells. Still as per the present disclosure, the population of immune cells as herein defined can be used in cell therapy of a subject suffering from cancer or at risk of cancer, or can be used for inhibiting proliferation of cancer cells.

[0045] Pharmaceutical compositions comprising any of the foregoing, optionally with a sterile pharmaceutically acceptable excipient(s), carrier, and/or buffer are also contemplated as well as methods of using them.

[0046] In any of the embodiments described herein, the Cancer Therapeutic Products as above defined can be administered in combination with at least one further therapeutic agent. Such further therapeutic agent can typically be a chemotherapeutic agent, or an immunotherapeutic agent.

[0047] For example, according to the present disclosure, any of the Cancer Therapeutic Products can be administered in combination with an anti-immunosuppressive/immunostimulatory agent. For example, the subject is further administered with one or more checkpoint inhibitors typically selected from PD-1 inhibitors, PD-L1 inhibitors, Lag-3 inhibitors, Tim-3 inhibitors, TIGIT inhibitors, BTLA inhibitors, V-domain Ig suppressor of T-cell activation (VISTA) inhibitors and CTLA-4 inhibitors, or IDO inhibitors.

[0048] Various embodiments of the methods, neoantigenic peptides and Cancer Therapeutic Products are described in detailed below. Except for alternatives clearly mentioned, combinations of such embodiments are encompassed by the present application.

### DETAILED DISCLOSURE

[0049] Transposable elements (TEs) expression in normal tissues is silenced by DNA methylation established early during embryonic development. An additional layer of inhibition is provided by histone modifications. TEs can be re-activated in tumor cells. The inventors have discovered and provided clear evidence that non-canonical alternative splicing events between exons and TEs can be a source of tumor antigens, in particular of tumor-specific antigens.

[0050] The Inventors have developed a method for identifying a tumor antigen, and notably a tumor specific antigen. In particular, the inventors have identified a method for identifying tumor antigens derived from junctions between TEs and exons (JETs). In some embodiments, the present invention therefore relates to a method for identifying, or selecting, a tumor neoantigenic peptide encoded by a fusion transcript (i.e.: JET) sequence comprising a part of a TE sequence and a part of an exonic sequence.

[0051] The neoantigenic tumor specific peptides, in particular neoantigenic peptides from any one of SEQ ID NO:1-38759, identified by the method according to the present disclosure are highly immunogenic. Indeed, because they are derived from fusion transcripts (also named herein JETs), composed of a transposable element, TE, and an exonic sequence, which are absent from normal cells, the peptides of the present disclosure are expected to exhibit very low immunological tolerance.

[0052] The present disclosure also allows selecting peptides having shared tumor neoepitopes among a population of patients. Such shared tumor peptides are of high therapeutic interest since they may be used in immunotherapy for a large population of patients.

### Definitions

[0053] According to the present disclosure, the term “disease” refers to any pathological state, including cancer diseases, in particular those forms of cancer diseases described herein.

[0054] The term “normal” refers to the healthy state or the conditions in a healthy subject or tissue, i.e., non-pathological conditions, wherein “healthy” preferably means non-cancerous.

[0055] Cancer (medical term: malignant neoplasm) is a class of diseases in which a group of cells display uncontrolled growth (division beyond the normal limits), invasion (intrusion on and destruction of adjacent tissues), and sometimes metastasis (spread to other locations in the body via lymph or blood). These three malignant properties of cancers differentiate them from benign tumors, which are self-limited, and do not invade or metastasize. Most cancers form a tumor but some, like leukemia, do not.

[0056] Malignant tumor is essentially synonymous with cancer. Malignancy, malignant neoplasm, and malignant tumor are essentially synonymous with cancer.

[0057] As used herein, the term “tumor” or “tumor disease” refers to an abnormal growth of cells (called neoplastic cells, tumorigenous cells or tumor cells) preferably forming a swelling or lesion. By “tumor cell” is meant an abnormal cell that grows by a rapid, uncontrolled cellular proliferation and continues to grow after the stimuli that initiated the new growth cease. Tumors show partial or complete lack of structural organization and functional coordination with the normal tissue, and usually form a distinct mass of tissue, which may be either benign, pre-malignant or malignant.

[0058] A benign tumor is a tumor that lacks all three of the malignant properties of a cancer. Thus, by definition, a benign tumor does not grow in an unlimited, aggressive manner, does not invade surrounding tissues, and does not spread to non-adjacent tissues (metastasize).

[0059] Neoplasm is an abnormal mass of tissue as a result of neoplasia. Neoplasia (new growth in Greek) is the abnormal proliferation of cells. The growth of the cells exceeds, and is uncoordinated with that of the normal tissues around it. The growth persists in the same excessive manner even after cessation of the stimuli. It usually causes a lump or tumor. Neoplasms may be benign, pre-malignant or malignant.

[0060] “Growth of a tumor” or “tumor growth” according to the present disclosure relates to the tendency of a tumor to increase its size and/or to the tendency of tumor cells to proliferate.

[0061] For purposes of the present disclosure, the terms “cancer” and “cancer disease” are used interchangeably with the terms “tumor” and “tumor disease”.

[0062] Cancers are classified by the type of cell that resembles the tumor and, therefore, the tissue presumed to be the origin of the tumor. These are the histology and the location, respectively.

[0063] According to the present application, cancer may affect any one of the following tissues or organs: breast; liver; kidney; heart, mediastinum, pleura; floor of mouth; lip; salivary glands; tongue; gums; oral cavity; palate; tonsil; larynx; trachea; bronchus, lung; pharynx, hypopharynx, oropharynx, nasopharynx; esophagus; digestive organs such as stomach, intrahepatic bile ducts, biliary tract, pancreas, small intestine, colon; rectum; urinary organs such as bladder, gallbladder, ureter; rectosigmoid junction; anus, anal canal; skin; bone; joints, articular cartilage of limbs; eye and adnexa; brain; peripheral nerves, autonomic nervous system; spinal cord, cranial nerves, meninges; and various parts of the central nervous system; connective, subcutaneous and other soft tissues; retroperitoneum, peritoneum; adrenal gland; thyroid gland; endocrine glands and related structures; female genital organs such as ovary, uterus, cervix uteri; corpus uteri, vagina, vulva; male genital organs such as penis, testis and prostate gland; hematopoietic and reticuloendothelial systems; blood; lymph nodes; thymus.

[0064] The term “cancer” according to the disclosure therefore comprises leukemias, seminomas, melanomas, teratomas, lymphomas, neuroblastomas, gliomas, rectal cancer, endometrial cancer, kidney cancer, adrenal cancer, thyroid cancer, blood cancer, skin cancer, cancer of the brain, cervical cancer, intestinal cancer, liver cancer, colon cancer, stomach cancer, intestine cancer, head and neck cancer, gastrointestinal cancer, lymph node cancer, esophagus cancer, colorectal cancer, pancreas cancer, ear, nose and throat (ENT) cancer, breast cancer, prostate cancer, cancer of the uterus, ovarian cancer and lung cancer and the metastases thereof. Examples thereof are lung carcinomas, mamma carcinomas, prostate carcinomas, colon carcinomas, renal cell carcinomas, cervical carcinomas, or metastases of the cancer types or tumors described above. The term cancer according to the present disclosure also comprises cancer metastases and relapse of cancer.

[0065] The main types of lung cancer are small cell lung carcinoma (SCLC) and non-small cell lung carcinoma (NSCLC). There are three main sub-types of the non-small cell lung carcinomas: squamous cell lung carcinoma, lung adenocarcinoma (LUAD), and large cell lung carcinoma. Adenocarcinomas account for approximately 10% of lung cancers. This cancer usually is seen peripherally in the lungs, as opposed to small cell lung cancer and squamous cell lung cancer, which both tend to be more centrally located.

[0066] By “metastasis” is meant the spread of cancer cells from its original site to another part of the body. The formation of metastasis is a very complex process and depends on detachment of malignant cells from the primary tumor, invasion of the extracellular matrix, penetration of the endothelial basement membranes to enter the body cavity and vessels, and then, after being transported by the blood, infiltration of target organs. Finally, the growth of a new tumor, i.e. a secondary tumor or metastatic tumor, at the target site depends on angiogenesis. Tumor metastasis often occurs even after the removal of the primary tumor because tumor cells or components may remain and develop metastatic potential. In one embodiment, the term “metastasis” according to the present disclosure relates to “distant metastasis” which relates to a metastasis which is remote from the primary tumor and the regional lymph node system.

[0067] The cells of a secondary or metastatic tumor are like those in the original tumor. This means, for example, that, if ovarian cancer metastasizes to the liver, the secondary tumor is made up of abnormal ovarian cells, not of abnormal liver cells. The tumor in the liver is then called metastatic ovarian cancer, not liver cancer.

[0068] A relapse or recurrence occurs when a person is affected again by a condition that affected them in the past. For example, if a patient has suffered from a tumor disease, has received a successful treatment of said disease and again develops said disease said newly developed disease may be considered as relapse or recurrence. However, according to the present disclosure, a relapse or recurrence of a tumor disease may but does not necessarily occur at the site of the original tumor disease. Thus, for example, if a patient has suffered from ovarian tumor and has received a successful treatment a relapse or recurrence may be the occurrence of an ovarian tumor or the occurrence of a tumor at a site different to ovary. A relapse or recurrence of a tumor also includes situations wherein a tumor occurs at a site different to the site of the original tumor as well as at the site of the original tumor. Preferably, the original tumor for which the patient has received a treatment is a primary tumor and the tumor at a site different to the site of the original tumor is a secondary or metastatic tumor.

[0069] By “treat” is meant to administer a compound or composition as described herein to a subject in order to prevent or eliminate a disease, including reducing the size of a tumor or the number of tumors in a subject; arrest or slow a disease in a subject; inhibit or slow the development of a new disease in a subject; decrease the frequency or severity of symptoms and/or recurrences in a subject who currently has or who previously has had a disease; and/or prolong, i.e. increase the lifespan of the subject. In particular, the term “treatment of a disease” includes curing, shortening the duration, ameliorating, preventing, slowing down or inhibiting progression or worsening, or preventing or delaying the onset of a disease or the symptoms thereof.

[0070] By “being at risk” is meant a subject, i.e. a patient, that is identified as having a higher than normal chance of developing a disease, in particular cancer, compared to the general population. In addition, a subject who has had, or who currently has, a disease, in particular cancer, is a subject who has an increased risk for developing a disease, as such a subject may continue to develop a disease. Subjects who currently have, or who have had, a cancer also have an increased risk for cancer metastases.

[0071] The therapeutically active agents, vaccines and compositions described herein may be administered via any conventional route, including by injection or infusion.

[0072] The agents described herein are administered in effective amounts. An “effective amount” refers to the amount which achieves a desired reaction or a desired effect alone or together with further doses or together with further therapeutic agents. In the case of treatment of a particular disease or of a particular condition, the desired reaction preferably relates to inhibition of the course of the disease. This comprises slowing down the progress of the disease and, in particular, interrupting or reversing the progress of the disease. The desired reaction in a treatment of a disease or of a condition may also be delay of the onset or a prevention of the onset of said disease or said condition.

[0073] An effective amount of an agent described herein will depend on the condition to be treated, the severity of the disease, the individual parameters of the patient, including age, physiological condition, size and weight, the duration of treatment, the type of an accompanying therapy (if present), the specific route of administration and similar factors. Accordingly, the doses administered of the agents described herein may depend on various of such parameters. In the case that a reaction in a patient is insufficient with an initial dose, higher doses (or effectively higher doses achieved by a different, more localized route of administration) may be used.

[0074] The pharmaceutical compositions as herein described are preferably sterile and contain an effective amount of the therapeutically active substance to generate the desired reaction or the desired effect.

[0075] The pharmaceutical compositions as herein described are generally administered in pharmaceutically compatible amounts and in pharmaceutically compatible preparation. The term “pharmaceutically compatible” refers to a nontoxic material which does not interact with the action of the active component of the pharmaceutical composition. Preparations of this kind may usually contain salts, buffer substances, preservatives, carriers, supplementing immunity-enhancing substances such as adjuvants, e.g. CpG oligonucleotides, cytokines, chemokines, saponin, GM-CSF and/or RNA and, where appropriate, other therapeutically active compounds. When used in medicine, the salts should be pharmaceutically compatible.

[0076] As used herein, the term “nucleic acid molecules” include any nucleic acid molecule that encodes a polypeptide of interest or a fragment thereof. Such nucleic acid molecules need not be 100% homologous or identical with an endogenous nucleic acid sequence but may exhibit substantial identity. Polynucleotides having “substantial identity” or “substantial homology” to an endogenous sequence are typically capable of hybridizing with at least one strand of a double-stranded nucleic acid molecule. By “hybridize” is meant a pair to form a double-stranded molecule between complementary polynucleotide sequences (e.g., a gene described herein), or portions thereof, under various conditions of stringency. (See, e.g., Wahl, G. M. and S. L. Berger (1987) Methods Enzymol. 152:399; Kimmel, A. R. (1987) Methods Enzymol. 152:507). For example, stringent salt concentration will ordinarily be less than about 750 mM NaCl and 75 mM trisodium citrate, e.g., less than about 500 mM NaCl and 50 mM trisodium citrate, or less than about 250 mM NaCl and 25 mM trisodium citrate. Low stringency hybridization can be obtained in the absence of organic solvent, e.g., formamide, while high stringency hybridization can be obtained in the presence of at least about 35% formamide, e.g., at least about 50% formamide. Stringent temperature conditions will ordinarily include temperatures of at least about 30° C., at least about 37° C., or at least about 42° C. Varying additional parameters, such as hybridization time, the concentration of detergent, e.g., sodium dodecyl sulfate (SDS), and the inclusion or exclusion of carrier DNA, are well known to those skilled in the art. Various levels of stringency are accomplished by combining these various conditions as needed. In certain embodiments, hybridization will occur at 30° C. in 750 mM NaCl, 75 mM trisodium citrate, and 1% SDS. In certain embodiments, hybridization will occur at 37° C. in 500 mM NaCl, 50 mM trisodium citrate, 1% SDS, 35% formamide, and 100 μg/ml denatured salmon sperm DNA (ssDNA). In certain embodiments, hybridization will occur at 42° C. in 250 mM NaCl, 25 mM trisodium citrate, 1% SDS, 50% formamide, and 200 μg/ml ssDNA. ETseful variations on these conditions will be readily apparent to those skilled in the art. For most applications, washing steps that follow hybridization will also vary in stringency. Wash stringency conditions can be defined by salt concentration and by temperature. As above, wash stringency can be increased by decreasing salt concentration or by increasing temperature. For example, stringent salt concentration for the wash steps can be less than about 30 mM NaCl and 3 mM trisodium citrate, e.g., less than about 15 mM NaCl and 1.5 mM trisodium citrate. Stringent temperature conditions for the wash steps will ordinarily include a temperature of at least about 25° C., of at least about 42° C., or of at least about 68° C. In certain embodiments, wash steps will occur at 25° C. in 30 mM NaCl, 3 mM trisodium citrate, and 0.1% SDS. In certain embodiments, wash steps will occur at 42° C. in 15 mM NaCl, 1.5 mM trisodium citrate, and 0.1% SDS. In certain embodiments, wash steps will occur at 68° C. in 15 mM NaCl, 1.5 mM trisodium citrate, and 0.1% SDS. Additional variations on these conditions will be readily apparent to those skilled in the art. Hybridization techniques are well known to those skilled in the art and are described, for example, in Benton and Davis (Science 196:180, 1977); Grunstein and Rogness (Proc. Natl. Acad. Sci., USA 72:3961, 1975); Ausubel et al. (Current Protocols in Molecular Biology, Wiley Interscience, New York, 2001); Berger and Kimmel (Guide to Molecular Cloning Techniques, 1987, Academic Press, New York); and Sambrook et al., Molecular Cloning: A Laboratory Manual, Cold Spring Harbor Laboratory Press, New York.

[0077] By “substantially identical” or “substantially homologous” is meant a polypeptide or nucleic acid molecule exhibiting at least about 50% homologous or identical to a reference amino acid sequence (for example, any one of the amino acid sequences described herein) or nucleic acid sequence (for example, any one of the nucleic acid sequences described herein). In certain embodiments, such a sequence is at least about 60%, at least about 65%, at least about 70%, at least about 75%, at least about 80%, at least about 85%, at least about 90%, at least about 95%, at least about 99%, or at least about 100% homologous or identical to the sequence of the amino acid or nucleic acid used for comparison.

[0078] Sequence identity can be measured by using sequence analysis software (for example, Sequence Analysis Software Package of the Genetics Computer Group, University of Wisconsin Biotechnology Center, 1710 University Avenue, Madison, Wis. 53705, BLAST, BESTFIT, GAP, or PILEUP/PRETTYBOX programs). Such software matches identical or similar sequences by assigning degrees of homology to various substitutions, deletions, and/or other modifications. Conservative substitutions typically include substitutions within the following groups: glycine, alanine; valine, isoleucine, leucine; aspartic acid, glutamic acid, asparagine, glutamine; serine, threonine; lysine, arginine; and phenylalanine, tyrosine. In an exemplary approach to determining the degree of identity, a BLAST program may be used, with a probability score between e-3 and e-100 indicating a closely related sequence.

[0079] By “analog” is meant a structurally related polypeptide or nucleic acid molecule having the function of a reference polypeptide or nucleic acid molecule.

[0080] Unless specifically stated or obvious from context, as used herein, the term “about” is to be understood as within a range of normal tolerance in the art, for example within 2 standard deviations of the mean. About can be understood as within 50%, 45%, 40%, 35%, 30%, 25%, 20%, 15%, 10%, 9%, 8%, 7%, 6%, 5%, 4%, 3%, 2%, 1%, 0.5%, 0.1%, 0.05%, or 0.01% of the stated value. Unless otherwise clear from context, all numerical values provided herein are modified by the term about.

[0081] A “transposable element” as used herein is a repeated DNA sequence DNA sequences that is able to move from one location to another in the genome either through an RNA copy generated by a reverse transcriptase (Class I TEs, retrotransposons), or by excising themselves from their original location (Class II TEs, or DNA transposons). It thus includes both class I (retrotransposons, including those containing LTRs, LINEs and SINEs) and class II (DNA transposons) endogenously part of the genome (i.e.: not from infection). This includes both autonomous and non-autonomous elements from both classes. According to the present disclosure the TE sequences can be for example selected from TE of class I, such as retrotransposons including Endogenous RetroVirus (ERVs), Long interspersed nuclear elements (LINEs) and short interspersed nuclear element (SINEs) and mammalian long terminal repeat transposon (MaLR), and TE of class II, such as DNA transposons endogenously part of the genome.

[0082] Retrotransposons are by far more abundant and their characteristics are similar to retroviruses, such as HIV. Retrotransposons function via reverse transcription of an RNA intermediate replicative mechanism. They are commonly grouped into three main orders: retrotransposons with long terminal repeats (LTRs) flanking the retroelement main body, which encode reverse transcriptase, similar to retroviruses; retroposons with long interspersed nuclear elements (LINEs, LINE-1s, or L1s), which encode reverse transcriptase but lack LTRs, and are transcribed by RNA polymerase II; and retrotransposons with short interspersed nuclear elements (SINEs) that do not encode reverse transcriptase and are transcribed by RNA polymerase III. DNA transposons have a transposition mechanism that do not involve an RNA intermediate. The transpositions are catalyzed by several transposase enzymes. LTRs include endogenous retroviruses (ERVs), while non-LTR TEs subdivide into long-interspersed (LINEs) and short interspersed elements (SINEs), nonautonomous transposons mobilized by the LINE integration machinery. These lineages are composed of phylogenetically related families, further branching out into multiple subfamilies, each originating from one precursor copy. With time, the accumulation of mutations introduced divergence in the consensus sequence within members of each subfamily. For review on TE retrotransposon, see Richardson, Sandra R et al. “The Influence of LINE-1 and SINE Retrotransposons on Mammalian Genomes.” Microbiology spectrum vol. 3,2 (2015): MDNA3-0061-2014.

[0083] A typical L1 element is approximately 6,000 base pairs (bp) long and consists of two non-overlapping open reading frames (ORF) which are flanked by untranslated regions (UTR) and target site duplications. LINE-1 retrotransposons have been amplifying in mammalian genomes for greater than 160 million years. In humans, the vast majority of LINE-1 sequences have amplified since the divergence of the ancestral mouse and human lineages approximately 65-75 million years ago. Sequence comparisons between individual genomic LINE-1 sequences and a consensus sequence derived from modern, active LINE-1s can be used to estimate the age of genomic LINE-1s (Khan H, Smit A, Boissinot S; Genome Res. 2006 January; 16 (1): 78-87). L1 subfamilies typically categorize into old (L1M, AluJ), intermediate (L1P, L1PB, AluS), young (L1HS, L1PA, AluY) and related (HAL, FAM) subfamilies. In humans, the only autonomously active family is the long-interspersed element-1 (LINE-1 or L1), however a few L1 copies are still retrotransposition competent, all of them belonging to the youngest human-specific L1HS subfamily.

[0084] SVA elements comprise an evolutionarily young, non-autonomous retrotransposon family that arose in primate lineages approximately 25 million years ago (Hancks D C, Kazazian H H Jr, Semin Cancer Biol. 2010 August; 20 (4): 234-45). A typical SVA element is approximately 2,000 bp and has a composite structure that consists of: 1) a hexameric CCCTCT repeat; 2) an inverted Alu-like element repeat; 3) a set of GC-rich variable nucleotide tandem repeats (VNTRs); 4) a SINE-R sequence that shares homology with HERVK-10, an inactive LTR retrotransposon; and 5) a canonical cleavage polyadenylation specificity factor (CPSF) binding site that is followed by a poly (A) tract. The youngest SVA subfamilies include SVA-D, SVA-E, SVA-F, and SVA-F1 subfamilies.

[0085] A “messenger RNA (mRNA)” is a single-stranded RNA molecule that corresponds to the genetic sequence of a gene and is read by the ribosome in the process of producing a protein. mRNA is created during the process of transcription, where the enzyme RNA polymerase converts genes into primary transcript mRNA (also known as pre-mRNA). This pre-mRNA usually still contains introns, regions that will not go on to code for the final amino acid sequence. These are removed in the process of RNA splicing, leaving only exons, regions that will encode the protein. This exon sequence constitutes mature mRNA. Mature mRNA is then read by the ribosome, and, utilizing amino acids carried by transfer RNA (tRNA), the ribosome creates the peptide sequence a process called translation.

[0086] A “transcript” as herein intended is a messenger RNA (or mRNA) or a part of a mRNA which is expressed by an organism, notably in a particular tissue or even in a particular tissue. Expression of a transcript varies depending on many factors. Expression of a transcript may be modified in a cancer cell as compared to a normal healthy cell.

[0087] A “transcriptome” as herein intended is the full set of messenger RNA, or mRNA, molecules expressed or transcribed by the gene of a cell. In some embodiments, the term “transcriptome” can also be used to describe the array of mRNA transcripts produced in a particular cell (or tissue type). In contrast with the genome, which is characterized by its stability, the transcriptome actively changes. In fact, an organism's transcriptome varies depending on many factors, including stage of development, environmental and physiological conditions. Typically, also, the transcriptome is modified in a cancer cell as compared to a corresponding normal healthy cell. Typically, the transcriptome as herein intended is the human transcriptome. The terms “transcriptomic pattern” and “transcriptome” are used herein as synonyms.

[0088] A reading frame is a way of dividing the sequence of nucleotides in a nucleic acid (DNA or RNA) molecule into a set of consecutive, non-overlapping triplets.

[0089] An open reading frame (ORF) is the part of a reading frame that has the ability to be translated into a peptide. An ORF is a continuous stretch of codons that contain a start codon (for example AUG) at a transcription starting site (TSS) and a stop codon (for example UAA, UAG or UGA). An ATG codon within the ORF (not necessarily the first) may indicate where translation starts. The transcription termination site is located after the ORF, beyond the translation stop codon. In eukaryotic genes with multiple exons, ORFs span intron/exon regions, which may be spliced together after transcription of the ORF to yield the final mRNA for protein translation.

[0090] A “canonical ORF” as herein intended is a protein coding sequence with specified reading frame within a mRNA sequence which is described or annotated in databases such as for example Ensembl genome/transcriptome/proteome database collection (typically HG19). Typically, a canonical ORF is the same as one of the exons in normal healthy cells.

[0091] A “non-canonical ORF” as herein intended is a protein coding sequence with specified reading frame within a mRNA sequence which is not described (i.e. unannotated) in genome databases such as for example in Ensembl genome/transcriptome/proteome database. Typically, a non-canonical ORF means thus that the reading frame is shifted compared to the usual reading frame of exons in normal healthy cells. In some embodiments however, a non-canonical can be described in genome databases (such as Ensembl database), but the mRNA sequence represents minor species in normal cells. By minor species it is typically intended less that 5%, notably less than 2%, or preferentially less than 1% species in normal cells.

[0092] An exon is any part of a gene that will encode a part of the final mature RNA produced by that gene after introns have been removed by RNA splicing. The term exon refers to both the DNA sequence within a gene and to the corresponding sequence in RNA transcripts. In RNA splicing, introns are removed, and exons are covalently joined to one another as part of generating the mature messenger RNA. An exonic sequence as per the present applicant comprises at least a portion of one or more exons. Typically, the exonic sequence comprises at least a portion of one or 2 exons.

[0093] The untranslated sequences in 3′end and in 5′ end (3′UTR and 5′UTR) present in mature RNA after splicing are exonic sequences, but are non-coding sequences because these sequences are located upstream of the start codon for the translation (5′UTR) or downstream of the stop codon ending the translation (3′UTR).

[0094] In the present application, the terms “fusion transcript”, “chimeric transcripts” “TE-exon transcript”, or “Junction Exon-TE” (JET) are used indifferently as synonyms. A “fusion or a chimeric” “transcript or sequence”, as per the present disclosure is defined as a transcript that aligns in part with an exon sequence and in part with a transposable element (TE) sequence. A fusion, or chimeric, transcript is also shortly named herein JET (junction between exon and TE). Typically, a fusion transcript according to the present description has a normalized number of read greater than 2.10⁻⁶. The normalized number of reads is defined as the number of reads that cover the fusion divided by the library size of the sample.

[0095] The term “peptide or polypeptide,” is used interchangeably with “neoantigenic peptide or polypeptide” in the present specification to designate a series of residues, typically L-amino acids, connected one to the other, typically by peptide bonds between the α-amino and carboxyl groups of adjacent amino acids. The polypeptides or peptides can be a variety of lengths, either in their neutral (uncharged) forms or in forms which are salts, and either free of modifications such as glycosylation, side chain oxidation, or phosphorylation or containing these modifications, subject to the condition that the modification does not destroy the biological activity of the polypeptides as herein described.

[0096] As used herein pJETs are peptides or polypeptides derived from (i.e. encoded by) chimeric/fusion transcripts or JETs. pJETs are also named herein translated JETs.

[0097] A “reference genome, or “representative genome” is a digital nucleic acid sequence data base, assembled by scientists as a representative example of species set of genes. As they are often assembled from the sequencing of DNA from a number of donors, reference genomes do not accurately represent the set of genes of any single individual (animal or person). Instead a reference provides a haploid mosaic of different DNA sequences from each donor.

[0098] RNA-Seq (named as an abbreviation of RNA sequencing) is a sequencing technique which uses next-generation sequencing (NGS) to reveal the presence and quantity of RNA (typically messenger RNA, mRNA) in a biological sample and generates an enormous numbers of raw sequencing reads (typically at least in the tens of millions). Single-cell RNA sequencing (scRNA-Seq) provides the expression profiles of an individual cell. A read refers to an RNA sequence from one RNA fragment from a biological sample or a single cell. The RNA sample that was sequenced is called the RNA library. RNA sequencing data are thus typically called RNA reads.

[0099] In the present application, “MHC molecule” or “HLA molecule” refers to at least one MHC/HLA class I molecule or at least one MHC/HLA Class II molecule. MHC class I proteins form a functional receptor on most nucleated cells of the body. There are 3 major MHC class I genes in HLA: HLA-A, HLA-B, HLA-C and three minor genes HLA-E, HLA-F and HLA-G. 32-microglobulin binds with major and minor gene subunits to produce a heterodimer. MHC molecules of class I consist of a heavy chain and a light chain and can bind a peptide of about 8 to 11 amino acids, but usually 8 or 9 amino acids, if this peptide has suitable binding motifs, and presenting it to cytotoxic T-lymphocytes. The binding of the peptide is stabilized at its two ends by contacts between atoms in the main chain of the peptide and invariant sites in the peptide-binding groove of all MHC class I molecules. There are invariant sites at both ends of the groove which bind the amino and carboxy termini of the peptide. Variations in peptide length are accommodated by a kinking in the peptide backbone, often at proline or glycine residues that allow the required flexibility. The peptide bound by the MHC molecules of class I usually originates from an endogenous protein antigen. As an example, the heavy chain of the MHC molecules of class I is typically an HLA-A, HLA-B or HLA-C monomer, and the light chain is β-2-microglobulin, in humans. There are 3 major and 2 minor MHC class II proteins encoded by the HLA. The genes of the class II combine to form heterodimeric (αβ) protein receptors that are typically expressed on the surface of antigen-presenting cells. The peptide bound by the MHC molecules of class II usually originates from an extracellular or exogenous protein antigen. As an example, the α-chain and the β-chain are in particular HLA-DR, HLA-DQ and HLA-DP monomers, in humans. MHC class II molecules are capable of binding a peptide of about 8 to 20 amino acids, notably from 10 to 25 amino acids or from 13 to 25 amino acids if this peptide has suitable binding motifs, and of presenting it to T-helper cells. The peptide lies in an extended conformation along the MHC II peptide-binding groove which (unlike the MHC class I peptide-binding groove) is open at both ends. It is held in place mainly by main-chain atom contacts with conserved residues that line the peptide-binding groove.

[0100] The term “peptidome” refers to the complete set of peptides expressed by a particular genome, or present within a particular organism or cell type (such as a cancer cell). Proteomic analysis (proteomics) thus refers to the separation, identification, and quantification of the entire set of peptides or proteins expressed by a genome, a cell, or a tissue at a specific point in time.

[0101] Proteomics analysis are typically based on two major techniques, namely two-dimensional gel electrophoresis (2-DGE) (Harper S et al., In: Coligan J E, Dunn B M, Speicher D W, Wing-field P T, editors. Current Protocols in Protein Science. John Wiley & Sons; Hoboken, N.J.: 1998. pp. 10.4.1-10.4.36.) and Mass Spectrometry (MS) (Aebersold & Mann, 2003), which are both powerful methods for the analysis of complex mixtures of proteins. HPLC is an alternative separation technique for proteomic studies, especially in separation and identification of low-molecular-weight proteins and peptides (Garbis et al., 2005). MS allows the determination of the molecular mass of proteins or peptides based on the mass to charge ratio (m/z) of ions in the gas phase. The terms “gel-based” or “gel-free” proteomics are used in relation to the applied separation techniques, 2-DGE or HPLC; proteomics approaches can also be “bottom-up” or “top-down,” which basically identify proteins from their protease (e.g., trypsin) digests or, as a whole, via a mass spectrometer, respectively.

[0102] Bottom-up proteomics is a common method to identify proteins from a biological sample (tissue(s) or cells) and characterize their amino acid sequences and post-translational modifications by proteolytic digestion of proteins prior to analysis by mass spectrometry. The crude protein extract is enzymatically digested, followed by one or more dimensions of separation of the peptides typically by liquid chromatography coupled to mass spectrometry, a technique known as shotgun proteomics. By comparing the masses of the proteolytic peptides or their tandem mass spectra with those predicted from a sequence database or annotated peptide spectral in a peptide spectral library, peptides can be identified, and multiple peptide identifications assembled into a protein identification.

[0103] In top-down proteomics, intact proteins are purified prior to digestion and/or fragmentation either within the mass spectrometer or by 2D electrophoresis. Top-down proteomics either uses an ion trapping mass spectrometer to store an isolated protein ion for mass measurement and tandem mass spectrometry (MS/MS) analysis or other protein purification methods such as two-dimensional gel electrophoresis in conjunction with MS/MS.

[0104] From the data generated by the MS, the protein is either sequenced de novo by manual mass analyses of the spectra or processed automatically via sequence search engines such as SEQUEST, Mascot, Phenyx, X!Tandem, and OMSSA. These algorithms are developed based on the correlation between experimental and theoretical MS/MS data; the latter being generated from in silico digestion of protein databases such as UniProt/Swiss-Prot (Deutsch, Lam, & Aebersold, 2008).

[0105] The term “immunopeptidome”, also commonly named “immunopeptidomic pattern”, “pMHC repertoire”, or “MHC-ligandome” or “HLA ligandome”, refers to the complete set of peptides within a particular cell type, which are bound to at least one MHC/HLA molecule at the cell surface. Correspondingly, “immunopeptidomics” has emerged as a term to describe analysis of the MHC/HLA-ligandome. The most common immunopeptidomics methods rely on mass spectrometry (MS). Immunopeptidomics samples are generally prepared by isolating MHCs, for example by using an allele-specific antibody, pan-specific antibody, or engineered affinity tag system, from lysed cells or tissues. Isolated complexes are acid eluted, and peptides are purified from the MHC molecules using molecular weight cut-off filtration (MWCO), solid phase extraction or other techniques, and are subsequently analyzed by MS (see for example for review L. E. Stopfer et al., Immuno-Oncology and Technology, Volume 11, 2021, 100042).

[0106] As used herein, the term “antibody” means not only intact antibody molecules, but also fragments of antibody molecules that retain immunogen-binding ability. Such fragments are also well known in the art and are regularly employed both in vitro and in vivo. Accordingly, as used herein, the term “antibody” means not only intact immunoglobulin molecules but also the well-known active fragments F(ab′)2, and Fab.

[0107] F(ab′)₂, and Fab fragments that lack the Fc fragment of intact antibody, clear more rapidly from the circulation, and may have less non-specific tissue binding of an intact antibody (Wahl et ah, J. Nucl. Med. 24:316-325 (1983).

[0108] As used herein, antibodies include whole native antibodies, bispecific antibodies; chimeric antibodies; Fab, Fab′, single chain V region fragments (scFv), fusion polypeptides, and unconventional antibodies.

[0109] In certain embodiments, an antibody is a glycoprotein comprising at least two heavy (H) chains and two light (L) chains inter-connected by disulfide bonds. Each heavy chain is comprised of a heavy chain variable region (abbreviated herein as V_{H}) and a heavy chain constant (CH) region. The heavy chain constant region is comprised of three domains, CH1, CH2 and CH3. Each light chain is comprised of a light chain variable region (abbreviated herein as V_{L}) and a light chain constant C_{L} region. The light chain constant region is comprised of one domain, C_{L}. The V_{H} and V_{L} regions can be further sub-divided into regions of hypervariability, termed complementarity determining regions (CDR), interspersed with regions that are more conserved, termed framework regions (FR). Each V_{H} and V_{L} is composed of three CDRs and four FRs arranged from amino-terminus to carboxy-terminus in the following order: FR1, CDR1, FR2, CDR2, FR3, CDR3, FR4.

[0110] The variable regions of the heavy and light chains contain a binding domain that interacts with an antigen. The constant regions of the antibodies may mediate the binding of the immunoglobulin to host tissues or factors, including various cells of the immune system (e.g., effector cells) and the first component (C1 q) of the classical complement system.

[0111] As used herein, “CDRs” are defined as the complementarity determining region amino acid sequences of an antibody which are the hypervariable regions of immunoglobulin heavy and light chains (See, e.g., Rabat et al., Sequences of Proteins of Immunological Interest, 4th U. S. Department of Health and Human Services, National Institutes of Health (1987). Generally, antibodies comprise three heavy chain and three light chain CDRs or CDR regions in the variable region. CDRs provide the majority of contact residues for the binding of the antibody to the antigen or epitope. In certain embodiments, the CDRs regions are delineated using the Rabat system (Rabat, E. A., et al. (1991) Sequences of Proteins of Immunological Interest, Fifth Edition, ET.S. Department of Health and Human Services, NIH Publication No. 91-3242).

[0112] As used herein, the term “single-chain variable fragment” or “scFv” is a fusion protein of the variable regions of the heavy (V_{H}) and light chains (V_{L}) of an immunoglobulin covalently linked to form a V_{H}::V_{L} heterodimer. The V_{H} and V_{L} are either joined directly or joined by a peptide-encoding linker (e.g., 10, 15, 20, 25 amino acids), which connects the N-terminus of the V_{H} with the C-terminus of the V_{L}, or the C-terminus of the V_{H} with the N-terminus of the V_{L}. The linker is usually rich in glycine for flexibility, as well as serine or threonine for solubility. Despite removal of the constant regions and the introduction of a linker, scFv proteins retain the specificity of the original immunoglobulin. Single chain Fv polypeptide antibodies can be expressed from a nucleic acid including V_{H}- and V_{L}-encoding sequences as described by Huston, et al. (Proc. Nat. Acad. Sci. USA, 85:5879-5883, 1988). See, also, U.S. Pat. Nos. 5,091,513, 5,132,405 and 4,956,778; and U.S. Patent Publication Nos. 20050196754 and 20050196754.

[0113] As used herein, the term “affinity” is meant a measure of binding strength. Affinity can depend on the closeness of stereochemical fit between antibody combining sites and antigen determinants, on the size of the area of contact between them, and/or on the distribution of charged and hydrophobic groups. As used herein, the term “affinity” also includes “avidity”, which refers to the strength of the antigen-antibody bond after formation of reversible complexes. Methods for calculating the affinity of an antibody for an antigen are known in the art, including, but not limited to, various antigen-binding experiments, e.g., functional assays (e.g., flow cytometry assay), surface plasmon resonance assays such as BIACORE assays, and kinetic exclusion assays such as KINEXA assays.

[0114] The term “chimeric antigen receptor” or “CAR” as used herein refers to a molecule comprising an extracellular antigen-binding domain that is fused to an intracellular signalling domain that is capable of activating or stimulating an immunoresponsive cell, and a transmembrane domain. In certain embodiments, the extracellular antigen-binding domain of a CAR comprises a scFv. The scFv can be derived from fusing the variable heavy and light regions of an antibody. Alternatively or additionally, the scFv may be derived from Fab's (instead of from an antibody, e.g., obtained from Fab libraries). In certain embodiments, the scFv is fused to the transmembrane domain and then to the intracellular signaling domain. In certain embodiments, the CAR has a high binding affinity or avidity for the antigen.

[0115] The term “antigen-binding domain” as used herein refers to a domain capable of specifically binding a particular antigenic determinant or set of antigenic determinants present on a cell.

[0116] The term “immune cell” as herein intended typically encompasses T cells, Natural Killer T cells, CD4+/CD8+ T cells, TILs/tumor derived CD8 T cells, central memory CD8+ T cells, Treg, MAIT, Yδ T cells, human embryonic stem cells, and pluripotent stem cells from which lymphoid cells may be differentiated.

[0117] By “isolated cell” is meant a cell that is separated from the molecular and/or cellular components that naturally accompany the cell.

[0118] The terms “isolated,” “purified,” or “biologically pure” refer to material that is free to varying degrees from components which normally accompany it as found in its native state. “Isolate” denotes a degree of separation from original source or surroundings. “Purify” denotes a degree of separation that is higher than isolation. A “purified” or “biologically pure” protein is sufficiently free of other materials such that any impurities do not materially affect the biological properties of the protein or cause other adverse consequences. That is, a nucleic acid or peptide is purified if it is substantially free of cellular material, viral material, or culture medium when produced by recombinant DNA techniques, or chemical precursors or other chemicals when chemically synthesized. Purity and homogeneity are typically determined using analytical chemistry techniques, for example, polyacrylamide gel electrophoresis or high performance liquid chromatography. The term “purified” can denote that a nucleic acid or protein gives rise to essentially one band in an electrophoretic gel. For a protein that can be subjected to modifications, for example, phosphorylation or glycosylation, different modifications may give rise to different isolated proteins, which can be separately purified.

[0119] Unless specifically stated or obvious from context, as used herein, the term “about” is to be understood as within a range of normal tolerance in the art, for example within 2 standard deviations of the mean. About can be understood as within 20%, 15%, 10%, 9%, 8%, 7%, 6%, 5%, 4%, 3%, 2%, 1%, 0.5%, 0.1%, 0.05%, or 0.01% of the stated value. Unless otherwise clear from context, all numerical values provided herein are modified by the term about.

### Method for Selecting a Tumor Neoantigenic Peptide

[0120] The method for selecting a tumor neoantigenic peptide as per the present disclosure comprises
[0121] a step of identifying, among mRNA sequences from a cancer cell sample of a subject, a fusion transcript (JET) sequence comprising a transposable element (TE) sequence and an exonic sequence, and including an open reading frame (ORF), and
[0122] a step of selecting a tumor neoantigenic peptide of at least 8 amino acids, encoded by a part of said ORF of the fusion transcript sequence,
   wherein said ORF overlaps the junction between the TE and the exonic sequence, is pure TE and/or is non-canonical, and
   wherein said tumor neoantigenic peptide binds to at least one Major Histocompatibility Complex (MHC) molecule of said subject.

[0123] Typically, a peptide translated from a part of non-canonical ORF of an exonic sequence is recognized as non-self by the immune system.

[0124] In some embodiments, the exonic sequence is from an oncogene and/or a tumor suppressor gene or one of their mutated variants.

[0125] Conceptually, cancer is a result of consecutive somatic mutation accumulation. Many studies have shown that both the gain of function in oncogenes and the loss of function in tumor-suppressor genes are required for the development of cancer from a normal cell. For a diploid organism, gain-of-function mutations are often dominant or semi-dominant, whereas loss-of-function mutations are usually recessive. Two-hit hypothesis of oncogenesis proposes that the development of cancer is initiated by the loss of both alleles of a tumor-suppressor gene.

[0126] Oncogenes (also named cancer genes) are genes whose action positively promotes cell proliferation or growth. The normal nonmutant versions are known as proto-oncogenes. The mutant versions are excessively or inappropriately active leading to tumor growth. Oncogenes can be identified in the Cancer Gene Marker Database (CGMD) (Pradeepkiran, J., Sainath, S., Kramthi Kumar, K. et al. CGMD:. Sci Rep 5, 12035 (2015) “An integrated database of cancer genes and markers”). Oncogenes (ONCs) can also be downloaded from Network of Cancer Genes database (NCG 5.0) (An O, Dall'Olio GM, Mourikis T P, Ciccarelli F D, Nucleic Acids Res. 2016 Jan. 4; 44 (D1): D992-9; “NCG 5.0: updates of a manually curated repository of cancer genes and associated properties from cancer mutational screenings”). Non-limitatives examples of oncogenes include: L-MYC, LYL-1, LYT-10, LYT-10/Cal, MAS, MDM-2, MLL, MOS, MTG8/AML1, MYB, MYH11/CBFB, NEU, N-MYC, OST, PAX-5, PBX1/E2A, PIM-1, PRAD-1, RAF, RAR/PML, RAS-H, RAS-K, RAS-N, REL/NRG, RET, RHOM1, RHOM2, ROS, SKI, SIS, SET/CAN, SRC, TAL1, TAL2, TAN-1, TIAM1, TSC2, and TRK.

[0127] Tumor suppressor genes (also named anti-oncogenes) represent the opposite side of cell growth control, normally acting to inhibit cell proliferation and tumor development. Thus tumor suppressor genes are genes that normally suppress cell division or growth. Loss of TSG function promotes uncontrolled cell division and tumor growth. Rb, a tumor suppressor gene that was identified by the genetic analysis of retinoblastoma an encoding atranscriptional regulatory protein, served as the prototype for the identification of additional tumor suppressor genes that contribute to the development of many different human cancers. Tumor suppressor genes are notably described in “Cooper GM. The Cell: A Molecular Approach. 2nd edition. Sunderland (MA): Sinauer Associates; 2000. Tumor Suppressor Genes”. Tumor-suppressor genes (TSGs) can also be downloaded from Tumor Suppressor Gene database (TSGene 2.0) (see for reference Zhao M, Kim P, Mitra R, Zhao J, Zhao Z; Nucleic Acids Res. 2016 Jan. 4; 44 (D1): D1023-31; “TSGene 2.0: an updated literature-based knowledgebase for tumor suppressor genes”). In this context, non-limitative examples of tumor suppressor genes include: APC, BRCA1, BRCA2, DPC4, INK4, MADR2, NF1, NF2, p53, PTC, PTEN, Rb, RB1, VHL, WT1, BUB1, BUBR1, TGF-βRII, Axin, DPC4, p300, PPARγ, p16, DPC4, PTEN, and hSNF5.

[0128] Oncogenes, tumor suppressor genes or “double agent” genes (with both oncogenic and tumor-suppressor functions) can be systematically identified through database search and text mining. Indeed, information on oncogenes or tumor suppressor genes can typically be found in Ensembl database (but see also Shen L, Shi Q, Wang W. Double agents: genes with both oncogenic and tumor-suppressor functions. Oncogenesis. 2018; 7 (3): 25. Published 2018 Mar. 13). Double agent genes may be identified as genes overlapped between the two above mentioned databases (see also Shen et al., Oncogenesis 2018 above).

[0129] Without to be bound by any theory, the inventors believe that selection of fusion wherein the exonic sequence is from an oncogene and/or a tumor suppressor gene is of high relevance for the reason below:

[0130] TE insertion in oncogenes can alter their oncogenic activity. Insertion of TE sequences in oncogene active domains could therefore result in constitutive activity of the oncogenes, similar to driver mutations. These fusions giving chimeric oncogenes could thus represent a new family of oncogenic proteins. If this is the case, targeting the activity of these new “fusion oncogenes” with small molecule antagonists could represent a potential therapeutic approach for cancer where these chimeric oncogenes are expressed.

[0131] TE insertions in tumor suppressors could inactivate their suppressor functions, leading typically to a loss of function (for example through introduction of stop codons, changes in ORF or disruptive amino acid stretches), thereby contributing to the oncogenic process.

[0132] Fusions implicating cancer driver genes would be excellent targets for adoptive cell therapies, antibodies, ADCs, T cell engagers, etc. If they are involved in oncogenesis, fusions oncogenes are expected to be more specific for cancer cells, and thus to reduce the development of resistances (because of the oncogenic activity of the target).

[0133] In some embodiments, the TE sequence is located in 5′ end of the fusion transcript sequence (it is also said that the TE sequence is the donor sequence) and the exonic sequence is located in 3′ end of the fusion transcript sequence with respect to the junction (the exon sequence is thus called an acceptor sequence). The expression “is located in 5′ end of the fusion transcript sequence” means that the element is located upstream of the junction in the fusion transcript sequence. The expression “is located in 3′ end of the fusion transcript sequence” means that the element is located downstream of the junction in the fusion transcript sequence.

[0134] In a particular embodiment, the TE sequence is located in 5′ end of the fusion transcript (JET) sequence and the exonic sequence is located in 3′ end of the fusion transcript (JET) sequence, and the part of the ORF of said fusion transcript (JET) sequence, which encodes the neoantigenic peptide (pJET), overlaps the junction. In this case, the ORF can be canonical or non-canonical. It is understood that the ORF may comprise the junction but the neoantigenic peptide (pJET) may not derive from the junction. In some embodiments however, where the neoantigenic peptide has a sequence which is derived from the junction sequence, the obtained peptide is thus encoded by both TE sequence and exonic sequence.

[0135] The expression “the part of the ORF is overlapping or overlaps the junction between the TE sequence and the exonic sequence”, means that said junction is contained in the part of the ORF of the fusion transcript (JET) sequence, which encodes said neoantigenic peptide (pJET).

[0136] In embodiments wherein (i) the part of the ORF encoding the neoantigenic peptide is overlapping the junction between the TE sequence and the exonic sequence, and (ii) the TE sequence and the exonic sequence are respectively in 5′ end and 3′end of the fusion transcript (JET) sequence, said part of the ORF typically encodes a neoantigenic peptide of at least 8 amino acids, including at least between 1 to 6 amino acids, notably 2 to 6 from the TE sequence and at least between 1 and 6, notably 2 to 6 amino acids from the exonic sequence.

[0137] In another embodiment wherein the TE sequence is located in 5′ end of the fusion transcript (JET) sequence and the exonic sequence is located in 3′ end of the fusion transcript (JET) sequence, the part of ORF which encodes said neoantigenic peptide, is downstream of the junction and the ORF is thus non-canonical.

[0138] The expression “the part of the ORF is downstream of the junction” means that the part of the ORF encoding the neoantigenic peptide (pJET) is not overlapping the junction, but it is contained in the 3′end part of said fusion transcript sequence with respect to the junction. In this embodiment, as the 3′ end part with respect to the junction, is the exonic sequence, the part of the ORF encoding the neoantigenic peptide is thus contained in the exonic sequence. Thus, as the part of the ORF is only located in the exonic sequence, the obtained peptide is therefore encoded by the exonic sequence, in a non-canonical ORF. Thus, in the particular embodiment wherein the exonic sequence is located in 3′ end of the fusion transcript (JET) sequence with respect to the junction, and wherein the part of the ORF which encodes the neoantigenic peptide is downstream of the junction with a non-canonical reading frame, the part of the ORF of the fusion transcript (JET) sequence encodes a neoantigenic peptide including 0 amino acid from the TE sequence, and at least 8 amino acids from the exonic sequence.

[0139] In another embodiment, the TE sequence is located in 3′ end of the fusion transcript (JET) sequence and the exonic sequence is located in 5′ end of the fusion transcript sequence with respect to the junction.

[0140] In some embodiments, the TE sequence is located in 3′ end of the fusion transcript (JET) sequence and the exonic sequence is located in 5′ end of the fusion transcript sequence and the part of the ORF of said fusion transcript sequence, which encodes a neoantigenic peptide, is overlapping the junction between the TE sequence and the exonic sequence. In this case, the ORF can also be canonical or non-canonical. The obtained peptide (pJET) is encoded by both TE sequence and exonic sequence.

[0141] In the particular embodiment wherein the part of the ORF encoding the neoantigenic peptide (pJET), is overlapping the junction between the exonic sequence and the TE sequence, and wherein the exonic sequence and the TE sequence are respectively in 5′ end and 3′end of the fusion transcript (JET) sequence, said part of the ORF encodes a neoantigenic peptide (pJET) of at least 8 amino acids, including at least between 1 to 6, notably 2 to 6 amino acids from the TE sequence and at least between 1 and 6, notably 2 to 6 amino acids from the exonic sequence.

[0142] In still another embodiment, the TE sequence is located in 3′ end of the fusion transcript (JET) sequence, the exonic sequence is located in 5′ end of the fusion transcript sequence, and the part of the ORF which encodes a neoantigenic peptide (pJET), is downstream of the junction between the exonic sequence and the TE sequence. Optionally, the peptide sequence (pJET) which is thus encoded by the pure TE sequence is non-canonical.

[0143] In this embodiment, as the 3′ end part with respect to the junction is the TE sequence, the part of the ORF encoding the neoantigenic peptide is therefore encoded by the TE sequence. Thus, the part of the ORF encodes a neoantigenic peptide including no amino acid from the exonic sequence and at least 8 amino acids from the TE sequence. In the particular embodiment wherein the TE sequence is located in 3′ end of the fusion transcript sequence with respect to the junction, and the part of the ORF which encodes the neoantigenic peptide is downstream the junction, the part of the ORF of the fusion transcript (JET) sequence encodes a neoantigenic peptide (pJET) including 0 amino acid from the exonic sequence, and at least 8 amino acids from the TE sequence.

[0144] A tumor neoantigenic peptide is a peptide that arises from somatic alterations (classically mutations in the DNA sequence), is recognized as different from self, and is presented by antigen-presenting cells (APC), such as dendritic cells (DC) and tumor cells themselves. Cross-presentation plays an important role as the APC is able to translocate exogenous antigens from the phagosome into the cytosol for proteolytic cleavage into the major histocompatibility complex I (MHC I) epitopes by the proteasome.

[0145] In the present disclosure the alteration corresponds to the transcription of fusion mRNA sequences that comprise a transposable element (TE) sequence and an exonic sequence (JET). This may arise from somatic (i.e.: specifically in the tumor clone) transposition. It may also arise not from de novo transposition but from tumor specific transcriptional de-repression such that a TE and nearby gene are co-transcribed.

[0146] A neoantigenic peptide (pJET) according to the present disclosure may be completely absent from normal healthy samples (i.e., not expressed in normal healthy samples) and thus be specific to tumor samples. Alternatively, it may be expressed at low levels in normal cells and/or disproportionately expressed on tumor samples as compared to normal (healthy) samples.

[0147] It can also be selectively expressed by the cell lineage from which the cancer evolved.

[0148] Cancer or tumor samples according to the present disclosure can be isolated from any solid tumor or non-solid tumor of any of the tissues or organs as defined previously, for example, breast cancer, lung cancer and/or melanoma. In some embodiments cancer samples are from Acute Myeloid Leukemia, Adrenocortical Carcinoma, Bladder Urothelial Carcinoma, Breast Ductal Carcinoma, Breast Lobular Carcinoma, Cervical Carcinoma, Cholangiocarcinoma, Colorectal Adenocarcinoma, Esophageal Carcinoma, Gastric Adenocarcinoma, Glioblastoma Multiforme, Head and Neck Squamous Cell Carcinoma, Hepatocellular Carcinoma, Kidney Chromophobe Carcinoma, Kidney Clear Cell Carcinoma, Kidney Papillary Cell Carcinoma, Lower Grade Glioma, Lung Adenocarcinoma, Lung Squamous Cell Carcinoma, Mesothelioma, Ovarian Serous Adenocarcinoma, Pancreatic Ductal Adenocarcinoma, Paraganglioma & Pheochromocytoma, Prostate Adenocarcinoma, Sarcoma, Skin Cutaneous Melanoma, Testicular Germ Cell Cancer, Thymoma, Thyroid Papillary Carcinoma, Uterine Carcinosarcoma, Uterine Corpus Endometrioid Carcinoma or Uveal Melanoma samples. In a particular embodiment, cancer samples are from lung cancer samples, notably from LUAD samples.

[0149] Typically, as per the present disclosure, the step of identifying the fusion transcript sequences is carried out by mapping mRNA sequences from cancer sample against a reference genome, and then distinguishing normal and abnormal (non-canonical) junctions.

[0150] According to the present disclosure, normal junctions correspond to junctions between donor and acceptor on the same strand and not too far apart (e.g.: typically not on different chromosomes).

[0151] According to the present disclosure, abnormal junctions correspond to junctions between donor and acceptor sequences on different chromosomes, or in cis (same chromosomes) but on different strands (no matter the order and the 5′-3′ sense).

[0152] mRNA sequences typically usable according to the present disclosure are RNA seq data (as illustrated in the results herein). RNA seq data are typically obtained from purified RNA obtained from a cell or a tissue sample, fragmented and reverse-transcribed into cDNA. The obtained cDNA are then amplified and sequenced (next-generation sequencing-NGS) on a high-throughput platform (such as for example the Illumina GA/HiSeq-see http://www.illumina.com—, SOLID or Roche 454). This process generates millions of short reads taken from one end of the cDNA fragments. A common variant on this process is to generate reads from both ends of each cDNA fragment, known as “paired-end” reads.

[0153] In some embodiments, the mRNA sequences can be mapped against a corresponding reference genome or transcriptome (such as the human reference genome Hg19 ENSEMBL (RNA sequences, GRCh37) with an adapted software, such as for example: Spliced Transcripts Alignment to a Reference (i.e.: STAR-see Dobin, Alexander et al. “STAR: ultrafast universal RNA-seq aligner.” Bioinformatics (Oxford, England) vol. 29, 1 (2013): 15-21), TopHat2 (Kim, Daehwan et al. “TopHat2: accurate alignment of transcriptomes in the presence of insertions, deletions and gene fusions.” Genome biology vol. 14, 4 R36. 25 Apr. 2013, doi: 10.1186/gb-2013-14-4-r36) or HISAT (Kim, Daehwan et al. “HISAT: a fast spliced aligner with low memory requirements.” Nature methods vol. 12, 4 (2015): 357-60. doi: 10.1038/nmeth.3317). STAR is a standalone software that uses sequential maximum mappable seed search followed by seed clustering and stitching to align RNA-seq reads. It can typically detect canonical junctions, non-canonical splices, and fusion/chimeric transcripts. Typically, detection of the junctions can be performed as detailed in the results based on the definitions from ENSEMBL and RepeatMasker databases respectively, downloaded from the UCSC Genome Browser. Thus, in some embodiments, the normal and abnormal junctions are determined in silico using dedicated databases, such as for example Ensembl and Repeatmasker databases, and the fusion transcripts having junctions between a TE and an exonic sequence are extracted in silico.

[0154] More particularly, in some embodiments, RNAseq reads from a sample (or cell) of interest are aligned to a reference genome (such as typically the hg19 genome) using typically STAR two-pass mode27 to identify un-annotated junctions. As previously indicated JETs are identified as a junction between an exon (most particularly a coding DNA sequence-CDS-exon) and a TE (or repeated element, RE). As per the present disclosure TE (or RE) can be identified (i.e. filtered) according to the definition of commonly used databases in the field such as ENSEMBL (GRCh37) and RepeatMasker.

[0155] According to the present disclosure, the mRNA sequences can come from all types of cancer cell or tumor cell sample(s). The tumor may be a solid or a non-solid tumor. In particular, the mRNA sequences come from any tissues or organs affected by a cancer or tumor as previously defined, for example from breast cancer, lung cancer and/or melanoma. In a particular embodiment, mRNA sequences are from LUAD samples. Tumor samples can be for example obtained from the Cancer Genome Atlas (TCGA). In some embodiments, the mRNA sequences are obtained from cell lines such as for example tumor cell lines from the Cancer Cell Line Encyclopedia (CCLE).

[0156] In some embodiments, the number of splicing reads can be normalized by the number of unique mapped reads. Typically JETs with a level of expression over 2.10⁻⁷ are selected.

[0157] In some embodiments of the present disclosure, the fusion transcript sequences are shared in more than 1%; notably more than 5%, more than 10%, more than 15%, more than 20% or even more than 25% of cancer samples (typically obtained from various patients, for example from the cancer samples collected for a given cancer type in the TCGA) and/or cell lines. In some embodiments, a fusion transcript (JET) sequence as per the present disclosure is shared in cancer samples from more than 1%; notably more than 2%, more than 5%, more than 10%, more than 15%, more than 20% or even more than 25% of the subjects suffering from a cancer. Alternatively, or additionally, the fusion (JET) transcript sequence may be specific for a cancer type of shared between several cancer types. Alternatively, or in addition, a fusion transcript sequence can be expressed in at least 1; 2; 3; 4; 5; 6; 7; 8; 9; 10; 11; 12; 13; 14; 15; 16; 17; 18; 19; 20 cell lines (typically from the CCLE).

[0158] According to the present disclosure, the fusion (JET) transcript sequences are expressed at higher levels in tumor cells compared to normal healthy cells. In some embodiments, the fusion transcript sequence is expressed in cancer cells (obtained from one or more cancer samples and/or one or more cell lines) and not in healthy cells (obtained from one or more tissue samples or one or more cell lines), in particular not in thymus healthy cells. In some embodiments a JET is considered not expressed in a cell when its expression level is below 2.10-7, notably below 2.10-8 and typically not detectable. Such fusion (JET) transcript may be called tumor specific fusion (JET) as per the present disclosure. Fusion transcripts that are expressed at higher level(s) in tumor cells as compared to normal cell, typically that are disproportionally expressed in cancers cells as compared to normal cells as defined above may be called tumor associated fusion transcripts (TAF) as per the present disclosure. Tumor associated fusion transcripts may be selected according to the present application if they are present in more than 10% of the tumor samples (for example in more than 1, notably more than 2%, more than 5% and in particular more than 10% of tumor samples obtained from the TCGA database for the same cancer type) and in less than 20% of the normal samples (for example juxta-tumor samples from the TCGA). Alternatively, or in addition, a fusion transcript sequence can be expressed in at least 1; 2; 3; 4; 5; 6; 7; 8; 9; 10; 11; 12; 13; 14; 15; 16; 17; 18; 19; 20 cell lines.

[0159] In some embodiments, the method further comprises a step of determining, optionally in silico or using in vitro techniques (see notably the examples for illustration), the binding affinity of the tumor neoantigenic peptide with at least one MHC molecule of the said subject suffering from a cancer.

[0160] When the method is carried out on human samples, the method may comprise a step of determining the patient's class I or class I Major Histocompatibility Complex (MHC, aka human leukocyte antigen (HLA) alleles). It is to be noticed that as MHC alleles for laboratory mice are generally known such that this step may not be necessary in that particular context. In the present application, “MHC molecule” refers to at least one MHC class I molecule or at least one MHC Class II molecule.

[0161] An MHC allele database is carried out by analyzing known sequences of MHC I and MHC II and determining allelic variability for each domain. This can be typically determined in silico using appropriate software algorithms well-known in the field. Several tools have been developed to obtain HLA allele information from genome-wide sequencing data (whole-exome, whole-genome, and RNA sequencing data), including OptiType, Polysolver, PHLAT, HLAreporter, HLAforest, HLAminer, and seq2HLA (see Kiyotani K et al., Immunopharmacogenomics towards personalized cancer immunotherapy targeting neoantigens; Cancer Science 2018; 109:542-549). For example, the seq2hla tool (see Boegel S, Lower M, Schafer M, et al. HLA typing from RNA-Seq sequence reads. Genome Med. 2012; 4:102), which is well designed to perform the method as herein disclosed is an in silico method written in python and R, which takes standard RNA-Seq sequence reads in fastq format as input, uses a bowtie index (Langmead B, et al., Ultrafast and memory-efficient alignment of short DNA sequences to the human genome. Genome Biol. 2009, 10: R25-10.1186/gb-2009-10⁻³-r25) comprising all HLA alleles and outputs the most likely HLA class I and class II genotypes (in 4 digit resolution), a p-value for each call, and the expression of each class.

[0162] Typically, the sequences having junctions between a TE and an exonic sequence (JETs) are extracted in silico. The affinity of all possible peptides encoded by each sequence for each MHC allele from the patient (or mouse) can be for example determined in silico using computational methods to predict peptide binding-affinity to HLA molecules. Indeed, accurate prediction approaches are based on artificial neural networks with predicted IC₅₀. For example, NetMHCpan software which has been modified from NetMHC to predict peptides binding to alleles for which no ligands have been reported, is well appropriate to implement the method as herein disclosed (Lundegaard C et al., NetMHC-3.0: accurate web accessible predictions of human, mouse and monkey MHC class I affinities for peptides of length 8-11; Nucleic Acids Res. 2008; 36: W509-W512; Nielsen M et al. NetMHCpan, a method for quantitative predictions of peptide binding to any HLA-A and -B locus protein of known sequence. PLOS One. 2007; 2: e796, but see also Kiyotani K et al., Immunopharmacogenomics towards personalized cancerimmunotherapy targeting neoantigens; Cancer Science 2018; 109:542-549 and Yarchoan M et al., Nat rev. cancer 2017; 17 (4): 209-222). NetMHCpan software predicts binding of peptides to any MHC molecule of known sequence using artificial neural networks (ANNs). The method is trained on a combination of more than 180,000 quantitative binding data and MS derived MHC eluted ligands. The binding affinity data covers 172 MHC molecules from human (HLA-A, B, C, E), mouse (H-2), cattle (BoLA), primates (Patr, Mamu, Gogo) and swine (SLA). The MS eluted ligand data covers 55 HLA and mouse alleles.

[0163] In example embodiments, neoantigenic peptides encoded by fusion (JETs) transcripts as above described and having a Kd affinity for MHC alleles of less than 10⁻⁴, 10⁻⁵, 10⁻⁶, 10⁻⁷ M or less than 500 nM, notably less than 50 nM are selected as tumor neoantigenic peptides.

[0164] As above mentioned, affinity of the selected peptide for MHC alleles can be determined in silico using appropriate software such as netMHCpan. Thus, in some embodiments, neoantigenic peptides bind MHC class I with a binding affinity of less than 2% percentile rank score predicted by NetMHCpan 4.0. In other embodiments, the neoantigenic peptides bind MHC class II with a binding affinity of less than 10% percentile rank score predicted by NetMHCpanII 3.2.

[0165] Affinity can also (alternatively or in addition) be estimated in vitro, for example by using MHC tetramer formation assay as described in the results included therein (see example 2, point 2.1 and 2.2.2). Commercial assays for example from ImmunAware® can typically be used by the skilled person (EasYmers® kits are from ImmunAware® are notably used according to their training guide). Typically, binding affinity is determined as a percentage of binding to a positive control. Generally, peptides showing a percentage of binding of at least 30%, notably at least 40% or even at least 50% of the positive control are selected. Typically, the neoantigenic peptide as per the present disclosure, and typically obtainable as per the present method, binds at least one HLA/MHC molecule with an affinity sufficient for the peptide to be presented on the surface of a cell as an antigen. Generally, the neoantigenic peptide has an IC50 affinity of less than 10⁻⁴, or 10⁻⁵, or 10⁻⁶, or 10⁻⁷ or less than 500 nM, at least less than 250 nM, at least less than 200 nM, at least less than 150 nM, at least less than 100 nM, at least less than 50 nM or less for at least one HLA/MHC molecule (lower numbers indicating greater binding affinity), typically a molecule of said subject suffering from a cancer.

[0166] Further optional steps according to the present method may thus independently include:
[0167] a step of exclusion of fusion transcripts or predicted peptides expressed at high levels or high frequency on healthy cells. An alignment of the fusion transcript sequence against the RNAseq data of healthy cells, typically allows determining the relative amount of fusion transcript sequence(s) present in healthy cells; In one embodiment, fusion transcripts or predicted peptides expressed on healthy cells are discarded.
[0168] a step to confirm that a tumor neoantigenic peptide is not expressed in healthy cells of the subject. This step can be carried out using typically the Basic local alignment search tool (BLAST) and performing alignment of the sequence of the neoantigenic peptide against the proteome of healthy cells; Preferably, peptides that align against the proteome of normal healthy cells (for example using BLAST) are discarded.
[0169] a step to confirm that the fusion transcript or predicted peptide is expressed in cancer cells of the subject. The presence of the selected fusion transcript sequence in cancer cells can be checked typically by RT-PCR in mRNA extracted from cancer cell sample.

[0170] In some embodiments, the present method can also include a step wherein the identified fusion (JETs) transcripts are in silico translated to generate a JET-derived protein database (JET-db). Typically, Strand-indexed JETs containing gene as donor can be translated using the canonical ORF from the implicated gene until the first stop codon after the breakpoint. In JETs where TE was the donor, the 3 possible ORFs can be translated and only the sequence found more proximal to the breakpoint and between two stop codons is typically kept. This JET db (typically also concatenated to the human proteome) can be then interrogated in mass spectrometry based proteomic datasets obtained from tumor samples and/or tumor cell lines which typically consist in proteomics data obtained from tumors samples and/or tumor cell lines. In some embodiments, public mass spectrometry datasets can be used. This embodiment is notably well described in the results provided in the present application. Such analysis also to identify JET-derived peptides or proteins.

[0171] In more specific embodiments, the JETdb (typically concatenated to the human proteome) can be interrogated to immunonopeptidomics mass spectrometry-based datasets as also detailed in the examples included herein. This embodiment allows to identify JET-derived peptides or proteins (pJETs) that are presented to MHC molecules.

[0172] To ensure that JET-derived peptides did not match with canonical proteins or peptides derived from JETs found in normal samples, identified peptides can be filtered for example with UniProt/TrEMBL database and/or with in silico translated JETs from normal (including for example juxta-tumor) samples or cell(s) (for example from public databases such as the TCGA or the CCLE).

### Neoantigenic Peptides

[0173] The present disclosure also relates to an isolated tumor neoantigenic peptide comprising at least 8, 9, 10, 11, or 12 amino acids, encoded by a portion of an open reading frame (ORF) from a fusion transcript that is a human mRNA sequence comprising a transposable element (TE) sequence and an exonic sequence. The peptide may be 8-9, 8-10, 8-11, 12-25, 13-25, 12-20, or 13-20 amino acids in length. Although the ORF overlaps a junction between a TE sequence and an exonic sequence, it is understood that the tumor neoantigenic peptide itself may not comprise the junction.

[0174] More particularly, the present disclosure provides a selection of isolated neoantigenic tumor peptide candidates obtained from the fusion transcripts predicted from the bioinformatic tumor transcriptome database CCLE (Broad Institute Cancer Cell Line Encyclopedia).

[0175] This step has been detailed in the above section (detailed description and previous examples) of the present application. Briefly, and as previously mentioned, in these fusion transcripts, the TE can be donor (in 5′ position) or acceptor (in 3′ acceptor) and correspondingly the exon can be acceptor or donor. TE-exon splicing results in the incorporation of parts of the “non-coding” genome into the coding genome, thereby exposing non-coding genomic sequences to the translation machinery. These fusions (or chimeric) transcripts also named JET (Junction Exon TE) include an ORF (open reading frame). When the TE is acceptor, the ORF of the fusion transcript is canonical (i.e. the same as the canonical transcript), whereas when the TE is the donor the ORF can be canonical (generally ORF1) or can be shifted by 1 or 2 nucleotides (typically ORFs 2 and 3 respectively). The fusion transcripts include not only the fused TE and exon sequences but can also further include exon(s), upstream the fusion breakpoint (between the exon and the TE) if the exon is donor or downstream the fusion breakpoint is the TE is donor, corresponding to the various transcript isoforms. Amino acid sequences SEQ ID NO:1-38907 and 38916-41099 correspond to the in silico translated sequences of all the transcripts (splice variants) including a fusion event (a fusion between an exonic sequence and TE sequence also named herein JET for “Junction Exon TE”), which are thus also named “fusion transcripts” or “chimeric transcripts”. Amino acid sequences are also named translated fusion transcripts or shortly “translated fusions” or “translated JETs” or “pJETs. Sequences SEQ ID NO: 1-10170; 38760-38907; 38916-39683; 39924-39965; 40128-40193; 40365-40391; and 40510-40728 are translated amino acid sequences from exon donor derived fusion transcripts. Sequences SEQ ID NO:10171-38759; 38760-38907; 38916-39683; 39684-39923; 399666-40127; 40194-40364; 40392-40509; and 40729-41099 are translated amino acid sequences from TE donor derived fusion transcripts. Tables 9; 11; 13; 15; 17 and 19 and 10; 12; 14; 16; 18; 20 herein provides the reference, location and coordinate of the donor sequence (exon or TE) and acceptor sequence (TE or exon respectively) such that each fusion transcript sequence can be unambiguously retrieved. Tables 9; 11; 13; 15; 17 and 19 and 10; 12; 14; 16; 18; 20 also assign each transcript to the corresponding translated fusion transcripts identified as SEQ ID NO: 1-38907 and 38916-41099. For each translated fusion transcript, the position of the breakpoint (between the exonic and TE sequences) is provided such that it is possible to identify for each of the amino acid sequences of SEQ ID NO:1-38907 and 38916-41099, the TE-derived sequence and the exon-derived sequence.

[0176] Thus, the present disclosure encompasses isolated tumor neoantigenic peptides, optionally comprising at least 8 amino acids, wherein said neoantigenic peptides are encoded by a part of an open reading frame (ORF) from a fusion transcript encoding any one of SEQ ID NO:1-38907 and 38916-41099 and comprising a transposable element (TE) sequence and an exonic sequence, wherein said ORF overlaps the junction between the TE and the exonic sequence, is pure TE and/or is non-canonical.

[0177] In some embodiments, the present disclosure encompasses isolated tumor neoantigenic peptide, optionally of at least 8 amino acids, wherein the neoantigenic peptide:
[0178] is a part of any one of the sequences of SEQ ID NO:1-38759; 39587-41089, notably is of any one of SEQ ID NO:38760-38907 and 38916-39596 or a fragment thereof, and comprises a TE-derived amino acid sequence, or
[0179] is a part of any one of the sequence of SEQ ID NO: 1-10170; 39597-39683; 39924-39965; 40128-40193; 40365-40311; and 40510-40728, notably is of any one of SEQ ID NO: 38760-38907 and 38916-39596 or a fragment thereof and is encoded by a fusion wherein the exon is the donor. Typically said neoantigenic peptides are derived from a part of a non-canonical ORF of a fusion transcript as above defined.

[0180] In some embodiments, the neoantigenic peptide overlaps the breakpoint between the TE-derived sequence and the exon-derived sequence of the translated fusion transcripts of any one of SEQ ID NO: 1-38759; 39597-41099, including fragments thereof. In other embodiments the neoantigenic peptide consists in or comprises a pure TE-derived sequence from a translated fusion transcripts of any one of SEQ ID NO:1-38759; 39597-41099, including fragments thereof.

[0181] in some embodiments the neoantigenic peptide comprises at least 8, 9, 10, 11 or 12 amino acids.

[0182] The peptide may be 8-9, 8-10, 8-11, 12-25, 13-25, 12-20, or 13-20 amino acids in length and fulfills one or more of the neoantigen peptide characteristics described above. The N-terminus of the peptide of at least 8 amino acids may be encoded by the triplet codon starting at any of nucleotide positions 1, 2, 3, 4, 5, 6, 7, 8, 9, 10, 11, 12, 13, 14, 15, 16, 17, 18, and higher (it being understood that the disclosure contemplates a start position that is any of the integers between 1 and 8000 without having to list every number between 1 and 8000). More specifically, the N terminus of the neoantigenic peptide of at least 8 amino acids may start at any of amino acid positions 1, 2, 3, 4, 5, 6, 7, 8, 9, 10, 11, 12, 13, 14, 15, 16, 17, 18, and higher (it being understood that the disclosure contemplates a start position that is any of the integers between 1 and 15000 without having to list every number between 1 and 15000) of any one of the sequences SEQ ID NO: 1-38759. Typically however, and as mentioned above, the neoantigenic peptide:
[0183] is a fragment of any one of the sequence of SEQ ID NO:1-38759; 39597-41099 and comprises a TE-derived amino acid sequence, or
[0184] is a fragment of any one of the sequence of SEQ ID NO: 1-38759; 39597-41099. Typically said neoantigenic peptides are derived from a part of a non-canonical ORF of a fusion transcript as above defined.

[0185] In some embodiments, the neoantigenic peptide overlaps the breakpoint between the TE-derived sequence and the exon-derived sequence of the translated fusion transcripts of any one of SEQ ID NO:1-1-38759; 39597-41099. In other embodiments the neoantigenic peptide consists in or comprises a pure TE-derived sequence from a translated fusion transcripts of any one of SEQ ID NO: 1-38759; 39597-41099.

[0186] A peptide as above defined is typically obtainable according to the method of the present disclosure and thus encompasses one or more of the characteristics as previously described. In particular a neoantigenic peptide as per the present disclosure may exhibit one or a combination of the following further characteristics:
[0187] It binds or specifically binds MHC class I of a subject and is 8 to 11 amino acids, notably 8, 9, 10, or 11 amino acids. Typically the neoantigenic peptide is 8 or 9 amino acids long, and binds to at least one MHC class I molecule of the subject; or alternatively, it binds to at least one MHC class II molecule of said subject and contains from 12 to 25 amino acids, notably is 12, 13, 14, 15, 16, 17, 18, 19, 20, 21, 22, 23, 24 or 25 amino acids long.
[0188] It binds at least one HLA/MHC molecule of said subject suffering from a cancer with an affinity sufficient for the peptide to be presented on the surface of a cell as an antigen. Typically the neoantigenic peptide has an IC50 of less than 10⁻⁴, or 10⁻⁵, or 10⁻⁶, or 10⁻⁷ or less than 500 nM, at least less than 250 nM, at least less than 200 nM, at least less than 150 nM, at least less than 100 nM, at least less than 50 nM or less (lower numbers indicating greater binding affinity).
[0189] It does not induce a significant autoimmune response and/or invoke immunological tolerance when administered to a subject.
[0190] It is expressed at higher levels in tumor samples compared to normal healthy samples. Typically, as per the present disclosure, a fusion transcript may be selected if it is present in more than 1%, notably more than 2%, more than 5% and typically more than 10% of the tumor samples (from the same or different tumor type, typically from one or more subjects typically from TCGA tumor samples) and in less than 20%, notably less than 15%, less than 10%, less than 5%, less than 2% or even less than 1% of the normal samples. Alternatively, or in addition, the transcript can be identified in one or more (at least 2, 5, 10, 20, 50, 100 cell lines such as for example from the CCLE) In some embodiments, the neoantigenic is more specifically a tumor specific antigen (TSA), i.e.: it is only expressed in cancer sample and not in normal samples, or is expressed at relatively low levels in normal samples (e.g. the expressed mRNA sequences represent minor species in normal cells from normal samples).
[0191] It comprises the junction between the TE sequence and the exonic sequence, in other words it is encoded by a part of a TE sequence and a part of an exonic sequence, the ORF being either canonical or non-canonical or
[0192] It is encoded by a non-canonical ORF of an exonic sequence or
[0193] It is encoded by the TE sequence, optionally in a non-canonical ORF

[0194] A tumor neoantigenic peptide may first be validated by RT transcription analysis of fusion transcripts sequence in tumors cell from a subject. Typically also, immunization with a tumor neoantigenic peptide as per the present disclosure elicits a T cell response

[0195] Affinity for MHC alleles can be determined by known techniques in the field and notably in silico or in vitro as exemplified above;

[0196] In a particular embodiment, a tumor neoantigenic peptide as per the present disclosure binds to a MHC molecule present in at least 1%, 5%, 10%, 15%, 20%, 25% or more of subjects. Notably, a tumor neoantigenic peptide as herein disclosed is expressed in at least 1%, 5%, 10%, 15%, 20%, 25% of subjects from a population of subjects suffering from cancer

[0197] More particularly, a tumor neoantigenic peptide of the present disclosure is capable of eliciting an immune response against a tumor present in at least 1%, 5%, 10%, 15%, 20%, or 25% of the subjects in the population of subjects suffering from cancer.

[0198] As previously defined, cancer may affect any one of the following tissues or organs: breast; liver; kidney; heart, mediastinum, pleura; floor of mouth; lip; salivary glands; tongue; gums; oral cavity; palate; tonsil; larynx; trachea; bronchus, lung; pharynx, hypopharynx, oropharynx, nasopharynx; esophagus; digestive organs such as stomach, intrahepatic bile ducts, biliary tract, pancreas, small intestine, colon; rectum; urinary organs such as bladder, gallbladder, ureter; rectosigmoid junction; anus, anal canal; skin; bone; joints, articular cartilage of limbs; eye and adnexa; brain; peripheral nerves, autonomic nervous system; spinal cord, cranial nerves, meninges; and various parts of the central nervous system; connective, subcutaneous and other soft tissues; retroperitoneum, peritoneum; adrenal gland; thyroid gland; endocrine glands and related structures; female genital organs such as ovary, uterus, cervix uteri; corpus uteri, vagina, vulva; male genital organs such as penis, testis and prostate gland; hematopoietic and reticuloendothelial systems; blood; lymph nodes; thymus. For example, the tumors or cancers as per the present application includes leukemias, seminomas, melanomas, teratomas, lymphomas, neuroblastomas, gliomas, rectal cancer, endometrial cancer, kidney cancer, adrenal cancer, thyroid cancer, blood cancer, skin cancer, cancer of the brain, cervical cancer, intestinal cancer, liver cancer, colon cancer, stomach cancer, intestine cancer, head and neck cancer, gastrointestinal cancer, lymph node cancer, esophagus cancer, colorectal cancer, pancreas cancer, ear, nose and throat (ENT) cancer, breast cancer, prostate cancer, cancer of the uterus, ovarian cancer and lung cancer and the metastases thereof. Examples thereof are lung carcinomas, mamma carcinomas, prostate carcinomas, colon carcinomas, renal cell carcinomas, cervical carcinomas, or metastases of the cancer types or tumors described above. The term cancer according to the present disclosure also comprises cancer metastases and relapse of cancer.

[0199] Typically, a neoantigenic peptide as per the present disclosure does not induce a significant autoimmune response and/or invoke immunological tolerance when administered to a subject. Tolerating mechanisms involve clonal deletion, ignorance, anergy, or suppression in the host w the reduction in the number of high-affinity self-reactive T cells.

[0200] The neoantigenic peptide can also be modified by extending or decreasing the compound's amino acid sequence, e.g., by the addition or deletion of amino acids. The peptides can also be modified by altering the order or composition of certain residues, it being readily appreciated that certain amino acid residues essential for biological activity, e.g., those at critical contact sites or conserved residues, may generally not be altered without an adverse effect on biological activity. The non-critical amino acids need not be limited to those naturally occurring in proteins, such as L-α-amino acids, or their D-isomers, but may include non-natural amino acids as well, such as β-γ-δ-amino acids, as well as many derivatives of L-α-amino acids.

[0201] Typically, a series of peptides with single amino acid substitutions are employed to determine the effect of electrostatic charge, hydrophobicity, etc. on binding. For instance, a series of positively charged (e.g., Lys or Arg) or negatively charged (e.g., Glu) amino acid substitutions are made along the length of the peptide revealing different patterns of sensitivity towards various MHC molecules and T cell receptors. In addition, multiple substitutions using small, relatively neutral moieties such as Ala, Gly, Pro, or similar residues may be employed. The substitutions may be homo-oligomers or hetero-oligomers. The number and types of residues which are substituted or added depend on the spacing necessary between essential contact points and certain functional attributes which are sought (e.g., hydrophobicity versus hydrophilicity). Increased binding affinity for an MHC molecule or T cell receptor may also be achieved by such substitutions, compared to the affinity of the parent peptide. In any event, such substitutions should employ amino acid residues or other molecular fragments chosen to avoid, for example, steric and charge interference which might disrupt binding.

[0202] Amino acid substitutions are typically of single residues. Substitutions, deletions, insertions or any combination thereof may be combined to arrive at a final peptide. Substitutional variants are those in which at least one residue of a peptide has been removed and a different residue inserted in its place. Such substitutions are generally made in accordance with the following Table 1 when it is desired to finely modulate the characteristics of the peptide.

TABLE 1

| Original residue | Exemplary substitution |
|---|---|
| Ala | Ser |
| Arg | Lys, His |
| Asn | Gln |
| Asp | Glu |
| Cys | Ser |
| Gln | Asn |
| Glu | Asp |
| Gly | Pro |
| His | Lys, Arg |
| Ile | Leu, Val |
| Leu | Ile, Val |
| Lys | Tyr, Trp |
| Met | Thr |
| Phe | Ser |
| Ser | Tyr, Phe |
| Tyr | Trp, Phe |
| Val | Ile, Leu |
| Pro | Gly |

[0203] Substantial changes in function (e.g., affinity for MHC molecules or T cell receptors) are made by selecting substitutions that are less conservative than those in above Table, i.e., selecting residues that differ more significantly in their effect on maintaining (a) the structure of the peptide backbone in the area of the substitution, for example as a sheet or helical conformation, (b) the charge or hydrophobicity of the molecule at the target site or (c) the bulk of the side chain. The substitutions which in general are expected to produce the greatest changes in peptide properties will be those in which (a) hydrophilic residue, e.g. seryl, is substituted for (or by) a hydrophobic residue, e.g. leucyl, isoleucyl, phenylalanyl, valyl or alanyl; (b) a residue having an electropositive side chain, e.g., lysl, arginyl, or histidyl, is substituted for (or by) an electronegative residue, e.g. glutamyl or aspartyl; or (c) a residue having a bulky side chain, e.g. phenylalanine, is substituted for (or by) one not having a side chain, e.g., glycine.

[0204] The peptides and polypeptides may also comprise isosteres of two or more residues in the neoantigenic peptide or polypepeptides. An isostere as defined here is a sequence of two or more residues that can be substituted for a second sequence because the steric conformation of the first sequence fits a binding site specific for the second sequence. The term specifically includes peptide backbone modifications well known to those skilled in the art. Such modifications include modifications of the amide nitrogen, the α-carbon, amide carbonyl, complete replacement of the amide bond, extensions, deletions or backbone crosslinks. See, generally, Spatola, Chemistry and Biochemistry of Amino Acids, Peptides and Proteins, Vol. VII (Weinstein ed., 1983).

[0205] In addition, the neoantigenic peptide may be conjugated to a carrier protein, a ligand, or an antibody. Half-life of the peptide may be improved by PEGylation, glycosylation, polysialylation, HESylation, recombinant PEG mimetics, Fc fusion, albumin fusion, nanoparticle attachment, nanoparticulate encapsulation, cholesterol fusion, iron fusion, or acylation.

[0206] Modifications of peptides and polypeptides with various amino acid mimetics or unnatural amino acids are particularly useful in increasing the stability of the peptide and polypeptide in vivo. Stability can be assayed in a number of ways. For instance, peptidases and various biological media, such as human plasma and serum, have been used to test stability. See, e.g., Verhoef et al., Eur. J. Drug Metab Pharmacokin. 11:291-302 (1986). Half life of the peptides of the present disclosure is conveniently determined using a 25% human serum (v/v) assay. The protocol is generally as follows. Pooled human serum (Type AB, non-heat inactivated) is delipidated by centrifugation before use. The serum is then diluted to 25% with RPMI tissue culture media and used to test peptide stability. At predetermined time intervals a small amount of reaction solution is removed and added to either 6% aqueous trichloracetic acid or ethanol. The cloudy reaction sample is cooled (4° C.) for 15 minutes and then spun to pellet the precipitated serum proteins. The presence of the peptides is then determined by reversed-phase HPLC using stability-specific chromatography conditions.

[0207] The peptides and polypeptides may be modified to provide desired attributes other than improved serum half-life. For instance, the ability of the peptides to induce CTL activity can be enhanced by linkage to a sequence which contains at least one epitope that is capable of inducing a T helper cell response. Particularly preferred immunogenic peptides/T helper conjugates are linked by a spacer molecule. The spacer is typically comprised of relatively small, neutral molecules, such as amino acids or amino acid mimetics, which are substantially uncharged under physiological conditions. The spacers are typically selected from, e.g., Ala, Gly, or other neutral spacers of nonpolar amino acids or neutral polar amino acids. It will be understood that the optionally present spacer need not be comprised of the same residues and thus may be a hetero- or homo-oligomer. When present, the spacer will usually be at least one or two residues, more usually three to six residues. Alternatively, the peptide may be linked to the T helper peptide without a spacer.

[0208] The neoantigenic peptide may be linked to the T helper peptide either directly or via a spacer either at the amino or carboxy terminus of the peptide. The amino terminus of either the neoantigenic peptide or the T helper peptide may be acylated. Exemplary T helper peptides include tetanus toxoid 830-843, influenza 307-319, malaria circumsporozoite 382-398 and 378-389

[0209] Multiple neoantigenic peptides described herein can also be linked together, optionally by a spacer.

### Peptide Productions, Polynucleotides and Vectors

[0210] Proteins or peptides may be made by any technique known to those of skill in the art, including the expression of proteins, polypeptides or peptides through standard molecular biological techniques, the isolation of proteins or peptides from natural sources, or the chemical synthesis of proteins or peptides. The nucleotide and protein, polypeptide and peptide sequences corresponding to various genes have been previously disclosed, and may be found at computerized databases known to those of ordinary skill in the art. One such database is the National Center for Biotechnology Information's Genbank and GenPept databases located at the National Institutes of Health website. The coding regions for known genes may be amplified and/or expressed using the techniques disclosed herein or as would be known to those of ordinary skill in the art. Alternatively, various commercial preparations of proteins, polypeptides and peptides are known to those of skill in the art.

[0211] In a further aspect the present disclosure provides a nucleic acid (e.g. polynucleotide) encoding a neoantigenic peptide as herein disclosed. The polynucleotide may be selected from DNA, cDNA, PNA, CNA, RNA, either single- and/or double-stranded, or native or stabilized forms of polynucleotides, such as for example polynucleotides with a phosphorothiate backbone, or combinations thereof and it may or may not contain introns so long as it codes for the peptide. Only peptides that contain naturally occurring amino acid residues joined by naturally occurring peptide bonds are encodable by a polynucleotide.

[0212] A still further aspect of the disclosure provides an expression vector capable of expressing a neoantigenic peptide as herein disclosed. Expression vectors for different cell types are well known in the art and can be selected without undue experimentation. Generally, the DNA is inserted into an expression vector, such as a plasmid, in proper orientation and correct reading frame for expression. The expression vector will comprise the appropriate heterologous transcriptional and/or translational regulatory control nucleotide sequences recognized by the desired host. The polynucleotide encoding the tumor neoantigenic peptide may be linked to such heterologous regulatory control nucleotide sequences or may be non-adjacent yet operably linked to such heterologous regulatory control nucleotide sequences. The vector is then introduced into the host through standard techniques. Guidance can be found for example in Sambrook et al. (1989) Molecular Cloning, A Laboratory Manual, Cold Spring Harbor Laboratory, Cold Spring Harbor, N.Y.

### Antigen Presenting Cells (APCs)

[0213] The present disclosure also encompasses a population of antigen presenting cells that have been pulsed with one or more of the peptides as previously defined and/or obtainable in a method as previously described. Preferably, the antigen presenting cells are dendritic cell (DCs) or artificial antigen presenting cells (aAPCs) (see Neal, Lillian R et al. “The Basics of Artificial Antigen Presenting Cells in T Cell-Based Cancer Immunotherapies.” Journal of immunology research and therapy vol. 2, 1 (2017): 68-79). Dendritic cells (DC) are professional antigen-presenting cells (APC) that have an extraordinary capacity to stimulate naive T-cells and initiate primary immune responses to pathogens. Indeed, the main role of mature DCs are to sense antigens and produce mediators that activate other immune cells, particularly T cells. DCs are potent stimulators for lymphocyte activation as they express MHC molecules that trigger TCRs (signal 1) and co-stimulatory molecules (signal 2) on T cells. Additionally, DCs also secrete cytokines that support T cell expansion. T cells require presented antigen in the form of a processed peptide to recognize foreign pathogens or tumor. Presentation of peptide epitopes derived from pathogen/tumor proteins is achieved through MHC molecules. MHC class I (MHC-I) and MHC class II (MHC-II) molecules present processed peptides to CD8+ T cells and CD4+ T cells, respectively. Importantly, DCs home to inflammatory sites containing abundant T cell populations to foster an immune response. Thus, DCs can be a crucial component of any immunotherapeutic approach, as they are intimately involved with the activation of the adaptive immune response. In the context of vaccines, DC therapy can enhance T cell immune responses to a desired target in healthy volunteers or patients with infectious disease or cancer. In one embodiment, APCS are artificial APC, which are genetically modified to express the desired T-cell co-stimulatory molecules, human HLA alleles and/or cytokines. Such artificial antigen presenting cells (aAPC) are able to provide the requirements for adequate T-cell engagement, co-stimulation, as well as sustained release of cytokines that allow for controlled T-cell expansion. These cells are not subject to the constraints of time and limited availability and can be stored in small aliquots for subsequent use in generating T-cell lines from different donors, thus representing an off the shelf reagent for immunotherapy applications. Expression of potent co-stimulatory signals on these aAPC endows this system with higher efficiency lending to increased efficacy of adoptive immunotherapy. Furthermore, aAPC can be engineered to express genes directing release of specific cytokines to facilitate the preferential expansion of desirable T-cell subsets for adoptive transfer; such as long lived memory T-cells (see for review Hasan A H et al., Artificial Antigen Presenting Cells: An Off the Shelf Approach for Generation of Desirable T-Cell Populations for Broad Application of Adoptive Immunotherapy; Adv Genet Eng. 2015; 4 (3): 130, Kim J V, Latouche J B, Rivière I, Sadelain M. The ABCs of artificial antigen presentation. Nat Biotechnol. 2004; 22:403-410 or Wang C, Sun W, Ye Y, Bomba H N, Gu Z. Bioengineering of Artificial Antigen Presenting Cells and Lymphoid Organs. Theranostics 2017; 7 (14): 3504-3516.).

[0214] Typically, the dendritic cells are autologous dendritic cells that are pulsed with a neoantigenic peptide as herein disclosed. The peptide may be any suitable peptide that gives rise to an appropriate T-cell response. The antigen-presenting cell (or stimulator cell) typically has an MHC class I or II molecule on its surface, and in one embodiment is substantially incapable of itself loading the MHC class I or II molecule with the selected antigen. The MHC class I or II molecule may readily be loaded with the selected antigen in vitro.

[0215] As an alternative the antigen presenting cell may comprise an expression construct encoding a tumor neoantigenic peptide as herein disclosed. The polynucleotide may be any suitable polynucleotide as previously defined and it is preferred that it is capable of transducing the dendritic cell, thus resulting in the presentation of a peptide and induction of immunity

[0216] Thus the present disclosure encompasses a population of APCs than can be pulsed or loaded with the neoantigenic peptide as herein disclosed, genetically modified (via DNA or RNA transfer) to express at least one neoantigenic peptide as herein disclosed, or that comprise an expression construct encoding a tumor neoantigenic peptide of the present disclosure. Typically the population of APCs is pulsed or loaded, modified to express or comprises at least one, at least 5, at least 10, at least 15, or at least 20 different neoantigenic peptide or expression construct encoding it.

[0217] The present disclosure also encompasses compositions comprising APCs as herein disclosed. APCs can be suspended in any known physiologically compatible pharmaceutical carrier, such as cell culture medium, physiological saline, phosphate-buffered saline, cell culture medium, or the like, to form a physiologically acceptable, aqueous pharmaceutical composition. Parenteral vehicles include sodium chloride solution, Ringer's dextrose, dextrose and sodium chloride, lactated Ringer's. Other substances may be added as desired such as antimicrobials. As used herein, a “carrier” refers to any substance suitable as a vehicle for delivering an APC to a suitable in vitro or in vivo site of action. As such, carriers can act as an excipient for formulation of a therapeutic or experimental reagent containing an APC. Preferred carriers are capable of maintaining an APC in a form that is capable of interacting with a T cell. Examples of such carriers include, but are not limited to water, phosphate buffered saline, saline, Ringer's solution, dextrose solution, serum-containing solutions, Hank's solution and other aqueous physiologically balanced solutions or cell culture medium. Aqueous carriers can also contain suitable auxiliary substances required to approximate the physiological conditions of the recipient, for example, enhancement of chemical stability and isotonicity. Suitable auxiliary substances include, for example, sodium acetate, sodium chloride, sodium lactate, potassium chloride, calcium chloride, sorbitan monolaurate, triethanolamine oleate, and other substances used to produce phosphate buffer, Tris buffer, and bicarbonate buffer.

### Vaccine Compositions

[0218] The present disclosure further encompasses a vaccine or immunogenic composition capable of raising a specific T-cell response comprising:
[0219] one or more neoantigenic peptides as herein defined,
[0220] one or more polynucleotides encoding a neoantigenic peptide as herein defined; and/or
[0221] a population of antigen presenting cells (such as autologous dendritic cells or artificial APC) as described above.

[0222] Preferably, neoantigenic peptide which are encoded by tumor specific fusions as previously defined are used in vaccine compositions as per the present disclosure. Said neoantigenic peptide can be also named tumor specific peptides. Preferably also polynucleotides encoding tumor specific peptides are used as per the present disclosure.

[0223] A suitable vaccine or immunogenic composition will preferably contain between 1 and 20 neoantigenic peptides, more preferably 2, 3, 4, 5, 6, 7, 8, 9, 10, 11, 12, 13, 14, 15, 16, 17, 18, 19, 20, 21, 22, 23, 24, 25 different neoantigenic peptides, further preferred 6, 7, 8, 9, 10 11, 12, 13, or 14 different neoantigenic peptides, and most preferably 12, 13 or 14 different neoantigenic peptides.

[0224] The neoantigenic peptide(s) may be linked to a carrier protein. Where the composition contains two or more neoantigenic peptides, the two or more (e.g. 2-25) peptides may be linearly linked by a spacer molecule as described above, e.g. a spacer comprising 2-6 nonpolar or neutral amino acids.

[0225] In one embodiment of the present disclosure the different neoantigenic peptides, encoding polynucleotides, vectors, or APCs are selected so that one vaccine or immunogenic composition comprises neoantigenic peptides capable of associating with different MHC molecules, such as different MHC class I molecules. Preferably, such neoantigenic peptides are capable of associating with the most frequently occurring MHC class I molecules, e.g. different fragments capable of associating with at least 2 preferred, more preferably at least 3 preferred, even more preferably at least 4 preferred MHC class I molecules. In some embodiments, the compositions comprise peptides, encoding polynucleotides, vectors, or APCs capable of associating with one or more MHC class II molecules. The MHC is optionally HLA-A, -B, -C, -DP, -DQ, or -DR.

[0226] The vaccine or immunogenic composition is capable of raising a specific cytotoxic T-cells response and/or a specific helper T-cell response.

[0227] Thus, in a particular embodiment, the present disclosure also relates to a neoantigenic peptide as described above, wherein the neoantigenic peptide has a tumor specific neoepitope and is included in a vaccine or immunogenic composition. A vaccine composition is to be understood as meaning a composition for generating immunity for the prophylaxis and/or treatment of diseases. Accordingly, vaccines are medicines which comprise or generate antigens and are intended to be used in humans or animals for generating specific defense and protective substance by vaccination. An “immunogenic composition” is to be understood as meaning a composition that comprises or generates antigen(s) and is capable of eliciting an antigen-specific humoral or cellular immune response, e.g. T-cell response.

[0228] In a preferred embodiment, the neoantigenic peptide according to the disclosure is 8 or 9 residues long, or from 13 to 25 residues long. When the peptide is less than 20 residues, in order to have a peptide better suited for in vivo immunization, said neoantigenic peptide, is optionally flanked by additional amino acids to obtain an immunization peptide of more amino acids, usually more than 20.

[0229] Pharmaceutical compositions (i.e., the vaccine or immunogenic composition) comprising a peptide as herein described may be administered to an individual already suffering from cancer. In therapeutic applications, compositions are administered to a patient in an amount sufficient to elicit an effective CTL response to the tumor antigen and to cure or at least partially arrest symptoms and/or complications. An amount adequate to accomplish this is defined as “therapeutically effective dose.” Amounts effective for this use will depend on, e.g., the peptide composition, the manner of administration, the stage and severity of the disease being treated, the weight and general state of health of the patient, and the judgment of the prescribing physician, but generally range for the initial immunization (that is for therapeutic or prophylactic administration) from about 1.0 μg to about 50,000 μg of peptide for a 70 kg patient, followed by boosting dosages or from about 1.0 μg to about 10,000 μg of peptide pursuant to a boosting regimen over weeks to months depending upon the patient's response and condition by measuring specific CTL activity in the patient's blood. It must be kept in mind that the peptide and compositions of the present invention may generally be employed in serious disease states, that is, life-threatening or potentially life threatening situations, especially when the cancer has metastasized. In such cases, in view of the minimization of extraneous substances and the relative nontoxic nature of the peptide, it is possible and may be felt desirable by the treating physician to administer substantial excesses of these peptide compositions.

[0230] For therapeutic use, administration should begin at the detection or surgical removal of tumors. This is followed by boosting doses until at least symptoms are substantially abated and for a period thereafter.

[0231] The vaccine or immunogenic compositions for therapeutic treatment are intended for parenteral, topical, nasal, oral or local administration. Preferably, the pharmaceutical compositions are administered parenterally, e.g., intravenously, subcutaneously, intradermally, or intramuscularly. The compositions may be administered at the site of surgical excision to induce a local immune response to the tumor.

[0232] The vaccine or immunogenic composition may be a pharmaceutical composition which additionally comprises a pharmaceutically acceptable adjuvant, immunostimulatory agent, stabilizer, carrier, diluent, excipient and/or any other materials well known to those skilled in the art. Such materials should be non-toxic and should not interfere with the efficacy of the active ingredient. The carrier is preferably an aqueous carrier but its precise nature of the carrier or other material will depend on the route of administration. A variety of aqueous carriers may be used, e.g., water, buffered water, 0.9% saline, 0.3% glycine, hyaluronic acid and the like. These compositions may be sterilized by conventional, well known sterilization techniques, or may be sterile filtered. The resulting aqueous solutions may be packaged for use as is, or lyophilized, the lyophilized preparation being combined with a sterile solution prior to administration. The compositions may further contain pharmaceutically acceptable auxiliary substances as required to approximate physiological conditions, such as pH adjusting and buffering agents, tonicity adjusting agents, wetting agents and the like, for example, sodium acetate, sodium lactate, sodium chloride, potassium chloride, calcium chloride, sorbitan monolaurate, triethanolamine oleate, etc. See, for example, Butterfield, B M J. 2015 22; 350 for a discussion of cancer vaccines.

[0233] Example adjuvants that increase or expand the immune response of a host to an antigenic compound include emulsifiers, muramyl dipeptides, avridine, aqueous adjuvants such as aluminum hydroxide, chitosan-based adjuvants, saponins, oils, Amphigen, LPS, bacterial cell wall extracts, bacterial DNA, CpG sequences, synthetic oligonucleotides, cytokines and combinations thereof. Emulsifier include, for example, potassium, sodium and ammonium salts of lauric and oleic acid, calcium, magnesium and aluminum salts of fatty acids, organic sulfonates such as sodium lauryl sulfate, cetyltrhethylammonlum bromide, glycerylesters, polyoxyethylene glycol esters and ethers, and sorbitan fatty acid esters and their polyoxyethylene, acacia, gelatin, lecithin and/or cholesterol. Adjuvants that comprise an oil component include mineral oil, a vegetable oil, or an animal oil. Other adjuvants include Freund's Complete Adjuvant (FCA) or Freund's Incomplete Adjuvant (FIA). Cytokines useful as additional immunostimulatory agents include interferon alpha, interleukin-2 (IL-2), and granulocyte macrophage-colony stimulating factor (GM-CSF), or combinations thereof.

[0234] The concentration of peptides as herein described in the vaccine or immunogenic formulations can vary widely, i.e., from less than about 0.1%, usually at or at least about 2% to as much as 20% to 50% or more by weight, and will be selected primarily by fluid volumes, viscosities, etc., in accordance with the particular mode of administration selected.

[0235] The peptides as herein described may also be administered via liposomes, which target the peptides to a particular cells tissue, such as lymphoid tissue. Liposomes are also useful in increasing the half-life of the peptides. Liposomes include emulsions, foams, micelles, insoluble monolayers, liquid crystals, phospholipid dispersions, lamellar layers and the like. In these preparations the peptide to be delivered is incorporated as part of a liposome, alone or in conjunction with a molecule which binds to, e.g., a receptor prevalent among lymphoid cells, such as monoclonal antibodies which bind to the CD45 antigen, or with other therapeutic or immunogenic compositions. Thus, liposomes filled with a desired peptide of the invention can be directed to the site of lymphoid cells, where the liposomes then deliver the selected therapeutic/immunogenic peptide compositions. Liposomes for use in the invention are formed from standard vesicle-forming lipids, which generally include neutral and negatively charged phospholipids and a sterol, such as cholesterol. The selection of lipids is generally guided by consideration of, e.g., liposome size, acid lability and stability of the liposomes in the blood stream. A variety of methods are available for preparing liposomes, as described in, e.g., Szoka et al., Ann. Rev. Biophys. Bioeng. 9; 467 (1980), USA U.S. Pat. Nos. 4,235,871, 4,501,728 4,501,728, 4,837,028, and 5,019,369.

[0236] For targeting to the immune cells, a ligand to be incorporated into the liposome can include, e.g., antibodies or fragments thereof specific for cell surface determinants of the desired immune system cells. A liposome suspension containing a peptide may be administered intravenously, locally, topically, etc. in a dose which varies according to, inter alia, the manner of administration, the peptide being delivered, and the stage of the disease being treated.

[0237] For solid compositions, conventional or nanoparticle nontoxic solid carriers may be used which include, for example, pharmaceutical grades of mannitol, lactose, starch, magnesium stearate, sodium saccharin, talcum, cellulose, glucose, sucrose, magnesium carbonate, and the like. For oral administration, a pharmaceutically acceptable nontoxic composition is formed by incorporating any of the normally employed excipients, such as those carriers previously listed, and generally 10-95% of active ingredient, that is, one or more peptides of the invention, and more preferably at a concentration of 25%-75%.

[0238] For aerosol administration, the immunogenic peptides are preferably supplied in finely divided form along with a surfactant and propellant. Typical percentages of peptides are 0.01%-20% by weight, preferably 1%-10%. The surfactant must, of course, be nontoxic, and preferably soluble in the propellant. Representative of such agents are the esters or partial esters of fatty acids containing from 6 to 22 carbon atoms, such as caproic, octanoic, lauric, palmitic, stearic, linoleic, linolenic, olesteric and oleic acids with an aliphatic polyhydric alcohol or its cyclic anhydride. Mixed esters, such as mixed or natural glycerides may be employed. The surfactant may constitute 0.1%-20% by weight of the composition, preferably 0.25-5%. The balance of the composition is ordinarily propellant. A carrier can also be included as desired, as with, e.g., lecithin for intranasal delivery.

[0239] Cytotoxic T-cells (CTLs) recognize an antigen in the form of a peptide bound to an MHC molecule rather than the intact foreign antigen itself. The MHC molecule itself is located at the cell surface of an antigen presenting cell. Thus, an activation of CTLs is only possible if a trimeric complex of peptide antigen, MHC molecule, and antigen presenting cell (APC) is present. Correspondingly, it may enhance the immune response if not only the peptide is used for activation of CTLs, but if additionally APCs with the respective MHC molecule are added. Therefore, in some embodiments the vaccine or immunogenic composition according to the present disclosure alternatively or additionally contains at least one antigen presenting cell, preferably a population of APCs.

[0240] The vaccine or immunogenic composition may thus be delivered in the form of a cell, such as an antigen presenting cell, for example as a dendritic cell vaccine. The antigen presenting cells such as a dendritic cell may be pulsed or loaded with a neoantigenic peptide as herein disclosed, may comprise an expression construct encoding a neoantigenic peptide as herein disclosed, or may be genetically modified (via DNA or RNA transfer) to express one, two or more of the herein disclosed neoantigenic peptides, for example at least 2, 3, 4, 5, 6, 7, 8, 9, or 10 neoantigenic peptides.

[0241] Suitable vaccines or immunogenic compositions may also be in the form of DNA or RNA relating to neoantigenic peptides as described herein. For example, DNA or RNA encoding one or more neoantigenic peptides or proteins derived therefrom may be used as the vaccine, for example by direct injection to a subject. For example, DNA or RNA encoding at least 2, 3, 4, 5, 6, 7, 8, 9, 10, 11, 12, 13, 14, 15, 16, 17, 18, 19, 20, 21, 22, 23, 24 or 25 neoantigenic peptides or proteins derived therefrom.

[0242] A number of methods are conveniently used to deliver the nucleic acids to the patient. For instance, the nucleic acid can be delivered directly, as “naked DNA”. This approach is described, for instance, in Wolff et al., Science 247:1465-1468 (1990) as well as USAU.S. U.S. Pat. Nos. 5,580,859 and 5,589,466. The nucleic acids can also be administered using ballistic delivery as described, for instance, in U.S. Pat. No. 5,204,253. Particles comprised solely of DNA can be administered. Alternatively, DNA can be adhered to particles, such as gold particles.

[0243] The nucleic acids can also be delivered complexed to cationic compounds, such as cationic lipids. Lipid-mediated gene delivery methods are described, for instance, in 9618372WOAWO 96/18372; 9324640WOAWO 93/24640; Mannino & Gould-Fogerite, BioTechniques 6 (7): 682-691 (1988); 5279833USARose U.S. Pat. Nos. 5,279,833; 9,106,309WOAWO 91/06309; and Felgner et al., Proc. Natl. Acad. Sci. USA 84:7413-7414 (1987).

[0244] Delivery systems may optionally include cell-penetrating peptides, nanoparticulate encapsulation, virus like particles, liposomes, or any combination thereof. Cell penetrating peptides include TAT peptide, herpes simplex virus VP22, transportan, Antp. Liposomes may be used as a delivery system. Listeria vaccines or electroporation may also be used.

[0245] The one or more neoantigenic peptides may also be delivered via a bacterial or viral vector containing DNA or RNA sequences which encode one or more neoantigenic peptides. The DNA or RNA may be delivered as a vector itself or within attenuated bacteria virus or live attenuated virus, such as vaccinia or fowlpox. This approach involves the use of vaccinia virus as a vector to express nucleotide sequences that encode the peptide of the invention. Upon introduction into an acutely or chronically infected host or into a noninfected host, the recombinant vaccinia virus expresses the immunogenic peptide, and thereby elicits a host CTL response. Vaccinia vectors and methods useful in immunization protocols are described in, e.g., U.S. Pat. No. 4,722,848. Another vector is BCG (Bacille Calmette Guerin). BCG vectors are described in Stover et al. (Nature 351:456-460 (1991)). A wide variety of other vectors useful for therapeutic administration or immunization of the peptides of the invention, e.g., Salmonella typhivectors and the like, will be apparent to those skilled in the art from the description herein.

[0246] An appropriate mean of administering nucleic acids encoding the peptides as herein described involves the use of minigene constructs encoding multiple epitopes. To create a DNA sequence encoding the selected CTL epitopes (minigene) for expression in human cells, the amino acid sequences of the epitopes are reverse translated. A human codon usage table is used to guide the codon choice for each amino acid. These epitope-encoding DNA sequences are directly adjoined, creating a continuous polypeptide sequence. To optimize expression and/or immunogenicity, additional elements can be incorporated into the minigene design. Examples of amino acid sequence that could be reverse translated and included in the minigene sequence include: helper T lymphocyte, epitopes, a leader (signal) sequence, and an endoplasmic reticulum retention signal. In addition, MHC presentation of CTL epitopes may be improved by including synthetic (e.g. poly-alanine) or naturally-occurring flanking sequences adjacent to the CTL epitopes.

[0247] The minigene sequence is converted to DNA by assembling oligonucleotides that encode the plus and minus strands of the minigene. Overlapping oligonucleotides (30-100 bases long) are synthesized, phosphorylated, purified and annealed under appropriate conditions using well known techniques. The ends of the oligonucleotides are joined using T4 DNA ligase. This synthetic minigene, encoding the CTL epitope polypeptide, can then cloned into a desired expression vector.

[0248] Standard regulatory sequences well known to those of skill in the art are included in the vector to ensure expression in the target cells. Thus, the DNA or RNA encoding the neoantigenic peptide(s) may typically be operably linked to one or more of:
[0249] a promoter that can be used to drive nucleic acid molecule expression. AAV ITR can serve as a promoter and is advantageous for eliminating the need for an additional promoter element. For ubiquitous expression, the following promoters can be used: CMV (notably human cytomegalovirus immediate early promoter (hCMV-IE)), CAG, CBh, PGK, SV40, RSV, Ferritin heavy or light chains, etc. For brain expression, the following promoters can be used: Synapsin1 for all neurons, CaMKIIalpha for excitatory neurons, GAD67 or GAD65 or VGAT for GABAergic neurons, etc. Promoters used to drive RNA synthesis can include: Pol III promoters such as U6 or HI. The use of a Pol II promoter and intronic cassettes can be used to express guide RNA (gRNA). Typically, the promoter includes a down-stream cloning site for minigene insertion. For examples of suitable promoters sequences, see notably U.S. Pat. Nos. 5,580,859 and 5,589,466.
[0250] Transcriptional transactivators or other enhancer elements, which can also increase transcription activity, e.g. the regulatory R region from the 5′ long terminal repeat (LTR) of human T-cell leukemia virus type 1 (HTLV-1) (which when combined with a CMV promoter has been shown to induce higher cellular immune response).
[0251] Translation optimizing sequences e.g. a Kozak sequence flanking the AUG initiator codon (ACCAUGG) within mRNA, and codon optimization.

[0252] Additional vector modifications may be desired to optimize minigene expression and immunogenicity. In some cases, introns are required for efficient gene expression, and one or more synthetic or naturally-occurring introns could be incorporated into the transcribed region of the minigene. The inclusion of mRNA stabilization sequences can also be considered for increasing minigene expression. It has recently been proposed that immunostimulatory sequences (ISSs or CpGs) play a role in the immunogenicity of DNA′ vaccines. These sequences could be included in the vector, outside the minigene coding sequence, if found to enhance immunogenicity.

[0253] In some embodiments, a bicistronic expression vector, to allow production of the minigene-encoded epitopes and a second protein included to enhance or decrease immunogenicity can be used.

[0254] DNA vaccines or immunogenic compositions as herein described can be enhanced by co-delivering cytokines that promote cell-mediated immune responses, such as IL-2, IL-12, IL-18, GM-CSF and IFNγ. CXC chemokines such as IL-8, and CC chemokines such as macrophage inflammatory protein (MIP)-1α, MIP-3α, MIP-3β, and RANTES, may increase the potency of the immune response. DNA vaccine immunogenicity can also be enhanced by co-delivering plasmid-encoded cytokine-inducing molecules (e.g. LeIF), co-stimulatory and adhesion molecules, e.g. B7-1 (CD80) and/or B7-2 (CD86). Helper (HTL) epitopes could be joined to intracellular targeting signals and expressed separately from the CTL epitopes. This would allow direction of the HTL epitopes to a cell compartment different than the CTL epitopes. If required, this could facilitate more efficient entry of HTL epitopes into the MHC class II pathway, thereby improving CTL induction. In contrast to CTL induction, specifically decreasing the immune response by co-expression of immunosuppressive molecules (e.g. TGF-β) may be beneficial in certain diseases.

[0255] Once an expression vector is selected, the minigene is cloned into the polylinker region downstream of the promoter. This plasmid is transformed into an appropriate E. coli strain, and DNA is prepared using standard techniques. The orientation and DNA sequence of the minigene, as well as all other elements included in the vector, are confirmed using restriction mapping and DNA sequence analysis. Bacterial cells harboring the correct plasmid can be stored as a master cell bank and a working cell bank.

[0256] Purified plasmid DNA can be prepared for injection using a variety of formulations. The simplest of these is reconstitution of lyophilized DNA in sterile phosphate-buffer saline (PBS). A variety of methods have been described, and new techniques may become available. As noted above, nucleic acids are conveniently formulated with cationic lipids. In addition, glycolipids, fusogenic liposomes, peptides and compounds referred to collectively as protective, interactive, non-condensing (PINC) could also be complexed to purified plasmid DNA to influence variables such as stability, intramuscular dispersion, or trafficking to specific organs or cell types.

[0257] Vaccines or immunogenic compositions comprising peptides may be administered in combination with vaccines or immunogenic compositions comprising polynucleotide encoding the peptides. For example, administration of peptide vaccine and DNA vaccine may be alternated in a prime-boost protocol. For example, priming with a peptide immunogenic composition and boosting with a DNA immunogenic composition is contemplated, as is priming with a DNA immunogenic composition and boosting with a peptide immunogenic composition.

[0258] The present disclosure also encompasses a method for producing a vaccine composition comprising the steps of:
[0259] a) Optionally, identifying at least one neoantigenic peptide according to the method as previously described;
[0260] b) producing said at least one neoantigenic peptide, at least one polypeptide encoding neoantigenic peptide(s), or at least a vector comprising said polypeptide(s) as described herein; and
[0261] c) optionally adding physiologically acceptable buffer, excipient and/or adjuvant and producing a vaccine with said at least one neoantigenic peptide, polypeptide or vector.

[0262] Another aspect of the present disclosure, is a method for producing a DC vaccine, wherein said DCs present at least one neoantigenic peptide as herein disclosed.

### Antibodies TCRs, CARs and Derivatives Thereof

[0263] The present disclosure also relates to an antibody or an antigen-binding fragment thereof that specifically binds a neoantigenic peptide as herein defined.

[0264] In some embodiments, the neoantigenic peptide is in association with an MHC or HLA molecule.

[0265] Typically, said antibody, or antigen-binding fragment thereof binds a neoantigenic peptide as herein defined, alone or optionally in association with an MHC or HLA molecule (i.e., peptide MHC complex) with a dissociation constant (K_{d}) of about 2×10⁻⁷M or less. In certain embodiments, the K_{d} is about 2×10⁻⁷ M or less, about 1×10⁻⁷ M or less, about 9×10⁻⁸ M or less, about 1×10⁻⁸ M or less, about 9×10⁻⁹ M or less, about 5×10⁻⁹ M or less, about 4×10″ 9 M or less, about 3×10⁻⁹ or less, about 2×10⁻⁹ M or less, or about 1×10⁻⁹ M or less, or about 1×10⁻¹⁰ M or less, or about 1×10⁻¹² M or less. In certain non-limiting embodiments, the K_{d} is from about 1.5×10⁻⁶ M to about 2.7×10⁻¹² M.

[0266] The present disclosure thus includes antibodies targeting MHC-restricted peptides and in particular targeting neoantigenic peptides as herein defined in association with at an MHC (or HLA) molecule (peptide MHC complex) or TCR-like antibodies (see notably for detailed description and method of production Høydahl, Lene Støkken et al. “Targeting the MHC Ligandome by Use of TCR-Like Antibodies.” Antibodies (Basel, Switzerland) vol. 8, 2 32. 9 May. 2019, doi: 10.3390/antib8020032; He, Qinghua et al. “TCR-like antibodies in cancer immunotherapy.” Journal of hematology & oncology vol. 12, 1 99. 14 Sep. 2019, doi: 10.1186/s13045-019-0788-4; Trenevska I, Li D, Banham A H. Therapeutic Antibodies against Intracellular Tumor Antigens. Front Immunol. 2017 Aug. 18; 8:1001. doi: 10.3389/fimmu.2017.01001. PMID: 28868054; PMCID: PMC5563323; or. Chang A Y, Gejman R S, Brea E J, Oh C Y, Mathias M D, Pankov D, Casey E, Dao T, Scheinberg D A. Opportunities and challenges for TCR mimic antibodies in cancer therapy. Expert Opin Biol Ther. 2016 August; 16 (8): 979-87. doi: 10.1080/14712598.2016.1176138. Epub 2016 Apr. 27. PMID: 27094818; PMCID: PMC4936943).

[0267] In some embodiments, TCR-like antibodies can also be conjugated with cytotoxic organic compounds, such as antibody-drug conjugates (ADCs), radionuclides, and protein toxins, to mediate the specific killing of tumor cells (Dao T, et al. Therapeutic bispecific T-cell engager antibody targeting the intracellular oncoprotein WT1. Nat Biotechnol. 2015; 33 (10): 1079-1086). Furthermore, immunomodulators or secondary antibodies can be conjugated with the TCR-like antibodies to mediate specific immune responses around the tumor site, as in bi-specific T cell engagers (BiTE) (Trenevska I, Li D, Banham A H. Therapeutic antibodies against intracellular tumor antigens. Front Immunol. 2017; 8:1001).

[0268] To promote the infiltration and recognition of tumor cells by lymphocytes T (LT), another strategy consists in using antibodies capable of recognizing more than one antigenic target simultaneously and more particularly two antigenic targets simultaneously. There are many formats of bispecific antibodies. BiTE (bi-specific T-cell engager) are the first to have been developed. These are proteins of fusion consisting of two scFvs (variable domains heavy VH and light VL chains) from two antibodies linked by a binding peptide: one recognizes the LT marker (CD3+) and the other a tumor antigen. The goal is to favor recruitment and activation of LTs in contact with tumor, thus leading to cell lysis tumor (See for review Patrick A. Baeuerle and Carsten Reinhardt; Bispecific T-Cell Engaging Antibodies for Cancer Therapy; Cancer Res 2009; 69: (12). Jun. 15, 2009; and Galaine et al., Innovations & Thérapeutiques en Oncologie, vol. 3-n°3-7, mai-août 2017).

[0269] In a particular embodiment, said antibody is thus a bi-specific T-cell engager (BiTE), typically derived from a TCR-like antibody that specifically binds a tumor neoantigenic peptide as herein defined, optionally in association with a MHC or an HLA molecule and which further targets at least an immune cell antigen. Typically, the immune cell is a T cell, a NK cell or a dendritic cell. In this context, the targeted immune cell antigen may be for example CD3, CD16, CD30 or a TCR.

[0270] The term “antibody” herein is used in the broadest sense and includes polyclonal and monoclonal antibodies, including intact antibodies and functional (antigen-binding) antibody fragments, including fragment antigen binding (Fab) fragments, F(ab′)2 fragments, Fab′ fragments, Fv fragments, recombinant IgG (rlgG) fragments, variable heavy chain (VH) regions capable of specifically binding the antigen, single chain antibody fragments, including single chain variable fragments (scFv), and single domain antibodies (e.g., VHH antibodies, sdAb, sdFv, nanobody) fragments. The term encompasses genetically engineered and/or otherwise variants modified forms of immunoglobulins, such as intrabodies, peptibodies, chimeric antibodies, fully human antibodies, humanized antibodies, and heteroconjugate antibodies, multispecific, e.g., bispecific, antibodies, diabodies, triabodies, and tetrabodies, tandem di-scFv, tandem tri-scFv. Unless otherwise stated, the term “antibody” should be understood to encompass functional antibody and fragments thereof. The term also encompasses intact or full-length antibodies, including antibodies of any class or sub-class, including IgG and sub-classes thereof, IgG1, IgG2, IgG3, IgG4, IgM, IgE, IgA, and IgD. In some embodiments, the antibody comprises a light chain variable domain and a heavy chain variable domain, e.g. in an scFv format.

[0271] Antibodies include variant polypeptide species that have one or more amino acid substitutions, insertions, or deletions in the native amino acid sequence, provided that the antibody retains or substantially retains its specific binding function. Conservative substitutions of amino acids are well known and described above.

[0272] The present disclosure further includes a method of producing an antibody, or antigen-binding fragment thereof, comprising a step of selecting antibodies that bind to a tumor neoantigen peptide as herein defined, optionally in association with an MHC or HLA molecule, with with a dissociation constant (K_{d}) of about 2×10⁻⁷ M or less. In certain embodiments, the K_{d} is about 2×10⁻⁷ M or less, about 1×10⁻⁷ M or less, about 9×10⁻⁸ M or less, about 1×10⁻⁸ M or less, about 9×10⁻⁹ M or less, about 5×10⁻⁹ M or less, about 4×10⁻⁹ M or less, about 3×10⁻⁹ or less, about 2×10⁻⁹ M or less, or about 1×10⁻⁹ M or less, or about 1×10⁻¹⁰ M or less, or about 1×10⁻¹² M or less.

[0273] In certain embodiments, the antibody is of murine, human or camelid (e.g., lama) origin.

[0274] In some embodiments, the antibodies are selected from a library of human antibody sequences. In some embodiments, the antibodies are generated by immunizing an animal with a polypeptide comprising the neoantigenic peptide, optionally in association with an MHC or HLA molecule, followed by the selection step.

[0275] Antibodies including chimeric, humanized or human antibodies can be further affinity matured and selected as described above. Humanized antibodies contain rodent-sequence derived CDR regions; typically the rodent CDRs are engrafted into a human framework, and some of the human framework residues may be back-mutated to the original rodent framework residue to preserve affinity, and/or one or a few of the CDR residues may be mutated to increase affinity. Fully human antibodies have no murine sequence, and are typically produced via phage display technologies of human antibody libraries, or immunization of transgenic mice whose native immunoglobin loci have been replaced with segments of human immunoglobulin loci.

[0276] Antibodies produced by said method, as well as immune cells expressing such antibodies or fragments thereof are also encompassed by the present disclosure.

[0277] The present disclosure also encompasses pharmaceutical compositions comprising one or more antibodies as herein disclosed alone or in combination with at least one other agent, such as a stabilizing compound, which may be administered in any sterile, biocompatible pharmaceutical carrier and optionally formulated with formulated with sterile pharmaceutically acceptable buffer(s), diluent(s), and/or excipient(s). Pharmaceutically acceptable carriers typically enhance or stabilize the composition, and/or can be used to facilitate preparation of the composition. Pharmaceutically acceptable carriers include solvents, dispersion media, coatings, antibacterial and antifungal agents, isotonic and absorption delaying agents, and the like that are physiologically compatible and in some embodiments pharmaceutically inert.

[0278] Administration of a pharmaceutical composition comprising antibodies as herein disclosed can be accomplished orally or parenterally. Methods of parenteral delivery include topical, intra-arterial (directly to the tumor), intramuscular, spinal, subcutaneous, intramedullary, intrathecal, intraventricular, intravenous, intraperitoneal, or intranasal administration.

[0279] Thus, in addition to the active ingredients, these pharmaceutical compositions may contain suitable pharmaceutically acceptable carriers comprising excipients and auxiliaries which facilitate processing of the active compounds into preparations which can be used pharmaceutically. Further details on techniques for formulation and administration may be found in the latest edition of Remington's Pharmaceutical Sciences (Ed. Maack Publishing Co, Easton, Pa.).

[0280] Depending on the route of administration, the active compound, i.e., antibody, bispecific and multispecific molecule, may be coated in a material to protect the compound from the action of acids and other natural conditions that may inactivate the compound.

[0281] The composition is typically sterile and preferably fluid. Proper fluidity can be maintained, for example, by use of coating such as lecithin, by maintenance of required particle size in the case of dispersion and by use of surfactants. In many cases, it is preferable to include isotonic agents, for example, sugars, polyalcohols such as mannitol or sorbitol, and sodium chloride in the composition. Long-term absorption of the injectable compositions can be brought about by including in the composition an agent which delays absorption, for example, aluminum monostearate or gelatin.

[0282] Pharmaceutical compositions for oral administration can be formulated using pharmaceutically acceptable carriers well known in the art in dosages suitable for oral administration. Such carriers enable the pharmaceutical compositions to be formulated as tablets, pills, dragees, capsules, liquids, gels, syrups, slurries, suspensions and the like, for ingestion by the patient.

[0283] Pharmaceutical preparations for oral use can be obtained through combination of active compounds with solid excipient, optionally grinding a resulting mixture, and processing the mixture of granules, after adding suitable auxilliaries, if desired, to obtain tablets or dragee cores. Suitable excipients are carbohydrate or protein fillers such as sugars, including lactose, sucrose, mannitol, or sorbitol; starch from corn, wheat, rice, potato, or other plants; cellulose such as methyl, cellulose, hydroxypropylmethylcellulose, or sodium carboxymethylcellulose; and gums including arabic and tragacanth; and proteins such as gelatin and collagen. If desired, disintegrating or solubilizing agents may be added, such as the cross-linked polyvinyl pyrrolidone, agar, alginic acid, or a salt thereof, such as sodium alginate.

[0284] Dragee cores are provided with suitable coatings such as concentrated sugar solutions, which may also contain gum arabic, talc, polyvinylpyrrolidone, carbopol gel, polyethylene glycol and/or titanium dioxide, lacquer solutions, and suitable organic solvents or solvent mixtures. Dyestuffs or pigments may be added to the tablets or dragee coatings for product identification or to characterize the quantity of active compound, ie. dosage.

[0285] Pharmaceutical preparations that can be used orally include push-fit capsules made of gelatin, as well as soft, sealed capsules made of gelatin and a coating such as glycerol or sorbitol. Push-fit capsules can contain active ingredients mixed with a filler or binders such as lactose or starches, lubricants such as talc or magnesium stearate, and optionally, stabilizers. In soft capsules, the active compounds may be dissolved or suspended in suitable liquids, such as fatty oils, liquid paraffin, or liquid polyethylene glycol with or without stabilizers.

[0286] Pharmaceutical formulations for parenteral administration include aqueous solutions of active compounds. For injection, the pharmaceutical compositions of the invention may be formulated in aqueous solutions, preferably in physiologically compatible buffers such as Hank's solution, Ringer's solution, or physiologically buffered saline. Aqueous injection suspensions may contain substances that increase viscosity of the suspension, such as sodium carboxymethyl cellulose, sorbitol, or dextran. Additionally, suspensions of the active compounds may be prepared as appropriate oily injection suspensions. Suitable lipophilic solvents or vehicles include fatty oils such as sesame oil, or synthetic fatty acid esters, such as ethyl oleate or triglycerides, or liposomes. Optionally, the suspension may also contain suitable stabilizers or agents which increase the solubility of the compounds to allow for the preparation of highly concentrated solutions.

[0287] For topical or nasal administration, penetrants appropriate to the particular barrier to be permeated are used in the formulation. Such penetrants are generally known in the art.

[0288] Pharmaceutical compositions of the disclosure can be prepared in accordance with methods well known and routinely practiced in the art. See. e.g., Remington: The Science and Practice of Pharmacy, Mack Publishing Co., 20th ed., 2000; and Sustained and Controlled Release Drug Delivery Systems, J R. Robinson, ed., Marcel Dekker, Inc., New York, 1978. Pharmaceutical compositions are preferably manufactured under GMP conditions.

[0289] The present disclosure also encompasses a recombinant T cell receptor (TCR) that targets a neoantigenic peptide as herein defined in association with an MHC or HLA molecule.

[0290] The present disclosure further includes a method of producing a TCR, or an antigen-binding fragment thereof, comprising a step of selecting TCRs that bind to a tumor neoantigen peptide as herein defined, optionally in association with an MHC or HLA molecule, with a dissociation constant (K_{d}) of about 2×10⁻⁷ M or less. In certain embodiments, the K_{d} is about 2×10⁻⁷ M or less, about 1×10⁻⁷ M or less, about 9×10⁻⁸ M or less, about 1×10⁻⁸ M or less, about 9×10⁻⁹ M or less, about 5×10⁻⁹ M or less, about 4×10⁻⁹ M or less, about 3×10⁻⁹ or less, about 2×10⁻⁹ M or less, or about 1×10⁻⁹ M or less, or about 1×10⁻¹⁰ M or less, or about 1×10⁻¹² M or less.

[0291] Nucleic acid encoding the TCR can be obtained from a variety of sources, such as by polymerase chain reaction (PCR) amplification of naturally occurring TCR DNA sequences, followed by expression of antibody variable regions, followed by the selecting step described above. In some embodiments, the TCR is obtained from T-cells isolated from a patient, or from cultured T-cell hybridomas. In some embodiments, the TCR clone for a target antigen has been generated in transgenic mice engineered with human immune system genes (e.g., the human leukocyte antigen system, or HLA). See, e.g., tumor antigens (see, e.g., Parkhurst et al. (2009) Clin Cancer Res. 15:169-180 and Cohen et al. (2005) J Immunol. 175:5799-5808. In some embodiments, phage display is used to isolate TCRs against a target antigen (see, e.g., Varela-Rohena et al. (2008) Nat Med. 14:1390-1395 and Li (2005) Nat Biotechnol. 23:349-354.

[0292] A “T cell receptor” or “TCR” refers to a molecule that contains a variable α and β chains (also known as TCRa and TCRb, respectively) or a variable γ and δ chains (also known as TCRg and TCRd, respectively) and that is capable of specifically binding to an antigen peptide bound to a MHC receptor. In some embodiments, the TCR is in the αβ form. Typically, TCRs that exist in αβ and γδ forms are generally structurally similar, but T cells expressing them may have distinct anatomical locations or functions. A TCR can be found on the surface of a cell or in soluble form. Generally, a TCR is found on the surface of T cells (or T lymphocytes) where it is generally responsible for recognizing antigens bound to major histocompatibility complex (MHC) molecules through its extracellular binding domain. In some embodiments, a TCR also can contain a constant domain, a transmembrane domain and/or a short cytoplasmic tail (see, e.g., Janeway et ah, Immunobiology: The Immune System in Health and Disease, 3 rd Ed., Current Biology Publications, p. 4:33, 1997). For example, in some aspects, each chain of the TCR can possess one N-terminal immunoglobulin variable domain, one immunoglobulin constant domain, a transmembrane region, and a short cytoplasmic tail at the C-terminal end. In some embodiments, a TCR is associated with invariant proteins of the CD3 complex involved in mediating signal transduction. Unless otherwise stated, the term “TCR” should be understood to encompass functional TCR fragments thereof. The term also encompasses intact or full-length TCRs, including TCRs in the αβ form or γδ form.

[0293] Thus, for purposes herein, reference to a TCR includes any TCR or functional fragment, such as an antigen-binding portion of a TCR that binds to a specific antigenic peptide bound in an MHC molecule, i.e. MHC-peptide complex. An “antigen-binding portion” or antigen-binding fragment” of a TCR, which can be used interchangeably, refers to a molecule that contains a portion of the structural domains of a TCR, but that binds the antigen (e.g. MHC-peptide complex) to which the full TCR binds. In some cases, an antigen-binding portion contains the variable domains of a TCR, such as variable a chain and variable β chain of a TCR, sufficient to form a binding site for binding to a specific MHC-peptide complex, such as generally where each chain contains three complementarity determining regions.

[0294] In some embodiments, the variable domains of the TCR chains associate to form loops, or complementarity determining regions (CDRs) analogous to immunoglobulins, which confer antigen recognition and determine peptide specificity by forming the binding site of the TCR molecule and determine peptide specificity. Typically, like immunoglobulins, the CDRs are separated by framework regions (FRs) {see, e.g., Jores et al., Pwc. Nat'l Acad. Sci. U.S.A. 87:9138, 1990; Chothia et al., EMBO J. 7:3745, 1988; see also Lefranc et al., Dev. Comp. Immunol. 27:55, 2003). In some embodiments, CDR3 is the main CDR responsible for recognizing processed antigen, although CDR1 of the alpha chain has also been shown to interact with the N-terminal part of the antigenic peptide, whereas CDR1 of the beta chain interacts with the C-terminal part of the peptide. CDR2 is thought to recognize the MHC molecule. In some embodiments, the variable region of the β-chain can contain a further hypervariability (HV4) region.

[0295] In some embodiments, the TCR chains contain a constant domain. For example, like immunoglobulins, the extracellular portion of TCR chains {e.g., α-chain, β-chain) can contain two immunoglobulin domains, a variable domain {e.g., Va or Vp; typically amino acids 1 to 116 based on Kabat numbering Kabat et al., “Sequences of Proteins of Immunological Interest, US Dept. Health and Human Services, Public Health Service National Institutes of Health, 1991, 5th ed.) at the N-terminus, and one constant domain {e.g., α-chain constant domain or Ca, typically amino acids 117 to 259 based on Kabat, β-chain constant domain or Cp, typically amino acids 117 to 295 based on Kabat) adjacent to the cell membrane. For example, in some cases, the extracellular portion of the TCR formed by the two chains contains two membrane-proximal constant domains, and two membrane-distal variable domains containing CDRs. The constant domain of the TCR domain contains short connecting sequences in which a cysteine residue forms a disulfide bond, making a link between the two chains. In some embodiments, a TCR may have an additional cysteine residue in each of the α and β chains such that the TCR contains two disulfide bonds in the constant domains.

[0296] In some embodiments, the TCR chains can contain a transmembrane domain. In some embodiments, the transmembrane domain is positively charged. In some cases, the TCR chains contain a cytoplasmic tail. In some cases, the structure allows the TCR to associate with other molecules like CD3. For example, a TCR containing constant domains with a transmembrane region can anchor the protein in the cell membrane and associate with invariant subunits of the CD3 signaling apparatus or complex.

[0297] Generally, CD3 is a multi-protein complex that can possess three distinct chains (γ, δ, and ε) in mammals and the ζ-chain. For example, in mammals the complex can contain a CD3y chain, a CD35 chain, two CD3s chains, and a homodimer of CD35 chains. The CD3y, CD35, and CD3s chains are highly related cell surface proteins of the immunoglobulin superfamily containing a single immunoglobulin domain. The transmembrane regions of the CD3y, CD35, and CD3s chains are negatively charged, which is a characteristic that allows these chains to associate with the positively charged T cell receptor chains. The intracellular tails of the CD3y, CD35, and CD3s chains each contain a single conserved motif known as an immunoreceptor tyrosine-based activation motif or ITAM, whereas each CD35 chain has three. Generally, ITAMs are involved in the signaling capacity of the TCR complex. These accessory molecules have negatively charged transmembrane regions and play a role in propagating the signal from the TCR into the cell. The CD3-and-chains, together with the TCR, form what is known as the T cell receptor complex.

[0298] In some embodiments, the TCR may be a heterodimer of two chains α and β (or optionally γ and δ) or it may be a single chain TCR construct. In some embodiments, the TCR is a heterodimer containing two separate chains (α and β chains or γ and δ chains) that are linked, such as by a disulfide bond or disulfide bonds.

[0299] While T-cell receptors (TCRs) are transmembrane proteins and do not naturally exist in soluble form, antibodies can be secreted as well as membrane bound. Importantly, TCRs have the advantage over antibodies that they in principle can recognize peptides generated from all degraded cellular proteins, both intra- and extracellular, when presented in the context of MHC molecules. Thus TCRs have important therapeutic potential.

[0300] The present disclosure also relates to soluble T-cell receptors (sTCRs) that contain the antigen recognition part directed against a tumor neoantigenic peptide as herein disclosed (see notably Walseng E, Wälchli S, Fallang L-E, Yang W, Vefferstad A, Areffard A, et al. (2015) Soluble T-Cell Receptors Produced in Human Cells for Targeted Delivery. PLOS ONE 10 (4): e0119559). In a particular embodiment, the soluble TCR can be fused to an antibody fragment directed to a T cell antigen, optionally wherein the targeted antigen is CD3 or CD16 (see for example Boudousquie, Caroline et al. “Polyfunctional response by ImmTAC (IMCgp100) redirected CD8+ and CD4+ T cells.” Immunology vol. 152, 3 (2017): 425-438. doi: 10.1111/imm.12779).

[0301] In certain embodiments, the present disclosure encompasses Recombinant HLA-independent (or non-HLA restricted) T cell receptors (referred to as “HI-TCRs”) that bind to a neoantigenic peptide as herein defined in an HLA-independent manner. “HI-TCRs” as herein intended and which are well-suited to the present invention are described in International Application No. WO 2019/157454. Thus, typically HI-TCRs according to the present disclosure comprise an antigen binding chain that comprises: (a) an antigen-binding domain (as previously defined) that binds to an antigen in an HLA-independent manner, for example, an antigen-binding fragment of an immunoglobulin variable region; and (b) a constant domain that is capable of associating with (and consequently activating) a CD32 polypeptide. Because typically TCRs bind antigen in a HLA-dependent manner, the antigen-binding domain that binds in an HLA-independent manner is heterologous. Preferably, the antigen-binding domain or fragment thereof comprises: (i) an antigen-binding domain comprising or consisting of an heavy chain variable region (VH) of an antibody and/or (ii) a light chain variable region (VL) of an antibody. The constant domain of the TCR is, for example, a native or modified TRAC polypeptide, or a native or modified TRBC polypeptide. The constant domain of the TCR is, for example, a native TCR constant domain (alpha or beta) or fragment thereof. Unlike chimeric antigen receptors, which typically themselves comprise an intracellular signaling domain, the HI-TCR does not directly produce an activating signal; instead, the antigen-binding chain associates with and consequently activates a CD3 polypeptide. The immune cells comprising the recombinant TCR provide superior activity when the antigen has a low density on the cell surface of less than about 10,000 molecules per cell.

[0302] The CD3ζ polypeptide is, for example, a native CD3ζ polypeptide or a modified CD3ζ polypeptide. The CD3ζ polypeptide is optionally fused to an intracellular domain of a co-stimulatory molecule or a fragment thereof. Alternatively, the antigen binding domain optionally comprises a co-stimulatory region, e.g. intracellular domain, that is capable of stimulating an immunoresponsive cell upon the binding of the antigen binding chain to the antigen. Example co-stimulatory molecules include CD28, 4-1BB, OX40, ICOS, DAP-10, fragments thereof, or a combination thereof.

[0303] In some embodiments, the recombinant HI-TCR is expressed by a transgene that is integrated at an endogenous gene locus of the immunoresponsive cell, for example, a CD3δ locus, a CD3ε locus, a CD247 locus, a B2M locus, a TRAC locus, a TRBC locus, a TRDC locus and/or a TRGC locus. In most embodiments, expression of the recombinant HI-TCR is driven from the endogenous TRAC or TRBC gene locus. In some embodiments, the transgene encoding a portion of the recombinant HI-TCR is integrated into the endogenous TRAC and/or TRBC locus in a manner that disrupts or abolishes the endogenous expression of a TCR comprising a native TCR α chain and/or a native TCR β chain. This disruption prevents or eliminates mispairing between the recombinant TCR and a native TCR α chain and/or a native TCR β chain in the immunoresponsive cell. The endogenous gene locus may also comprise a modified transcription terminator region, for example, a TK transcription terminator, a GCSF transcription terminator, a TCRA transcription terminator, an HBB transcription terminator, a bovine growth hormone transcription terminator, an SV40 transcription terminator, and a P2A element.

[0304] In some embodiments of the present disclosure, the recombinant TCR and typically the HI-TCR comprises an extracellular antigen-binding domain which is capable of dimerizing with a second extracellular antigen-binding domain. Typically, the second extracellular antigen-binding domain binds a tumor antigen, preferably wherein the tumor antigen is selected from pHER95, CD19, MUC16, MUC1, CAIX, CEA, CD8, CD7, CD10, CD20, CD22, CD30, CD70, CLL1, CD33, CD34, CD38, CD41, CD44, CD49f, CD56, CD74, CD133, CD138, EGP-2, EGP-40, EpCAM, Erb-B2, Erb-B3, Erb-B4, FBP, Fetal acetylcholine receptor, folate receptor-a, GD2, GD3, HER-2, hTERT, IL-13R-a2, κ-light chain, KDR, LeY, L1 cell adhesion molecule, MAGE-A1, Mesothelin, MAGEA3, p53, MART1, GP100, Proteinase3 (PRI), Tyrosinase, Survivin, hTERT, EphA2, NKG2D ligands, NY-ESO-1, oncofetal antigen (h5T4), PSCA, PSMA, ROR1, TAG-72, VEGF-R2, WT-1, BCMA, CD123, CD44V6, NKCS1, EGF1R, EGFR-VIII, CD99, CD70, ADGRE2, CCR1, LILRB2, LILRB4, PRAME, and ERBB.

[0305] The present disclosure also encompasses a chimeric antigen receptor (CAR) which is directed against a tumor neoantigenic peptide as herein disclosed. CARs are fusion proteins comprising an antigen-binding domain, typically derived from an antibody, linked to the signalling domain of the TCR complex. CARs can be used to direct immune cells, such as T-cells or NK T cells, against a tumor neoantigenic peptide as previously defined with a suitable antigen-binding domain selected.

[0306] The antigen-binding domain of a CAR is typically based on a scFv (single chain variable fragment) derived from an antibody. In addition to an N-terminal, extracellular antibody-binding domain, CARs typically may comprise a hinge domain, which functions as a spacer to extend the antigen-binding domain away from the plasma membrane of the immune effector cell on which it is expressed, a transmembrane (TM) domain, an intracellular signalling domain (e.g. the signalling domain from the zeta chain of the CD3 molecule (CD35) of the TCR complex, or an equivalent) and optionally one or more co-stimulatory domains which may assist in signalling or functionality of the cell expressing the CAR. Signalling domains from co-stimulatory molecules including CD28, OX-40 (CD134), and 4-1BB (CD137) can be added alone (second generation) or in combination (third generation) to enhance survival and increase proliferation of CAR modified T cells. Potential co-stimulatory domains also include ICOS-1, CD27, GITR, and DAP10.

[0307] Thus, the CAR may include
[0308] (1) In its extracellular portion, one or more antigen binding molecules, such as one or more antigen-binding fragment, domain, or portion of an antibody, or one or more antibody variable domains, and/or antibody molecules.
[0309] (2) In its transmembrane portion, a transmembrane domain derived from human T cell receptor-alpha or -beta chain, a CD3 zeta chain, CD28, CD3-epsilon, CD45, CD4, CD5, CD8, CD9, CD16, CD22, CD33, CD37, CD64, CD80, CD86, CD134, CD137, ICOS, CD154, or a GITR. In some embodiments, the transmembrane domain is derived from CD28, CD8 or CD3-zeta.
[0310] (3) One or more co-stimulatory domains, such as co-stimulatory domains derived from human CD28, 4-1BB (CD137), ICOS-1, CD27, OX 40 (CD137), DAP10, and GITR (AITR). In some embodiments, the CAR comprises co-stimulating domains of both CD28 and 4-1BB.
[0311] (4) In its intracellular signalling domain, an intracellular signalling domain comprising one or more ITAMs, for example, the intracellular signalling domain is CD3-zeta, or a variant thereof lacking one or two ITAMs (e.g. ITAM3 and ITAM2), or the intracellular signalling domain is derived from FcεRIγ.

[0312] The CAR can be designed to recognize tumor neoantigenic peptide alone or in association with an HLA or MHC molecule.

[0313] The moieties used to bind to antigen include three general categories, either single-chain antibody fragments (scFvs) derived from antibodies, Fab's selected from libraries, or natural ligands that engage their cognate receptor (for the first-generation CARs). Successful examples in each of these categories are notably reported in Sadelain M, Brentjens R, Riviere I. The basic principles of chimeric antigen receptor (CAR) design. Cancer discovery. 2013; 3 (4): 388-398 (see notably table 1) and are included in the present application.

[0314] Antibodies include chimeric, humanized or human antibodies, and can be further affinity matured and selected as described above. Chimeric or humanized scFv's derived from rodent immunoglobulins (e.g. mice, rat) are commonly used, as they are easily derived from well-characterized monoclonal antibodies. Humanized antibodies contain rodent-sequence derived CDR regions; typically, the rodent CDRs are engrafted into a human framework, and some of the human framework residues may be back-mutated to the original rodent framework residue to preserve affinity, and/or one or a few of the CDR residues may be mutated to increase affinity. Fully human antibodies have no murine sequences, and are typically produced via phage display technologies of human antibody libraries, or immunization of transgenic mice whose native immunoglobin loci have been replaced with segments of human immunoglobulin loci. Variants of the antibodies can be produced that have one or more amino acid substitutions, insertions, or deletions in the native amino acid sequence, wherein the antibody retains or substantially retains its specific binding function. Conservative substitutions of amino acids are well known and described above. Further variants may also be produced that have improved affinity for the antigen.

[0315] Typically, the CAR includes an antigen-binding domain as previously defined from an antibody molecule, such as a single-chain antibody fragment (scFv) derived from the variable heavy (VH) and variable light (VL) chains of a monoclonal antibody (mAb).

[0316] In some aspects, the antigen-binding, domain of the CAR is linked to one or more transmembrane and intracellular signaling domains. In some embodiments, the CAR includes a transmembrane domain fused to the extracellular domain of the CAR. In one embodiment, the transmembrane domain that is naturally associated with one of the domains in the CAR is used. In some instances, the transmembrane domain is selected or modified by amino acid substitution to avoid binding of such domains to the transmembrane domains of the same or different surface membrane proteins to minimize interactions with other members of the receptor complex.

[0317] The transmembrane domain in some embodiments is derived either from a natural or from a synthetic source. Where the source is natural, the domain can be derived from any membrane-bound or transmembrane protein. Transmembrane regions include those derived from (i.e. comprise at least the transmembrane region(s) of) the alpha, beta or zeta chain of the T-cell receptor, CD28, CD3 epsilon, CD45, CD4, CD5, CD8, CD9, CD16, CD22, CD33, CD37, CD64, CD80, CD86, CD 134, CD137, CD154, ICOS or a GITR). The transmembrane domain can also be synthetic. In some embodiments, the transmembrane domain is derived from CD28, CD8 or CD3-zeta.

[0318] In some embodiments, a short oligo- or polypeptide linker, for example, a linker of between 2 and 10 amino acids in length, is present and forms a linkage between the transmembrane domain and the cytoplasmic signaling domain of the CAR.

[0319] The CAR generally includes at least one intracellular signaling component or components. First generation CARs typically had the intracellular domain from the CD3-chain, which is the primary transmitter of signals from endogenous TCRs. Second generation CARs typically further comprise intracellular signaling domains from various costimulatory protein receptors (e.g., CD28, 41BB (CD28), ICOS) to the cytoplasmic tail of the CAR to provide additional signals to the T cell. Co-stimulatory domains include domains derived from human CD28, 4-1BB (CD137), ICOS-1, CD27, OX 40 (CD137), DAP10, and GITR (AITR). Combinations of two co-stimulatory domains are contemplated, e.g. CD28 and 4-1BB, or CD28 and OX40. Third generation CARs combine multiple signaling domains, such as CD3z-CD28-4-1BB or CD3z-CD28-OX40, to augment potency.

[0320] The intracellular signaling domain can be from an intracellular component of the TCR complex, such as a TCR CD3+chain that mediates T-cell activation and cytotoxicity, e.g., the CD3 zeta chain. Alternative intracellular signaling domains include FcεRIγ. The intracellular signaling domain may comprise a modified CD3 zeta polypeptide lacking one or two of its three immunoreceptor tyrosine-based activation motifs (ITAMs), wherein the ITAMs are ITAM1, ITAM2 and ITAM3 (numbered from the N-terminus to the C-terminus). The intracellular signaling region of CD3-zeta is residues 22-164 of SEQ ID NO: 4. ITAM1 is located around amino acid residues 61-89, ITAM2 around amino acid residues 100-128, and ITAM3 around residues 131-159. Thus, the modified CD3 zeta polypeptide may have any one of ITAM1, ITAM2, or ITAM3 inactivated. Alternatively, the modified CD3 zeta polypeptide may have any two ITAMs inactivated, e.g. ITAM2 and ITAM3, or ITAM1 and ITAM2. Preferably, ITAM3 is inactivated, e.g. deleted. More preferably, ITAM2 and ITAM3 are inactivated, e.g. deleted, leaving ITAM1. For example, one modified CD3 zeta polypeptide retains only ITAM1 and the remaining CD32 domain is deleted (residues 90-164). As another example, ITAM1 is substituted with the amino acid sequence of ITAM3, and the remaining CD32 domain is deleted (residues 90-164). See, for example, Bridgeman et al., Clin. Exp. Immunol. 175 (2): 258-67 (2014); Zhao et al., J. Immunol. 183 (9): 5563-74 (2009); Maus et al., WO 2018/132506; Sadelain et al., WO/2019/133969, Feucht et al., Nat Med. 25 (1): 82-88 (2019).

[0321] Thus, in some aspects, the antigen binding domain is linked to one or more cell signaling modules. In some embodiments, cell signaling modules include CD3 transmembrane domain, CD3 intracellular signaling domains, and/or other CD transmembrane domains. The CAR can also further include a portion of one or more additional molecules such as Fc receptor γ, CD8, CD4, CD25, or CD16.

[0322] In some embodiments, upon ligation of the CAR, the cytoplasmic domain or intracellular signaling domain of the CAR activates at least one of the normal effector functions or responses of the corresponding non-engineered immune cell (typically a T cell). For example, the CAR can induce a function of a T cell such as cytolytic activity or T-helper activity, secretion of cytokines or other factors.

[0323] In some embodiments, the intracellular signaling domain(s) include the cytoplasmic sequences of the T cell receptor (TCR), and in some aspects also those of co-receptors that in the natural context act in concert with such receptor to initiate signal transduction following antigen-specific receptor engagement, and/or a variant of such molecules, and/or any synthetic sequence that has the same functional capability.

[0324] T cell activation is in some aspects described as being mediated by two classes of cytoplasmic signaling sequences: those that initiate antigen-dependent primary activation through the TCR (primary cytoplasmic signaling sequences), and those that act in an antigen-independent manner to provide a secondary or co-stimulatory signal (secondary cytoplasmic signaling sequences). In some aspects, the CAR includes one or both of such signaling components.

[0325] In some aspects, the CAR includes a primary cytoplasmic signaling sequence that regulates primary activation of the TCR complex either in a stimulatory way, or in an inhibitory way. Primary cytoplasmic signaling sequences that act in a stimulatory manner may contain signaling motifs which are known as immunoreceptor tyrosine-based activation motifs or ITAMs. Examples of ITAM containing primary cytoplasmic signaling sequences include those derived from TCR zeta, FcR gamma, FcR beta, CD3 gamma, CD3 delta, CD3 epsilon, CDS, CD22, CD79a, CD79b, and CD66d. In some embodiments, cytoplasmic signaling molecule(s) in the CAR contain(s) a cytoplasmic signaling domain, portion thereof, or sequence derived from CD3 zeta

[0326] The CAR can also include a signaling domain and/or transmembrane portion of a costimulatory receptor, such as CD28, 4-1BB, OX40, DAP10, and ICOS. In some aspects, the same CAR includes both the activating and costimulatory components; alternatively, the activating domain is provided by one CAR whereas the costimulatory component is provided by another CAR recognizing another antigen.

[0327] Thus, in some embodiments, the CAR may include:
[0328] (1) In its extracellular portion, one or more antigen binding molecules, such as one or more antigen-binding fragment, domain, or portion of an antibody, or one or more antibody variable domains (heavy chain and/or light chain), and/or antibody molecules.
[0329] (2) In its transmembrane portion, a transmembrane domain derived from human T cell receptor-alpha or -beta chain, a CD3 zeta chain, CD28, CD3-epsilon, CD45, CD4, CD5, CD8, CD9, CD16, CD22, CD33, CD37, CD64, CD80, CD86, CD134, CD137, ICOS, CD154, or a GITR. In some embodiments, the transmembrane domain is derived from CD28, CD8 or CD3-zeta.
[0330] (3) One or more co-stimulatory domains, such as co-stimulatory domains derived from human CD28, 4-1BB (CD137), ICOS-1, CD27, OX 40 (CD137), DAP10, and GITR (AITR). In some embodiments, the CAR comprises co-stimulating domains of both CD28 and 4-1BB.
[0331] (4) In its intracellular signalling domain, one or more intracellular signalling domain(s) comprising one or more ITAMs, for example: the intracellular signalling domain or a portion thereof from CD3-zeta, or a variant thereof lacking one or two ITAMs (e.g.: ITAM3 and/or ITAM2 see also as detailed above and bibliographic references), FcR gamma, FcR beta, CD3 gamma, CD3 delta, CD3 epsilon, CDS, CD22, CD79a, CD79b, and/or CD66d, notably selected from the intracellular domain of CD3-zeta, or a variant thereof lacking one or two ITAMs (e.g.: ITAM3 and ITAM2), or the intracellular signalling of FcεRIγ or a variant thereof.

[0332] The CAR or other antigen-specific receptor can also be an inhibitory CAR (e.g. iCAR) and includes intracellular components that dampen or suppress a response, such as an immune response. Examples of such intracellular signaling components are those found on immune checkpoint molecules, including PD-1, CTLA4, LAG3, BTLA, OX2R, TIM-3, TIGIT, LAIR-1, PGE2 receptors, EP2/4 Adenosine receptors including A2AR. In some aspects, the engineered cell includes an inhibitory CAR including a signaling domain of or derived from such an inhibitory molecule, such that it serves to dampen the response of the cell. Such CARs are used, for example, to reduce the likelihood of off-target effects when the antigen recognized by the activating receptor, e.g, CAR, is also expressed, or may also be expressed, on the surface of normal cells.

[0333] In some embodiments, the CAR is a MHC-restricted antibody-based chimeric antigen receptor or TCR-like CAR. Typically, such CAR comprises an antibody or a fragment thereof targeting a MHC restricted neoantigenic peptide as previously defined. A non-limiting example of a CAR MHC-restricted antibody-based CAR which general structure is typically well-suited according to the present disclosure can be found in Maus MV, Plotkin J, Jakka G, et al. An MHC-restricted antibody-based chimeric antigen receptor requires TCR-like affinity to maintain antigen specificity. Mol Ther Oncolytics. 2017; 3:1-9.

[0334] Exemplary antigen receptors, including CARs and recombinant TCRs, as well as methods for engineering and introducing the receptors into cells, include those described, for example, in international patent application publication numbers WO200014257, WO2013126726, WO2012/129514, WO2014031687, WO2013/166321, WO2013/071154, WO2013/123061, WO2019157454, U.S. patent application publication numbers US2002131960, US2013287748, US20130149337, U.S. Pat. Nos. 6,451,995, 7,446,190, 8,252,592, 8,339,645, 8,398,282, 7,446,179, 6,410,319, 7,070,995, 7,265,209, 7,354,762, 7,446,191, 8,324,353, and 8,479,118, and European patent application number EP2537416, and/or those described by Sadelain et al., Cancer Discov. 2013 April; 3 (4): 388-398; Davila et al. (2013) PLOS ONE 8 (4): e61338; Turtle et al., Curr. Opin. Immunol., 2012 October; 24 (5): 633-39; Wu et al., Cancer, 2012 Mar. 18 (2): 160-75. In some aspects, the genetically engineered antigen receptors include a CAR as described in U.S. Pat. No. 7,446,190, and those described in International Patent Application Publication No.: WO/2014055668 A1.

[0335] The present disclosure also encompasses polynucleotides encoding antibodies, antigen-binding fragments or derivatives thereof, TCRs and CARs as previously described as well as vector comprising said polynucleotide(s).

### Immune Cells

[0336] The present disclosure further encompasses an immune cell, notably an isolated immune cell which target one or more tumor neoantigenic peptides as previously described. In more specific embodiments the present disclosure encompasses an immune cell, notably an isolated immune cell expressing a recombinant CAR or TCR as previously defined.

[0337] As used herein, the term “immune cell” includes cells that are of hematopoietic origin and that play a role in the immune response. Immune cells include lymphocytes, such as B cells and T cells, natural killer cells, myeloid cells, such as monocytes, macrophages, eosinophils, mast cells, basophils, and granulocytes.

[0338] As used herein, the term “T cell” includes cells bearing a T cell receptor (TCR), in particular TCR directed against a tumor neoantigenic peptide as herein disclosed. T-cells according to the present disclosure can be selected from the group consisting of inflammatory T-lymphocytes, cytotoxic T-lymphocytes, regulatory T-lymphocytes, Mucosal-Associated Invariant T cells (MAIT), Yδ T cell, tumour infiltrating lymphocyte (TILs) or helper T-lymphocytes included both type 1 and 2 helper T cells and Th 17 helper cells. In another embodiment, said cell can be derived from the group consisting of CD4+ T-lymphocytes and CD8+ T-lymphocytes. Said immune cells may originate from a healthy donor or from a subject suffering from a cancer. In some embodiments, the immune cell is an allogenic or autologous cell. In some embodiments, the immune cell is selected from T cells, Natural Killer T cells, CD4+/CD8+ T cells, TILs/tumor derived CD8 T cells, central memory CD8+ T cells, Treg, MAIT, Yδ T cells, human embryonic stem cells, and pluripotent stem cells from which lymphoid cells may be differentiated.

[0339] Immune cells can be extracted from blood or derived from stem cells. The stem cells can be adult stem cells, embryonic stem cells, more particularly non-human stem cells, cord blood stem cells, progenitor cells, bone marrow stem cells, induced pluripotent stem cells, totipotent stem cells or hematopoietic stem cells. Representative human cells are CD34+ cells.

[0340] T-cells can be obtained from a number of non-limiting sources, including peripheral blood mononuclear cells, bone marrow, lymph node tissue, cord blood, thymus tissue, tissue from a site of infection, ascites, pleural effusion, spleen tissue, and tumors. In certain embodiments, T-cells can be obtained from a unit of blood collected from a subject using any number of techniques known to the skilled person, such as FICOLL™ separation. In one embodiment, cells from the circulating blood of a subject are obtained by apheresis. In certain embodiments, T-cells are isolated from PBMCs. PBMCs may be isolated from buffy coats obtained by density gradient centrifugation of whole blood, for instance centrifugation through a LYMPHOPREP™ gradient, a PERCOLL™ gradient or a FICOLL™ gradient. T-cells may be isolated from PBMCs by depletion of the monocytes, for instance by using CD14 DYNABEADS®. In some embodiments, red blood cells may be lysed prior to the density gradient centrifugation. In another embodiment, said cell can be derived from a healthy donor, from a subject diagnosed with cancer. The cell can be autologous or allogeneic.

[0341] In allogeneic immune cell therapy, immune cells are collected from healthy donors, rather than the patient. Typically these are HLA matched to reduce the likelihood of graft vs. host disease. Alternatively, universal ‘off the shelf’ products that may not require HLA matching comprise modifications designed to reduce graft vs. host disease, such as disruption or removal of the TCRαβ receptor. See Graham et al., Cells. 2018 October; 7 (10): 155 for a review. Because a single gene encodes the alpha chain (TRAC) rather than the two genes encoding the beta chain, the TRAC locus is a typical target for removing or disrupting TCRαβ receptor expression. Alternatively, inhibitors of TCRαβ signalling may be expressed, e.g. truncated forms of CD3% can act as a TCR inhibitory molecule. Disruption or removal of HLA class I molecules has also been employed. For example, Torikai et al., Blood. 2013; 122:1341-1349 used ZFNs to knock out the HLA-Alocus, while Ren et al., Clin. Cancer Res. 2017; 23:2255-2266 knocked out Beta-2 microglobulin (B2M), which is required for HLA class I expression. Ren et al. simultaneously knocked out TCRαβ, B2M and the immune-checkpoint PD1. Generally, the immune cells are activated and expanded to be utilized in the adoptive cell therapy. The immune cells as herein disclosed can be expanded in vivo or ex vivo. The immune cells, in particular T-cells can be activated and expanded generally using methods known in the art. Generally the T-cells are expanded by contact with a surface having attached thereto an agent that stimulates a CD3/TCR complex associated signal and a ligand that stimulates a co-stimulatory molecule on the surface of the T cells.

[0342] In one embodiment of the present disclosure, the immune cell can be modified to be directed to tumor neoantigenic peptides as previously defined. In a particular embodiment, said immune cell may express a recombinant antigen receptor directed to said neoantigenic peptide its cell surface. By “recombinant” is meant an antigen receptor which is not encoded by the cell in its native state, i.e. it is heterologous, non-endogenous. Expression of the recombinant antigen receptor can thus be seen to introduce new antigen specificity to the immune cell, causing the cell to recognise and bind a previously described peptide. The antigen receptor may be isolated from any useful source. In some embodiments, the cells comprise one or more nucleic acids introduced via genetic engineering that encode one or more antigen receptors, wherein the antigen include at least one tumor neoantigenic peptide as per the present disclosure.

[0343] Among the antigen receptors as per the present disclosure are genetically engineered T cell receptors (TCRs) and components thereof, as well as functional non-TCR antigen receptors, such as chimeric antigen receptors (CAR) as previously described.

[0344] Methods by which immune cells can be genetically modified to express a recombinant antigen receptor are well known in the art. A nucleic acid molecule encoding the antigen receptor may be introduced into the cell in the form of e.g. a vector, or any other suitable nucleic acid construct. Vectors, and their required components, are well known in the art. Nucleic acid molecules encoding antigen receptors can be generated using any method known in the art, e.g. molecular cloning using PCR. Antigen receptor sequences can be modified using commonly-used methods, such as site-directed mutagenesis.

[0345] In some embodiments, the immune cell is cell wherein the gene encoding the Suv39h1 protein, and in particular the human suv39h1 protein (referenced 043463 in UNIPROT), is disrupted.

[0346] In some embodiments, the immune cell comprises a recombinant HLA-independent (or non-HLA restricted) T cell receptors (referred to as “HI-TCRs”) that bind to an antigen of interest in an HLA-independent manner are described in International Application No. WO 2019/157454. Such HI-TCRs comprise an antigen binding chain that comprises: (a) an antigen-binding domain that binds to an antigen in an HLA-independent manner, for example, an antigen-binding fragment of an immunoglobulin variable region; and (b) a constant domain that is capable of associating with (and consequently activating) a CD32 polypeptide. Because typically TCRs bind antigen in a HLA-dependent manner, the antigen-binding domain that binds in an HLA-independent manner must be heterologous. Preferably, the antigen-binding domain or fragment thereof comprises: (i) a heavy chain variable region (VH) of an antibody and/or (ii) a light chain variable region (VL) of an antibody. The constant domain of the TCR is, for example, a native or modified TRAC polypeptide, or a native or modified TRBC polypeptide. The constant domain of the TCR is, for example, a native TCR constant domain (alpha or beta) or fragment thereof. Unlike chimeric antigen receptors, which typically themselves comprise an intracellular signaling domain, the HI-TCR does not directly produce an activating signal; instead, the antigen-binding chain associates with and consequently activates a CD3ζ polypeptide. The immune cells comprising the recombinant TCR provide superior activity when the antigen has a low density on the cell surface of less than about 10,000 molecules per cell.

[0347] The CD3ζ polypeptide is, for example, a native CD3ζ polypeptide or a modified CD3ζ polypeptide. The CD3ζ polypeptide is optionally fused to an intracellular domain of a co-stimulatory molecule or a fragment thereof. Alternatively, the antigen binding domain optionally comprises a co-stimulatory region, e.g. intracellular domain, that is capable of stimulating an immunoresponsive cell upon the binding of the antigen binding chain to the antigen. Example co-stimulatory molecules include CD28, 4-1BB, OX40, ICOS, DAP-10, fragments thereof, or a combination thereof.

[0348] In some embodiments of the present disclosure, the immune cell is a cell wherein (a) the SUV39H1 gene is inactivated, (b) the antigen-specific receptor is a modified TCR comprising a heterologous (or recombinant) antigen-binding domain and a native TCR constant domain or fragment thereof, and the antigen-specific receptor is capable of activating a CD3 zeta polypeptide. For example, the immune cell may further comprise at least one chimeric costimulatory receptor (CCR) and/or at least one chimeric antigen receptor, for example as previously defined.

[0349] In a related aspect, the immune cells, particularly if allogeneic, may be designed to reduce graft vs. host disease, such that the cells comprise inactivated (e.g. disrupted or deleted) TCRαβ receptor. In such cases, the nucleic acid encoding the antigen-binding domain of the HI-TCR (typically as previously defined) is conveniently inserted into the endogenous TRAC locus and/or TRBC locus of the immune cell. The insertion of the HI-TCR nucleic acid sequence, or another smaller mutation, can disrupt or abolish the endogenous expression of a TCR comprising a native TCR alpha chain and/or a native TCR beta chain. The insertion or mutation may reduce endogenous TCR expression by at least about 50%, 60%, 70%, 75%, 80%, 85%, 90%, 95%, 98%, or 99%. Because a single gene encodes the alpha chain (TRAC) rather than the two genes encoding the beta chain, the TRAC locus is a typical target for reducing TCRαβ receptor expression. Thus, the nucleic acid encoding the antigen-specific receptor (e.g. CAR or TCR) may be integrated into the TRAC locus at a location, preferably in the 5′ region of the first exon (SEQ ID NO: 3), that significantly reduces expression of a functional TCR alpha chain. See, e.g., Jantz et al., WO 2017/062451; Sadelain et al., WO 2017/180989; Torikai et al,. Blood, 119 (2): 5697-705 (2012); Eyquem et al., Nature. 2017 Mar. 2; 543 (7643): 113-117. Expression of the endogenous TCR alpha may be reduced by at least about 50%, 60%, 70%, 75%, 80%, 85%, 90%, 95%, 98%, or 99%. In such embodiments, expression of the nucleic acid encoding the antigen-specific receptor is optionally under control of the endogenous TCR-alpha or endogenous TCR-beta promoter.

[0350] Optionally, the immune cell also comprises a modified CD3 with a single active ITAM domain, and optionally the CD3 may further comprise one or more or two or more costimulatory domains. In some embodiments, the CD3 comprises two costimulatory domains, optionally CD28 and 4-1BB. The modified CD3 with a single active ITAM domain can comprise, for example, a modified CD3zeta intracellular signaling domain in which ITAM2 and ITAM3 have been inactivated, or ITAM1 and ITAM2 have been inactivated. In some embodiments, a modified CD3 zeta polypeptide retains only ITAM1 and the remaining CD32 domain is deleted (residues 90-164). As another example, ITAM1 is substituted with the amino acid sequence of ITAM3, and the remaining CD32 domain is deleted (residues 90-164).

[0351] The modified immune cells disclosed herein may comprise combinations of two or more, or three or more, or four or more, of the foregoing aspects.

[0352] For example, the modified immune cell is an immune cell wherein (a) the antigen-specific receptor is a modified TCR comprising a heterologous (or recombinant) antigen-binding domain (typically as previously defined) and a native TCR constant domain or fragment thereof, and the antigen-specific receptor is capable of activating a CD3 zeta polypeptide, and/or the antigen-specific receptor is a CAR, and optionally (b) the SUV39H1 gene is inactivated, and optionally (c) the immune cell comprises a modified CD3 with a single active ITAM domain, e.g. in which ITAM2 and ITAM3 have been inactivated, and optionally (d) the TCR is under control of an endogenous TRAC and/or TRBC promoter, and optionally (e) expression of native TCR-alpha chain and/or native TCR-beta chain are disrupted or abolished. In further embodiments, the cell may comprise at least one chimeric costimulatory receptor (CCR). In some embodiments, the tumor antigen is selected from pHER95, CD19, MUC16, MUC1, CAIX, CEA, CD8, CD7, CD10, CD20, CD22, CD30, CD70, CLL1, CD33, CD34, CD38, CD41, CD44, CD49f, CD56, CD74, CD133, CD138, EGP-2, EGP-40, EpCAM, Erb-B2, Erb-B3, Erb-B4, FBP, Fetal acetylcholine receptor, folate receptor-a, GD2, GD3, HER-2, hTERT, IL-13R-a2, κ-light chain, KDR, LeY, L1 cell adhesion molecule, MAGE-A1, Mesothelin, MAGEA3, p53, MART1, GP100, Proteinase3 (PR1), Tyrosinase, Survivin, hTERT, EphA2, NKG2D ligands, NY-ESO-1, oncofetal antigen (h5T4), PSCA, PSMA, ROR1, TAG-72, VEGF-R2, WT-1, BCMA, CD123, CD44V6, NKCS1, EGF1R, EGFR-VIII, CD99, CD70, ADGRE2, CCR1, LILRB2, LILRB4, PRAME, and ERBB.]

[0353] In some embodiments, the recombinant HI-TCR is expressed by a transgene that is integrated at an endogenous gene locus of the immunoresponsive cell, for example, a CD38 locus, a CD38 locus, a CD247 locus, a B2M locus, a TRAC locus, a TRBC locus, a TRDC locus and/or a TRGC locus. In most embodiments, expression of the recombinant HI-TCR is driven from the endogenous TRAC or TRBC gene locus. In some embodiments, the transgene encoding a portion of the recombinant HI-TCR is integrated into the endogenous TRAC and/or TRBC locus in a manner that disrupts or abolishes the endogenous expression of a TCR comprising a native TCR α chain and/or a native TCR β chain. This disruption prevents or eliminates mispairing between the recombinant TCR and a native TCR α chain and/or a native TCR β chain in the immunoresponsive cell. The endogenous gene locus may also comprise a modified transcription terminator region, for example, a TK transcription terminator, a GCSF transcription terminator, a TCRA transcription terminator, an HBB transcription terminator, a bovine growth hormone transcription terminator, an SV40 transcription terminator, and a P2A element.

[0354] The present disclosure also relates to a method for providing an immune cell, and in particular a T cell population which targets a tumor neoantigenic peptide as herein disclosed, in particular an immune cell and notably a T cell population expressing a TCR or a CAR in particular an MHC-restricted antibody-based chimeric antigen receptor as previously defined.

[0355] The T cell population may comprise CD8+ T cells, CD4+ T cells or CD8+ and CD4+ T cells.

[0356] Immune cell populations produced in accordance with the present disclosure may be enriched with immune cells that are specific to, i.e. target, the tumor neoantigenic peptide of the present disclosure. That is, the immune cell population that is produced in accordance with the present disclosure will have an increased number of immune cells that target one or more tumor neoantigenic peptide. For example, the immune cell population of the disclosure will have an increased number of immune cells that target a tumor neoantigenic peptide compared with the immune cells in the sample isolated from the subject. That is to say, the composition of the immune cell population will differ from that of a “native” immune cell population (i.e. a population that has not undergone the identification and expansion steps discussed herein), in that the percentage or proportion of immune cells that target a tumor neoantigenic peptide will be increased.

[0357] Immune cell populations produced in accordance with the present disclosure may be enriched with immune cells that are specific to, i.e. target, tumor neoantigenic peptide. That is, the T cell population that is produced in accordance with the present disclosure will have an increased number of immune cells that target one or more tumor neoantigenic peptide of the present disclosure. For example, the immune cell population of the present disclosure will have an increased number of immune cells that target a tumor neoantigenic peptide compared with the immune cells in the sample isolated from the subject. That is to say, the composition of the immune cell population will differ from that of a “native” immune cell population (i.e. a population that has not undergone the identification and expansion steps discussed herein), in that the percentage or proportion of immune cells that target a tumor neoantigenic peptide will be increased.

[0358] The immune cell population according to the present disclosure may have at least about 0.2, 0.3, 0.4, 0.5, 0.6, 0.7, 0.8, 0.9, 1, 2, 3, 4, 5, 6, 7, 8, 9, 10, 11, 12, 13, 14, 15, 16, 17, 18, 19, 20, 25, 30, 35, 40, 45, 50, 55, 60, 65, 70, 75, 80, 85, 90, 95 or 100% T cells that target a tumor neoantigenic peptide as herein disclosed. For example, the immune cell population may have about 0.2%-5%, 5%-10%, 10-20%, 20-30%, 30-40%, 40-50%, 50-70% or 70-100% immune cells that target a tumor neoantigenic peptide of the present disclosure.

[0359] An expanded population of tumor neoantigenic peptide-reactive immune cells may have a higher activity than a population of immune cells not expanded, for example, using a tumor neoantigenic peptide. Reference to “activity” may represent the response of the immune cell population to restimulation with a tumor neoantigenic peptide, e.g. a peptide corresponding to the peptide used for expansion, or a mix of tumor neoantigenic peptide. Suitable methods for assaying the response are known in the art. For example, cytokine production may be measured (e.g. IL2 or IFNy production may be measured). The reference to a “higher activity” includes, for example, a 1-5, 5-10, 10-20, 20-50, 50-100, 100-500, 500-1000-fold increase in activity. In one aspect the activity may be more than 1000-fold higher.

[0360] In a preferred embodiment present disclosure provides a plurality or population, i.e. more than one, of immune cells wherein the plurality of immune cells comprises a immune cell, notably a T cell, which recognizes a clonal tumor neoantigenic peptide and a T cell which recognizes a different clonal tumor neoantigenic peptide. As such, the present disclosure provides a plurality of immune cells, notably T cells, which recognize different clonal tumor neoantigenic peptide. Different immune cells, notably T cells, in the plurality or population may alternatively have different TCRs which recognize the same tumor neoantigenic peptide.

[0361] In a preferred embodiment the number of clonal tumor neoantigenic peptide recognized by the plurality of T cells is from 2 to 1000. For example, the number of clonal neo-antigens recognized may be 2, 3, 4, 5, 6, 7, 8, 9, 10, 20, 50, 100, 150, 200, 250, 300, 350, 400, 450, 500, 550, 600, 650, 700, 750, 800, 850, 900, 950 or 1000, preferably 2 to 100. There may be a plurality of immune cells, notably T cells, with different TCRs but which recognize the same clonal neo-antigen.

[0362] The immune cell and in particular the T cell population may be all or primarily composed of CD8+ T cells, or all or primarily composed of a mixture of CD8+ T cells and CD4+ T cells or all or primarily composed of CD4+ T cells.

[0363] In particular embodiments, the T cell population is generated from T cells isolated from a subject with a tumor. For example, the T cell population may be generated from T cells in a sample isolated from a subject with a tumor. The sample may be a tumor sample, a peripheral blood sample or a sample from other tissues of the subject.

[0364] In a particular embodiment the immune cell population is generated from a sample from the tumor in which the tumor neoantigenic peptide is identified. In other words, the immune cell and notably the T cell population is isolated from a sample derived from the tumor of a patient to be treated. Such T cells are referred to herein as ‘tumor infiltrating lymphocytes’ (TILs).

[0365] T cells may be isolated using methods which are well known in the art. For example, T cells may be purified from single cell suspensions generated from samples on the basis of expression of CD3, CD4 or CD8. T cells may be enriched from samples by passage through a Ficoll-paque gradient.

### Cancer Therapeutic Methods

[0366] In any of the embodiments, the Cancer Therapeutic Products described herein may be used in methods for inhibiting proliferation of cancer cells. The Cancer Therapeutic Products described herein may also be used in the treatment of cancer, in patients suffering from cancer, or for the prophylactic treatment of cancer, in patients at risk of cancer.

[0367] Cancers that can be treated using the therapy described herein include any solid or non-solid tumors as previously defined. Of particular interest according to the present disclosure are breast cancer, melanoma and lung cancer.

[0368] Cancers includes also the cancers which are refractory to treatment with other chemotherapeutics. The term “refractory, as used herein refers to a cancer (and/or metastases thereof), which shows no or only weak antiproliferative response (e.g., no or only weak inhibition of tumor growth) after treatment with another chemotherapeutic agent. These are cancers that cannot be treated satisfactorily with other chemotherapeutics. Refractory cancers encompass not only (i) cancers where one or more chemotherapeutics have already failed during treatment of a patient, but also (ii) cancers that can be shown to be refractory by other means, e.g., biopsy and culture in the presence of chemotherapeutics.

[0369] The therapy described herein is also applicable to the treatment of patients in need thereof who have not been previously treated.

[0370] A subject as per the present disclosure is typically a patient in need thereof that has been diagnosed with cancer or is at risk of developing cancer. The subject is typically a human, dog, cat, horse or any animal in which a tumor specific immune response is desired.

[0371] The present disclosure also pertains to a neoantigenic peptide, a population of APCs, a vaccine or immunogenic composition, a polynucleotide encoding a neoantigenic peptide or a vector as previously defined for use in cancer vaccination therapy of a subject or for treating cancer in a subject, wherein the peptide(s) binds at least one MHC molecule of said subject.

[0372] The present disclosure also provides a method for treating cancer in a subject comprising administering a vaccine or immunogenic composition as described herein to said subject in a therapeutically effective amount to treat the subject. The method may additionally comprise the step of identifying a subject who has cancer.

[0373] The present disclosure also relates to a method of treating cancer comprising producing an antibody or antigen-binding fragment thereof by the method as herein described and administering to a subject with cancer said antibody or antigen-binding fragment thereof, or with an immune cell expressing said antibody or antigen-binding fragment thereof, in a therapeutically effective amount to treat said subject.

[0374] The present disclosure also relates to an antibody (including variants and derivatives thereof) in particular a TCR-like antibody, a T cell receptor (TCR) (including variants and derivatives thereof), or a CAR (including variants and derivatives thereof), in particular an MHC-restricted antibody-based chimeric antigen receptor, which are directed against a tumor neoantigenic peptide as herein described, for use in cancer therapy of a subject, wherein the tumor neoantigenic peptide binds at least one MHC molecule of said subject.

[0375] The present disclosure also relates to an antibody (including variants and derivatives thereof) in particular a TCR-like antibody, a T cell receptor (TCR) (including variants and derivatives thereof), or a CAR (including variants and derivatives thereof), in particular an MHC-restricted antibody-based chimeric antigen receptor, which are directed against a tumor neoantigenic peptide as herein described, optionally in association with an MHC or HLA molecule, or an immune cell which targets a neoantigenic peptide, as previously defined, for use in adoptive cell or CAR-T cell therapy in a subject, wherein the tumor neoantigenic peptide binds at least one MHC molecule of said subject. Typically, the skilled person is able to select an appropriate antigen receptor which binds and recognizes a tumor neoantigenic peptide as previously defined with which to redirect an immune cell to be used for use in cancer cell therapy. In a particular embodiment, the immune cell for use in the method of the present disclosure is a redirected T-cell, e.g. a redirected CD8+ and/or CD4+ T-cell.

[0376] In some embodiments, cancer treatment, vaccination therapy and/or adoptive cell cancer therapy as above described are administered in combination with additional cancer therapies. In particular, the T cell compositions according to the present disclosure may be administered in combination with checkpoint blockade therapy, co-stimulatory antibodies, chemotherapy and/or radiotherapy, targeted therapy or monoclonal antibody therapy.

[0377] Checkpoint inhibitors include, but are not limited to, PD-1 inhibitors, PD-L1 inhibitors, Lag-3 inhibitors, Tim-3 inhibitors, TIGIT inhibitors, BTLA inhibitors, V-domain Ig suppressor of T-cell activation (VISTA) inhibitors and CTLA-4 inhibitors, IDO inhibitors for example. Co-stimulatory antibodies deliver positive signals through immune-regulatory receptors including but not limited to ICOS, CD137, CD27 OX-40 and GITR. In a preferred embodiment the checkpoint inhibitor is a CTLA-4 inhibitor.

[0378] A chemotherapeutic entity as used herein refers to an entity which is destructive to a cell, that is the entity reduces the viability of the cell. The chemotherapeutic entity may be a cytotoxic drug. A chemotherapeutic agent contemplated includes, without limitation, alkylating agents, anthracyclines, epothilones, nitrosoureas, ethylenimines/methylmelamine, alkyl sulfonates, alkylating agents, antimetabolites, pyrimidine analogs, epipodophylotoxins, enzymes such as L-asparaginase; biological response modifiers such as IFNa, IL-2, G-CSF and GM-CSF; platinum coordination complexes such as cisplatin, oxaliplatin and carboplatin, anthracenediones, substituted urea such as hydroxyurea, methylhydrazine derivatives including N-methylhydrazine (MIH) and procarbazine, adrenocortical suppressants such as mitotane (o,ρ′-DDD) and aminoglutethimide; hormones and antagonists including adrenocorticosteroid antagonists such as prednisone and equivalents, dexamethasone and aminoglutethimide; progestin such as hydroxyprogesterone caproate, medroxyprogesterone acetate and megestrol acetate; estrogen such as diethylstilbestrol and ethinyl estradiol equivalents; antiestrogen such as tamoxifen; androgens including testosterone propionate and fluoxymesterone/equivalents; antiandrogens such as flutamide, gonadotropin-releasing hormone analogs and leuprolide; and non-steroidal antiandrogens such as flutamide.

[0379] ‘In combination’ may refer to administration of the additional therapy before, at the same time as or after administration of the T cell composition according to the present disclosure.

[0380] In addition or as an alternative to the combination with checkpoint blockade, the T cell composition of the present disclosure may also be genetically modified to render them resistant to immune-checkpoints using gene-editing technologies including but not limited to TALEN and Crispr/Cas. Such methods are known in the art, see e.g. US20140120622. Gene editing technologies may be used to prevent the expression of immune checkpoints expressed by T cells including but not limited to PD-1, Lag-3, Tim-3, TIGIT, BTLA CTLA-4 and combinations of these. The T cell as discussed here may be modified by any of these methods.

[0381] The T cell according to the present disclosure may also be genetically modified to express molecules increasing homing into tumours and or to deliver inflammatory mediators into the tumour microenvironment, including but not limited to cytokines, soluble immune-regulatory receptors and/or ligands.

[0382] In a particular embodiment, said tumor neoantigenic peptide is used in cancer vaccination therapy in combination with another immunotherapy such as immune checkpoint therapy, more particularly in combination with antibodies anti-PD1, anti-PDL1, anti-CTLA-4, anti-TIM-3, anti-LAG3, anti-GITR.

### BRIEF DESCRIPTION OF THE DRAWINGS

[0383] FIG. 1: Tumor neoantigenic peptides (or TE-derived epitopes) having a predicted affinity for MHC alleles of less than 500 nM, identified by the in silico method according to the disclosure in the tumor mouse lines B16F10-OVA cells (A) and in MCA101-OVA cells (B) and identified both in the two lines (C).

[0384] FIG. 2: (A) RT-PCR gels of amplification of the fusion transcript sequence encoding the neoantigenic peptide N25, in cDNA of tumor mouse lines B16F10-OVA and MCA101-OVA. (B) RT-PCR gels of amplification of the fusion transcript sequence encoding the neoantigenic peptide N26, in cDNA of tumor mouse lines B16F10, B16F10-OVA and MCA101-OVA.

[0385] FIG. 3: (A) Detection of peptide-reactive IFNg-secreting cells by ELISPOT in inguinal lymph nodes from immunized animals with DMSO (negative control), OVA (ovalbumine) (positive control), peptide N25 or peptide N26. (B) IFNg spots for 10\hat{ }5 cells for immunized animals with DMSO (negative control), SIINFEKL (positive control), N25 or N26 peptide.

[0386] FIG. 4: (A) Evolution of the tumor volume (mm3) in mice beforehand immunized with DMSO, OVA or N25L peptide, following the days after the injection of tumor cells B16F10-OVA into said immunized mice. (B) Evolution of the tumor volume (mm3) in mice beforehand immunized with DMSO, OVA or N26L peptide, following the days after the injection of tumor cells B16F10-OVA into said immunized mice.

[0387] FIG. 5: TCGA data sets for 784 luminal, 100 HER2+, 197 TNBC, 112 normal breast tissue, 516 primary lung adenocarcinomas (primary tumor) and 59 normal lung tissue (solid tissue normal), were analyzed by the method for identifying fusion transcript sequence encoded tumor neoantigenic peptide described. (A) Number of fusion transcript sequence (TE-exon fusions) in different subtypes of breast cancer (HER2+, TNBC, normal breast tissue and luminal). (B) Number of fusion transcript sequence (TE-exon fusions) in different subtypes of lung cancer (primary lung adenocarcinomas, normal lung tissue).

[0388] FIG. 6: 8-9 amino acid-long peptides predicted from TE-gene fusion products from each sample were tested in silico for binding to the predicted HLA alleles expressed in the same sample. Shown are peptides with predicted affinity below 500 nM for at least one HLA-A, -B, or -C allele from each sample. (A) Samples of different subtypes of breast cancer (HER2+, TNBC, normal breast tissue and luminal). (B) Samples of different subtypes of lung cancer (non-small cell lung cancer, normal lung tissue).

[0389] FIG. 7: Distribution of tumor-specific peptides per patient across breast tumor subtypes. (A) Numbers of tumor-specific HLA-binding peptides per subtypes of breast cancer patient are shown. (B) Numbers of predicted tumor neoantigenic peptides shared across luminal subtypes samples (n=784) (abscissa). (C) Numbers of predicted tumor neoantigenic peptides shared across HER2+ subtypes samples (n=100) (abscissa). (D) Numbers of predicted tumor neoantigenic peptides shared across TNBC subtypes samples (n=197) (abscissa).

[0390] FIG. 8: (A) Numbers of tumor-specific HLA-binding peptides per primary lung adenocarcinomas (LUAD) sample (lung cancer). (B) Distribution of tumor-specific peptides per patient across lung adenocarcinomas. Numbers of predicted tumor neoantigenic peptides shared across primary tumor subtypes samples (n=516) (abscissa).

[0391] FIG. 9: Reconstruction of the fusion nucleotide sequence when the donor is the exon (A) and when the donor is the TE (B).

[0392] FIG. 10: Binding of chimeric transcripts-derived peptides to HLA-A2. Binding to HLA-A2 allele of predicted peptides from the most frequent chimeric fusions were validated by flow cytometry using tetramer formation assay. The results are shown as percentage of binding relative to positive control. Dotted line indicates the threshold considered to confirm the binding to this allele.

[0393] FIG. 11. Immunogenicity of fusion transcripts-derived peptides and reactive CD8+ T cells generation. (A) Frequencies of pJET (fusion transcript derived peptides) specific tetramer-positive CD8+ T cells expanded from 6 different healthy donors in in vitro immunogenicity assays using 6 different healthy donors. (B) Cytokine secretion of CTL-clones after stimulation with different concentration of specific peptide. On the right is listed the CTL-clones generated and their peptide specificity. (C) Killing assay for CTL-clone 9 in co-culture with target cells loaded with 2 different peptide concentration in combination with anti-MHC-I antibodies or Isotype control (Left panel), or with un-loaded targets cells at different ratios (Right panel). (D) Killing assays for CTL-clone 9, 80 and 64 when co-cultured with peptide unloaded target cells in combination with anti-MHCI-I antibodies or isotype control. Effector: Target ratio is indicated in each individual plot. H1650 were used as target cells for each plot of this figure.

[0394] FIG. 12. Expression of TCR recognizing fusion-derived peptides. Transduced Jurkat-reporter cells with TCR sequence derived from CTL-clone 9 co-cultured with target cells alone, or loaded with 2 different peptide concentration. Plots show percentage of positive Jurkat cells for the 3 reporter genes evaluated by flow cytometry, using H1650 cell line as target cells (upper plots) or H1395 cell line as target cells (lower plots). Negative control: non-transduced Jurkat cells. No peptide: transduced Jurkat cells co-cultured with peptide unloaded target cells. Positive control: Transduced Jurkat cells stimulated with PMA/ionomycin.

[0395] FIG. 13. Tumor infiltrating lymphocytes recognizing fusion transcripts-derived peptides. Percentage of tetramer positive CD8 T cells for the indicated fusion transcript-derived peptides found in tumor infiltrating lymphocytes (TILs) expanded in the presence of fusion transcripts-derived peptide's mix+IL2 (A) or only with IL-2 (B).

[0396] FIG. 14. Phenotype of CD8+ T cells recognizing fusion transcripts-derived peptides in LUAD patient's derived samples. Percentage of tetramer positive CD8 T cells recognizing fusion transcripts-derived peptides present in tumor, juxta tumor, lymph nodes and blood samples derived from LUAD Patient 2 (A, upper panel) and Patient 3 (B, upper panel). In lower panel of figure (A) and (B) is shown the percentage of Naïve (CCR7+CD45+), Central Memory (CM, CCR7+CD45−), Effector Memory (EM, CCR7−CD45−) and Terminal Effector (TE, CCR7−CD45+) cells of tetramer positive parental cell population.

[0397] FIG. 15. Immunopeptidomics analysis of lung tumor samples. Fusion transcript-derived peptide sequences were searched in public MHC-I immunopeptidomes datasets. Each column represents a different sample. Each row represents a different peptide sequence (specify on the right). Colored squares indicate in which sample is found each fusion transcript-derived peptide. Publications describing each sample data-sets are annotated on the top.

[0398] FIG. 16. Immunopeptidomics. A. Identification of JET derived peptides across 17 primary lung tumors and the human adenocarcinoma cell line A549, treated or not, with interferon gamma. Peptides are shown in rows and samples in columns. B. Boxplot showing the comparison of MS/MS scores obtained from the annotated peptidome (canonical peptides) and from the pJET peptidome. C. Comparison of the frequencies of peptides identified from the annotated peptidome (canonical peptides) and the pJET peptidome at different amino acid peptide lengths.

[0399] FIG. 17. Binding of ER-derived peptides to HLA-A2 molecule. Peptides-HLA-A*02:01 complex formation for synthesized chimeric transcripts-derived peptides. Percentage of complex formation relative to positive control (CMV pp65 495-503) is represented. The mutated (MelA Mut) and non-mutated (MelA) sequences of Melan-A were used as strong and weak binder peptides controls, respectively. ‘Negative’ indicates staining background. Dashed line indicates the minimum complex formation value needed to consider a peptide as good binder to HLA-A*0201 (50% of positive control).

[0400] FIG. 18. A. Activation of Jurkat cells transduced with CTL-clones-derived TCRs recognizing chimeric transcripts-derived peptides after co-culture with target cells loaded with relevant/specific or an irrelevant/unrelated peptide (Melan-A). B. Activation of Jurkat cells transduced with CTL-clones-derived TCRs recognizing chimeric transcripts-derived peptides after co-culture with target cells loaded with relevant peptide or unrelated peptide (Melan-A), in presence or absence of anti-MHC-I blocking antibody (W6/32) or isotype control. PMA/Ionomycin was used as a positive control of activation and target cells without loading peptides were used as negative control of activation. H1395 LUAD cell line were used as target cells. CTL-clone from which each TCR is derived is indicated on the top and peptide specificity between brackets, showing aminoacidic sequence of chimeric transcript-derived peptide recognized by each of these TCR. This peptide sequence is the specific/relevant peptide used in each case to load target cells. Melan-A and MelA Mut both refer to the unrelated peptide (ELAGIGILTV).

[0401] FIG. 19: A. Heatmap summarizing the frequency of CD8+ T cells recognizing chimeric transcript-derived peptides found ex-vivo without T cell expansions. Only peptide specificities found in at least one tissue are shown (total evaluated patients=4). B. CCR7 and CD45RA percentages in tetramer positive cells summarized in A. after ex-vivo staining for patient 2 and patient 5. (no data available for Patient 1). C. Heatmap summarizing specific tetramer positive cells recognizing chimeric transcripts-derived peptides after in-vitro expansions at day 20 on CD8+ T cells from tumor, juxta tumor or tumor-draining LN samples in the 5 patients analyzed. Only peptide specificities found in at least one tissue are shown. Black squares highlight peptide specificities found also ex-vivo in the same tissue and patient.

### EXAMPLES

### 1. Example 1: Identification of Fusion Transcript Sequence Encoded Tumor Neoantigenic Peptide

### 1.1 Proof of Concept in Mice

[0402] To detect individual and shared tumor neoantigenic peptide issued from fusion transcripts sequences, a bioinformatics pipeline has been developed. This pipeline is designed to identify tumor-specific mRNA sequences composed in part of a TE sequence and in part of an exonic sequence. This pipeline implies determining the MHC alleles. For each human sample, the Class I and Class II MHC alleles can be determined using the seq2hla (v2.2) tool (bitbucket.org/sebastian_boegel/seq2hla). For mouse models, murine H-2 alleles are generally known. The bioinformatics method comprises the mapping of transcripts from RNA-sequencing against the reference genome. For the proof of concept analyses described here, mm10 was used for mouse and hg19 for human. Different versions of assembled genomes can be used for example hg19, hg38, mm9 or mm10. This mapping is carried out with STAR (v2.5.3a) (github.com/alexdobin/STAR), with the following setting:
[0403] For allowing multi-hits mapping the parameter outFilterMultimapNmax which sets the maximum number of loci, the read is allowed to map to, is set at 1000, and
[0404] For detecting the abnormal junction (fusion), the parameter chimSegmentMin which sets the minimum length of fusion segment, is set at 10, the parameter chimJunctionOverhangMin which sets the minimum overhang for a fusion junction is set at 10.

[0405] Normal (from SJ.out.tab output file) and abnormal (from Chimeric.out.junction output file) junctions are annotated using Ensembl and repeatmasker databases. Normal junctions define all the junctions that match the parameters used for the mapping (maximum intron length<=1 000 000 bp (set by --alignIntronMax), same chromosome and well oriented) and abnormal ones are junctions that do not match with at least one of the previous criteria. This mean that a TE/Exon junction could be in both junction type but a Exon/Exon junction must be in normal file (SJ.out.tab). Transcript sequences comprising a junction between a TE sequence and an exonic sequence are extracted in silico. From the area of the transcript sequence which overlaps the junction, or downstream of the junction when out-of-frame (reading frame non-canonical), the software predicts, in all reading frames, all possible peptides of 8 or 9 mers. Then, the binding affinity of all these possible peptides for the MHC alleles previously defined for the matched sample is determined netMHCpan (v3.4) (cbs.dtu.dk/services/NetMHCpan/). There are currently more than a dozen various prediction algorithms for predicting the binding affinity of peptides, with NetMHC being the most widely used and validated algorithm for neoantigen prediction pipelines.

[0406] Peptides with either less than 500 nM or with a percentile rank less than 2% are considered as potential neo-antigens. Each splice site (donor or acceptor) is uniquely annotated as TE or as Exon. The part in the 5′ end is qualified “donor”, and the part in the 3′ is qualified “acceptor”. Predicted HLA-binding peptides shared between cancer and normal tissues are excluded from further analyses.

[0407] This method has been applied to RNAseq data obtained from 7 well-characterized murine tumor cell lines (B16F10, B16F10-OVA, MCA101, MCA101-OVA, MC38, MC38-GFP, MC38-GFP-OVA). The cell lines with the extension-OVA corresponding to the same model but further expressing ovalbumin. In this study, this line is considered as the similar model, that is to say for example that an assay carried out on the cell line from B16F10-OVA is considered as a repeat of an assay carried out on the cell line from B16F10.

[0408] A list of candidate peptides has been obtained with these parameters (FIGS. 1A, 1B and 1C), some were specific to particular cell lines (FIGS. 1A and 1B), and some were shared between the two tumor cell lines (FIG. 1C).

[0409] For validation, we selected a range of peptides, expressed either in B16F10-OVA or MCA101-OVA, with predicted affinities less than 500 nM. Peptides were selected trying to optimize the ratio between number of reads and predicted affinity for MHC-I.

[0410] Four predicted tumor neoantigenic peptides were selected and characterized by identifying the TE and the exonic sequence (table 2).

TABLE 2
Characterization of 4 predicted tumor neoantigenic peptides selected by the method

| Peptide | Cell line | Donor | Acceptor | Predicted affinity |
|---|---|---|---|---|
| N25 | B16/B16-OVA | ERV-MaLR | Chmp3, exon2 | H2-Db, 51.8937 |
| | | (subfamily | | |
| | | MTA) | | |
| N26 | MCA/MCA-OVA | SINE- | Angel2, exon2 | H2-Kb, 392.0384 |
| | MC38-GFP/MC38-OVAGFP | Alu(B1F) | | |
| N90 | MCA/MCA-OVA | Predicted gene | ERVL-MaLR | H2-Kb, 403.8959 |
| | | 45873 | (subfamily | and 50.5416 |
| | | | ORR1A2-int) | |
| N94 | MCA/MCA-OVA | Rsrc1 | ERV1 (subfamily | H2-Kb, 431.0564 |
| | MC38-GFP/MC38-OVAGFP | | RLTR4_MM-int) | |

### 1.2 Validation by RT-PCR of the Fusion Transcript Sequence

[0411] First, a validation by regular RT-PCR has been performed, using primer pairs with one primer in the TE sequence, and the other one in the exonic sequence.

[0412] For the RNA extraction and reverse transcription, 3-5.10⁶ cells were lyzed in 500 μL Trizol, and 100 μL phenol-chloroform added to the lyzates prior centrifugation. Aqueous phase was collected, mixed in a 1:1 ratio with 100% EtOH and transferred to RNAeasy minikit columns. RNA was then collected following manufacturer's instructions (including on column DNAse treatment). After RNA elution, DNA contaminants were further removed by treatment with Turbo DNAse (Fisher scientific), according to manufacturer's instructions). RNA concentration was measured using a nanodrop, and 1 μg of RNA used for reverse transcription. First strand synthesis was performed with Superscript III (Life technologies) using oligodT (15) as primers, according to manufacturer's instructions. Primers were ordered from Eurogentec. PCR reactions were performed using Taq polymerase. After identification of optimal conditions for each reaction, PCR products were extracted from agarose gels, and sequencing was performed using GATC lightrun. Sequence alignment was checked with APE software.

[0413] Using this approach, bands matching predicted size for N25, N26, N90 and N94 were detected, respectively in the cell lines identified in Table 2 (See FIG. 2A for N25). Interestingly, although N26 was detected only in MCA and MC38 cells in silico by RNAseq as previously described in the pipeline, using RT-PCR we detected a band corresponding to N26 in B16F10-OVA cells (FIG. 2B), indicating that this sequence is shared between three independent tumor cell lines (MCA, MC38 and B16F10). By re-analyzing the RNAseq data, we found that the N26 junction was present in B16F10-OVA cells, but below the detection threshold of the algorithm. Moreover, sequencing of the RT-PCR product showed exact match with sequences predicted by the algorithm.

### 1.3 In Vivo Immunization of Mice

[0414] To validate these candidates in vivo, short (9-mers) peptides corresponding to neoantigenic peptide which binds to the MHC class I sequences, were synthetized. For the in vivo assays, long (27-mers) peptides, which include the flanking regions to the predicted MHC-binding short peptides of 9 mers, were synthetized, because this length is better suited for in vivo immunization. B16F10 OVA and MCA101-OVA were maintained in RPMI, Glutamax, 10% FCS, 1% penicillin-streptomycin and passaged using TrypLE. Cells were kept in culture for a maximum of one month, and new vials were thawed for each in vivo experiment. C57BL6J recipient mice were immunized with 100 μg long peptide (N25L or N26L), SIINFEKL peptide (short OVA peptide), OVA (Sigma) or DMSO, each with 50 μg polyI:C, by subcutaneous injection into the flank. Immunizations were repeated 7 days after primary immunization. 3 days later (10 days after primary immunization), animals were sacrificed and numbers of peptide-specific IFNg-secreting CD8 T cells in inguinal lymph nodes were detected by ELISPOT (FIG. 3A). Short peptides (N25, N26, or SIINFEKL) or DMSO at 10 μg·mL⁻¹ were used to restimulate T cells. Alternatively, 7 days after secondary immunization, animals were injected subcutaneously with 2.5.10⁵ B16F10-OVA or 5.10⁵ MCA-OVA cells in PBS. We found that N25, and to a lesser extent N26 were able to induce immune responses (FIG. 3B).

1.4 In Vivo Treatment of Mice with Tumor

[0415] To test whether these peptides were protective against tumor cells, we immunized C57BL6 mice with 100 mg peptides N25L or N26L, or OVA (control peptide) and 50 μg polyI: C in PBS at d0 and d7, and at d14, we injected 2.5.10⁵B16F10-OVA cells to mice immunized with OVA, N25L and N26L. B16F10 OVA and MCA101-OVA were maintained in RPMI, Glutamax, 10% FCS, 1% penicillin-streptomycin and passaged using TrypLE. Cells were kept in culture for a maximum of one month, and new vials were thawed for each in vivo experiment. C57BL6J recipient mice were immunized with 100 μg long peptide (N25L or N26L), OVA (Sigma) or DMSO, each with 50 μg polyI: C, by subcutaneous injection into the flank. Immunizations were repeated 7 days after primary immunization.

[0416] Short peptides (N25, N26, or SIINFEKL) or DMSO at 10 μg·mL⁻¹ were used to restimulate T cells. Alternatively, 7 days after secondary immunization, animals were injected subcutaneously with 2.5.10⁵ B16F10-OVA or 5.10⁵ MCA-OVA cells in PBS. Tumor size was measured twice weekly using a manual caliper, and animal health status monitored throughout the experiment timeframe (FIGS. 4A and 4B). Animals were sacrificed when tumor volume reached 1 mm³. Strikingly, we observed that N25L significantly delayed the formation of B16OVA tumors, in a more efficient way than OVA. Moreover, we obtained a similar result upon N26L immunization.

### 2 Example 2: Identification of Human Lung Adenocarcinoma (LUAD) Neoantigenic Peptides Derived from Fusion Transcripts Composed of a TE Element and an Exonic Sequence

### 2.1 Material and Methods

[0417] RNA extraction. Tumour and juxtatumour samples were cut into pieces of #1 mm³ and resuspended in 700 μl RTL lysis buffer (Quiagen) supplemented with 1% β-mercaptoethanol and homogenized using Perecellys 24 Tissue Homogenizer (Bertin Technologies). Total RNA isolation was performed using RNeasy Micro Kit (Qiagen) following manufacturer instructions. Total RNA from tumour cell lines were extracted from 5.10⁶ tumor cell lines using the same procedure.

[0418] PCR and Sequencing. Primers were designed using APE software. For each sample, 1 μg of RNA was retrotranscribed into cDNA using SuperScript III Reverse transcriptase (ThermoFisher), as indicated by the provider. PCR reaction was performed using GoTaq G2 Hot Start Polymarase (Promega). All primers were used in a concentration of 0.5 μM. Reactions were carried out in Veriti™ 96-Well Thermal Cycler (ThermoFisher). PCR products were loaded in LabChip GX (Caliper LifeSciences) and analysed by LabChip GX Software (v4.2).

[0419] PCR reactions were repeated for those samples with an amplification product on the expected size. Then, the PCR products were run in a 2% agarose gel SYBR Free Dye (1/10000) (Invitrogen). The specific bands were cut and the DNA products were purified using QIAquick Gel Extraction Kit (Qiagen) following manufacturer instructions. Finally, these products were sequenced by EuroFins Scientific. The resulting sequences were compared to the expected one using Serial Cloner software.

[0420] Tetramer formation. HLA-A2 monomers were purchased from ImmunAware® and the formation of tetramers was evaluated with synthetic ER-derived peptides following manufacturer instructions. Briefly, synthetic HLA-A2 monomers were incubated with synthetic peptides during 48h at 18° C. Tetramerization was done by further incubation of monomers with biotinylated-sepharose. Finally, tetramer formation was measured by flow cytometry using a PE-conjugated anti-β2-microglobulin antibody. As a positive control we used a peptide derived from CMV provided by the manufacturer.

[0421] In experiments addressed to evaluate the presence of specific CD8+ T cells, the tetramerization step was performed by incubating the monomers with different combinations of fluorescent streptavidin (PE, APC, PE-Cy5, PE-CF594, BV421, BV711 and FITC).

[0422] Priming of naïve CTLs. PBMCs were obtained by Ficoll gradient separation from HLA-A2+ healthy blood donors. CD14+, CD4+ and CD8+ cells were purified by positive selection using magnetic beads (Miltenyi Biotec). While CD4+ and CD8+ T cells were cryopreserved until the experiment day, CD14+ fraction was cultured in the presence of IL-4 (50 ng/ml) and GM-CSF (10 ng/mL) at 106 cells/mL during 5 days to obtain moDCs. After this period of time, the moDCs were maturated with LPS and incubated with synthetic ER-derived peptides at a final concentration of 1 μg/mL for 2 hours. Finally, peptide-loaded moDCs were co-cultured with autologous CD4+ and CD8+ T cells in culture medium supplemented with with IL-2 (10U/ml) and IL-7 (100 ng/ml). The ER-derived peptide stimulation of specific CD8+ CTL populations was assessed by MHC-I tetramer staining by flow cytometry using a combination of two-color tetramer for each peptide.

[0423] Tetramer Staining. Cells were resuspended in PBS, stained with Live/Dead Aqua-405 nm (ThermoFisher) during 20 minutes at 4° C. and washed once. After that, cells were resuspended in PBS-1% BSA containing the mix of SA-coupled tetramers and incubated in the dark at room temperature during 20 minutes. Without further washing, surface antibodies were added in PBS-1% BSA and cells were incubated 20 minutes in the dark at 4° C. Surface antibodies were a combination of anti-CD3-BV650+ anti-CD8-PECy7 in combination with anti-CCR7-AF700+ anti-CD45RA-BUV395 when required. Finally, cells were washed twice and resuspended in FACS buffer for flow cytometry analysis.

[0424] CTL-clones generation. Tetramer positive cells were single-cell FACS sorted (ARIA-sorter, BD) in U bottom 96-well plates. Sorted cells were collected in 100 μl of RPMI 10% human serum AB (Sigma-Aldrich) containing 150.000 feeders' cells. Finally, 100 μl of AIM-medium containing IL-2 (3000 IU/ml) and anti-CD3 (100 μg/ml, OKT3 clone from Miltenyi) were added and cells were cultured during 15-20 days maximum. When evident cell growth was observed in wells, we perform a second round of expansions with new feeders' cells for an additional period of 15 days maximum. Cells were feed and split as necessary during this period with the same culture media (AIM-RPMI 50/50+5% Human Serum) but only containing IL-2 at 500 IU/ml. Finally, expanded clones were checked for their specificity by FACs-tetramer staining and only clones with >85% of tetramer positive clones were used for further analysis.

[0425] Killing assays. To perform killing assays, xCELLigence RTCA S16 Real Time Cell Analyzer was used. H1650 cell-line were plated at 0.5×10⁶ cells/ml in pre-coated 16 well plates. One day after, cells were incubated or not during 1 h with different concentration of the correspondent synthetic peptides. After that, cells were washed twice with culture medium and incubated or not for additional 30 minutes with anti-MHC-I antibodies (clone W6/32, 50 μg/well) or isotype control at the same concentration. Without additional wash, CTL-clones were added at the correspondent ratio. The complete assay was done in free-serum culture medium in a final volume of 200 at 37° C. connected to the xCELLigence system. Impedance variation (cell-index) was measured in real-time during 40 h. Each condition was performed by duplicates.

[0426] Cytokine secretion and Jurkat cells activation. 50.000 H1650 cells were plated in 96-well plate in culture medium supplemented with 5% of fetal bovine serum. The day after, cells were culture during 1-2 h with synthetic peptides at different final concentrations. After that, cells were washed twice, CTL-clones were added at 1:1 ratio and co-cultured during 18 h with peptide-loaded target cells. Culture supernatants were collected and cytokine concentration analyzed by cytokine beads arrays (CBA, BD Biosciences) following manufacturer's instructions.

[0427] The same experiment was performed using transduced Jurkat cells instead of CTL-clones and two different types of target cells: H1650 and H1395 cell lines. In this assay, after co-cultured with peptide-loaded target cells, Jurkat cells were assessed by flow cytometry analyzing the expression of reporter markers. PMA/Ionomycin was used as positive control to activate Jurkat cells.

[0428] Tissues and Blood samples. Lung tumor, juxta tumor and lymph nodes samples were cut into small pieces and digested using a mix of collagenase-I (2 mg/ml), hyaluronidase (2 mg/ml) and DNasa (25 μg/ml) in a final volume of 2 ml culture medium (CO₂ independent medium+5) during 40 min at 37° C. After digestion single cell suspensions were collected through a cell Strainer and washed. Tumor and Juxta tumor suspensions were enriched on lymphocyte fractions by a ficoll gradient. After that cells were staining for tetramer analysis by FACs as described before.

[0429] Blood samples were seeded on a ficoll gradient and PBMCs were isolated. After that, PBMCs were enriched for CD8+ T cells using EasyStep Human CD8+ T cell Enrichment Kit (STEMCELL Technologies). Finally, enriched cells were stained for tetramer analysis as described before.

[0430] Tumor infiltrating lymphocytes (TILs) cultures. Tumor tissue was cut into small pieces (1-3 mm³ size, 6-12 pieces maximum). Each tumor fragment was transferred into individual wells from 24-well plates and cultured in a final volume of 2 ml RPMI 10% Human Serum+IL-2 6000 IU/ml. Cells were feed/split as necessary during 15-20 days and cryopreserve or analyzed for tetramer staining.

[0431] TCR cloning. Total RNA was extracted from CTL-clones and retrotranscribed into cDNA using SuperScript III (ThermoFisher). TCRα and β were amplified by PCR as described in Li et al 2019. DNA products were run in 2% agarose gels and sequenced after gel band extraction (Qiagen). TCR V regions (a and B) were concatenated with murine TCR constant chain and cloned into a PEW-pEF1A-inactEGFP vector and amplified in transformed bacteria.

[0432] Jurkat transduction. Lentivirus particles were produced by HEK-293 FT cell line transfected with TCR-expression plasmids together with envelope (pVSVG) and packaging (psPAX2) plasmids. After 64 h, supernatant was collected and lentivirus particles were concentrated using 100 kDa centrifugal filter (Sigma-Aldrich). Lentivirus suspension was transferred by spinoculation into TCR-negative Jurkat cells expressing reporter genes (NFAT-GPF, NF-KB-CFP and AP-1-mCherry). After 5 days, transduction efficiency was evaluated by FACS using anti-murine TCR-B antibody (Clone H57-597). This Jurkat cells were described in Rosskopf S. et al. 2018.

[0433] Mass spectrometry data analysis. Public immunopeptidomics raw data derived from MHC-eluted peptides were analysed using ProteomeDiscoverer 1.4 (ThermoFisher) with the following parameters: no-enzyme, peptide length 8-15 aa, precursor mass tolerance 20 ppm and fragment mass tolerance 0.02 Da. Methionine was enabled as variable modification and a false discovery rate (FDR) of 1% was applied. MS/MS spectra were searched against the human proteome from Uniprot/SwissProt (updated 6 Mar. 2020) concatenated with the list of all fusion transcripts-derived proteins from lung TCGA projects. Finally, peptides matching with Uniprot database or with translated fusion transcripts present in lung normal samples were discarded.

### 2.2 Results: Identification of Fusion Transcript Sequences Encoding Tumor Neoantigenic Peptide in Human Subject

### 2.2.1 Characterization of Neoantigens

[0434] First the TE-Exon fusion transcript landscape was characterized in normal samples from TCGA public database. A total of 8876 unique fusions were identified in 679 normal samples from 19 different tissues (bile duct, bladder, brain, breast, cervical, colon, head and neck, kidneys, liver, pancreas, PCPG, prostate, rectum, sarcoma, skin, thymus, thyroid, uterine). Specific fusions to each tissue type were found with a very small portion of pan-tissue fusion transcripts. These results suggest that a dedicated tissue specific regulatory mechanism is associated with these fusion transcripts.

[0435] Then the number of identified fusions in 514 LUAD samples from TCGA has been compared to their 59 normal associated pulmonary samples present in TCGA. On average, 235 fusions were identified in NSCLC samples, compared with 200 in healthy lung samples (Wilcoxon pvalue=9×10.⁻¹⁰). 8269 total unique fusions were identified in NSCLC tumors.

[0436] A first category of fusions called TSF (tumor specific fusion) was obtained as those found in at least 1% of tumor samples and in none of the normal samples. 210 fusions were thus defined as TSF.

[0437] Some high-frequency fusion transcripts in tumors and low frequency in normal cells may also be good candidates for neo-antigens. Thus, a second category called TAF (tumor associated fusion) was notably defined as fusions present in less than 4% of normal tissues, notably less than 2%, and more than 10% of the tumors and that is over expressed in tumors compared to normal tissue samples.

[0438] Fusion sequence:
[0439] In order to reconstruct the fusion nucleotide sequence, the sequence of the donor on chromosome “Donor Chromosome X” from “Donor_start_X” to “Donor_Breakpoint_X” on strand “Donor_strand_X” and the acceptor sequence on the chromosome “Acceptor_Chromosome_X” starting from “Acceptor_Breakpoint_X” to “Acceptor_end_X” on the strand “Acceptor_strand_X” have been extracted from the Ensembl HG19 human assembly database. It is to be noted that the use of the Ensembl HG19 human database is not limitative and that any other adapted database may be used such as NCBI reference Sequence Database (RefSeq).
[0440] Care should be taken to take the reverse complement of the sequence if the fusion is present on the minus strand.
[0441] The “fusion sequence” consists of the donor sequence followed by the acceptor sequence.

[0442] Nucleotide sequence of the fusion transcript:

[0443] On the basis of the known canonical transcripts in which the exon is involved, all the “fusion transcripts” were reconstructed.

[0444] When the donor is the exon (see FIG. 9A)
[0445] it starts with the beginning of the canonical transcript to the donor exon and replace the complete canonical exon sequence with the fusion sequence. In this case, the fusion transcript stops after the TE sequence of the acceptor.

[0446] When the donor is the TE (FIG. 9 B)
[0447] The sequence begins at the canonical position of the acceptor exon in the transcript and forget all exons upstream. The canonical sequence of the acceptor exon was replaced with the fusion sequence and the transcript was reconstructed until the end.

[0448] Each nucleotide sequence of size k (i.e. from 24 to 75 nucleotides) of the fusion transcript (translation of the first k-mer starts at the first nucleotide of the fusion transcript, translation of the second k-mer starts at the second nucleotide of the fusion transcript, etc.) was then translated into a peptide sequence.

[0449] The obtained peptides are then further analyzed with NetMHCpan for MHC binding prediction. Affinity for binding to at least one of the known human alleles was thus predicted, (see also example 1 for further illustration) for each k-mer present in the sequence.

[0450] The peptides were then further screened against a reference proteome, typically for human subject against all sequences present in Uniprot (representing all the sequences encoded in the human exome). Peptides were considered equal to those in Uniprot if they had the same amino acid sequence or if they only differed in the amino acid in the first or last position. All these equal sequences were then discarded from the candidate list. 117 peptide sequences derived from these 230 fusion transcripts where thus predicted to bind to HLA-A2: 01 (see table 3 below).

TABLE 3
Peptides LUAD

| Peptide | Peptide | Peptide |
|---|---|---|
| sequence | sequence | sequence |
| RLLHLESFL | TLGGLMPVL | LMTSSIMSV |
| TLMNLVQVL | FLQGSITFI | MLMKTVWQA |
| ILHSLVTGV | MLLLYIWQV | SLQPEDMAL |
| FMMEQVGLA | YLKIMPVHL | KILTYFPMV |
| AMDGKELSL | HTLGGLMPV | FLGTRVTRV |
| TLAYGKYYI | YIMARVLFV | SLMQSGSPV |
| GLIQLIWLA | FILRTDHYI | VLMWTMAHL |
| GMVDGGSNI | IMSSAIAYL | LLGETKVYV |
| YLWTTFFPL | FIIGILQLA | KILTYFPMV |
| ALWEAKMII | YLLQEIYGI | SLLERGLEA |
| WLSSRVTQL | GVFPVVIQA | VLSSLNVPL |
| AILPKANTV | ALVHLPSQL | FLERKSIRV |
| VLLFEVELV | GLHPAKPQV | FVGSSTFYL |
| GLDTGLQGM | MLVTWELAL | FLYTGDFFL |
| SLLDGTQLF | VLLTNTIWL | SVGPFALTV |
| GLPTGYLFV | ALVHLPSQL | NLALPLPKV |
| LLDRFGYHV | CLIDEMPEA | VLESGLYQV |
| SLLEETQAI | ALMGGFMKT | MLVAITVLI |
| MLLVQPAEL | LLLHLPLXL | FMDDAKILF |
| GLLNISHTA | TLQDKNLGL | ALVHLPSQL |
| HLYEPWFPV | ILANLPPAL | ILTASITSI |
| YLQGLPLPL | PLWDGMAGL | AMDGKELSL |
| KAVEGILAV | GLDHQTHPL | SLGWNISGV |
| MIYEENNRL | GMFLLPPQL | MISAFPNEV |
| YLPYFLKSL | RLADHLSFC | RLTHELPGI |
| GLYSLSSVV | RMRDQLPAL | LLFSDGEKV |
| LMISRTPEV | GLLHAEVAL | RLNESTTFV |
| LLGGPSVFL | SLQNCQVSV | KLEELKSFV |
| ILSGYGPCV | VISAFPSEV | SINEEIQTV |
| FLPDLDRPL | ALAIAALEL | RLHDGPLRA |
| AMDGKELSL | VLDGLDVLL | MISAFPNEV |
| RMDFEDLGL | ELFPPLFMA | ILHTSVPFL |
| TLIFNPTEI | FLIVAEILI | YLENMVSGV |
| LLPGLLLLL | IVAEILISL | QLLGRLESL |
| LLLVHQHAV | KAVEGILAV | RLLHLESFL |
| FLDDAPPGT | YLPHLPQVL | ALLRQMEGI |
| VLIRYVWTL | MLLDPMGGI | TLNKDFQEV |
| YLCGHLHTL | RLLHLESFL | IMEQGDLSV |
| VLSQLTILI | YLAYILYFV | RLLHLESFL |

### 2.2.2 Validation on HLA-A2 Associated Peptides

[0451] Given that HLA-A2 allele is expressed in almost 50% of the Caucasian population, together with the existence of different technical tools, validations were focused on HLA-A2-associated peptides.

[0452] In the following paragraphs TE-Exon derived-transcripts is used interchangeably with “fusion transcripts” and the term “TE-derived peptides” is used interchangeably with “fusion transcripts-derived peptides.

### Expression of TE-Exon Derived-Transcripts in Lung Adenocarcinoma Samples

[0453] To experimentally validate the predicted TE-Exon transcripts, the expression by PCR in LUAD tumor samples and tumor cell lines was validated firstly. Specific primers for each chimeric fusion were thus designed, in order to have one of them binding to the TE part and the other to the Exon part of the fusion. The results were further confirmed by sequencing of the PCR products.

[0454] In particular, specific primers were designed in such a way that the forward primer was binding in the “donor” sequence and the reverse primer was binding in the “acceptor” sequence of the reconstructed fusion sequence. PCR reactions were run on RNA derived from lung tumor samples and human tumor cell lines. Amplifications products were seeded on agarose gels and bands found on the expected size were cut and sequenced. Finally, sequenced PCR products were compared with the reconstructed fusion sequence.

[0455] Using this approach, it was possible to confirm the presence of predicted fusion transcripts both in LUAD tumor samples and tumor cell lines. Table 4 below summarizes the results found for 8 of the most frequent chimeric fusions with a predicted peptide associated to bind with high affinity to HLA-A2 allele.

TABLE 4
Most frequent fusion transcript validation. The most frequent fusions peptides were validated by PCR in 15 LUAD tumor
samples and 6 LUAD tumor cell lines. The status ‘Yes’ or ‘No’ in the table below indicates the presence
or absence of the PCR product on the expected size. When the PCR product was further validated by sequencing, is denoted as ‘Yes’.

| | Frequency | TE-Exon fusion derived-peptides asociated to bind HLA-A2 | | | | | | | |
|---|---|---|---|---|---|---|---|---|---|
| | peptide | 119 | 48 | 28 | 24 | 23 | 19 | 18 | 16 |
| | sequence | RLLHLESFL | MLMKTVW [symbol] A | FLGTRVTRV | AILPKANTV | YLPYFLKSL | AMDGKELSL | FLIVAEILI | RLADHLSFC |
| [symbol] | [symbol] | Yes | Yes | No | No | Yes | No | No | No |
| [symbol] | [symbol] | Yes | No | No | No | No | No | No | Yes |
| [symbol] | [symbol] | Yes | No | No | No | No | No | No | Yes |
| | [symbol] | Yes | Yes | No | No | Yes | No | No | No |
| | [symbol] | Yes | No | No | No | No | No | No | No |
| | [symbol] | Yes | Yes | No | No | Yes | [symbol] | No | No |
| [symbol] | [symbol] | Yes | No | No | No | Yes | Yes | No | Yes |
| [symbol] | [symbol] | Yes | Yes | No | No | Yes | Yes | No | No |
| [symbol] | [symbol] | Yes | No | No | No | Yes | No | No | Yes |
| | [symbol] | Yes | No | No | No | Yes | Yes | No | No |
| | [symbol] | Yes | No | No | No | No | No | No | No |
| | [symbol] | Yes | No | No | Yes | Yes | Yes | Yes | Yes |
| | [symbol] | Yes | No | No | No | No | Yes | No | No |
| | [symbol] | Yes | No | No | No | Yes | Yes | No | No |
| | [symbol] | Yes | No | No | No | No | Yes | Yes | No |
| | [symbol] | Yes | Yes | Yes | Yes | Yes | Yes | Yes | No |
| | [symbol] | Yes | Yes | No | No | Yes | Yes | Yes | No |
| | [symbol] | Yes | Yes | Yes | Yes | Yes | Yes | No | No |
| | [symbol] | Yes | Yes | No | Yes | Yes | No | No | Yes |
| | [symbol] | Yes | Yes | Yes | Yes | Yes | Yes | No | Yes |
| | [symbol] | No | No | No | No | No | Yes | No | No |

[symbol]

indicates data missing or illegible when filed

### Binding of ER-Derived Peptides to HLA-A2 Molecule

[0456] Once confirmed the expression of chimeric transcripts, the derived-peptides were synthetized and their binding to HLA-A2 was confirmed. Because monomer stabilization and tetramer formation are only possible in the presence of a high affinity binding peptide, the formation of HLA-A2 tetramers was estimated in the presence of synthetized peptides by flow cytometry. All predicted peptides were able to stabilize tetramer formation, showing a percentage of fluorescence higher than 50% relative to positive control. As positive control, a known high affinity binding peptide to HLA-A2 derived from Cytomegalovirus (CMV) was used. This result confirmed the predicted high affinity binding to HLA-A2 allele. FIG. 10 shows the result for 10 peptides derived from the most frequent fusions peptides.

[0457] FIG. 17 shows a new set of peptides, also derived from frequent chimeric transcripts, with a confirmed binding to HLA-A2 using the same peptide-MHC-I complex formation assay. As a positive control of complex formation, we used both CMV pp65 495-503 (NLVPMVATV) and the mutated sequence of Melan-A (MelA mut, ELAGIGILTV), both known good binders to HLA-A2. The non-mutated sequence of Melan-A (MelA) was used as a control of low binder peptide. Negative is recombinant HLA-A2 molecule without any peptide.

### Immunogenicity of ER-Derived Peptides

[0458] The following step after binding validation to HLA-A2 allele, was to test the immunogenicity of predicted peptides. Priming assays were thus performed to test the ability of identified peptides to expand specific cytotoxic T cells. PBMCs from HLA-A2+ healthy donors were used to generate monocyte derived-DCs (moDCs). After loading the moDCs with a mix of synthetic peptides, autologous co-culture was performed with CD4+ and CD8+ T cells. Finally, the expansion of specific CD8+ T cells was analysed by flow cytometry using two-colours tetramer staining. As a control of specific expansion, the co-culture was performed in the absence of peptides. By using this approach in one donor, it has been possible to identify and expand specific CD8+ T cells recognizing 6 of the most frequent chimeric fusion derived-peptides (RLLHLESFL, LLGETKVYV, AILPKANTV, RLADHLSFC, FLIVAEILI, YLWTTFFPL). This result is evidenced by an increase in at least one magnitude order of the percentage of tetramer positive cells compared to control test among total CD8+ T cells.

[0459] The same experiment was performed in order to evaluate the response in additional 5 donors. FIG. 11A summarizes the results obtained for the total of 6 donors analyzed in which we found specific CD8+ T expansions for 23 out of 29 of the most frequent fusions transcripts-derived peptides (YLWTTFFPL, FLGTRVTRV, RLADHLSFC, LLGETKVYV, MLVTWELAL, MLMKTVWQA, SLMQSGSPV, AILPKANTV, AMDGKELSL, LLDRFGYHV, GLLNISHTA, ILTASITSI, ILSGYGPCV, RQAPGFHHA, GLPSHVELA, ILHSLVTGV, LLHLESFLV, VLLTNTIWL, LLTSWHLYL, RLLHLESFL, YLPYFLKSL, VLMWTMAHL, YLQGLPLPL). As a positive of expansions, mutated Melan-A peptide (ELAGIGILTV) were used. These experiments show that these peptides are able to induce an immune response and confirms the immunogenicity of ER-derived peptides.

### Generation of Cytotoxic T Lymphocytes Clones Recognizing ER-Derived Peptides

[0460] Expanded CD8+ tetramer positive T-cells from immunogenicity assays (FIG. 11A) were single cell FACS-sorted in order to generate cytotoxic T lymphocytes (CTLs) clones. 10 clones recognizing 5 different ER-derived peptides were generated: YLWTTFFPL, LLGETKVYV, MLVTWELAL, MLMKTVWQA, RLADHLSF. These peptides are listed in Table 3 as peptide 9, 86, 53, 80 and 64 respectively. It will be referred to these numbers to indicate the specificity of each generated CTL-clone. For example, CTL-clone 9 recognize ER-derived peptide 9. In a second set of experiments a new CTL-clone 17 was generated recognizing peptide 17 (LLDRFGYHV).

[0461] In order to evaluate the cytotoxic capacity of generated CTL-clones, two different functional assays were conducted using the H1650 cell line as target cells. This is a LUAD-derived tumor cell line expressing HLA-A2 allele.

[0462] First, the ability of CTL-clones to secret cytokines after exposure to ER-derived peptides was measured. After co-cultured of the CTL-clones with the target cells loaded with the specific ER-derived peptides during 18h, secretion of INF-y, TNF and Granzyme-B (Gr-B) was measured in culture supernatants. All CTL-clones were activated after exposure specific ER-derived peptides, secreting cytokines in a dose-dependent manner (FIG. 11B).

[0463] In a second set of experiments, CTL clones killing capacity was assessed. CTL-clones were co-cultured in different conditions with target cells loaded or not with ER-derived peptides. Using xCELLigence system the real-time impedance variation in a target cells monolayer was measured. In these assays, a decrease in cell-index is related with a decrease in the number of cells in the monolayer reflecting cell viability.

[0464] When CTL-clone 9 was co-culture in 1:1 ratio with target cells loaded with ER-derived peptide 9, a decrease in cell-index over time was observed, compared to the control cells (target cells alone). This cell-index decrease was inhibited when co-culture was performed in the presence of blocking anti-MHC-I antibody (+ anti-MHC-I). Performing the co-culture using the same concentration of isotype control (+ isotype) did not inhibit the decrease in cell-index. Moreover, the amount of the decrease increased when target cells were loaded with a higher concentration of peptide (1 pM compared to 1 uM) (FIG. 11C, left panel). These result show that cytotoxic T cells can recognize peptides encoded by a fusion transcript as herein described and kill target tumor cells expressing such peptides.

[0465] It was then demonstrated that ER-derived peptides are naturally expressed and presented by target cells, such said target target-cells can thus be killed by co-culturing them with CTL-clones without external addition of peptides. To this aim, co-culture of CTL-clone 9 with H1650 target cells at different ratios were performed. The right panel of FIG. 11C, shows that CTL-9 was able to kill target cells at a ratio effector-target of 4:1 as compared to the control cells (target cells alone). Moreover, killing efficacy is increased at higher ratios (8:1). No killing of target cells was evidenced at lower ratios (2:1).

[0466] Finally, similar experiments were performed with CTL-clone 9, CTL-clone 64, and CTL-clone 80 showing a specific killing of target cells that could be also inhibited when the co-culture is performed in the presence of anti-MCH-I antibodies (FIG. 11D).

[0467] All together, these results confirm that cytotoxic T cells that recognizes several different peptides encoded by a fusion transcript as herein described can recognize and kill tumor cells expressing said specific fusion transcripts-derived peptides and that this effect is due to the specific recognition of peptides in the context of MHC-I molecules. Moreover, the fact that CTL-clones are able to kill target cells without addition of external peptides, provide clear evidence that fusion transcripts-derived peptides are naturally expressed and presented by an LUAD tumor cell line.

### Generation of Engineered T-Cells Recognizing Fusion-Derived Peptides

[0468] Jurkat cells transduced with lentiviral vector encoding for CTL-9 TCR sequence were co-cultured with two different target cells, H1650 and H1395. Both are LUAD-derived cell lines express HLA-A2 allele. TCR-mediated activation of Jurkat cells was evaluated by flow cytometry as an increase in the fluorescence of reporter genes (NFAT-GPF, NF-KB-CFP and AP-1-mCherry). Preliminary results showed that Jurkat cells are activated when co-cultured with both target cells compared to negative control (non-transduced Jurkat cells). Furthermore, this activation increased in a dose-dependent manner when the co-culture was performed with target cells loaded with specific peptides. PMA/ionomycin was used as positive control (FIG. 12).

[0469] These results were repeated in another set of experiments and similar ones were obtained with Jurkat cells transduced with lentiviral vector encoding TCR sequences from CTL-86 and CTL-53 and CTL-17. Transduced Jurkat cells were activated by co-culture with a target tumor cell line loaded with the corresponding ER-derived peptide (Specific/Relevant peptide) but not with the control Melan-A peptide (Unrelated/Irrelevant peptide, ELAGIGILTV) (FIG. 18A). As expected, activation is inhibited by blocking with anti-HLA-I antibodies (FIG. 18B). TCRs expressed by the generated CTL-clones are thus specific to the corresponding HLA-A2 presented ER-derived peptides. Table 4bis lists the sequences of re-expressed TCRs.

[0470] These results are in line with the results shown in FIGS. 11 C and D, showing that LUAD-derived tumor cells express TE-derived peptides. Furthermore, these results also highlight the technical relevance of CTL-clones TCR sequences in the development of engineered T cells.

TABLE 4bis
TCR sequences derived from CTL-clones recognizing chimeric transcripts-derived peptides.

| TCR | | | | | | | | |
|---|---|---|---|---|---|---|---|---|
| num- | Speci- | TCRalpha | | TCRbeta | | | | |
| ber | ficity | V | J | V | D | J | CDR3alpha | CDR3beta |
| 1 | LLDRFGYHV | TRAV41*01 | TRAJ34*01 | TRBV6-5*01 | TRBD1*01 | TRBJ- | CAVLLDNTDKLIF | CASSRLQGALELFF |
| | | | | | | 2*01 | | |
| 2 | YLWTTFFPL | TRAV12*2*03 | TRAJ44*01 | TRBV7-6*01 | TRBD1*01 | TRBJ2- | CAVNTRGTASKLTF | CASSLGGGTDTQYF |
| | | | | | | 3*01 | | |
| 3 | LLGETKVYV | TRAV12-3*01 | TRAJ49*01 | TRBV2*02 | TRBD2*01 | TRBJ- | CAVFTGNQFYF | CASLSGESYEQYF |
| | | | | | | 7*01 | | |
| 4 | MLVTWELAL | TRAV35*01 | TRAJ54*01 | TRBV13*01 | TRBD2*01 | TRBJ2- | CAGQLAGAQKLVF | CASSPSRDGQETQYF |
| | | | | | | 5*01 | | |

### Presence of CD8+ Cells Recognizing Fusion-Derived Peptides in LUAD Patients

[0471] It was then aimed to identify the presence of CTL cells recognizing fusion-derived peptides in LUAD tumor samples.

[0472] In a first set of experiments tumor infiltrating lymphocytes (TILs) expanded with a mix of TE-derived peptides and Il-2, or only with Il-2, were analyzed by tetramer staining. As is shown in FIGS. 13A and B, CD8+ T-cells cells recognizing fusion-derived peptides were found in TILs derived from LUAD patients.

[0473] It was then showed that tetramer positive cells could be detected and their phenotype in non-expanded CD8+ T cells derived from fresh tumor samples was further assessed. Using this strategy, CD8+ T cells present in Tumor, juxta-tumor, invaded lymph-nodes and blood derived from LUAD patient samples were thus analyzed. The cell phenotype was determined based on the expression of surface markers CCR7 and CD45RA for Naïve (CCR7+CD45+), Central Memory (CM, CCR7+CD45RA−) Effector Memory (EM, CCR7−CD45−) and Terminal Effectors (TE, CCR7−CD45+) T cells. Interestingly, tetramer positive cells found in tumor tissues shared preferentially a memory phenotype whereas naïve cells (CCR7+CD45+) are found mostly in cells derived from lymph nodes (FIGS. 14A and B). Patient 2 and 3 are the same in FIG. 13 and FIG. 14.

[0474] All samples tested derived from HLA-A2+ patients.

[0475] The presence of tetramer positive cells with a memory phenotype in tumor tissues, together with the presence of tetramer positive cells in TILs, provide evidence that an immune response is generated against TE-derived peptides in these patients. Moreover, the existence of naïve tetramer positive cells in lymph nodes shows that an immune response against these particularly TE-derived peptides can be generated.

[0476] In a second cohort of 5 primary, untreated, LUAD tumor, juxta-tumor, tumor-draining lymph node and blood samples from LUAD cancer HLA-A2+ patients were analyzed. Half of each sample was analyzed directly ex-vivo by isolating CD8+ T cells without in-vitro expansions, and the other half was cultured in-vitro for 20 days either with chimeric transcript-derived peptide mixed with IL-2 (patients 1 and 2) or with IL-2 alone (patients 3, 4, 5), aiming to amplify in the samples, the populations of specific T cells recognizing Chimeric transcript-derived peptides. T cells were identified using double color tetramer staining. Antibodies directed CCR7 and CD45RA were also added to the non-expanded cells to distinguish naïve and memory cells. Expansions were considered with 5 or more double tetramer-labelled cells. FIG. 19A shows a summary of the 7 “Chimeric transcript-derived peptide specific” tetramer-positive T cell populations found in the 4 patients analyzed directly ex-vivo (one of the patient samples could not be analyzed for technical reasons). CCR7/CD45RA labeling showed that all tetramer-positive T cells detected in tumor samples have a clear effector/memory phenotype, whereas in blood and lymph nodes the “Chimeric transcript-derived peptide specific” tetramer-positive T cells have variable proportions of less differentiated, CCR7+naïve and/or central memory phenotypes.

[0477] Therefore, these results demonstrate that primary human NSCLC tumors contain chimeric transcript-derived peptide specific memory T cells (FIG. 19B).

[0478] A summary of expanded, tetramer+CD8+ T cells, is shown in FIG. 19C. For the majority of peptide specificities, T cells were expanded from both the tumor and the matched invaded lymph nodes (LN) analyzed only in 2 patients, and in some cases from the matched juxta-tumor samples (Jt) (FIG. 19C). 5 out of 7 specific tetramer positive populations were also found at Day 20 in the same patient and tissue found ex-vivo without T cell expansions (FIG. 19A and bold squares on FIG. 19C).

[0479] These results provide thus evidence that chimeric transcript-derived peptide specific T cells are present in tumors, tumor-draining lymph nodes and sometimes in juxta-tumor tissue and blood of LUAD patients before and after in-vitro expansion, consistent with the existence of chimeric transcripts-derived peptide specific immune responses in LUAD patients.

### Peptide Identification by Mass Spectrometry in LUAD Biopsies.

[0480] Presentation by MHC class I molecules on the tumour cell surface is required for ER-derived peptides in order to be recognized by cytotoxic T cells. In order to confirm that predicted peptides are express on MHC class I molecules, public data from MHC I immunopeptidome derived from 3 LUAD biopsies (Laumont C M et al., “Noncoding regions are the main source of targetable tumor-specific antigens” Sci Transl Med. 2018 10 (470)) were used. OpenMS Software was used to analyse the raw data uploaded to PRIDE database from MHC-I immunopurification of 3 LUAD tumours (PXD009752, PXD009754 and PXD009755). Having in mind that data-dependent acquisition in proteomics only allows the identification of those sequences contained in a target database (generally the whole human proteome); the peptides as per the present application had not been previously identified because they derive from non-coding sequences. The MS/MS identifications incorporating the sequences of the herein predicted peptides in the target database has been re-analyzed. Five peptides among the 3 samples biopsies (peptides ID: 3304, 269, 757, 1810, 3953) were found. To perform this analysis, all predicted peptides derived from chimeric fusions present in at least 5 samples in the TCGA binding to any MHC I allele were considered. This result confirms the expression of chimeric fusion-derived peptides on MHC class I molecules in LUAD tumors.

[0481] Later, we extended our analysis to new lung immunopeptidomics datasets (Bulik-Sullivan et al. Nat. Biotec 2018, Chong et al. Nat. Comm. 2020 and Javitt et al. Front Immunol 2019). Of note, all datasets were generated with fresh lung tumor samples with the exception of Javitt et al. Front Immunol 2019 containing LUAD tumor cell line. For this second analysis, ProteomeDiscoverer 1.4 Software was used to identify the ER-derived peptides. Considering the 4 datasets, 23 unique ER-derived peptides were present in at least one of the total 19 immunopeptidomic samples. In FIG. 15, ER-derived peptides (rows) identified in each MHC sample (column) are indicated with a grey square. On the right, the peptide sequence found is indicated. Interestingly, some of them were observed in more than 1 MHC sample indicating that they are shared across samples. These results confirm that fusion transcripts-derived peptides are processed and presented by HLA-I molecules on tumor cells surface.

[0482] Peptide RLADHLSFC derived from a fusion transcript where the gene part of the fusion is a tumor suppressor gene (Fusion ID: chr22: 29117506:->chr22: 29115473:-/gene involved: CHEK2) and peptide GLPSHVELA derived from a fusion transcript where the gene part is an oncogene (Fusion ID: chr6: 117763597:->chr6: 117739669:-/gene involved: ROS1). Interestingly, both peptides were found to be immunogenic (FIG. 11A) and particularly for peptide RLADHLSFC, results show in FIG. 11 D indicate that could be express by H1650 cell line. Furthermore, we found TILs recognizing peptide GLPSHVELA (FIG. 12A), which indicates that this fusion transcript-derived peptide could be express in LUAD tumor samples.

### Example 3: Identification Neoantigenic Peptides Derived from Fusion Transcripts Composed of a TE Element and an Exonic Sequence from Various Cancer Samples

[0483] 9184 samples from 32 different cancer types (Acute Myeloid Leukemia, Adrenocortical Carcinoma, Bladder Urothelial Carcinoma, Breast Ductal Carcinoma, Breast Lobular Carcinoma, Cervical Carcinoma, Cholangiocarcinoma, Colorectal Adenocarcinoma, Esophageal Carcinoma, Gastric Adenocarcinoma, Glioblastoma Multiforme, Head and Neck Squamous Cell Carcinoma, Hepatocellular Carcinoma, Kidney Chromophobe Carcinoma, Kidney Clear Cell Carcinoma, Kidney Papillary Cell Carcinoma, Lower Grade Glioma, Lung Adenocarcinoma, Lung Squamous Cell Carcinoma, Mesothelioma, Ovarian Serous Adenocarcinoma, Pancreatic Ductal Adenocarcinoma, Paraganglioma & Pheochromocytoma, Prostate Adenocarcinoma, Sarcoma, Skin Cutaneous Melanoma, Testicular Germ Cell Cancer, Thymoma, Thyroid Papillary Carcinoma, Uterine Carcinosarcoma, Uterine Corpus Endometrioid Carcinoma and Uveal Melanoma) were analyzed according to the method as previously described.

[0484] 16580 fusion transcripts were identified.

### 4 Example 4: Proteomics Results

### Results

### Total Proteomics

[0485] Mass spectrometry-based proteomics has emerged as a powerful tool to interrogate the actual protein content of a given cell preparation. To confirm that JETs are indeed translated into proteins, mass spectrometry output files (called raw files) generated from cell lines and fresh tumors were analyzed to identify different populations of JET-derived peptides. This study has been grouped into two different analyses, each one providing a different and complementary type of information, that demonstrate that JET derived proteins can reliably be detected in a tumor sample or in a tumor cell line.

[0486] First it was demonstrated that proteins derived from the JETs were found to be highly recurrent in CCLE dataset. Therefore, the in-silico translated junctions from all those JET mRNA sequences predicted in more than 7 different cell lines in the CCLE cohort were used and interrogated to the mass spectrometry raw files from Nusinow et al. 2020, which consists in the proteomics analysis of 375 cell lines from CCLE. These cell lines were grouped in TMT10plex, generating a total amount of 42 MS/MS output files. This MS-based proteomics analysis led to the identification of 186 JET derived proteins, containing at least 1 peptide overlapping the splicing junction (Table 5).

TABLE 5

| | | Recurrence |
|---|---|---|
| Sequence | Chimeric_id | in dataset |
| SSTGPADLK | chr20:42212014:+ > chr20:42213492:+ | 72 |
| MLLGLLAK | chr7:20686997:+ > chr7:20687158:+ | 72 |
| MGISIVK | chr8:74872000:− > chr8:74871067:− | 72 |
| IQSFTNISFSMPHR | chr1:44680991:+ > chr1:44683983:+ | 63 |
| TQEVEVAVNR | chr7:73776406:+ > chr7:73778585:+ | 45 |
| MASASPTIK | chr3:53915693:− > chr3:53914136:− | 36 |
| ETDLITVTGSSFLTHR | chrX:57620887:+ > chrX:57667223:+ | 36 |
| EAENEVQTAK | chr7:116555100:+ > chr7:116556114:+ | 36 |
| LNIHLLMVTSSVTSSSILINLDR | chr13:41835827:− > chr13:41835011:− | 36 |
| DLELEIPFGPAIPLLGSCSQCR | chr11:129978600:+ > chr11:129979324:+ | 36 |
| MILESTYHNTLHIAMK | chr6:17835789:− > chr6:17834302:− | 36 |
| MLAPENSDIGLAAWGR | chr20:32888526:− > chr20:32883391:− | 36 |
| TQEAELAGVATVR | chr3:122863676:+ > chr3:122864369:+ | 27 |
| TSLHSIPVTVGRR | chr17:42188097:− > chr17:42182463:− | 27 |
| AEIAPLHSSLGDK | chr5:132253438:− > chr5:132240096:− | 27 |
| MLGAVAHNCDPSTLR | chr12:57081782:− > chr12:57080459:− | 27 |
| GPAPEPPSMR | chr19:50010181:+ > chr19:50027764:+ | 27 |
| MACNMGLEKGEK | chr5:179238682:+ > chr5:179250858:+ | 27 |
| MASICPFLK | chr20:49307663:− > chr20:49307455:− | 27 |
| EIETILANPENK | chr6:130374597:+ > chr6:130376316:+ | 27 |
| QAQCSTDSTLWYFMHGVCR | chr3:12604393:+ > chr3:12610374:+ | 18 |
| LASTTSVSEEDVSSR | chr12:79996543:− > chr12:79990438:− | 18 |
| AIAQGIQELR | chr17:43475315:− > chr17:43474814:− | 18 |
| TCPSAMIVSFLK | chr10:51747031:+ > chr10:51749068:+ | 18 |
| VQLAGNTLPSTPCWTR | chr9:130924301:+ > chr9:130925722:+ | 18 |
| GLEFETSLANVVQLPNSIVFSVTR | chr18:19147325:− > chr18:19146167:− | 18 |
| KESLEASMMLK | chr9:88264917:− > chr9:88261333:− | 18 |
| VETLCATLWGFGK | chr10:102711867:+ > chr10:102716208:+ | 18 |
| MMAHLCIFGLQSR | chr5:86704905:− > chr5:86704003:− | 18 |
| VSTSHVGPWVSP | chr5:1475076:− > chr5:1474800:− | 18 |
| NLLDIDAPVTGWQELK | chr4:102117073:− > chr4:102104428:− | 18 |
| AKIAPAEGPDVSER | chr3:185370866:− > chr3:185369956:− | 18 |
| EAEEPSDNGPLFTELK | chr14:97307963:+ > chr14:97312432:+ | 18 |
| MAGLVFQWLR | chr3:136005373:+ > chr3:136012598:+ | 18 |
| ISQLQIWDTAGQER | chr3:128828867:− > chr3:128814012:− | 18 |
| VISAFPSELQSQCTK | chr6:100379769:− > chr6:100369131:− | 18 |
| TAQLPEQLMTWHSR | chr22:37870550:− > chr22:37861756:− | 18 |
| LLNITAGLGSDGTIR | chr6:34511797:− > chr6:34511385:− | 18 |
| MGTVAHAYNPSTLGGR | chr2:48593264:+ > chr2:48600431:+ | 18 |
| MLPPFVLAVTMGLSVVK | chr3:15058779:+ > chr3:15062260:+ | 18 |
| QADHLMPGVQDQPNMTSVP | chr11:18491675:− > chr11:18490765:− | 18 |
| WAGHSASCSSLRK | chr22:18351213:− > chr22:18348778:− | 18 |
| TFMMIHCHLMNNMSCR | chr3:10160654:+ > chr3:10167310:+ | 9 |
| GQIGILLWNSMGTMQQPR | chr20:30254794:− > chr20:30253889:− | 9 |
| APTDSTLCTLCK | chr17:62609987:− > chr17:62602758:− | 9 |
| LREPIDNLTPEER | chr20:34315958:− > chr20:34313077:− | 9 |
| EWSGIQKATLMDLQLSDSNFRR | chr18:244302:− > chr18:226901:− | 9 |
| TSLANMVVFPLMK | chr2:98263129:+ > chr2:98263530:+ | 9 |
| IWLTEDATALLQRPGWR | chr11:44960717:− > chr11:44959917:− | 9 |
| METGIISLLPPWGGRPSAVR | chr1:6531548:− > chr1:6531300:− | 9 |
| GNLLIISLDAK | chr17:65894534:+ > chr17:65899905:+ | 9 |
| TSSGLPLILHCVYAK | chr16:82201145:− > chr16:82197799:− | 9 |
| SGVQDQPGQQGPVTLHK | chr10:28824988:+ > chr10:28872328:+ | 9 |
| WADHLTSGVR | chr10:95225471:− > chr10:95216694:− | 9 |
| MNDSCIFRPETDSDIMELTDR | chr19:19976808:+ > chr19:19982937:+ | 9 |
| IVEQTLK | chr13:115035095:+ > chr13:115037659:+ | 9 |
| MELTIPGEGK | chr2:99224660:− > chr2:99220654:− | 9 |
| HFIAMMYFK | chr5:145540727:− > chr5:145540049:− | 9 |
| ETFFLQQQGNDAK | chr16:89607754:+ > chr16:89611056:+ | 9 |
| QLQVCVLQIMGSCVPSCPTP | chr11:64643083:− > chr11:64641990:− | 9 |
| EAEASQAAQEAEINAR | chr1:183107957:+ > chr1:183109539:+ | 9 |
| YSNVLEMAWLQYA | chr12:63961380:− > chr12:63954442:− | 9 |
| MATVAHTSLATVEDFQIRPHTLY | chr2:37520065:− > chr2:37518142:− | 9 |
| VHSYK | | |
| LPIFFFGTHETLLGGR | chr9:15506559:− > chr9:15492223:− | 9 |
| QASRALPPCPWNTQTSGSR | chr10:6010739:− > chr10:6008302:− | 9 |
| LDIGFPSLQNYR | chr17:47441711:+ > chr17:47450375:+ | 9 |
| TLPSLDDLR | chr7:72720556:− > chr7:72719094:− | 9 |
| LLVNDPETAVK | chr12:112149997:+ > chr12:112150302:+ | 9 |
| LQEMGPLGVPQR | chr14:105335983:+ > chr14:105342593:+ | 9 |
| TSLANMDMFK | chr12:72301769:+ > chr12:72307606:+ | 9 |
| MGAVVHACKPSTLGGR | chr15:42151606:− > chr15:42151178:− | 9 |
| KQAQKDCPTHSGVS | chr17:43536749:− > chr17:43531638:− | 9 |
| SEGIRIMEMLLK | chr5:145153908:− > chr5:145144563:− | 9 |
| GFGPSTMLGTQK | chr1:193028315:− > chr1:193022970:− | 9 |
| MTKLLSPIR | chr22:32787416:− > chr22:32784086:− | 9 |
| WLTPVIPALWEAER | chr8:103282996:− > chr8:103282411:− | 9 |
| ETTLAFK | chr1:240569786:+ > chr1:240601361:+ | 9 |
| ATALQPGR | chr1:45988450:− > chr1:45981479:− | 9 |
| ITSVVMVDEAHER | chr6:30629093:− > chr6:30628019:− | 9 |
| SQYCTPALEAETK | chr17:78263365:+ > chr17:78263458:+ | 9 |
| TLTFLGPLQFR | chr19:20025631:+ > chr19:20026089:+ | 9 |
| TPEVEATVPLQK | chr22:42085308:+ > chr22:42089467:+ | 9 |
| VILIFFPECYAK | chr22:31947110:+ > chr22:31952928:+ | 9 |
| DGDHPSQHDGVLLCCPGWSTM | chr9:96211969:− > chr9:96210771:− | 9 |
| GGSHLQSQHFGRPR | chr21:34973474:− > chr21:34971554:− | 9 |
| SVSTIFLTCSR | chr10:1100108:− > chr10:1090111:− | 9 |
| MGTVAHACNPCTLGG | chr20:17550856:+ > chr20:17565018:+ | 9 |
| TPGRNGHLESGHLK | chr7:102793520:+ > chr7:102939015:+ | 9 |
| SGFSFLLGIVGF | chr12:22831248:+ > chr12:22837417:+ | 9 |
| EIETLHHPSTGVILADHK | chr13:44432917:− > chr13:44413224:− | 9 |
| TIAQMIDSTVALPLEAT | chr8:38697785:+ > chr8:38698832:+ | 9 |
| NQSQSHLNVGLLASR | chr9:21808999:+ > chr9:21815432:+ | 9 |
| SVERFLQEDQMFHQEK | chr9:97843062:+ > chr9:97909493:+ | 9 |
| MELTIPGVGHSSGSLNEGK | chr2:99224633:− > chr2:99220654:− | 9 |
| ESLEASMMLK | chr9:88264917:− > chr9:88261333:− | 9 |
| LLITAEDQSMWIQS | chr13:113897987:+ > chr13:113898724:+ | 9 |
| QAWWIMPIIPALWEAK | chr2:10135488:+ > chr2:10136007:+ | 9 |
| MESQMVEQLCSR | chr8:66633382:− > chr8:66631730:− | 9 |
| GLTGEFSITR | chr5:1257816:− > chr5:1255526:− | 9 |
| GGEFAPSWDCKP | chr2:37490123:− > chr2:37487527:− | 9 |
| CLTTLFGSFR | chr7:107256834:+ > chr7:107258773:+ | 9 |
| SQHFGRPSCVPLPATGVK | chr12:69249761:− > chr12:69236109:− | 9 |
| EQLSQAEAVALK | chr6:17837109:− > chr6:17835895:− | 9 |
| GQVLGPWPSR | chr19:1045618:+ > chr19:1046229:+ | 9 |
| TGAQPPATMPLNVSFTNR | chr8:128749923:+ > chr8:128750494:+ | 9 |
| TGIPSATLIR | chr22:46193106:+ > chr22:46202839:+ | 9 |
| EQTDVMHQNIYD | chr5:414855:+ > chr5:422844:+ | 9 |
| FVDVTECQACSANSR | chr22:25019883:+ > chr22:25023093:+ | 9 |
| IRDSEELIGR | chr15:79649214:+ > chr15:79703742:+ | 9 |
| DHIMFSLFEK | chr1:116206078:+ > chr1:116206282:+ | 9 |
| DSGSTTWCFIQK | chr12:112169999:+ > chr12:112171727:+ | 9 |
| GFPSHMSLGYHFQCPIPR | chr2:28190310:+ > chr2:28210860:+ | 9 |
| CPEMLPTSQTLR | chr12:110470515:+ > chr12:110471602:+ | 9 |
| FLQQCLLLLVSLEVFR | chr19:54502735:+ > chr19:54515205:+ | 9 |
| TAGGQQQALPLGSPR | chr17:45356073:+ > chr17:45360720:+ | 9 |
| SVTVSHNPQLGPSGCR | chr5:133691774:− > chr5:133686118:− | 9 |
| AVTANGYQMLDGK | chr2:43779972:− > chr2:43779478:− | 9 |
| FPSGILCVIMPGR | chr6:3432328:− > chr6:3416089:− | 9 |
| HDYDEDLVQEASSEDVLGVHMV | chr5:177450333:+ > chr5:177462097:+ | 9 |
| DK | | |
| CNPSTLGDQAEK | chr2:231040909:− > chr2:231037675:− | 9 |
| AEISCQQPAPGPR | chr19:49832179:+ > chr19:49838971:+ | 9 |
| GQEMETIPANTLIQEDILDTGNDK | chr12:86274547:+ > chr12:86276001:+ | 9 |
| GGFHHDCK | chr7:84736037:− > chr7:84727281:− | 9 |
| LWTSLPAPMFSR | chr20:60835987:+ > chr20:60838672:+ | 9 |
| CMCLEYPAVVEFAPFQK | chr13:115049839:+ > chr13:115051777:+ | 9 |
| LIISIFLVHSPK | chr12:7125578:− > chr12:7120720:− | 9 |
| GATWTGSSPQGSWDFTR | chr7:75083158:− > chr7:75070925:− | 9 |
| TVTVPAQELK | chr9:128421519:− > chr9:128420078:− | 9 |
| ENTMAENELQV | chr10:112572705:+ > chr10:112576399:+ | 9 |
| TPMELELPPASHFEFIGSSANCR | chr2:37570066:+ > chr2:37579932:+ | 9 |
| GLLWSGMALTGSLRVTQR | chr22:36007617:− > chr22:36007153:− | 9 |
| GLSDHVQLSQSHSTSFHVSPK | chr16:90158141:− > chr16:90141431:− | 9 |
| MILESTYHNTLHIAMKAPELK | chr6:17835789:− > chr6:17834302:− | 9 |
| CPETFLDGTLGR | chr19:4703015:− > chr19:4702728:− | 9 |
| SYQLRPGTMIEWGNYWR | chr7:56052571:+ > chr7:56059164:+ | 9 |
| TILANTVMAR | chr16:2115231:+ > chr16:2115520:+ | 9 |
| MELTIPGVGK | chr2:99224656:− > chr2:99220650:− | 9 |
| SSPQAIQMVATLGTTTCCSFDNLL | chr7:50595367:− > chr7:50571757:− | 9 |
| EVGPICNK | | |
| GDPGIDAR | chr21:43290029:− > chr21:43280481:− | 9 |
| MAFSGSQAPYLSPDPK | chr17:25958330:+ > chr17:25965125:+ | 9 |
| TIAQGNLSNTDVQAAKRSCSYL | chr16:21987564:+ > chr16:21988399:+ | 9 |
| MQENTLRAPTDSTLWHPPHYK | chr14:60442915:+ > chr14:60443943:+ | 9 |
| DQPGQHGPGMRPPLGLR | chr1:222838358:+ > chr1:222838651:+ | 9 |
| EAPTYITWTIRR | chr1:51218110:− > chr1:51210447:− | 9 |
| DLVGGYTPGTPYK | chr2:131824664:− > chr2:131813268:− | 9 |
| GLNEAIFMIPTNPPPTFR | chr8:99648370:− > chr8:99608397:− | 9 |
| DAAALLLANEAR | chr6:110774731:− > chr6:110768193:− | 9 |
| ATSLWYFMAAQAK | chr2:42615589:− > chr2:42580483:− | 9 |
| MDLVQVSGSLGSPVLSCK | chr10:104231153:+ > chr10:104231667:+ | 9 |
| QHQEVTLYGLK | chr15:99433697:+ > chr15:99434554:+ | 9 |
| LVSLSQYWEK | chr18:74574245:+ > chr18:74580641:+ | 9 |
| TGTTPVYSSQHEQHR | chr1:178806756:+ > chr1:178846633:+ | 9 |
| QATGMDLEVIILSDITQK | chr6:129786434:+ > chr6:129788349:+ | 9 |
| LLALLDVLK | chr1:22263648:− > chr1:22224962:− | 9 |
| GIGYPAWAMK | chr2:131840150:− > chr2:131829742:− | 9 |
| MESQLQIEETTLLR | chr16:4667729:+ > chr16:4700366:+ | 9 |
| GLLGLAGMRPELR | chr3:40555431:+ > chr3:40557351:+ | 9 |
| GQEMETILANMISR | chr9:96211969:− > chr9:96209979:− | 9 |
| ICRPGAAAAARHPGSPGGQLAPR | chr16:29692733:+ > chr16:29705985:+ | 9 |
| ELGVTAGGLPTR | chr12:42795298:+ > chr12:42835117:+ | 9 |
| GNLDTKTPGMPK | chr10:12280484:+ > chr10:12301986:+ | 9 |
| LLELQGLPLMPSR | chr19:53119971:− > chr19:53097557:− | 9 |
| AGGSLEAGGK | chr7:44883388:− > chr7:44882953:− | 9 |
| EGDVVLYCSSATFCATSQSGTGE | chr2:219296440:+ > chr2:219296580:+ | 9 |
| VR | | |
| STNDELDELR | chr18:8708134:+ > chr18:8718422:+ | 9 |
| INSAHLQTLSAGK | chr15:49600974:+ > chr15:49611801:+ | 9 |
| MGLSPASAPRPQTCFSLSTTK | chr17:17735071:− > chr17:17723835:− | 9 |
| MLADRSMSSSLSASQLHTVNMR | chr17:38177572:− > chr17:38176606:− | 9 |
| GTQVFVTGYTPWQR | chr20:1532337:− > chr20:1530245:− | 9 |
| METDLECSDSR | chr5:68551355:+ > chr5:68551980:+ | 9 |
| TLLPGTLR | chr7:129915476:+ > chr7:129916468:+ | 9 |
| WLMPVIPALGR | chr1:160283437:− > chr1:160282957:− | 9 |
| LLGAEIAPLHSSLDGLS | chr9:97214855:+ > chr9:97216240:+ | 9 |
| DPAIALQPGPQSER | chr15:79168112:+ > chr15:79170555:+ | 9 |
| MAHTLQYFK | chr8:72942008:+ > chr8:72964774:+ | 9 |
| MAHTLQYFKSSQHQR | chr8:72942008:+ > chr8:72964774:+ | 9 |
| MISAFPTEGQR | chr11:74830434:+ > chr11:74873700:+ | 9 |
| MDFMNAEILLK | chr19:49834874:− > chr19:49797810:− | 9 |
| SEEPLRPAAAPSENALR | chr9:119602892:− > chr9:119583062:− | 9 |
| TSPVAGPALPPNYK | chr13:45576476:+ > chr13:45578440:+ | 9 |
| EYLEYEDTAQR | chr2:113956803:+ > chr2:113966557:+ | 9 |
| QNLHEIGLWR | chr12:42835231:+ > chr12:42836287:+ | 9 |
| AGGSLEAK | chr19:6365650:+ > chr19:6366269:+ | 9 |
| AMSQINFFTNDPASAIGEYEDLR | chr10:118750845:− > chr10:118738819:− | 9 |
| LELALLAPQACR | chr8:53483830:− > chr8:53455005:− | 9 |
| SLVLEGFLINSKPENACEPI | chr3:149581921:+ > chr3:149589816:+ | 9 |
| TVTDSTLWIASSPGGLSPADCGAS | chr3:77121427:+ > chr3:77147165:+ | 9 |
| FR | | |
| IASTQEADVVVAR | chr5:94876747:− > chr5:94876534:− | 9 |
| LLRELQVMYGMLVFTLVLR | chr11:76708271:+ > chr11:76709807:+ | 9 |

[0487] The identification of peptides overlapping splicing regions is less sensitive likely due to 1) the lower abundance in the whole proteome of the sequence of interest compared to a non-spliced region and 2) splicing motifs code in around 40% of the cases for a lysine (K) or arginine (R) amino acids, which are also the cleavage sites for trypsin (i.e.: the enzyme used for MS sample processing). Therefore, the above-mentioned protocol probably leads to an underestimated of the presence of JET-derived proteins in tumor samples and cell lines.

[0488] It has been then demonstrated that tumor-specific JETs were indeed translated. Focusing on lung tumors, lung tumor-specific JETs predicted in TCGA and CCLE projects were in silico translated and interrogated against 2 different mass spectrometry output datasets: Nusinow et al. 2020 (CCLE proteomics dataset) and Stewart et al. 2019 (lung primary tumours proteomics dataset). This analysis provided information about JET-derived proteins not only in the context of a cell line, but also in cancer human samples. In cell lines, we were able to identify 221 peptides overlapping the splicing site of 206 JET-derived proteins (Table 6).

TABLE 6

| Sequence | chimeric_Tx_Id | Recurrence |
|---|---|---|
| HTDLQATAIGK | chr12: 104824437: +: Charlie6 > chr12: 104995684: | 108 |
| | +: ENST00000546689 | |
| YISLIYTNYAEGK | chr11: 67352712: +: ENST00000398603 > chr11: | 81 |
| | 67361105: +: LTR22A | |
| AQWLTPVIPALWEAEAGE | chr1: 36637320: +: AluSp > chr1: 36638065: +: | 45 |
| SPERPR | ENST00000530729 | |
| MILSSIR | chr6: 144066592: +: L3 > chr6: 144070122: +: | 45 |
| | ENST00000427704 | |
| MGISIVK | chr8: 74872000: − | 36 |
| | : ENST00000520242 > chr8: 74871067: −: Tigger3b | |
| LLINRMVTL | chr5: 52197198: +: MLT1D > chr5: 52201593: +: | 36 |
| | ENST00000282588 | |
| MGAVAHTCNPSTLGGQGK | chr12: 104645612: +: AluSc > chr12: 104651797: +: | 36 |
| | ENST00000429002 | |
| ALVNLSFVTGVSSMTFMM | chr2: 270006: +: MER39 > chr2: 271866: +: | 36 |
| GNICR | ENST00000442386 | |
| APVSDEK | chr7: 130069134: −: L3 > chr7: 130067859: − | 27 |
| | : ENST00000541543 | |
| MNSLSIR | chr9: 128638776: +: Tigger2a > chr9: | 27 |
| | 128677965: +:ENST00000491787 | |
| ALELGVVSQPSVYR | chr1: 223852296: −: MIRb > chr1: 223842101: − | 27 |
| | : ENST00000419193 | |
| MGAVTHTCNPSTLEGR | chr2: 207009280: −: AluJo > chr2: 207008856: − | 27 |
| | : ENST00000432169 | |
| ELLHGTEGGEHR | chr17: 27441216: −: L3 > chr17: 27441115: − | 27 |
| | ENST00000531253 | |
| VAASSPIMRK | chr11: 71728382: −: MIR > chr11: 71727576: − | 18 |
| | : ENST00000358965 | |
| TITLEVEPR | chr17: 16285735: +: ENST00000535788 > chr17: | 18 |
| | 16300446: +: MER4B | |
| MGAVAHTCNPSTLEGQDC | chr3: 185370866: −: AluSx1 > chr3: 185369956: − | 18 |
| PCGRPRR | : ENST00000421047 | |
| EAEEPSDNGPLFTELK | chr14: 97307963: +: AluSx > chr14: 97312432: +: | 18 |
| | ENST00000216639 | |
| LQDSTGSWEK | chrX: 40570189: −: MER8 > chrX: 40569381: − | 18 |
| | : ENST00000324817 | |
| GLPSHAELIR | chr12: 16168469: +: THE1D > chr12: 16185476: +: | 18 |
| | ENST00000531803 | |
| CNPSTLGDQAEK | chr2: 231040909: −: AluJb > chr2: 231037675: − | 18 |
| | : ENST00000258381 | |
| QLQSANYGHMQASCLSIK | chr12: 52639328: +: ENST00000331817 > chr12: | 18 |
| | 52645561: +: MER58A | |
| AHLNERNTLQEENK | chr18: 20537359: +: L2c > chr18: 20555116: +: | 18 |
| | ENST00000582354 | |
| DLYANTVMSVELNAASGT | chr7: 5567728: −: | 18 |
| R | ENST00000331789 > chr7: 5522250: −: MIRb | |
| TEEMPQLNFGMAVLYGG | chr3: 107447807: +: ENST00000415149 > chr3: | 18 |
| MCL | 107448789: +: AluJr | |
| ENLPSIQPGMVLQAVAHL | chr5: 140764890: +: ENST00000518325 > chr5: | 18 |
| HGR | 140765965: +: BC200 | |
| LLNATHQIGCQYTHR | chr1: 160314616: +: ENST00000421914 > chr1: | 18 |
| | 230653304: +: MLT1B | |
| MAVVAHACNLNSFGGQG | chr3: 49096310: −: AluSp > chr3: 49065271: −: | 18 |
| PAWFLR | ENST00000429182 | |
| MVWVGTIGSGPK | chr17: 59856034: −: | 18 |
| | MamRep1161 > chr17: 59853923: − | |
| | ENST00000259008 | |
| NLLDIDAPVTGWQELK | chr4: 102117073: −: | 18 |
| | ENST00000525819 > chr4: 102104428: −: MLT1J | |
| VISAFPSELQSQCTK | chr6: 100379769: −: L1PA3 > chr6: 100369131: −: | 18 |
| | ENST00000281806 | |
| MACNMGLEKGEK | chr5: 179238682: +: MER61- | 18 |
| | int > chr5: 179250858: +: ENST00000504627 | |
| MLDNLMYDYELNWVR | chr14: 106801819: −: LIME2 > chr14: 106518589: − | 18 |
| | : ENST00000390598 | |
| AKIAPAEGPDVSER | chr3: 185370866: −: AluSx1 > chr3: 185369956: − | 18 |
| | : ENST00000346192 | |
| MVLLVR | chr2: 189861722: +: (TA)n > chr2: 189861891: +: | 18 |
| | ENST00000304636 | |
| VGGSRVLGGDQ | chr6: 30690007: +: AluSc > chr6: 30690314: +: | 18 |
| | ENST00000327892 | |
| NTQLTMWLPQLIWTK | chr7: 127304880: +: MER21C > chr7: 127347646: + | 18 |
| | : ENST00000354725 | |
| MCQKEVMEQSAGR | chr2: 133425973: −: | 18 |
| | ENST00000345008 > chr2: 133381838: −MLT1B | |
| MAQWLMPVIPALWEAQIH | chr2: 224652913: −: AluSz > chr2: 224642586: − | 9 |
| FILLFSR | : ENST00000396653 | |
| LLSSSMHTLQTK | chrX: 38146409: +: CT−rich > chrX: 38146366: − | 9 |
| | : ENST00000378505 | |
| QQMLVCFVNLDVNK | chr2: 228948057: −: LIPA8 > chr2: 228892259: − | 9 |
| | : ENST00000344657 | |
| MASTISAGCGGGACGPSYS | chr20: 62284680: − | 9 |
| GG | : ENST00000370053 > chr20: 62277869: −: AluY | |
| LLDEAAGEGEAAGR | chr15: 83103156: +: ENST00000358583 > chr15: | 9 |
| | 83193188: +: GA−rich | |
| TSPVAGPALPPNYK | chr13: 45576476: +: 7SLRNA > chr13: 45578440: + | 9 |
| | : ENST00000361121 | |
| LSTVVDADEIIVLDQEK | chrX: 74280058: − | 9 |
| | : ENST00000529949 > chrX: 74267940: −: L1MB8 | |
| MDFMNAEILLK | chr19: 49834874: −: MLT1J2 > chr19: 49797810: − | 9 |
| | : ENST00000335875 | |
| MATVAHTSLATVEDFQIRP | chr2: 37520065: −: AluJb > chr2: 37518142: − | 9 |
| HTLYVHSYK | : ENST00000443187 | |
| METQADLVSQEPQALLDS | chr7: 99674926: − | 9 |
| ALREAEAGR | : ENST00000428683 > chr7: 99674180: −: AluSc8 | |
| LLITAEDQSMWIQS | chr13: 113897987: +: L1MC5 > chr13: 113898724: | 9 |
| | +: ENST00000326335 | |
| LADLFGWSQLIYNHITEYK | chr4: 2886393: +: ENST00000398129 > chr4: | 9 |
| | 2888303: +: L2a | |
| LLHHQLHMMLDK | chr1: 145474732: +: ENST00000323397 > chr1: | 9 |
| | 145476653: +: MIR3 | |
| LSPLPSNSCVTWGGYR | chr7: 7498396: −: MIRb > chr7: 7495743: − | 9 |
| | : ENST00000399429 | |
| MILESTYHNTLHIAMK | chr6: 17835789: −: MIR > chr6: 17834302: − | 9 |
| | : ENST00000378814 | |
| MQENTLRAPTDSTLWHPP | chr14: 60442915: +: MER1A > chr14: 60443943: +: | 9 |
| HYK | ENST00000254271 | |
| MMVNCHAHFWVSTYLSP | chr8: 74209664: +: ENST00000521928 > chr8: | 9 |
| HLL | 74216833: +: L2 | |
| SQVMDVDTLY | chr3: 98618227: −: AluSc8 > chr3: 98600611 | 9 |
| | : −: ENST00000326857 | |
| TDDSLGLGLK | chr11: 14737526: +: L1PA2 > chr11: 14793483: +: | 9 |
| | ENST00000282096 | |
| GHEFETSLANMVIQLLK | chr7: 154793407: −: AluSq > chr7: 154790494: − | 9 |
| | : ENST00000457196 | |
| MDGQMMDTGVDK | chr4: 2453586: +: (TGGA)n > chr4: 2453869: +: | 9 |
| | ENST00000506607 | |
| HLEDYMEHTPPPR | chr2: 95476942: +: MIR > chr2: 95540521: +: | 9 |
| | ENST00000295201 | |
| IFTYQICK | chr15: 72463983: −: L1M5 > chr15: 72462280: − | 9 |
| | : ENST00000564129 | |
| TENLGSILSWWHNK | chr3: 72442890: −: L1MC4a > chr3: 72428578: − | 9 |
| | : ENST00000477973 | |
| MGGATSPLLSSAK | chr17: 56588640: −: MIRb > chr17: 56586202: − | 9 |
| | : ENST00000579925 | |
| MISAFPTEGQR | chr11: 74830434: +: L1PA4 > chr11: 74873700: +: | 9 |
| | ENST00000289575 | |
| TFTMIHFHLITR | chr12: 4948527: +: Tigger2a > chr12: 4959904: +: | 9 |
| | ENST00000542998 | |
| LLPPCQPGSSLSSK | chr16: 18565603: −: MIR > chr16: 18540905: | 9 |
| | −: ENST00000569051 | |
| GLFSQAEIR | chr6: 123549550: −: THE1C > chr6: 123545276: | 9 |
| | −: ENST00000398178 | |
| MAALTIATGLAVD | chr11: 77850610: −: | 9 |
| | ENST00000530454 > chr11: 77848691: −: Tigger1 | |
| MYMAHGLTQSTK | chr5: 153529506: +: L2c > chr5: 153674376: +: | 9 |
| | ENST00000425427 | |
| EFETSLGLWQAMR | chr9: 15573873: +: AluJo > chr9: 15578847: +: | 9 |
| | ENST00000535968 | |
| TAELPKPSISSNNSNPK | chr19: 42217314: +: Tigger4a > chr19: | 9 |
| | 42311149: +: ENST00000415495 | |
| VQDHPGQHGEAIGK | chrX: 47312190: −: AluSx > chrX: 47308873: − | 9 |
| | : ENST00000432977 | |
| TSLGNMINDK | chr15: 64365987: −: AluJr4 > chr15: 64365216: − | 9 |
| | : ENST00000300030 | |
| MLPPFVLAVTMGLSVVK | chr3: 15058779: +: L2c > chr3: 15062260: +: | 9 |
| | ENST00000323373 | |
| QIGCYQGFAFAWK | chr11: 69488615: −: AluJo > chr11: 69486587: − | 9 |
| | : ENST00000542341 | |
| SQGSGLNFIDLMVR | chr16: 77786496: +: MIR3 > chr16: 77850818: +: | 9 |
| | ENST00000302536 | |
| AWEAEIMVKYLLFMWEIK | chr2: 177179106: +: AluSz6 > chr2: 177191553: +: | 9 |
| | ENST00000249442 | |
| ATVWLGSGDEK | chr16: 50651682: +: MER91A > chr16: 50655550: + | 9 |
| | : ENST00000268459 | |
| DNTDSVVFEDVAVNFTQE | chr19: 12635610: −: L1MB3 > chr19: 12577664: − | 9 |
| EWALLGPSQK | : ENST00000598753 | |
| QSLSEELK | chr2: 211453855: +: LTR16C > chr2: 211454830: +: | 9 |
| | ENST00000430249 | |
| AAAVAAKAEAVSPAK | chr19: 39833216: +: (CGG)n > chr19: 39866290: +: | 9 |
| | ENST00000598913 | |
| KLILCLNDCK | chr12: 104518408: −: MER33 > chr12: 104517201: − | 9 |
| | : ENST00000240055 | |
| TGAQPPATMPLNVSFTNR | chr8: 128749923: +: G-rich > chr8: | 9 |
| | 128750494: +: ENST00000377970 | |
| DLEFETSLANK | chr10: 103896914: +: AluSx1 > chr10: 103897607: | 9 |
| | +: ENST00000278070 | |
| LSSQHLGGQEPEQLPEKR | chr1: 19410263: −: AluJo > chr1: 19408067: − | 9 |
| | : ENST00000375224 | |
| TPEVEATVPLQK | chr22: 42085308: +: AluSx1 > chr22: 42089467: +: | 9 |
| | ENST00000402966 | |
| ISQLQIWDTAGQER | chr3: 128828867: −: AluJo > chr3: 128814012: − | 9 |
| | : ENST00000457077 | |
| VILIFFPECYAK | chr22: 31947110: +: L2 > chr22: 31952928: +: | 9 |
| | ENST00000450787 | |
| IRDSEELIGR | chr15: 79649214: +: LIME4a > chr15: 79703742: +: | 9 |
| | ENST00000424155 | |
| MLAPENSDIGLAAWGR | chr20: 32888526: −: L2b > chr20: 32883391: − | 9 |
| | : ENST00000217426 | |
| QETPMAADEGSAEK | chr9: 140606077: +: L1MB7 > chr9: 140611078: +: | 9 |
| | ENST00000460843 | |
| MLADRSMSSSLSASQLHT | chr17: 38177572: −: MIRb > chr17: 38176606: − | 9 |
| VNMR | : ENST00000394126 | |
| LGVGSDSEVEER | chr12: 124157140: +: AluJo > chr12: 124158165: +: | 9 |
| | ENST00000303372 | |
| IQEAEVAVK | chr17: 48743773: +: AluSp > chr17: 48744915: +: | 9 |
| | ENST00000502426 | |
| IDMISCVWK | chr2: 223509604: −: MER44A > chr2: 223507626: − | 9 |
| | ENST00000281828 | |
| MGVVAHTCNPNTLGGQGI | chr11: 125450741: +: AluSx1 > chr11: 125451107: | 9 |
| EMHQR | +: ENST00000278903 | |
| EDQMSSWSISTSVQPSGR | chr1: 208254106: −: MIRb > chr1: 208252795: − | 9 |
| | : ENST00000367033 | |
| MLLTHWLNLADHWR | chrX: 63029083: −: MIR3 > chrX: 62944591: − | 9 |
| | : ENST00000253401 | |
| MEQFVQVYNWIDV | chr6: 39290104: − | 9 |
| | : ENST00000507712 > chr6: 39289934: −: MIR3 | |
| LLSSLFSEPTCLILVSPQ | chr17: 43026722: −: L2c > chr17: 43013726: − | 9 |
| | : ENST00000590129 | |
| TAQLPEQLMTWHSR | chr22: 37870550: − | 9 |
| | : ENST00000356998 > chr22: 37861756: −: L2a | |
| SYQLRPGTMIEWGNYWR | chr7: 56052571: +: ENST00000322090 > chr7: | 9 |
| | 56059164: +: AluSp | |
| QEDPLNLTCPSCGITFAPK | chr16: 4052808: −: AluSx > chr16: 4043511: − | 9 |
| | : ENST00000571467 | |
| TQEAEVANAASK | chr18: 19241710: −: AluSp > chr18: 19239304: − | 9 |
| | : ENST00000289119 | |
| ITSVVMVDEAHER | chr6: 30629093: −: AluY > chr6: 30628019: − | 9 |
| | : ENST00000376442 | |
| NIFSCISMGNFGGPGK | chr1: 92518215: +: ENST00000370383 > chr1: | 9 |
| | 92524420: +: LTR86B1 | |
| VISAFPSEVPGSSHSGVPDS | chr16: 21059883: −: L1PA2 > chr16: 21051265: − | 9 |
| GR | : ENST00000415178 | |
| DILMYMVWWCVPMMPAT | chr2: 225400245: − | 9 |
| RR | : ENST00000409096 > chr2: 225395962: −: AluSz | |
| GQEIQTILANTCIPR | chr1: 10478650: +: AluSc > chr1: 10478883: +: | 9 |
| | ENST00000270776 | |
| METDLECSDSR | chr5: 68551355: +: ENST00000502604 > chr5: | 9 |
| | 68551980: +: AluJo | |
| MLSFMRPPQPCFLYSLWN | chr9: 17365375: +: MSTA > chr9: 17366615: +: | 9 |
| | ENST00000380647 | |
| MLEKLEFEDEVPGP | chr7: 151329155: − | 9 |
| | : ENST00000493872 > chr7: 151297948: −: MIRb | |
| MELTIPGVGHSSGSLNEGK | chr2: 99224633: −: MIRb > chr2: 99220654: − | 9 |
| | : ENST00000328709 | |
| MASICPFLK | chr20: 49307663: − | 9 |
| | : ENST00000535356 > chr20: 49307455: −: MIR3 | |
| AFLAMIHSVSSMK | chr7: 151865652: −: UCON26 > chr7: 151864463: − | 9 |
| | : ENST00000355193 | |
| LSLSEDTDNSSLSPPPAK | chrX: 19072648: −: L1ME4a > chrX: 19058342: − | 9 |
| | : ENST00000357991 | |
| LHHWTPAWAAEK | chr17: 80441180: +: AluSx > chr17: 80443373: +: | 9 |
| | ENST00000457415 | |
| TISPFTGK | chr15: 29384448: +: MER58A > chr15: 29385278: + | 9 |
| | : ENST00000561069 | |
| MSAALMFDAVHVVVSAV | chr19: 42559834: −: L2a > chr19: 42558624: − | 9 |
| R | : ENST00000301218 | |
| MLLTTFVIHGR | chr17: 15939279: −: Tigger1 > chr17: 15938258: − | 9 |
| | : ENST00000395851 | |
| MLLTTFVIHGRR | chr17: 15939279: −: Tigger1 > chr17: 15938258: − | 9 |
| | : ENST00000395851 | |
| EYIVPMLTGLQPIMIIQ | chr5: 139864383: +: L1ME3A > chr5: 139864706: + | 9 |
| | : ENST00000421134 | |
| PQNSTASVSEAER | chr1: 21588222: −: L2c > chr1: 21586885: − | 9 |
| | : ENST00000473505 | |
| SVSTIFLTCSR | chr10: 1100108: −: Tigger1 > chr10: 1090111: − | 9 |
| | : ENST00000381344 | |
| MVILESMVSLTQELCPVA | chr14: 24530511: +: MIRc > chr14: 24530706: +: | 9 |
| MR | ENST00000342740 | |
| VSTEEEK | chr15: 51201329: +: MIRb > chr15: 51204275: +: | 9 |
| | ENST00000558439 | |
| MAHLLPNVSEETVSPTR | chr9: 123334133: −: L2b > chr9: 123330666: − | 9 |
| | : ENST00000481266 | |
| MGTVADTCDPSTLGGGVC | chr2: 201751637: −: AluJo > chr2: 201750495: − | 9 |
| DTAYR | : ENST00000415562 | |
| MLQPSQEVGTISK | chr4: 157831776: −: L1MD2 > chr4: 157782641: − | 9 |
| | : ENST00000274071 | |
| TQSLGVDEVTIVNILTNRS | chr15: 60689166: −: MIRc > chr15: 60656722: − | 9 |
| N | : ENST00000559370 | |
| MPGPLRSLEMAR | chr19: 20278169: +: ENST00000597083 > chr19: | 9 |
| | 20281106: +: AluSx1 | |
| VMGL VIPDVPK | chr13: 96595382: −: L1ME3F > chr13: 96592345: − | 9 |
| | : ENST00000376747 | |
| LHHCTPAWLTER | chr9: 33878600: +: AluJb > chr9: 33886879: +: | 9 |
| | ENST00000263228 | |
| MLSTSWTLPR | chr20: 30459529: −: L2a > chr20: 30457400: − | 9 |
| | : ENST00000278979 | |
| LAPALLSAMIFAVLWSTR | chr17: 64403546: +: MSTA > chr17: 64492319: +: | 9 |
| | ENST00000284384 | |
| NGISGQVLK | chr2: 238991995: +: ENST00000433750 > chr2: | 9 |
| | 238992535: +: L1MDa | |
| MQLDQICISFDEGK | chr22: 50947090: +: Charlie9 > chr22: | 9 |
| | 50954876: +: ENST00000299821 | |
| MGAWLTPDTGVGK | chr18: 9766693: +: AluJr4 > chr18: 9775275: +: | 9 |
| | ENST00000578921 | |
| STNDELDELR | chr18: 8708134: +: L2c > chr18: 8718422: +: | 9 |
| | ENST00000306329 | |
| EAEAGESLKPGR | chr17: 421135: −: AluJr > chr17: 420873: | 9 |
| | −: ENST00000574029 | |
| SQILGMQSLALVAQSGVQ | chr11: 17098209: −: FRAM > chr11: 17098094: −: | 9 |
| WR | ENST00000533969 | |
| WQIYSGPLPTSPGAACLPC | chr16: 57483993: +: L1ME2z > chr16: 57484952: +: | 9 |
| FSCGAK | ENST00000262507 | |
| EYLEYEDTAQR | chr2: 113956803: +: ENST00000245796 > chr2: | 9 |
| | 113966557: +: L4 | |
| SSGAQGEYAGLATIR | chr9: 6566281: −: L1MC5 > chr9: 6565429: −: | 9 |
| | ENST00000321612 | |
| AGGSGSVVIWTVPTGSWQ | chr15: 75629457: +: AluJr > chr15: 75630403: +: | 9 |
| K | ENST00000564815 | |
| VNGYPNYLIR | chr14: 45702609: −: L2a > chr14: 45702023: −: | 9 |
| | ENST00000453142 | |
| MASAWEGGAWR | chr14: 105195833: +: (GCGTG)n > chr14: 1051961 | 9 |
| | 66: +: ENST00000555486 | |
| CMCLEYPAVVEFAPFQK | chr13: 115049839: +: (TG)n > chr13: 115051777: +: | 9 |
| | ENST00000375299 | |
| TSLANMVGMFK | chr6: 136924515: −: AluSx1 > chr6: 136923117: − | 9 |
| | : ENST00000359015 | |
| FSEASVAMLPVQLWNR | chr6: 147981955: +: MSTA > chr6: 148058453: +: | 9 |
| | ENST00000566741 | |
| VETLCATLWGFGK | chr10: 102711867: +: AluSz > chr10: 102716208: +: | 9 |
| | ENST00000370269 | |
| MDLVQVSGSLGSPVLSCK | chr10: 104231153: +: ENST00000366277 > chr10: | 9 |
| | 104231667: +: MIR3 | |
| MVAGPTYLGDLCPPK | chr14: 94523351: −: MIR > chr14: 94521530: − | 9 |
| | : ENST00000330836 | |
| HCHALMPK | chr12: 15701267: +: L1MC4a > chr12: 15702028: +: | 9 |
| | ENST00000535311 | |
| ASGSQGMFK | chr8: 95855580: +: AluSx3 > chr8: 95861690: +: | 9 |
| | ENST00000343161 | |
| IVESGDTPK | chr2: 25505735: −: Charlie24 > chr2: 25505580: − | 9 |
| | : ENST00000406659 | |
| ASGSLEGPFVTWR | chr19: 15297447: −: AluSx > chr19: 15296490: − | 9 |
| | : ENST00000263388 | |
| ENTMAENELQV | chr10: 112572705: +: ENST00000369519 > chr10: | 9 |
| | 112576399: +: L2a | |
| TVTVPAQELK | chr9: 128421519: −: MIR > chr9: 128420078: − | 9 |
| | : ENST00000373496 | |
| NLQLSAHLLTSSLK | chr9: 112168615: −: MER102a > chr9: 112166888: − | 9 |
| | : ENST00000374541 | |
| NLDLLEGMESTQMPK | chr13: 38183213: −: LIMEf > chr13: 38171419: − | 9 |
| | : ENST00000541481 | |
| LDGHAGDLDIEDDMK | chr14: 62187825: +: AluSg4 > chr14: 62188227: +: | 9 |
| | ENST00000394997 | |
| MTKLLSPIR | chr22: 32787416: −: AluSx1 > chr22: 32784086: − | 9 |
| | : ENST00000216038 | |
| YEEEIRTCR | chr6: 24551662: − | 9 |
| | : ENST00000543707 > chr6: 24541573: −: MLT1B | |
| QAWRLMPVIPAHWEAEV | chr7: 156789005: −: AluJo > chr7: 156786875: − | 9 |
| K | : ENST00000469500 | |
| AEIALLHSSLGNREK | chrX: 114878268: +: AluSx > chrX: 114879341: +: | 9 |
| | ENST00000537301 | |
| TFWTNDDPGLEVLVPEGG | chr6: 134528494: − | 9 |
| VLPETQQ | : ENST00000367858 > chr6: 134508473: −: ERVL- | |
| | B4-int | |
| QEAEIPGANLNVEILSSCR | chr1: 117629144: +: ENST00000369466 > chr1: | 9 |
| | 117630672: +: L2c | |
| LNEGASGLDGKPGSR | chr4: 109762023: −: MIRb > chr4: 109755546: − | 9 |
| | : ENST00000494183 | |
| MESQLQIEETTLLR | chr16: 4667729: +: AluJb > chr16: 4700366: +: | 9 |
| | ENST00000588994 | |
| MSDPVFLSLSLLVCETGDH | chr9: 20361021: −: MIR > chr9: 20360839: − | 9 |
| EKRNGR | : ENST00000380338 | |
| ICHFLSVTGSLLR | chr2: 74071187: +: MIR > chr2: 74071940: +: | 9 |
| | ENST00000424659 | |
| MSSINPNTSATWK | chr14: 90416441: − | 9 |
| | : ENST00000267544 > chr14: 90416136: −: THE1B | |
| IILANTFSK | chr3: 185328562: +: AluY > chr3: 185329439: +: | 9 |
| | ENST00000545472 | |
| FCRLLNGLGEEIK | chr10: 28247767: −: MIRb > chr10: 28233891: − | 9 |
| | : ENST00000537576 | |
| AQEFETSLGNMFR | chr12: 95596369: −: FLAMC > chr12: 95566520: | 9 |
| | −: ENST00000451107 | |
| MSDQEKGPIVSSGVR | chr2: 203103163: −: | 9 |
| | ENST00000392244 > chr2: 203098881: −: | |
| | Charlie4z | |
| TNYAASSYLSLTPEQWK | chr22: 23204348: +: L1MA4A > chr22: 23248706: | 9 |
| | +: ENST00000390325 | |
| TSLGNMLTADPR | chr14: 35778674: +: AluSx > chr14: 35779946: +: | 9 |
| | ENST00000556506 | |
| SPVTMEQLICK | chr2: 90074903: +: MER70− | 9 |
| | int > chr2: 90139454: +: ENST00000492446 | |
| GAGPAVPGGPVPAGATLT | chr17: 2627917: +: GCrich > chr14: 106330469: − | 9 |
| TGAR | : ENST00000461719 | |
| GQEFETSLANMETPGR | chr16: 3718260: −: AluSx > chr16: 3716119: − | 9 |
| | : ENST00000576335 | |
| FVDVTECQACSANSR | chr22: 21567354: − | 9 |
| | : ENST00000424627 > chr22: 21564141: −: L2b | |
| TELNIVPVPR | chr19: 41438041: +: L2b > chr19: 41509906: +: | 9 |
| | ENST00000330446 | |
| MTLATDGTADMFGIR | chr3: 4927407: − | 9 |
| | : ENST00000441894 > chr3: 4898429: −: MLT1D | |
| MELSAQFAATTTTPPRPLG | chr11: 58943356: +: MIR3 > chr11: 58949212: +: | 9 |
| R | ENST00000227451 | |
| EAIALCHFFFNISGILLWYP | chr4: 25676447: +: L3 > chr4: 25677757: +: | 9 |
| IPFTR | ENST00000503434 | |
| DAAALLLANEAR | chr6: 110774731: −: LTR40c > chr6: 110768193: − | 9 |
| | : ENST00000434949 | |
| MELTIPGVGK | chr2: 99224656: −: MIRb > chr2: 99220650: − | 9 |
| | : ENST00000328709 | |
| METPAQLLFLLLLWLPAE | chr2: 89442543: − | 9 |
| AGGIMR | : ENST00000492167 > chr2: 89438968: −: AluYb8 | |
| MGAVTHIWNPRTLGGQDP | chr17: 40046175: −: AluSq2 > chr17: 40043956: − | 9 |
| DHR | : ENST00000353196 | |
| LTMGSTGCDRPLDK | chr14: 106717516: −: L1MC > chr14: 106641752: − | 9 |
| | : ENST00000390605 | |
| WGGQAPPGQPPRPGGR | chr19: 39346300: −: SVAD > chr19: 39338074: − | 9 |
| | : ENST00000601449 | |
| LRQEQLLEPRMQR | chr19: 50809471: +: AluSp > chr19: 50812982: +: | 9 |
| | ENST00000262269 | |
| TLEVEGK | chr12: 76520433: −: AluSx1 > chr12: 76443026: − | 9 |
| | ENST00000431879 | |
| NLEASWATR | chr16: 14738989: +: AluJr > chr16: 14742245: +: | 9 |
| | ENST00000570219 | |
| ELYPGQFKPPICLL | chr19: 39380329: − | 9 |
| | : ENST00000358931 > chr19: 39380152: −: MIR | |
| MLVSASQDGK | chr7: 100274628: +: AluJo > chr7: 100274975: +: | 9 |
| | ENST00000412215 | |
| AGFYEQMNGPVAG | chr8: 144745326: −: AluSz > chr8: 144668944: − | 9 |
| | : ENST00000531931 | |
| MLGTRPHGR | chr11: 73445789: −: MER1B > chr11: 73441868: − | 9 |
| | ENST00000336083 | |
| LAVNSPPVEPPEQHSR | chr1: 53346501: +: MLT1E1A > chr1: 53347143: +: | 9 |
| | ENST00000371532 | |
| MIVMNDQMDSSLK | chr10: 64976967: − | 9 |
| | : ENST00000402544 > chr10: 64445839: −: L2c | |
| MGTVAHACNTSTLGGQEH | chr22: 21577153: −: AluJb > chr22: 21104282: − | 9 |
| CEGLR | : ENST00000255882 | |
| MSLCILSMK | chr19: 9939645: +: MIRb > chr19: 9940641: +: | 9 |
| | ENST00000586895 | |
| IPTVTPGAASSC | chr17: 62544114: −: MER5B > chr17: 62499650: − | 9 |
| | ENST00000450599 | |
| TITDAELPIYR | chr14: 51362421: +: HERVH- | 9 |
| | int > chr14: 51368547: +: ENST00000353130 | |
| GLEWVSQISESTNSL | chr14: 107048816: − | 9 |
| | ENST00000390627 > chr14: 107047602: − | |
| | : LTR13 | |
| VAVSVLSPGK | chr11: 69063184: +: ENST00000308946 > chr11: | 9 |
| | 69084301: +: MIRb | |
| GQVIGEIDEETDSALDL | chr7: 117829683: +: AluSq2 > chr7: 117831971: +: | 9 |
| GNIR | ENST00000422760 | |
| DQPGQHGPGMRPPLGLR | chr1: 222838358: +: AluJb > chr1: 222838651: +: | 9 |
| | ENST00000344441 | |
| VILVNLGSSAEWVFQR | chr9: 123165587: −: L2c > chr9: 123165349: − | 9 |
| | : ENST00000416449 | |
| TTALQPGHSDLVTAR | chr9: 127988405: +: AluSx > chr9: 127990189: +: | 9 |
| | ENST00000259460 | |

[0489] In lung primary tumors, 167 JET-derived proteins were identified (FIG. 16A and Table 7).

TABLE 7

| Sequence | chimeric_id_all | Recurrence |
|---|---|---|
| LSVLSQPK | chr2: 134035154: +: L1M5 > chr22: 23248512: +: ENST00000390325 | 100 |
| SNLNTGVPS | chr2: 90214357: +: L1ME3 > chr2: 90249278: +: ENST00000468879, | 99 |
| R | chr2: 90214357: +: L1ME3 > chr2: 90260131: +: ENST00000471857 | |
| LDSQYVER | chr19: 18432008: −: L2a > chr19: 18426875: −: ENST00000593829 | 81 |
| DIVRSDLEG | chr22: 45565558: +: LTR13A > chr22: 45566869: +: ENST00000434760 | 71 |
| KR | | |
| AEIAPLNSSL | chr19: 8529495: +: AluSq2 > chr19: 8530208: +: ENST00000348943 | 46 |
| GR | | |
| TFTGGAVIV | chr20: 44410315: −: MER68 > chr20: 44404241: −: ENST00000337205 | 35 |
| QK | | |
| VETSDEEIHK | chr1: 226016613: +: ENST00000445856 > chr1: 226018885: +: MER58B, | 32 |
| K | chr1: 226016613: +: ENST00000445856 > chr1: 226018885: +: MER58B | |
| SQLLERPRQ | chr19: 17387073: +: AluSq2 > chr19: 17387304: +: ENST00000596335, | 31 |
| ENRLNLGAS | chr19: 17387073: +: AluSq2 > chr19: 17387304: +: ENST00000598188, | |
| R | chr19: 17387073: +: AluSq2 > chr19: 17387304: +: ENST00000599474, | |
| | chr19: 17387073: +: AluSq2 > chr19: 17387304: +: ENST00000601938, | |
| | chr19: 17387073: +: AluSq2 > chr19: 17387304: +: ENST00000602066 | |
| LSLGSRIDQI | chr3: 4867430: −: ENST00000449914 > chr3: 4859235: −: L1MC4 | 30 |
| NISR | | |
| NGKFPSLLT | chr6: 35419093: +: L2b > chr6: 35438040: +: ENST00000322203 | 26 |
| HNENMVAK | | |
| ACLAEGR | chr3: 40501213: +: AluY > chr3: 40502924: +: ENST00000338970 | 25 |
| ILNCQKAM | chr9: 140458886: −: ENST00000277540 > chr9: 140458662: −: L2 | 24 |
| APSFR | | |
| TEFLSFMNT | chr1: 152006124: −: ENST00000271638 > chr1: 152005339: −: MIRc, | 23 |
| ELAAFTKK | chr1: 152006124: −: ENST00000271638 > chr1: 152005339: −: MIRc | |
| VLGVGSTR | chr1: 46675049: +: HAL1 > chr1: 46685371: +: ENST00000371980 | 21 |
| QNLQQAQC | chrX: 38015613: −: MER5A1 > chrX: 38013836: −: ENST00000432886, | 20 |
| GLDLR | chrX: 38015613: −: MER5A1 > chrX: 38013836: −: ENST00000432886, | |
| | chrX: 38015613: −: MER5A1 > chrX: 38013836: −: ENST00000432886 | |
| MRRPGQAS | chr9: 130213388: −: MIR3 > chr9: 130213083: −: ENST00000361436, | 15 |
| AFLGLSFFTL | chr9: 130213388: −: MIR3 > chr9: 130213083: −: ENST00000361436, | |
| YLR | chr9: 130213388: −: MIR3 > chr9: 130213083: −: ENST00000361436, | |
| | chr9: 130213388: −: MIR3 > chr9: 130213083: −: ENST00000536368, | |
| | chr9: 130213388: −: MIR3 > chr9: 130213083: −: ENST00000536368, | |
| | chr9: 130213388: −: MIR3 > chr9: 130213083: −: ENST00000536368 | |
| TQGGSMGN | chr2: 114668071: +: MER21B > chr2: 114670749: +: ENST00000263238, | 15 |
| SSSSR | chr2: 114668071: +: MER21B > chr2: 114670749: +: ENST00000263238, | |
| | chr2: 114668071: +: MER21B > chr2: 114670749: +: ENST00000415792, | |
| | chr2: 114668071: +: MER21B > chr2: 114670749: +: ENST00000415792, | |
| | chr2: 114668071: +: MER21B > chr2: 114670749: +: ENST00000446821, | |
| | chr2: 114668071: +: MER21B > chr2: 114670749: +: ENST00000446821 | |
| NLDNLPSRL | chr18: 66490653: +: MER51E > chr18: 66505943: +: ENST00000584775 | 14 |
| SIR | | |
| VVSKVEFVH | chr7: 156483036: −: Charlie7a > chr7: 156480885: −: ENST00000353442 | 14 |
| FLAFIK | | |
| LPRTGIGAP | chr7: 94018589: +: L2c > chr7: 94057721: +: ENST00000297268 | 14 |
| RTR | | |
| MGWMGEA | chr9: 130341201: −: ENST00000373314 > chr9: 130334967: −: MIRb | 12 |
| VR | | |
| MALSQCGP | chr19: 53754789: −: ENST00000333952 > chr19: 53750572: −: MER30 | 12 |
| GKPK | | |
| LLITTSAGGR | chr3: 194340620: −: L3 > chr3: 194337998: −: ENST00000392432 | 12 |
| LSCAASGFT | chr14: 106866613: −: ENST00000390618 > chr14: 106764783: −: AluJb | 12 |
| LR | | |
| ASQASVPPA | chr2: 112896307: +: ENST00000331203 > chr2: 112896389: +: C−rich | 11 |
| SLPCPSR | | |
| ASVTLIR | chr3: 44887389: +: MER65D > chr3: 44889477: +: ENST00000326047 | 11 |
| MNSLSIR | chr9: 128638776: +: Tigger2a > chr9: 128677965: +: ENST00000342287, | 11 |
| | chr9: 128638776: +: Tigger2a > chr9: 128677965: +: ENST00000373487, | |
| | chr9: 128638776: +: Tigger2a > chr9: 128677965: +: ENST00000373489, | |
| | chr9: 128638776: +: Tigger2a > chr9: 128677965: +: ENST00000428092, | |
| | chr9: 128638776: +: Tigger2a > chr9: 128677965: +: ENST00000491787 | |
| APVTGWQE | chr4: 102117073: −: ENST00000492351 > chr4: 102104428: −: MLT1J | 11 |
| LK | | |
| MEAYTPKLT | chr11: 18373993: +: ENST00000526630 > chr11: 18374659: +: AluSq2 | 11 |
| QLLK | | |
| SHLLGRLSQ | chr1: 234516671: +: AluSx > chr1: 234519469: +: ENST00000366615 | 11 |
| ENHWNLIK | | |
| GLEFETSLA | chr4: 25395102: +: AluSz6 > chr4: 25395461: +: ENST00000315368 | 8 |
| NMHGKK | | |
| TNVQQTTD | chr14: 31588916: −: ENST00000399332 > chr14: 31586842: −: L1ME4a, | 8 |
| LEIPPPGTV | chr14: 31588916: −: ENST00000399332 > chr14: 31586842: −: L1ME4a, | |
| GYCAVK | chr14: 31588916: −: ENST00000553957 > chr14: 31586842: −: L1ME4a, | |
| | chr14: 31588916: −: ENST00000553957 > chr14: 31586842: −: L1ME4a | |
| LARHGWAE | chr8: 54994449: −: AluSq2 > chr8: 54978373: −: ENST00000316963, | 8 |
| AFAGIRSSHI | chr8: 54994449: −: AluSq2 > chr8: 54978373: −: ENST00000343231, | |
| K | chr8: 54994449: −: AluSq2 > chr8: 54978373: −: ENST00000518546 | |
| MATVYFTR | chr19: 49497180: +: ENST00000595090 > chr19: 49497762: +: L2a | 8 |
| ATSQCK | | |
| LGGSSCLVA | chr20: 35116711: +: MIR > chr20: 35125108: +: ENST00000373907, | 8 |
| YKK | chr20: 35116711: +: MIR > chr20: 35125108: +: ENST00000373913 | |
| LLIYAASNG | chr2: 90199062: +: ENST00000390276 > chr2: 90207369: +: MER66−int, | 8 |
| HSGQQ | chr2: 90199062: +: ENST00000390276 > chr2: 90207369: +: MER66−int | |
| MAACLGLP | chr2: 172725191: −: ENST00000392592 > chr2: 172723793: −: SVA_D, | 8 |
| K | chr2: 172725191: −: ENST00000392592 > chr2: 172723793: −: SVA_D | |
| MSLGLSIHH | chr17: 37028428: +: MIR3 > chr17: 37034339: +: ENST00000318008 | 8 |
| LSDGSGIK | | |
| AEDTATSCR | chr14: 106573251: −: ENST00000390601 > chr14: 106558237: −: L1PB4 | 8 |
| AK | | |
| ISSEQLFCFT | chr19: 32948256: +: L4 > chr19: 32949006: +: ENST00000392250 | 7 |
| LINPK | | |
| AIALQPGQQ | chrX: 114878268: +: AluSx > chrX: 114879341: +: ENST00000355899, | 7 |
| RETR | chrX: 114878268: +: AluSx > chrX: 114879341: +: ENST00000497870 | |
| MGVVAHAC | chr7: 6508832: −: AluY > chr7: 6505954: −: ENST00000258739 | 7 |
| NSSTLGGQD | | |
| PLDLLHLPG | | |
| VR | | |
| MELTIPGEG | chr2: 99224660: −: MIRb > chr2: 99220654: −: ENST00000328709, | 7 |
| K | chr2: 99224660: −: MIRb > chr2: 99220654: −: ENST00000328709, | |
| | chr2: 99224660: −: MIRb > chr2: 99220654: −: ENST00000328709 | |
| MAAAALRD | chr19: 57999351: +: ENST00000354197 > chr19: 58024390: +: LTR3B | 7 |
| PAQSR | | |
| GPSPSGAEP | chr17: 43880005: +: Tigger12 > chr17: 43884376: +: ENST00000347197, | 6 |
| R | chr17: 43880005: +: Tigger12 > chr17: 43884376: +: ENST00000352855 | |
| LLSSSMHTL | chrX: 38146409: +: CT−rich > chrX: 38146366: −: ENST00000318842, | 4 |
| QTK | chrX: 38146409: +: CT−rich > chrX: 38146366: −: ENST00000378505, | |
| | chrX: 38146409: +: CT−rich > chrX: 38146366: −: ENST00000482855 | |
| SSRPAWPT | chr19: 55882935: −: AluSx > chr19: 55880309: −: ENST00000264563 | 4 |
| WCLPPGPG | | |
| R | | |
| MTDGGLAL | chr12: 110873462: −: AluSz > chr12: 110873022: −: ENST00000228825 | 4 |
| QFWNHFVC | chr22: 42077159: −: L1MC4a > chr22: 42076368: −: ENST00000355257 | 4 |
| IVEETEADV | | |
| NPK | | |
| GLILLEQDTA | chr9: 15619847: +: Tigger1 > chr9: 15623265: +: ENST00000297641, | 4 |
| VQNMHK | chr9: 15619847: +: Tigger1 > chr9: 15623265: +: ENST00000380701, | |
| | chr9: 15619847: +: Tigger1 > chr9: 15623265: +: ENST00000535968 | |
| LASVFQLQL | chr10: 29778636: −: AluJb > chr10: 29777685: −: ENST00000375400 | 4 |
| LR | | |
| DASKGVSLH | chrX: 138286221: −: ENST00000370603 > chrX: 138072779: −: THE1B | 4 |
| K | | |
| YAGRPLQCL | chr11: 684898: −: ENST00000382409 > chr11: 681362: −: AluSx | 4 |
| IQDGILNPH | | |
| AASCTCAAC | | |
| CDDMTLLLR | | |
| FQTSGLQNC | chr10: 98044785: −: MLT1C > chr10: 98006805: −: ENST00000224337, | 4 |
| SFKRWSMIL | chr10: 98044785: −: MLT1C > chr10: 98006805: −: ENST00000224337 | |
| K | | |
| QLWTLIGM | chr2: 42612922: −: MER34B > chr2: 42580483: −: ENST00000468711 | 4 |
| EMVPEESTL | | |
| TSLGIK | | |
| PAAVALACN | chr1: 234538581: −: AluJb > chr1: 234537008: −: ENST00000040877 | 4 |
| PSTLRGRG | | |
| MPR | | |
| VIHDNFGIV | chr12: 6646556: +: ENST00000229239 > chr12: 6648679: +: MIRb, | 4 |
| EGLMTVTPK | chr12: 6646556: +: ENST00000396856 > chr12: 6648679: +: MIRb, | |
| | chr12: 6646556: +: ENST00000396858 > chr12: 6648679: +: MIRb | |
| EFETSLANM | chr14: 50950778: −: AluSx1 > chr14: 50949134: −: ENST00000013125 | 4 |
| LLDHYQNCK | | |
| AHSTLQDEA | chr19: 17683411: +: ENST00000252599 > chr19: 17684363: +: AluJb | 4 |
| ESFMHVQL | | |
| EVMVR | | |
| HLEEATVAE | chr2: 118715941: −: ENST00000319432 > chr2: 118715754: −: MER58A, | 4 |
| LSSCR | chr2: 118715941: −: ENST00000376300 > chr2: 118715754: −: MER58A | |
| SLNLYNCNS | chr1: 94660048: −: MLT1A0 > chr1: 94655639: −: ENST00000552844 | 4 |
| GAILTTMLA | chr5: 149627335: −: ENST00000348628 > chr5: 149626005: −: MER102b | 4 |
| TRNFSDAVA | | |
| SLDPRSCDS | | |
| R | | |
| QMTQVTM | chr7: 74461534: −: AluJr > chr7: 74457217: −: ENST00000329959 | 4 |
| PGEPVDVAC | | |
| GVDHMVTL | | |
| AK | | |
| QVISAFPTEI | chr3: 51405623: +: L1PA5 > chr3: 51411918: +: ENST00000266037 | 4 |
| STAMPVK | | |
| WVYEVQAG | chr13: 33100704: +: L1MC5 > chr19: 41270986: +: ENST00000243563, | 4 |
| AARDALQG | chr13: 33100704: +: L1MC5 > chr19: 41270986: +: ENST00000601393 | |
| FK | | |
| QVDCLGPG | chr8: 141451863: −: AluJr > chr8: 141449296: −: ENST00000389327 | 4 |
| VPDQPGQH | | |
| DITRSGAK | | |
| YEEASIPFVG | chr1: 182920453: −: ENST00000367547 > chr1: 182915515: −: HAL1, | 4 |
| ILVEK | chr1: 182920453: −: ENST00000423786 > chr1: 182915515: −: HAL1 | |
| QEQSSSPA | chr1: 51946945: −: ENST00000371730 > chr1: 51945188: −: L1PA5 | 4 |
| MEQSWME | | |
| NDFDKLTEL | | |
| GFRR | | |
| LFFLLLTSCR | chr22: 41650398: +: CT−rich > chr22: 41648969: −: ENST00000405486 | 4 |
| AASRGVTFL | chr10: 70722825: +: AluJo > chr10: 70723047: +: ENST00000354185 | 4 |
| FPIQAK | | |
| NPSTLGGQ | chr16: 16171648: +: AluSx > chr16: 16173209: +: ENST00000349029, | 4 |
| ASPSPSPK | chr16: 16171648: +: AluSx > chr16: 16173209: +: ENST00000349029, | |
| | chr16: 16171648: +: AluSx > chr16: 16173209: +: ENST00000351154, | |
| | chr16: 16171648: +: AluSx > chr16: 16173209: +: ENST00000351154, | |
| | chr16: 16171648: +: AluSx > chr16: 16173209: +: ENST00000399410, | |
| | chr16: 16171648: +: AluSx > chr16: 16173209: +: ENST00000399410 | |
| IIQVWWHV | chr7: 116527485: +: AluJo > chr7: 116528181: +: ENST00000361183, | 4 |
| PVVPAAQE | chr7: 116527485: +: AluJo > chr7: 116528181: +: ENST00000426421, | |
| AEVR | chr7: 116527485: +: AluJo > chr7: 116528181: +: ENST00000458284, | |
| | chr7: 116527485: +: AluJo > chr7: 116528181: +: ENST00000490693 | |
| MWSGLPSR | chr2: 180610440: −: ENST00000409343 > chr2: 180493215: −: L1MC5 | 4 |
| GLPIFK | | |
| FLGLGFFICN | chr15: 81281080: −: MIR3 > chr15: 81274523: −: ENST00000561312 | 4 |
| MRR | | |
| AEIAPLHSSL | chr7: 138950208: +: AluSc8 > chr7: 138951079: +: ENST00000288561, | 4 |
| GDRAAK | chr7: 138950208: +: AluSc8 > chr7: 138951079: +: ENST00000483726 | |
| LLPVIPELWE | chr10: 95240482: −: AluSx > chr10: 95216694: −: ENST00000358334 | 4 |
| AEMR | | |
| MDGPAEPQ | chr19: 49055580: +: ENST00000201586 > chr19: 49066561: +: L1ME2z | 4 |
| IPGLWDTYE | | |
| DDISEISYLP | | |
| KR | | |
| NLGSVWWL | chr8: 146016536: −: MIRb > chr8: 146015855: −: ENST00000394920 | 4 |
| EVAELTNPS | | |
| TSLGNMCVI | chr21: 45165696: +: AluJb > chr21: 45165960: +: ENST00000468090 | 4 |
| QSWVTSGT | | |
| AK | | |
| EAANMILVD | chr16: 84488590: +: ENST00000262429 > chr16: 84490583: +: L1HS | 4 |
| DDFSAIIIGK | | |
| MAHAYNPS | chr17: 62480081: −: AluJb > chr17: 62479091: −: ENST00000539111, | 4 |
| TLGSQAPIK | chr17: 62480081: −: AluJb > chr17: 62479091: −: ENST00000581355 | |
| MQVSLHPK | chr8: 105152976: +: L2b > chr8: 105160835: +: ENST00000408894 | 4 |
| CKADK | | |
| GQLRPHTW | chr19: 10200199: +: MIRb > chr19: 10200333: +: ENST00000253110, | 4 |
| LSIRSTR | chr19: 10200199: +: MIRb > chr19: 10200333: +: ENST00000587710, | |
| | chr19: 10200199: +: MIRb > chr19: 10200333: +: ENST00000590378, | |
| | chr19: 10200199: +: MIRb > chr19: 10200333: +: ENST00000593131 | |
| MMKPGLAS | chr7: 37989696: +: L1MB3 > chr7: 37989802: +: ENST00000476620, | 4 |
| IQSRIAILSR | chr7: 37989704: +: L1MB3 > chr7: 37989802: +: ENST00000476620 | |
| WRHGTPA | chr2: 102014362: −: AluSq2 > chr2: 102014186: −: ENST00000376826 | 4 |
| WLIQVLLED | | |
| ETTESAVK | | |
| TDSREAEFP | chr15: 51201329: +: MIRb > chr15: 51204275: +: ENST00000561441 | 4 |
| QKK | | |
| ATVLFYSYKP | chr19: 32948256: +: L4 > chr19: 32949006: +: ENST00000392250, | 4 |
| K | chr19: 32948256: +: L4 > chr19: 32949006: +: ENST00000586987, | |
| | chr19: 32948256: +: L4 > chr19: 32949006: +: ENST00000588648 | |
| LLLSSLSSLG | chr1: 156962904: −: MIRb > chr1: 156955965: −: ENST00000361409, | 4 |
| DSAPER | chr1: 156962904: −: MIRb > chr1: 156955965: −: ENST00000368194 | |
| DLGQVISLD | chr20: 1106051: +: MIR3 > chr20: 1106141: +: ENST00000333082 | 4 |
| LHIFICEVSR | | |
| VPMIR | | |
| ILWWSQGK | chr12: 123839145: −: MIR3 > chr12: 123834988: −: ENST00000267176 | 4 |
| SLGLSFHICII | chr15: 83100895: +: MIRb > chr15: 83103066: +: ENST00000561062 | 4 |
| EAAGRGGE | | |
| AVK | | |
| VISAFPSEVS | chr9: 18711328: +: L1PA3 > chr9: 18721534: +: ENST00000380548 | 4 |
| RR | | |
| MISSTSVYA | chr2: 164591413: −: ENST00000409634 > chr2: 164561904: −: MIR3 | 4 |
| PK | | |
| GLPSHTELS | chr14: 78340168: +: THE1C > chr14: 78353434: +: ENST00000238561 | 4 |
| MICSRASM | | |
| TPLWGRPP | | |
| WPR | | |
| GIPSQVELA | chr7: 81946024: −: THE1B > chr7: 81799925: −: ENST00000356860 | 4 |
| WHWKR | | |
| VTLGISSPVK | chr19: 3368020: +: MIR3 > chr19: 3449012: +: ENST00000341919, | 4 |
| K | chr19: 3368020: +: MIR3 > chr19: 3449012: +: ENST00000346156, | |
| | chr19: 3368020: +: MIR3 > chr19: 3449012: +: ENST00000589123 | |
| ICKAMLELLE | chr10: 5056964: −: PABL_B−int > chr10: 5037645: −: | 4 |
| DPVLCALAK | ENST00000380753 | |
| TCAMAQNI | chr8: 99019829: +: ENST00000521689 > chr8: 99025486: +: Tigger12c, | 4 |
| PEGQKLDILL | chr8: 99019829: +: ENST00000522025 > chr8: 99025486: +: Tigger12c, | |
| NK | chr8: 99019829: +: ENST00000524308 > chr8: 99025486: +: Tigger12c | |
| HVVQGIQII | chr13: 92560311: +: ENST00000377067 > chr13: 92572670: +: HAL1 | 4 |
| R | | |
| VTGSLQDG | chr17: 39976301: +: MIRc > chr17: 39977199: +: ENST00000321562 | 4 |
| MTTGPPRR | | |
| R | | |
| YLSPEAEVA | chr14: 73754128: −: AluSz6 > chr14: 73754022: −: ENST00000554546 | 4 |
| VSRDCATAL | | |
| QPGVK | | |
| QLLCIVSNQ | chr12: 49658051: +: MIRb > chr12: 49663248: +: ENST00000541364, | 4 |
| K | chr12: 49658051: +: MIRb > chr12: 49663248: +: ENST00000552125 | |
| FVSDEMSK | chr20: 33644499: −: L1ME3E > chr20: 33642834: −: ENST00000252015, | 4 |
| DCLSILYNTC | chr20: 33644499: −: L1ME3E > chr20: 33642834: −: ENST00000451813 | |
| VCTEGVTK | | |
| QLEYLARIQ | chr8: 74464247: −: ENST00000517542 > chr8: 74420593: −: Tigger1, | 4 |
| GFQASLFPE | chr8: 74464247: −: ENST00000521210 > chr8: 74420593: −: Tigger1, | |
| TQQY | chr8: 74464247: −: ENST00000521451 > chr8: 74420593: −: Tigger1, | |
| | chr8: 74464247: −: ENST00000521727 > chr8: 74420593: −: Tigger1, | |
| | chr8: 74464247: −: ENST00000522695 > chr8: 74420593: −: Tigger1, | |
| | chr8: 74464247: −: ENST00000523533 > chr8: 74420593: −: Tigger1, | |
| | chr8: 74464247: −: ENST00000523558 > chr8: 74420593: −: Tigger1, | |
| | chr8: 74464247: −: ENST00000524300 > chr8: 74420593: −: Tigger1 | |
| LQGERISGN | chr17: 73725517: +: ENST00000579662 > chr17: 73726063: +: AluJo | 4 |
| LDAPEGGFD | | |
| AILQTAVCT | | |
| K | | |
| LLEILGATIE | chr16: 29692733: +: Charlie4z > chr16: 29708317: +: ENST00000395384, | 4 |
| NSR | chr17: 39696603: −: MIR > chr17: 39681525: −: ENST00000361566, | |
| | chr17: 39696603: −: MIR > chr17: 39681525: −: ENST00000361566 | |
| MTKLLSPIR | chr22: 32787416: −: AluSx1 > chr22: 32784086: −: ENST00000216038 | 4 |
| VLILCQHEAL | chr17: 53344521: +: MIRb > chr17: 53345112: +: ENST00000226067 | 4 |
| VK | | |
| DDSEPGMP | chr12: 56685415: −: L3 > chr12: 56680404: −: ENST00000351328, | 4 |
| VLPPR | chr12: 56685415: −: L3 > chr12: 56680404: −: ENST00000552688 | |
| QWTEILHFT | chr11: 60665318: −: ENST00000227524 > chr11: 60663297: −: Tigger1, | 4 |
| DFPISLDTTIL | chr11: 60665318: −: ENST00000227524 > chr11: 60663297: −: Tigger1, | |
| K | chr11: 60665318: −: ENST00000535326 > chr11: 60663297: −: Tigger1, | |
| | chr11: 60665318: −: ENST00000535326 > chr11: 60663297: −: Tigger1 | |
| MSVLGELS | chr14: 75593608: −: ENST00000238616 > chr14: 75593104: −: MIRc | 4 |
| GQEIKTILAN | chr14: 53079781: +: AluY > chr14: 53211570: +: ENST00000442123, | 4 |
| TEWTYPMR | chr14: 53108136: +: AluY > chr14: 53211570: +: ENST00000442123, | |
| | chr14: 53201596: +: AluY > chr14: 53211570: +: ENST00000442123 | |
| FSSHSEMVII | chr18: 9858290: +: MIRc > chr18: 9859225: +: ENST00000578921 | 4 |
| TTITSNSQG | | |
| EAAR | | |
| TENQTPHVL | chr4: 87716976: +: L1PA6 > chr4: 87718027: +: ENST00000411767 | 4 |
| THRPPK | | |
| QAFLEQTRP | chr3: 127878586: +: L2a > chr3: 127965679: +: ENST00000254730, | 4 |
| LR | chr3: 127878586: +: L2a > chr3: 127965679: +: ENST00000483457, | |
| | chr5: 43583569: −: MER39B > chr5: 43556101: −: ENST00000306846, | |
| | chr5: 43583569: −: MER39B > chr5: 43556101: −: ENST00000306846, | |
| | chr5: 43583569: −: MER39B > chr5: 43556101: −: ENST00000306846 | |
| ESFSDFSSS | chr19: 16201431: +: L2c > chr19: 16204346: +: ENST00000344824 | 4 |
| ILK | | |
| QVLWLMP | chr4: 3344780: +: ENST00000514268 > chr4: 3377116: +: (CCCCAG)n | 4 |
| MIPALSEAE | | |
| AAGSLETSL | | |
| GNMTSAW | | |
| CR | | |
| QTDHLRPG | chr1: 28810817: +: AluSx > chr1: 28815682: +: ENST00000373839, | 4 |
| VQHQSGQH | chr1: 28810817: +: AluSx > chr1: 28815682: +: ENST00000373839, | |
| SK | chr1: 28810817: +: AluSx > chr1: 28815682: +: ENST00000373839 | |
| IEDFGVHCK | chr8: 67968754: −: ENST00000357849 > chr8: 67967541: −: L2a | 4 |
| QMTSHLTK | | |
| YFDYWGQG | chr14: 106330435: −: ENST00000461719 > chr14: 106301002: −: | 4 |
| TLVTQSPPS | MER65−int | |
| K | | |
| AVALYEGTL | chr2: 238451319: +: (TGG)n > chr2: 238454100: +: ENST00000445024 | 4 |
| SLCSEDLK | | |
| MPSLNTSRP | chr22: 22689234: +: L1PA8 > chr22: 22712477: +: ENST00000390294, | 4 |
| SGVPDRFSG | chr22: 22689234: +: L1PA8 > chr22: 22735583: +: ENST00000390297 | |
| SK | | |
| IVGNMFNQ | chr13: 77572426: +: MIRc > chr13: 77574593: +: ENST00000377453 | 4 |
| MAK | | |
| LLIYAAATR | chr2: 90537978: −: ENST00000443397 > chr2: 89942712: −: MLT1D | 4 |
| LFSIHLLSAL | chr4: 55076146: −: L2a > chr2: 89160766: −: ENST00000390240 | 4 |
| GPK | | |
| LCPAATLSE | chr20: 35779434: +: SVA_B > chr20: 35812583: +: ENST00000237530 | 4 |
| R | | |
| TVEQGVGV | chr11: 64042841: +: MIRb > chr11: 64085797: +: ENST00000265462, | 4 |
| WR | chr11: 64042841: +: MIRb > chr11: 64085797: +: ENST00000265462, | |
| | chr11: 64042841: +: MIRb > chr11: 64085797: +: ENST00000347941, | |
| | chr11: 64042841: +: MIRb > chr11: 64085797: +: ENST00000347941 | |
| GLEWIGTK | chr14: 106877762: −: ENST00000390619 > chr14: 106859351: −: MLT1C | 4 |
| QRPLCCDEQ | chr1: 153635838: −: AluJr4 > chr1: 153635752: −: ENST00000361891, | 4 |
| PHQTAFGPK | chr1: 153635838: −: AluJr4 > chr1: 153635752: −: ENST00000361891, | |
| | chr1: 153635838: −: AluJr4 > chr1: 153635752: −: ENST00000361891 | |
| MIVMNDQ | chr10: 64976967: −: ENST00000402544 > chr10: 64445839: −: L2c | 4 |
| MDSSLK | | |
| PGVVAHAC | chr19: 39144970: +: AluSz > chr19: 39191240: +: ENST00000252699, | 4 |
| NPSTLGGRD | chr19: 39144970: +: AluSz > chr19: 39191240: +: ENST00000252699, | |
| LHGMVQLP | chr19: 39144970: +: AluSz > chr19: 39191240: +: ENST00000252699 | |
| PAEGR | | |
| MSPQLLTPG | chr14: 106662989: −: HERVS71−int > chr14: 106641867: −: | 4 |
| SGAHSQVQ | ENST00000390605 | |
| LVQSGAEVK | | |
| LLEGEECRN | chr12: 52910421: −: ENST00000252242 > chr12: 52900057: −: L1MC1 | 4 |
| LASKK | | |
| PGMMAHA | chr6: 31360872: −: AluSg > chr6: 31324570: −: ENST00000412585 | 4 |
| CNPSTLGGR | | |
| GGWIMR | | |
| LFPGQPMV | chr14: 70383468: +: L2a > chr14: 70418855: +: ENST00000361956 | 4 |
| SNK | | |
| TAPPLSPLA | chr14: 51363531: +: LTR7 > chr14: 51368547: +: ENST00000337334 | 4 |
| DSLCGLSPP | | |
| APR | | |
| NLHQSNFSL | chr4: 5827221: −: ENST00000324989 > chr4: 5744561: −: MER66C, | 3 |
| SGEAKYPPR | chr4: 5827221: −: ENST00000397890 > chr4: 5744561: −: MER66C, | |
| | chr4: 5827221: −: ENST00000512574 > chr4: 5744561: −: MER66C | |
| SCIFTISKID | chr6: 74208780: +: MER104 > chr6: 74210297: +: ENST00000415954 | 3 |
| DR | | |
| LHELMERTI | chr1: 212870303: −: ENST00000243440 > chr1: 212869254: −: L2 | 3 |
| FLITQIR | | |
| EAEAGESLE | chr4: 17818661: +: AluSc > chr4: 17818884: +: ENST00000251496 | 3 |
| SDAVKQAM | | |
| QK | | |
| KKADATLLK | chr14: 23350226: +: AluSc > chr14: 23353883: +: ENST00000267396, | 3 |
| | chr14: 23350226: +: AluSc > chr14: 23353883: +: ENST00000536884 | |
| MVEGDQLP | chr1: 183811061: +: Tigger4a > chr1: 183816700: +: ENST00000304685, | 3 |
| PGHTVSQYE | chr1: 183811061: +: Tigger4a > chr1: 183816700: +: ENST00000539189 | |
| TCK | | |
| VCNKNFDD | chr2: 122259789: −: L2a > chr2: 122227536: −: ENST00000263710, | 3 |
| EDSVDGNR | chr2: 122259789: −: L2a > chr2: 122227536: −: ENST00000397587, | |
| PSSASSTSSK | chr2: 122259789: −: L2a > chr2: 122227536: −: ENST00000409078, | |
| | chr2: 122259789: −: L2a > chr2: 122227536: −: ENST00000418989, | |
| | chr2: 122259789: −: L2a > chr2: 122227536: −: ENST00000449975, | |
| | chr2: 122259789: −: L2a > chr2: 122227536: −: ENST00000452274, | |
| | chr2: 122259789: −: L2a > chr2: 122227536: −: ENST00000455322, | |
| | chr2: 122259789: −: L2a > chr2: 122227536: −: ENST00000541377, | |
| | chr2: 122259789: −: L2a > chr2: 122227536: −: ENST00000541859, | |
| | chr2: 122259789: −: L2a > chr2: 122227536: −: ENST00000545861 | |
| MLETLTLISS | chr19: 58288037: +: ENST00000391702 > chr19: 58308975: +: AluSp | 3 |
| LGGLR | | |
| STNVLCTLF | chr2: 131117848: +: L2a > chr2: 131126706: +: ENST00000175756, | 3 |
| MLNLPDLEE | chr2: 131117848: +: L2a > chr2: 131126706: +: ENST00000175756 | |
| K | | |
| QEQSSSPA | chr1: 51946945: −: ENST00000371730 > chr1: 51945188: −: L1PA5 | 3 |
| MEQSWME | | |
| NDFDKLTEL | | |
| GFRR | | |
| MILSSIR | chr6: 144066592: +: L3 > chr6: 144070122: +: ENST00000367584 | 3 |
| MGAVAQAC | chr3: 10237009: +: AluJo > chr3: 10242053: +: ENST00000256458 | 3 |
| NPSTLGGQ | | |
| GKPAPEIR | | |
| YVLAAPEWT | chr10: 22168673: −: Tigger1 > chr10: 22095028: −: ENST00000376980 | 3 |
| EEDLSQLTR | | |
| SMVK | | |
| HPSFRPAM | chr20: 25838731: −: SST1 > chr20: 25755948: −: ENST00000376403 | 3 |
| TVWVGK | | |
| ALEPGRGSE | chr17: 5200809: +: MIRb > chr17: 5235244: +: ENST00000262477 | 3 |
| EAKCSITSCT | | |
| R | | |
| QVLQHPWK | chr3: 118831521: −: L1PA3 > chr3: 118649122: −: ENST00000425327 | 3 |
| SLRPAATPS | chr1: 217697476: −: SVA_D > chr1: 217688231: −: ENST00000366935 | 3 |
| GK | | |
| HRRQISTAM | chr3: 51405599: +: L1PA5 > chr3: 51411918: +: ENST00000266037 | 3 |
| PVK | | |
| TSSGLPLILH | chr7: 33001530: +: MER1A > chr7: 33014229: +: ENST00000242209 | 3 |
| YAMTETPLS | | |
| MCLWEK | | |
| LLDASQFGR | chr1: 243449699: +: ENST00000435549 > chr1: 243451519: +: AluJb | 3 |
| MITR | | |
| SQHFGRPR | chr7: 101810334: +: AluSx1 > chr7: 101813726: +: ENST00000437600 | 3 |
| QVDYLR | | |
| IQNSQVGIA | chr3: 9476785: +: AluSp > chr3: 9477412: +: ENST00000450326 | 3 |
| VQQK | | |
| QPPRPNQL | chr20: 43581385: +: L2b > chr20: 43586984: +: ENST00000372826 | 3 |
| CRR | | |
| LQAEYMAA | chr19: 10561170: +: MIRb > chr19: 10561279: +: ENST00000592685 | 3 |
| SLGHGGPR | | |
| DTVDVLK | chr3: 50089360: +: L1MB7 > chr3: 50091768: +: ENST00000425608 | 3 |
| AASNQISGV | chr2: 90010195: −: LTR62 > chr2: 89246936: −: ENST00000496168 | 3 |
| PSR | | |
| LSWRGSGKI | chr14: 106552518: −: ENST00000390600 > chr14: 106279761: −: L1PA13, | 3 |
| TK | chr14: 106815952: −: ENST00000390615 > chr14: 106279761: −: L1PA13 | |
| QELSILTMQ | chr18: 33758286: +: L1ME1 > chr18: 33775220: +: ENST00000261326 | 3 |
| VPPCSPR | | |
| LSCAASGFT | chr14: 107048875: −: ENST00000390627 > chr14: 107025026: −: L1PB3, | 3 |
| VK | chr14: 107131236: −: ENST00000390632 > chr14: 107025026: −: L1PB3 | |
| QAPGQGLE | chr14: 107170059: −: ENST00000390633 > chr14: 107126752: −: L1ME2, | 3 |
| WMGGIIPIF | chr14: 107170059: −: ENST00000390633 > chr14: 107126752: −: L1ME2 | |
| GTRNYRK | | |
| VCTWTPFN | chr5: 302190: +: (TG)n > chr5: 304292: +: ENST00000505221, | 3 |
| PVTVR | chr5: 302190: +: (TG)n > chr5: 304292: +: ENST00000505221, | |
| | chr5: 302190: +: (TG)n > chr5: 304292: +: ENST00000505221, | |
| | chr5: 302190: +: (TG)n > chr5: 304292: +: ENST00000506909, | |
| | chr5: 302190: +: (TG)n > chr5: 304292: +: ENST00000506909, | |
| | chr5: 302190: +: (TG)n > chr5: 304292: +: ENST00000506909, | |
| | chr5: 302190: +: (TG)n > chr5: 304292: +: ENST00000507473, | |
| | chr5: 302190: +: (TG)n > chr5: 304292: +: ENST00000507473, | |
| | chr5: 302190: +: (TG)n > chr5: 304292: +: ENST00000507473, | |
| | chr5: 302190: +: (TG)n > chr5: 304292: +: ENST00000507528, | |
| | chr5: 302190: +: (TG)n > chr5: 304292: +: ENST00000507528, | |
| | chr5: 302190: +: (TG)n > chr5: 304292: +: ENST00000507528 | |

[0490] Importantly, a group of 10 JET-derived proteins were found to be highly recurrent across the dataset, which were also highly reliable according to their MS/MS spectra. In addition, an overexpression of JET-derived proteins was detected in tumor samples annotated as inflammatory, which could be associated to higher interferon-y levels, and therefore an increased expression of transposable elements. These results provide a clear evidence that JETs encode for coding sequences that are translated into protein sequences. Mass spectrometry-based proteomics is thus a useful tool for from the validation of coding JETs.

### Immunopeptidomics

[0491] Proteomic analysis provides evidence of the existence of JET-derived proteins within the cell, but it does not elucidate the contribution of those proteins to the repertoire of major histocompatibility complex class I (HLA-I in humans)-associated peptides (also referred to as the immunopeptidome). Presentation by MHC class I molecules (named HLA-I in humans) on the tumor cell surface is indeed required for JET-derived peptides (pJETs) to be recognized by cytotoxic T cells. To demonstrate that JETs can be effectively processed and presented by HLA-I, the presence of lung tumor-specific pJET was searched in MS-based immunopeptidomics datasets (FIG. 16A—Table 8).

TABLE 8

| | | Recurrence |
|---|---|---|
| | | in |
| Sequence | chimeric id | peptidome |
| RATKPTVQK | chr22: 19103521: − > chr22: 19077003: − | 8 |
| MTSQTMVNK | chr17: 34139989: + > chr17: 34147028: + | 5 |
| RTHQQAPLK | chr20: 45967949: − > chr20: 45938948: − | 5 |
| VAAAESHPL | chr9: 136210283: + > chr9: 136216428: + | 5 |
| GIRPPTSVR | chr12: 120659973: − > chr12: 120659561: − | 4 |
| AQMSVPFNR | chr13: 38183213: − > chr13: 38171419: − | 4 |
| SLSPPLVSK | chr19: 46646469: + > chr19: 46663672: + | 4 |
| AVNGKFVGR | chr5: 10384580: + > chr5: 10387106: + | 4 |
| IQNEIHAQR | chr5: 43583569: − > chr5: 43556101: − | 4 |
| RLDHQRAEK | chr1: 180975232: − > chr1: 180974599: − | 3 |
| RWKEVPSVPR | chr10: 123969561: + > chr10: 123969912: + | 3 |
| GVQQYHLLSW | chr10: 72644921: − > chr10: 72642242: − | 3 |
| RLATAPSEK | chr10: 99601433: + > chr10: 99619215: + | 3 |
| YLPDFYFGKF | chr11: 108084796: − > chr11: 108068147: − | 3 |
| TVKTKSLM | chr11: 117024976: + > chr11: 117030650: + | 3 |
| HSKALSLSK | chr11: 118278445: + > chr11: 118279715: + | 3 |
| KTKNLPMQEK | chr11: 19146727: + > chr11: 19164530: + | 3 |
| KTKDLDQFLK | chr12: 41157000: + > chr12: 41312441: + | 3 |
| GGGYNDFGNY | chr12: 54631910: + > chr12: 54677621: + | 3 |
| TEIILRIK | chr14: 75593406: − > chr14: 75593104: − | 3 |
| RMFWIPKTK | chr15: 50744825: + > chr15: 50751197: + | 3 |
| VWMRSPLSTF | chr15: 60657933: − > chr15: 60656722: − | 3 |
| LPDLAGLAHL | chr16: 47626347: + > chr16: 47627411: + | 3 |
| KVLGDVATK | chr2: 171927080: − > chr2: 171917666: − | 3 |
| MVKPPSLLK | chr2: 44554937: + > chr16: 75263893: − | 3 |
| ESFYGIGTTRW | chr5: 140080670: + > chr5: 140081591: + | 3 |
| SIKQLQLLK | chr6: 7300909: − > chr6: 7299056: − | 3 |
| SVVSVLVQK | chr8: 41859766: − > chr8: 41845081: − | 3 |
| ALRAVTLTAK | chr1: 151239815: + > chr1: 151245271: + | 2 |
| YLMPSQLWKA | chr1: 207504641: + > chr1: 207506243: + | 2 |
| EQLDILENI | chr1: 33142971: + > chr1: 33145245: + | 2 |
| RSPDHPRAEY | chr1: 38258152: + > chr1: 38274660: + | 2 |
| ITSWFVPRPW | chr1: 45227052: + > chr1: 45241706: + | 2 |
| NELDKFIVF | chr10: 120938004: − > chr10: 120936665: − | 2 |
| SHKASLNKF | chr10: 47173898: − > chr10: 47139994: − | 2 |
| GTVPKSKAL | chr10: 5058029: − > chr10: 5043873: − | 2 |
| FMMEQVGLAIRS | chr10: 5060092: − > chr10: 5043783: − | 2 |
| MELALRSQL | chr11: 102093793: + > chr11: 102094353: + | 2 |
| RVLLKEELTTPK | chr11: 13465223: − > chr11: 13443385: − | 2 |
| PSSPRPSSL | chr11: 17486945: − > chr11: 17485151: − | 2 |
| GSGKRTSSQLKP | chr11: 44148906: + > chr11: 44151595: + | 2 |
| STSYSISSK | chr11: 61132342: + > chr11: 61133517: + | 2 |
| RTQSSTIQIR | chr11: 61196370: − > chr11: 61189080: − | 2 |
| QEDLGQRGY | chr11: 785039: + > chr11: 810272: + | 2 |
| ETEKDRRPW | chr12: 104681628: + > chr12: 104682709: + | 2 |
| RRLQGATAMVR | chr12: 20704505: + > chr20: 57470710: + | 2 |
| WRFQSCPPTTY | chr12: 53835233: + > chr12: 53836479: + | 2 |
| AVMTEVVLSK | chr12: 54862609: − > chr12: 54857081: − | 2 |
| STSIYSTL | chr12: 56867593: − > chr12: 56867378: − | 2 |
| APKRNTSAL | chr13: 38183213: − > chr13: 38171419: − | 2 |
| RSVSARPPR | chr13: 42456176: − > chr13: 42442613: − | 2 |
| SVAWPFSFPK | chr13: 53015205: − > chr13: 53013303: − | 2 |
| TPNLRTIY | chr13: 76192906: − > chr13: 76104323: − | 2 |
| SIQHSDLLY | chr13: 99992819: + > chr13: 100009388: + | 2 |
| SVKQGTGTSW | chr14: 102196928: + > chr14: 102197694: + | 2 |
| KSQKLREQIK | chr14: 107277425: − > chr14: 106478239: − | 2 |
| RRQQLITRF | chr14: 24686695: − > chr14: 24686429: − | 2 |
| KSQLLERL | chr14: 77914837: − > chr14: 77913291: − | 2 |
| GLFFMKQSV | chr15: 79168112: + > chr15: 79170555: + | 2 |
| RENGFVKKF | chr15: 80254313: − > chr15: 80253516: − | 2 |
| NEQAALSEAKVGGS | chr16: 30778197: + > chr16: 30778878: + | 2 |
| HELQSHHF | chr16: 69773838: − > chr16: 69752437: − | 2 |
| NEIRISEA | chr16: 80584267: + > chr16: 80584412: + | 2 |
| APRMLPIQAV | chr17: 25597844: + > chr17: 25630393: + | 2 |
| EAEVARWL | chr17: 57171332: − > chr17: 57168701: − | 2 |
| RLCPAAPSEK | chr17: 67192427: − > chr17: 67190636: − | 2 |
| APRGPSGTQEM | chr19: 3624569: − > chr19: 3624160: − | 2 |
| STHPPPPSGL | chr19: 3782560: − > chr19: 3781670: − | 2 |
| LYSRYKKLQQHSGAK | chr19: 40478151: + > chr19: 40491610: + | 2 |
| AAAVNQGLSY | chr19: 40540857: − > chr19: 40534017: − | 2 |
| LWPSPVNLRF | chr19: 42217314: + > chr19: 42311149: + | 2 |
| VSLSPPLVSK | chr19: 46646469: + > chr19: 46663672: + | 2 |
| VAAAAARVL | chr19: 8323741: + > chr19: 8326572: + | 2 |
| WRTSALGQR | chr2: 158306719: − > chr2: 158300518: − | 2 |
| KYKLLDIGYRK | chr2: 224817241: + > chr2: 224824251: + | 2 |
| KFTRFFVK | chr2: 24029041: − > chr2: 24021193: − | 2 |
| LHQKGGITF | chr2: 24198120: + > chr2: 24199839: + | 2 |
| QPSQTQVPL | chr2: 28859785: + > chr2: 28863793: + | 2 |
| ETFPGKSTF | chr2: 30856371: + > chr2: 30862983: + | 2 |
| DVLDKFMSF | chr2: 70488518: + > chr2: 70489942: + | 2 |
| GRWITPSNR | chr2: 89166769: − > chr2: 89157082: − | 2 |
| SAALQALKR | chr20: 32408074: + > chr20: 32436273: + | 2 |
| TATQRPTPM | chr20: 34710669: + > chr20: 34761806: + | 2 |
| RLLVPSSPK | chr20: 44540197: − > chr20: 44540102: − | 2 |
| TEATVDTSF | chr20: 60770037: + > chr20: 60770858: + | 2 |
| LASREAIL | chr20: 9457400: + > chr20: 9484605: + | 2 |
| HDLVRISM | chr21: 27105478: − > chr21: 27102112: − | 2 |
| NPQFLISMILQR | chr21: 27105526: − > chr21: 27102112: − | 2 |
| MRATKPTVQK | chr22: 19103521: − > chr22: 19077003: − | 2 |
| SAAAGIVGR | chr22: 39716401: − > chr22: 39714597: − | 2 |
| HTMGFWLTK | chr3: 10160654: + > chr3: 10188198: + | 2 |
| SPRDEGKVFR | chr3: 120840551: + > chr3: 120866822: + | 2 |
| QALYCQLLTY | chr3: 132948195: + > chr3: 132969129: + | 2 |
| GTFPFAFSL | chr3: 185198511: − > chr3: 185194935: − | 2 |
| KTFPLSKSPK | chr4: 106617004: − > chr4: 106616825: − | 2 |
| KVLEKYWLYK | chr4: 123834362: − > chr4: 123833778: − | 2 |
| TTDAAIRY | chr5: 10384580: + > chr5: 10387106: + | 2 |
| QAQPTLRPPK | chr5: 133406533: − > chr5: 133326845: − | 2 |
| AQPTLRPPK | chr5: 133406533: − > chr5: 133326845: − | 2 |
| KPAVARAR | chr5: 134415207: − > chr5: 134367163: − | 2 |
| ESFYGIGTTR | chr5: 140080670: + > chr5: 140081591: + | 2 |
| RRNQETGAVQR | chr5: 1503092: − > chr5: 1501718: − | 2 |
| ATDNDFSRRNLY | chr5: 1503092: − > chr5: 1501718: − | 2 |
| EVVSTSYRR | chr5: 87546068: − > chr5: 87524345: − | 2 |
| KLRDPTDSTLR | chr6: 109427293: + > chr6: 109466422: + | 2 |
| SPSADRVVAL | chr6: 43395970: + > chr6: 43399880: + | 2 |
| KVSSPESGLSNR | chr7: 101514832: + > chr7: 101559395: + | 2 |
| DIISAFHPF | chr7: 103845571: − > chr7: 103844682: − | 2 |
| AVFSLRPIPR | chr7: 32555261: + > chr7: 32582753: + | 2 |
| GRFPSQAQL | chr7: 40618566: + > chr7: 40789033: + | 2 |
| DIFQQQISR | chr7: 56036577: + > chr7: 56045819: + | 2 |
| SVSATSVQK | chr9: 101867407: + > chr9: 101891137: + | 2 |
| VHCDPTKGF | chr9: 71770431: + > chr9: 71827464: + | 2 |
| IVQHTEISSK | chrX: 122865506: − > chrX: 122846758: − | 2 |

[0492] HLA-I peptidomics identified 116 tumor-specific pJETs across 17 primary lung tumors and 2 tumor cell lines (one of the two cell lines was treated with interferon gamma). Interestingly, some pJETs were found in more than 1 sample, indicating that they are shared epitopes. Importantly, pJETs showed similar MS/MS identification scores and peptide length distributions as the annotated peptidome (FIGS. 16B and C). To further validate the reliability of the identifications, MS/MS spectra were manually verified, and 8 of them were confirmed with MS/MS spectra of the corresponding synthetic peptides. These results fully confirmed that the present method if reliable for the identification of pJETS that are presented by HLA-I molecules on tumor cells and are therefore accessible to cytotoxic cells.

### Methods

### Total Proteomics

[0493] For the discovery of JETs (junctions exon-transposable element) at the proteome level, two sources of mass spectrometry datasets were used. Firstly, a publicly available dataset of 504 mass spectrometry raw files corresponding to 375 cell lines of the CCLE (Cancer Cell Line Encyclopedia) were used. The original study associated to these analyses was described and published by Nusinow and colleagues in Cell in 2020 (DOI: 10.1016/j.cell.2019.12.023). The second source of data was lung primary tumours obtained from Stewart et al. in Cell 2019 (raw files downloaded from PRIDE database-accession code PXD010357).

[0494] Briefly, in both datasets, total protein extracts were obtained from cell lines or tumours and were subsequently digested with trypsin. The resulting peptides were chemically labelled with isobaric tags using TMT, where different samples were analysed in the same experiment, together with an internal reference standard. Peptides were fractionated offline through HPLC and different fractions from each experiment were run on the mass spectrometer separately (Orbitrap Fusion or Orbitrap Fusion Lumos, from Thermo-Fisher). Further details regarding the experimental procedures and analysis are available in the corresponding publications.

[0495] Raw output files from mass spectrometry runs were interrogated using Proteome Discoverer 2.4 (Thermo-Fisher), with Sequest-HT as search engine. Two customized databases were used to query the mass spectrometry peaks, both of them including Swissprot and TrEMBL canonical sequences, as well as the in silico translation of chimeric sequences predicted from different datasets. One of databases, the “CCLE-recurrent”, included those JETs found in at least 7 samples of the CCLE mRNA-seq collection. The other database, the “lung-specific”, was constructed adding to the canonical sequences those tumor-specific JETs detected on lung cell lines from CCLE. Thus, two different outputs were obtained, according to the library of predictions set as reference. Protein cleavage was specified as Trypsin allowing for a maximum of 2 miss-cleavages. Peptide FDR was set to 1% while protein FDR was allowed to 100%, to focus our search on the investigation of peptides. The mass tolerance for peptides was 4.5 ppm and fragment tolerance 0.02 Da. Carbamidomethylation of Cysteines was set as fixed modification. For the quantification, signals from TMT reporters were obtained using MS2 or MS3 fragmentation, paired with the MS2 scans for peptide identification.

### Cell Lysis and HLA-ABC-Peptide Complexes Purification

[0496] Dry pellets from H1650 cells were resuspended in lysis buffer and sonicated. The sample was centrifuged 12 min at 5500 g and 4° C. to remove nuclei and organelles. The supernatant was collected and ultracentrifuged at 72000 g for 1 h at 4° C. to extract the membranes and the pellet was resuspended with solubilization buffer. After overnight incubation at 4° C., the sample was ultracentrifuged at 55000 g for 1 h at 4° C. to pellet the non-solubilized membranes. Solubilized membranes were incubated overnight with CNBr-activated Sepharose beads (GE Healthcare Life Sciences) coupled to anti-HLA-ABC W6/32 antibody. After washing, peptide-HLA-ABC complexes were eluted with 0.25% TFA. The eluted material was cleaned by a C18 tip before mass spectrometry. Eluted samples were analyzed by Liquid Chromatography-Mass spectrometry (LC-MS) using an Orbitrap Fusion Lumos™ Tribrid (ThermoFisher) equipped with a nanoESI source and coupled to a nanochromatographic system. LC separation was done using a 140-min acetonitrile gradient. Analyses were performed in a Top Speed (most intense) data-dependent mode using a Higher-energy Collisional Dissociation (HCD).

### Immunopeptidomics

[0497] Mass spectrometry output files (called raw files) were downloaded from PRIDE database (dataset identifiers: PXD013649, MSV000082648, PXD009752, PXD009754, PXD009755 and PXD009936) or generated in house (for the H1650 cell line). Raw files were processed using ProteomeDiscoverer 2.4 (ThermoFisher) with the following parameters: no-enzyme, precursor mass tolerance 20 ppm and fragment mass tolerance 0.02 Da. Methionine and N-acetylation were enabled as variable modifications. Using Percolator, a false discovery rate (FDR) of 1% was applied at peptide level and no FDR was used at protein level. MS/MS spectra were searched against the human proteome from Uniprot/SwissProt with isoforms concatenated with the in-silico translated lung tumour-specific JETs.

[0498] Identified peptides in each sample were processed individually to GibbsCluster 2.0 Server and each cluster was attributed to a HLA-I allele. Only peptides grouped to a given cluster were kept for further analyses. To ensure that JET-derived peptides are not found in canonical proteins, identified peptides were filtered with UniProt/TrEMBL database. Leucine and isoleucine were treated as equivalent. Remaining sequences were aligned to the translated junction using our own custom R scripts. Only those peptides overlapping the junction or in gene frameshift were kept. Finally, spectrums from identified peptides were checked manually.

[0499] Synthetic peptides (HPLC purity of 95%) were injected in a LTQ Orbitrap and/or in a Orbitrap Fusion Lumos (CID/HCD). Raw files were analysed with ProteomeDiscoverer 2.5 (ThermoFisher). Spectrums were exported and compared to the endogenous peptide using Msnbase R package. Only PSM with the same charge between synthetic and endogenous and without modifications were analysed.

[0500] The following tables 9 and 10 respectively refer to the detailed identification of the neoantigenic peptides of SEQ ID NO 1 to 10170 translated from fusion transcripts wherein the exon is the donor and the neoantigenic peptides of SEQ ID NO 10171 to 38759 translated from fusion transcripts wherein the TE is the donor.

[0501] The column named “position” refers to the various chimeric proteins (identified by their SEQ ID NO) that are derived from splice variants of the same JET (or fusion). In table 10, the SEQ ID NO of the chimeric protein can be obtained by adding 10170 to the number(s) provided. For example, in line 2, the column “position” refers to 4 chimeric proteins of SEQ ID NO:10171 to 10174

[0502] The last column in each table gives the position of the breakpoint between the exon-derived aa sequence and the TE-derived aa sequence respectively for each of the chimeric proteins (if more than one) of the previous column (position).

[0503] In the following tables 11-20, columns 1-13 refer to the following items

| | Fusions (donor: exon) | Fusions (donor: TE) |
|---|---|---|
| 1 | Fusion_id | Fusion_id |
| 2 | Donor_Chromosome_Exon | Donor_Chromosome_TE |
| 3 | Donor_start_Exon | Donor_start_TE |
| 4 | Donor_Breakpoint_Exon | Donor_Breakpoint_TE |
| 5 | Donor_tx_name_Exon | Donor_tx_name_TE |
| 6 | Donor_strand_Exon | Donor_strand_TE |
| 7 | Acceptor_Chromosome_TE | Acceptor_Chromosome_exon |
| 8 | Acceptor_Breakpoint_TE | Acceptor_Breakpoint_exon |
| 9 | Acceptor_end_TE | Acceptor_end_exon |
| 10 | Acceptor_strand_TE | Acceptor_strand_exon |
| 11 | Chimeric protein (i.e. translated JET) reference | Chimeric protein (i.e. translated JET) |
| | | reference |
| 12 | Breakpoint_position_in_AA | Breakpoint_position_in_AA |
| 13 | Tissue | Tissue |

[0504] Column 11 refers to the various chimeric proteins (identified by their SEQ ID NO) that are derived from splice variants of the same JET (or fusion).
[0505] In table 11, the SEQ ID NO of the chimeric protein can be obtained by adding 39596 to the number(s) provided.
[0506] In table 12, the SEQ ID NO of the chimeric protein can be obtained by adding 39596 to the number(s) provided.
[0507] In table 13, the SEQ ID NO of the chimeric protein can be obtained by adding 39923 to the number(s) provided.
[0508] In table 14, the SEQ ID NO of the chimeric protein can be obtained by adding 39923 to the number(s) provided.
[0509] I In table 15, the SEQ ID NO of the chimeric protein can be obtained by adding 40127 to the number(s) provided.
[0510] In table 16, the SEQ ID NO of the chimeric protein can be obtained by adding 40127 to the number(s) provided.
[0511] In table 17, the SEQ ID NO of the chimeric protein can be obtained by adding 40364 to the number(s) provided.
[0512] In table 18, the SEQ ID NO of the chimeric protein can be obtained by adding 40364 to the number(s) provided.
[0513] In table 19, the SEQ ID NO of the chimeric protein can be obtained by adding 40509 to the number(s) provided.
[0514] In table 20, the SEQ ID NO of the chimeric protein can be obtained by adding 40509 to the number(s) provided.

### Description of the Sequences

| SEQ ID NO: | Sequence description |
|---|---|
| 1-10170 | Translated peptides from transcripts table 9: exon donor |
| 10171-38759 | Translated peptides from transcripts table 10: TE donor |
| 38760-38876 | LUAD peptides of table 3 (117) |
| 38877-38907 | Additional peptides from FIGS. 11-16 (31) |
| 38908-38915 | CDRs sequences table 4bis (8) |
| 38916-39104 | Table 5 peptides from MS (189) |
| 39105-39315 | Table 6 peptides from MS (211) |
| 39316-394820 | Table 7 peptides from MS (167) |
| 39483-39596 | Table 8 peptides from MS (116) |
| 39597-39683 | Translated peptides (JETs of table 11: exon donor) (87) |
| 39684-39923 | Translated peptides (JETs of table 12: TE donor) (240) |
| 39924-39965 | Translated peptides (JETs of table 13: exon donor) (42) |
| 39966-40177 | Translated peptides (JETs of table 14: TE donor) (162) |
| 40128-40193 | Translated peptides (JETs of table 15: exon donor) (66) |
| 40194-40364 | Translated peptides (JETs of table 16: TE donor) (171) |
| 40365-40391 | Translated peptides (JETs of table 17: exon donor) (27) |
| 40392-40509 | Translated peptides (JETs of table 18: TE donor) (118) |
| 40510-40728 | Translated peptides (JETs of table 19: exon donor) (219) |
| 40729-41099 | Translated peptides (JETs of table 20: TE donor) (371) |

1. An isolated tumor neoantigenic peptide comprising at least 4, 5, 6, 7 or 8 amino acids of any one of SEQ ID NO: 1-38907 and 38916-41099.

2. An isolated tumor neoantigenic peptide, according to claim 1 wherein (a) the peptide is from any one of SEQ ID NO:1-38907 and 38916-41099 or a fragment thereof, and comprises at least a portion of TE-derived amino acid sequence from any one of SEQ ID NO:1-38907 and 38916-41099, optionally (i) a fragment that overlaps the breakpoint between, the TE-derived amino acid sequence and an exon-derived amino acid sequence or, optionally (ii) a pure TE sequence; or (b) the peptide is from any one of SEQ ID NO: 1-10170; 38760-38907; 38916-39683; 39924-39965; 40128-40193; 40365-40391; and 40510-40728 or a fragment thereof, and is encoded by a non-canonical ORF downstream of the junction between the TE-derived amino acid sequence and the exon-derived amino acid sequence.

3. The isolated tumor neoantigenic peptide according to claim 1, wherein said neoantigenic peptide
is expressed at higher levels in tumor cells compared to normal healthy cells;
is expressed in at least 1% of subjects from a population of subjects suffering from cancer; and/or
binds MHC class I or class II with a Kd binding affinity of less than about 10⁻⁵ M.

4. A population of autologous dendritic cells or antigen presenting cells that have been pulsed with one or more of the peptides as defined in claim 1 or transfected with a polynucleotide encoding one or more of the peptides as defined in claim 1.

5. A vaccine or immunogenic composition capable of raising a specific T-cell response comprising
a. one or more neoantigenic peptides as defined in claim 1, optionally with a physiologically acceptable buffer, carrier, or excipient, and/or optionally with an adjuvant or immunostimulant;
b. one or more polynucleotides encoding a neoantigenic peptide as defined in claim 1, optionally linked to a heterologous regulatory control nucleotide sequence; and/or
c. a population of antigen presenting cells that have been pulsed with one or more of the peptides as defined in claim 1 or transfected with a polynucleotide encoding one or more of the peptides as defined in claim 1.

6. An antibody, or an antigen-binding fragment thereof, a T cell receptor (TCR), or a chimeric antigen receptor (CAR) that specifically binds a neoantigenic peptide as defined in claim 1, optionally in association with an MHC molecule, with a Kd affinity of about 10⁻⁶ M or less, optionally wherein the antibody is a TCR-like antibody or the CAR is a TCR-like antibody-based CAR.

7. A method of producing an antibody, TCR or CAR that specifically binds a neoantigenic peptide as defined in claim 1, comprising the step of selecting an antibody, TCR or CAR that binds to a tumor neoantigen peptide of claim 1, optionally in association with an MHC or HLA molecule, or optionally expressed on the surface of a cell, with a Kd binding affinity of about 10⁻⁶ M or less.

8. An antibody, TCR or CAR produced by the method of claim 7.

9. A T cell receptor according to claim 8, wherein said T cell receptor is made soluble or a TCR-like antibody fused to an antibody fragment directed to a T cell antigen, optionally wherein the targeted antigen is CD3 or CD16.

10. An antibody, TCR or CAR according to claim 6, wherein said antibody is a multispecific antibody that further targets at least an immune cell antigen, optionally wherein the immune cell is a T cell, a NK cell or a dendritic cell, optionally wherein the targeted antigen is CD3, CD16, CD30 or a TCR, optionally wherein the immune cell is defective for the Suv39h1 gene.

11. A polynucleotide encoding a neoantigenic peptide as defined in claim 1 or a polynucleotide encoding an antibody, a CAR or a TCR, which specifically binds a neoantigenic peptide as defined in claim 1, optionally in association with an MHC molecule, with a Kd affinity of about 10⁻⁶ M or less, optionally wherein the antibody is a TCR-like antibody or the CAR is a TCR-like antibody-based CAR;
optionally linked to a heterologous regulatory control sequence.

12. A vector comprising the polynucleotide of claim 11.

13. An immune cell that specifically binds to one or more neoantigenic peptides as defined in claim 1, optionally wherein the immune cell is defective for the Suv39h1 gene.

14. The immune cell of claim 13, which is an allogenic or autologous cell selected from T cells, Natural Killer T cells, CD4+/CD8+ T cells, TILs/tumor derived CD8 T cells, central memory CD8+ T cells, Treg, MAIT, Yδ T cells, human embryonic stem cells, and pluripotent stem cells from which lymphoid cells may be differentiated.

15. A T cell according to claim 14, which comprises
a T cell receptor that specifically binds one or more neoantigenic peptides as defined in claim 1, or
a TCR or a CAR that specifically binds to one or more neoantigenic peptides as defined in claim 1, optionally wherein the CAR is an MHC-restricted antibody-based chimeric antigen receptor.

16. A method of inhibiting cancer cell proliferation, a method of cancer vaccination therapy of a subject or a method of treating cancer in a subject, comprising administering to a subject in need thereof the neoantigenic peptide as defined in claim 1, a population of dendritic cells or antigen presenting cells that bind to one or more of the peptides as defined in claim 1, a vaccine or immunogenic composition capable of raising a specific T-cell response to one or more of the peptides of claim 1, a polynucleotide encoding a neoantigenic peptide as defined in claim 1 or a polynucleotide encoding an antibody, a CAR or a TCR which specifically binds a neoantigenic peptide as defined in claim 1, a vector comprising said polynucleotide or an antibody, a CAR or a TCR which specifically binds the neoantigenic peptide as defined in claim 1.

17. (canceled)

18. A method of treating cancer in a subject, comprising administering to a subject in need thereof a n immune cell that specifically binds to one or more neoantigenic peptides as defined in claim 1, optionally wherein the immune cell is defective for the Suv39h1 gene, optionally wherein the immune cell is an allogenic or autologous cell selected from T cells, Natural Killer T cells, CD4+/CD8+ T cells, TILs/tumor derived CD8 T cells, central memory CD8+ T cells, Treg, MAIT, γδ T cells, human embryonic stem cells, and pluripotent stem cells from which lymphoid cells may be differentiated, and optionally wherein the immune cell comprises a TCR or CAR that specifically binds a neoantigenic peptide as defined in claim 1.

19. The method of claim 16 comprising administering at least one further therapeutic agent, optionally a chemotherapeutic agent, an immunotherapeutic agent, or a checkpoint inhibitor.

20. The method of claim 18 comprising administering at least one further therapeutic agent, optionally a chemotherapeutic agent, or an immunotherapeutic agent, or a checkpoint inhibitor.

The application's sequence listing, which the Patent Office published only in electronic form, follows.

SEQUENCE LISTING (41099 sequences)

SEQ ID NO: 1 - protein, 337 aa, Artificial Sequence
  Synthetic polypeptide
MAVSGFTLGTCILLLHISYVANYPNGKVTQSCHGMIPEHGHSPQSVPVHDIYVSQMTFRPGDQIEVTLSGHPFKGFLLEARNAEDLNGPPIGSFTLIDSEVSQLLTCEDIQGSAVSHRSASKKTEIKVYWNAPSSAPNHTQFLVTVVEKYKIYWVKIPGPIISQPNAFPFTTPKATVVPLPTLPPVSHLTKPFSASDCGNKKFCIRSPLNCDPEKEASCVFLSFTRDDQSVMVEMSGPSKGYLSFALSHDQWMGDDDAYLCIHEDQTVYIQPSHLTGRSHPVMDSRDTLEDMAWRLADGVMQCSFRRNITLPGVKNRFDLNTSYYIFLADGAANDVY

SEQ ID NO: 2 - protein, 296 aa, Artificial Sequence
  Synthetic polypeptide
MFANLKYVSLGILVFQTTSLVLTMRYSRTLKEEGPRYLSSTAVVVAELLKIMACILLVYKDSKCSLRALNRVLHDEILNKPMETLKLAIPSGIYTLQNNLLYVALSNLDAATYQVTYQLKILTTALFSVSMLSKKLGVYQWLSLVILMTGVAFVQWPSDSQLDSKELSAGSQFVGLMAVLTACFSSGFAGVYFEKILKETKQSVWIRNIQLGFFGSIFGLMGVYIYDGELVSKNGFFQGYNRLTWIVVVLQALGGLVIAAVIKYADNILKGFATSLSIILSTLISYFWLQDFVPTR

SEQ ID NO: 3 - protein, 338 aa, Artificial Sequence
  Synthetic polypeptide
MSSRSVLSPVVGTDAPDQHLELKKPQELKEMERLPLANEDKTMFANLKYVSLGILVFQTTSLVLTMRYSRTLKEEGPRYLSSTAVVVAELLKIMACILLVYKDSKCSLRALNRVLHDEILNKPMETLKLAIPSGIYTLQNNLLYVALSNLDAATYQVTYQLKILTTALFSVSMLSKKLGVYQWLSLVILMTGVAFVQWPSDSQLDSKELSAGSQFVGLMAVLTACFSSGFAGVYFEKILKETKQSVWIRNIQLGFFGSIFGLMGVYIYDGELVSKNGFFQGYNRLTWIVVVLQALGGLVIAAVIKYADNILKGFATSLSIILSTLISYFWLQDFVPTR

SEQ ID NO: 4 - protein, 23 aa, Artificial Sequence
  Synthetic polypeptide
MAAVRMLRTWSRNAGKLAPTGGS

SEQ ID NO: 5 - protein, 126 aa, Artificial Sequence
  Synthetic polypeptide
MEELSADEIRRRRLARLAGGQTSQPTTPLTSPQRENPPGPPIAASAPGPSQSLGLNVHNMTPATSPIGASGVAHRSQSSEGVSSLSSSPSNSLETQSQSLSRSQSMDIDGVSCEKSDLGGCVLQMA

SEQ ID NO: 6 - protein, 1069 aa, Artificial Sequence
  Synthetic polypeptide
MEELSADEIRRRRLARLAGGQTSQPTTPLTSPQRENPPGPPIAASAPGPSQSLGLNVHNMTPATSPIGASGVAHRSQSSEGVSSLSSSPSNSLETQSQSLSRSQSMDIDGVSCEKSMSQVDVDSGIENMEVDENDRREKRSLSDKEPSSGPEVSEEQALQLVCKIFRVSWKDRDRDVIFLSSLSAQFKQNPKEVFSDFKDLIGQILMEVLMMSTQTRDENPFASLTATSQPIAAAARSPDRNLLLNTGSNPGTSPMFCSVASFGASSLSSLGASGGASNWDSYSDHFTIETCKETDMLNYLIECFDRVGIEEKKAPKMCSQPAVSQLLSNIRSQCISHTALVLQGSLTQPRSLQQPSFLVPYMLCRNLPYGFIQELVRTTHQDEEVFKQIFIPILQGLALAAKECSLDSDYFKYPLMALGELCETKFGKTHPVCNLVASLRLWLPKSLSPGCGRELQRLSYLGAFFSFSVFAEDDVKVVEKYFSGPAITLENTRVVSQSLQHYLELGRQELFKILHSILLNGETREAALSYMAAVVNANMKKAQMQTDDRLVSTDGFMLNFLWVLQQLSTKIKLETVDPTYIFHPRCRITLPNDETRVNATMEDVNDWLTELYGDQPPFSEPKFPTECFFLTLHAHHLSILPSCRRYIRRLRAIRELNRTVEDLKNNESQWKDSPLATRHREMLKRCKTQLKKLVRCKACADAGLLDESFLRRCLNFYGLLIQLLLRILDPAYPDITLPLNSDVPKVFAALPEFYVEDVAEFLFFIVQYSPQALYEPCTQDIVMFLVVMLCNQNYIRNPYLVAKLVEVMFMTNPAVQPRTQKFFEMIENHPLSTKLLVPSLMKFYTDVEHTGATSEFYDKFTIRYHISTIFKSLWQNIAHHGTFMEEFNSGKQFVRYINMLINDTTFLLDESLESLKRIHEVQEEMKNKEQWDQLPRDQQQARQSQLAQDERVSRSYLALATETVDMFHILTKQVQKPFLRPELGPRLAAMLNFNLQQLCGPKCRDLKVENPEKYGFEPKKLLDQLTDIYLQLDCARFAKAIADDQNTHHCVTTADRIQYSPTLYSFVA

SEQ ID NO: 7 - protein, 953 aa, Artificial Sequence
  Synthetic polypeptide
MSQVDVDSGIENMEVDENDRREKRSLSDKEPSSGPEVSEEQALQLVCKIFRVSWKDRDRDVIFLSSLSAQFKQNPKEVFSDFKDLIGQILMEVLMMSTQTRDENPFASLTATSQPIAAAARSPDRNLLLNTGSNPGTSPMFCSVASFGASSLSSLGASGGASNWDSYSDHFTIETCKETDMLNYLIECFDRVGIEEKKAPKMCSQPAVSQLLSNIRSQCISHTALVLQGSLTQPRSLQQPSFLVPYMLCRNLPYGFIQELVRTTHQDEEVFKQIFIPILQGLALAAKECSLDSDYFKYPLMALGELCETKFGKTHPVCNLVASLRLWLPKSLSPGCGRELQRLSYLGAFFSFSVFAEDDVKVVEKYFSGPAITLENTRVVSQSLQHYLELGRQELFKILHSILLNGETREAALSYMAAVVNANMKKAQMQTDDRLVSTDGFMLNFLWVLQQLSTKIKLETVDPTYIFHPRCRITLPNDETRVNATMEDVNDWLTELYGDQPPFSEPKFPTECFFLTLHAHHLSILPSCRRYIRRLRAIRELNRTVEDLKNNESQWKDSPLATRHREMLKRCKTQLKKLVRCKACADAGLLDESFLRRCLNFYGLLIQLLLRILDPAYPDITLPLNSDVPKVFAALPEFYVEDVAEFLFFIVQYSPQALYEPCTQDIVMFLVVMLCNQNYIRNPYLVAKLVEVMFMTNPAVQPRTQKFFEMIENHPLSTKLLVPSLMKFYTDVEHTGATSEFYDKFTIRYHISTIFKSLWQNIAHHGTFMEEFNSGKQFVRYINMLINDTTFLLDESLESLKRIHEVQEEMKNKEQWDQLPRDQQQARQSQLAQDERVSRSYLALATETVDMFHILTKQVQKPFLRPELGPRLAAMLNFNLQQLCGPKCRDLKVENPEKYGFEPKKLLDQLTDIYLQLDCARFAKAIADDQNTHHCVTTADRIQYSPTLYSFVA

SEQ ID NO: 8 - protein, 1198 aa, Artificial Sequence
  Synthetic polypeptide
MEELSADEIRRRRLARLAGGQTSQPTTPLTSPQRENPPGPPIAASAPGPSQSLGLNVHNMTPATSPIGASGVAHRSQSSEGVSSLSSSPSNSLETQSQSLSRSQSMDIDGVSCEKSMSQVDVDSGIENMEVDENDRREKRSLSDKEPSSGPEVSEEQALQLVCKIFRVSWKDRDRDVIFLSSLSAQFKQNPKEVFSDFKDLIGQILMEVLMMSTQTRDENPFASLTATSQPIAAAARSPDRNLLLNTGSNPGTSPMFCSVASFGASSLSSLYESSPAPTPSFWSSVPVMGPSLASPSRAASQLAVPSTPLSPHSAASGTAAGSQPSSPRYRPYTVTHPWASSGVSILSSSPSPPALASSPQAVPASSSRQRPSSTGPPLPPASPSATSRRPSSLRISPSLGASGGASNWDSYSDHFTIETCKETDMLNYLIECFDRVGIEEKKAPKMCSQPAVSQLLSNIRSQCISHTALVLQGSLTQPRSLQQPSFLVPYMLCRNLPYGFIQELVRTTHQDEEVFKQIFIPILQGLALAAKECSLDSDYFKYPLMALGELCETKFGKTHPVCNLVASLRLWLPKSLSPGCGRELQRLSYLGAFFSFSVFAEDDVKVVEKYFSGPAITLENTRVVSQSLQHYLELGRQELFKILHSILLNGETREAALSYMAAVVNANMKKAQMQTDDRLVSTDGFMLNFLWVLQQLSTKIKLETVDPTYIFHPRCRITLPNDETRVNATMEDVNDWLTELYGDQPPFSEPKFPTECFFLTLHAHHLSILPSCRRYIRRLRAIRELNRTVEDLKNNESQWKDSPLATRHREMLKRCKTQLKKLVRCKACADAGLLDESFLRRCLNFYGLLIQLLLRILDPAYPDITLPLNSDVPKVFAALPEFYVEDVAEFLFFIVQYSPQALYEPCTQDIVMFLVVMLCNQNYIRNPYLVAKLVEVMFMTNPAVQPRTQKFFEMIENHPLSTKLLVPSLMKFYTDVEHTGATSEFYDKFTIRYHISTIFKSLWQNIAHHGTFMEEFNSGKQFVRYINMLINDTTFLLDESLESLKRIHEVQEEMKNKEQWDQLPRDQQQARQSQLAQDERVSRSYLALATETVDMFHILTKQVQKPFLRPELGPRLAAMLNFNLQQLCGPKCRDLKVENPEKYGFEPKKLLDQLTDIYLQLDCARFAKAIADDQNTHHCVTTADRIQYSPTLYSFVA

SEQ ID NO: 9 - protein, 1203 aa, Artificial Sequence
  Synthetic polypeptide
MEPWSSRWKTKRWLWDFTVTTLALTFLFQAREVRGAAPVDVLKALDFHNSPEGISKTTGFCTNRKNSKGSDTAYRVSKQAQLSAPTKQLFPGGTFPEDFSILFTVKPKKGIQSFLLSIYNEHGIQQIGVEVGRSPVFLFEDHTGKPAPEDYPLFRTVNIADGKWHRVAISVEKKTVTMIVDCKKKTTKPLDRSERAIVDTNGITVFGTRILDEEVFEGDIQQFLITGDPKAAYDYCEHYSPDCDSSAPKAAQAQEPQIDEYAPEDIIEYDYEYGEAEYKEAESVTEGPTVTEETIAQTEANIVDDFQEYNYGTMESYQTEAPRHVSGTNEPNPVEEIFTEEYLTGEDYDSQRKNSEDTLYENKEIDGRDSDLLVDGDLGEYDFYEYKEYEDKPTSPPNEEFGPGVPAETDITETSINGHGAYGEKGQKGEPAVVEPGMLVEGPPGPAGPAGIMGPPGLQGPTGPPGDPGDRGPPGRPGLPGADGLPGPPGTMLMLPFRYGGDGSKGPTISAQEAQAQAILQQARIALRGPPGPMGLTGRPGPVGGPGSSGAKGESGDPGPQGPRGVQGPPGPTGKPGKRGRPGADGGRGMPGEPGAKGDRGFDGLPGLPGDKGHRGERGPQGPPGPPGDDGMRGEDGEIGPRGLPGEAGPRGLLGPRGTPGAPGQPGMAGVDGPPGPKGNMGPQGEPGPPGQQGNPGPQGLPGPQGPIGPPGEKGPQGKPGLAGLPGADGPPGHPGKEGQSGEKGALGPPGPQGPIGYPGPRGVKGADGVRGLKGSKGEKGEDGFPGFKGDMGLKGDRGEVGQIGPRGEDGPEGPKGRAGPTGDPGPSGQAGEKGKLGVPGLPGYPGRQGPKGSTGFPGFPGANGEKGARGVAGKPGPRGQRGPTGPRGSRGARGPTGKPGPKGTSGGDGPPGPPGERGPQGPQGPVGFPGPKGPPGPPGKDGLPGHPGQRGETGFQGKTGPPGPGGVVGPQGPTGETGPIGERGHPGPPGPPGEQGLPGAAGKEGAKGDPGPQGISGKDGPAGLRGFPGERGLPGAQGAPGLKGGEGPQGPPGPVGSPGERGSAGTAGPIGLPGRPGPQGPPGPAGEKGAPGEKGPQGPAGRDGVQGPVGLPGPAGPAGSPGEDGDKGEIGEPGQKGSKGDKGENGPPGPPGLQGPVGAPGIAGGDGEPGPRGQQGMFGQKGDEGARGFPGPPGPIGLQGHG

SEQ ID NO: 10 - protein, 1164 aa, Artificial Sequence
  Synthetic polypeptide
MEPWSSRWKTKRWLWDFTVTTLALTFLFQAREVRGAAPVDVLKALDFHNSPEGISKTTGFCTNRKNSKGSDTAYRVSKQAQLSAPTKQLFPGGTFPEDFSILFTVKPKKGIQSFLLSIYNEHGIQQIGVEVGRSPVFLFEDHTGKPAPEDYPLFRTVNIADGKWHRVAISVEKKTVTMIVDCKKKTTKPLDRSERAIVDTNGITVFGTRILDEEVFEGDIQQFLITGDPKAAYDYCEHYSPDCDSSAPKAAQAQEPQIDEANIVDDFQEYNYGTMESYQTEAPRHVSGTNEPNPVEEIFTEEYLTGEDYDSQRKNSEDTLYENKEIDGRDSDLLVDGDLGEYDFYEYKEYEDKPTSPPNEEFGPGVPAETDITETSINGHGAYGEKGQKGEPAVVEPGMLVEGPPGPAGPAGIMGPPGLQGPTGPPGDPGDRGPPGRPGLPGADGLPGPPGTMLMLPFRYGGDGSKGPTISAQEAQAQAILQQARIALRGPPGPMGLTGRPGPVGGPGSSGAKGESGDPGPQGPRGVQGPPGPTGKPGKRGRPGADGGRGMPGEPGAKGDRGFDGLPGLPGDKGHRGERGPQGPPGPPGDDGMRGEDGEIGPRGLPGEAGPRGLLGPRGTPGAPGQPGMAGVDGPPGPKGNMGPQGEPGPPGQQGNPGPQGLPGPQGPIGPPGEKGPQGKPGLAGLPGADGPPGHPGKEGQSGEKGALGPPGPQGPIGYPGPRGVKGADGVRGLKGSKGEKGEDGFPGFKGDMGLKGDRGEVGQIGPRGEDGPEGPKGRAGPTGDPGPSGQAGEKGKLGVPGLPGYPGRQGPKGSTGFPGFPGANGEKGARGVAGKPGPRGQRGPTGPRGSRGARGPTGKPGPKGTSGGDGPPGPPGERGPQGPQGPVGFPGPKGPPGPPGKDGLPGHPGQRGETGFQGKTGPPGPGGVVGPQGPTGETGPIGERGHPGPPGPPGEQGLPGAAGKEGAKGDPGPQGISGKDGPAGLRGFPGERGLPGAQGAPGLKGGEGPQGPPGPVGSPGERGSAGTAGPIGLPGRPGPQGPPGPAGEKGAPGEKGPQGPAGRDGVQGPVGLPGPAGPAGSPGEDGDKGEIGEPGQKGSKGDKGENGPPGPPGLQGPVGAPGIAGGDGEPGPRGQQGMFGQKGDEGARGFPGPPGPIGLQGHG

SEQ ID NO: 11 - protein, 1215 aa, Artificial Sequence
  Synthetic polypeptide
MEPWSSRWKTKRWLWDFTVTTLALTFLFQAREVRGAAPVDVLKALDFHNSPEGISKTTGFCTNRKNSKGSDTAYRVSKQAQLSAPTKQLFPGGTFPEDFSILFTVKPKKGIQSFLLSIYNEHGIQQIGVEVGRSPVFLFEDHTGKPAPEDYPLFRTVNIADGKWHRVAISVEKKTVTMIVDCKKKTTKPLDRSERAIVDTNGITVFGTRILDEEVFEGDIQQFLITGDPKAAYDYCEHYSPDCDSSAPKAAQAQEPQIDEKKKSNFKKKMRTVATKSKEKSKKFTPPKSEKFSSKKKKSYQASAKAKLGVKANIVDDFQEYNYGTMESYQTEAPRHVSGTNEPNPVEEIFTEEYLTGEDYDSQRKNSEDTLYENKEIDGRDSDLLVDGDLGEYDFYEYKEYEDKPTSPPNEEFGPGVPAETDITETSINGHGAYGEKGQKGEPAVVEPGMLVEGPPGPAGPAGIMGPPGLQGPTGPPGDPGDRGPPGRPGLPGADGLPGPPGTMLMLPFRYGGDGSKGPTISAQEAQAQAILQQARIALRGPPGPMGLTGRPGPVGGPGSSGAKGESGDPGPQGPRGVQGPPGPTGKPGKRGRPGADGGRGMPGEPGAKGDRGFDGLPGLPGDKGHRGERGPQGPPGPPGDDGMRGEDGEIGPRGLPGEAGPRGLLGPRGTPGAPGQPGMAGVDGPPGPKGNMGPQGEPGPPGQQGNPGPQGLPGPQGPIGPPGEKGPQGKPGLAGLPGADGPPGHPGKEGQSGEKGALGPPGPQGPIGYPGPRGVKGADGVRGLKGSKGEKGEDGFPGFKGDMGLKGDRGEVGQIGPRGEDGPEGPKGRAGPTGDPGPSGQAGEKGKLGVPGLPGYPGRQGPKGSTGFPGFPGANGEKGARGVAGKPGPRGQRGPTGPRGSRGARGPTGKPGPKGTSGGDGPPGPPGERGPQGPQGPVGFPGPKGPPGPPGKDGLPGHPGQRGETGFQGKTGPPGPGGVVGPQGPTGETGPIGERGHPGPPGPPGEQGLPGAAGKEGAKGDPGPQGISGKDGPAGLRGFPGERGLPGAQGAPGLKGGEGPQGPPGPVGSPGERGSAGTAGPIGLPGRPGPQGPPGPAGEKGAPGEKGPQGPAGRDGVQGPVGLPGPAGPAGSPGEDGDKGEIGEPGQKGSKGDKGENGPPGPPGLQGPVGAPGIAGGDGEPGPRGQQGMFGQKGDEGARGFPGPPGPIGLQGHG

SEQ ID NO: 12 - protein, 1087 aa, Artificial Sequence
  Synthetic polypeptide
MEPWSSRWKTKRWLWDFTVTTLALTFLFQAREVRGAAPVDVLKALDFHNSPEGISKTTGFCTNRKNSKGSDTAYRVSKQAQLSAPTKQLFPGGTFPEDFSILFTVKPKKGIQSFLLSIYNEHGIQQIGVEVGRSPVFLFEDHTGKPAPEDYPLFRTVNIADGKWHRVAISVEKKTVTMIVDCKKKTTKPLDRSERAIVDTNGITVFGTRILDEEVFEGDIQQFLITGDPKAAYDYCEHYSPDCDSSAPKAAQAQEPQIDEYAPEDIIEYDYEYGEAEYKEAESVTEGPTVTEETIAQTEINGHGAYGEKGQKGEPAVVEPGMLVEGPPGPAGPAGIMGPPGLQGPTGPPGDPGDRGPPGRPGLPGADGLPGPPGTMLMLPFRYGGDGSKGPTISAQEAQAQAILQQARIALRGPPGPMGLTGRPGPVGGPGSSGAKGESGDPGPQGPRGVQGPPGPTGKPGKRGRPGADGGRGMPGEPGAKGDRGFDGLPGLPGDKGHRGERGPQGPPGPPGDDGMRGEDGEIGPRGLPGEAGPRGLLGPRGTPGAPGQPGMAGVDGPPGPKGNMGPQGEPGPPGQQGNPGPQGLPGPQGPIGPPGEKGPQGKPGLAGLPGADGPPGHPGKEGQSGEKGALGPPGPQGPIGYPGPRGVKGADGVRGLKGSKGEKGEDGFPGFKGDMGLKGDRGEVGQIGPRGEDGPEGPKGRAGPTGDPGPSGQAGEKGKLGVPGLPGYPGRQGPKGSTGFPGFPGANGEKGARGVAGKPGPRGQRGPTGPRGSRGARGPTGKPGPKGTSGGDGPPGPPGERGPQGPQGPVGFPGPKGPPGPPGKDGLPGHPGQRGETGFQGKTGPPGPGGVVGPQGPTGETGPIGERGHPGPPGPPGEQGLPGAAGKEGAKGDPGPQGISGKDGPAGLRGFPGERGLPGAQGAPGLKGGEGPQGPPGPVGSPGERGSAGTAGPIGLPGRPGPQGPPGPAGEKGAPGEKGPQGPAGRDGVQGPVGLPGPAGPAGSPGEDGDKGEIGEPGQKGSKGDKGENGPPGPPGLQGPVGAPGIAGGDGEPGPRGQQGMFGQKGDEGARGFPGPPGPIGLQGHG

SEQ ID NO: 13 - protein, 1203 aa, Artificial Sequence
  Synthetic polypeptide
MEPWSSRWKTKRWLWDFTVTTLALTFLFQAREVRGAAPVDVLKALDFHNSPEGISKTTGFCTNRKNSKGSDTAYRVSKQAQLSAPTKQLFPGGTFPEDFSILFTVKPKKGIQSFLLSIYNEHGIQQIGVEVGRSPVFLFEDHTGKPAPEDYPLFRTVNIADGKWHRVAISVEKKTVTMIVDCKKKTTKPLDRSERAIVDTNGITVFGTRILDEEVFEGDIQQFLITGDPKAAYDYCEHYSPDCDSSAPKAAQAQEPQIDEYAPEDIIEYDYEYGEAEYKEAESVTEGPTVTEETIAQTEANIVDDFQEYNYGTMESYQTEAPRHVSGTNEPNPVEEIFTEEYLTGEDYDSQRKNSEDTLYENKEIDGRDSDLLVDGDLGEYDFYEYKEYEDKPTSPPNEEFGPGVPAETDITETSINGHGAYGEKGQKGEPAVVEPGMLVEGPPGPAGPAGIMGPPGLQGPTGPPGDPGDRGPPGRPGLPGADGLPGPPGTMLMLPFRYGGDGSKGPTISAQEAQAQAILQQARIALRGPPGPMGLTGRPGPVGGPGSSGAKGESGDPGPQGPRGVQGPPGPTGKPGKRGRPGADGGRGMPGEPGAKGDRGFDGLPGLPGDKGHRGERGPQGPPGPPGDDGMRGEDGEIGPRGLPGEAGPRGLLGPRGTPGAPGQPGMAGVDGPPGPKGNMGPQGEPGPPGQQGNPGPQGLPGPQGPIGPPGEKGPQGKPGLAGLPGADGPPGHPGKEGQSGEKGALGPPGPQGPIGYPGPRGVKGADGVRGLKGSKGEKGEDGFPGFKGDMGLKGDRGEVGQIGPRGEDGPEGPKGRAGPTGDPGPSGQAGEKGKLGVPGLPGYPGRQGPKGSTGFPGFPGANGEKGARGVAGKPGPRGQRGPTGPRGSRGARGPTGKPGPKGTSGGDGPPGPPGERGPQGPQGPVGFPGPKGPPGPPGKDGLPGHPGQRGETGFQGKTGPPGPGGVVGPQGPTGETGPIGERGHPGPPGPPGEQGLPGAAGKEGAKGDPGPQGISGKDGPAGLRGFPGERGLPGAQGAPGLKGGEGPQGPPGPVGSPGERGSAGTAGPIGLPGRPGPQGPPGPAGEKGAPGEKGPQGPAGRDGVQGPVGLPGPAGPAGSPGEDGDKGEIGEPGQKGSKGDKGENGPPGPPGLQGPVGAPGIAGGDGEPGPRGQQGMFGQKGDEGARGFPGPPGPIGLQGSA

SEQ ID NO: 14 - protein, 1164 aa, Artificial Sequence
  Synthetic polypeptide
MEPWSSRWKTKRWLWDFTVTTLALTFLFQAREVRGAAPVDVLKALDFHNSPEGISKTTGFCTNRKNSKGSDTAYRVSKQAQLSAPTKQLFPGGTFPEDFSILFTVKPKKGIQSFLLSIYNEHGIQQIGVEVGRSPVFLFEDHTGKPAPEDYPLFRTVNIADGKWHRVAISVEKKTVTMIVDCKKKTTKPLDRSERAIVDTNGITVFGTRILDEEVFEGDIQQFLITGDPKAAYDYCEHYSPDCDSSAPKAAQAQEPQIDEANIVDDFQEYNYGTMESYQTEAPRHVSGTNEPNPVEEIFTEEYLTGEDYDSQRKNSEDTLYENKEIDGRDSDLLVDGDLGEYDFYEYKEYEDKPTSPPNEEFGPGVPAETDITETSINGHGAYGEKGQKGEPAVVEPGMLVEGPPGPAGPAGIMGPPGLQGPTGPPGDPGDRGPPGRPGLPGADGLPGPPGTMLMLPFRYGGDGSKGPTISAQEAQAQAILQQARIALRGPPGPMGLTGRPGPVGGPGSSGAKGESGDPGPQGPRGVQGPPGPTGKPGKRGRPGADGGRGMPGEPGAKGDRGFDGLPGLPGDKGHRGERGPQGPPGPPGDDGMRGEDGEIGPRGLPGEAGPRGLLGPRGTPGAPGQPGMAGVDGPPGPKGNMGPQGEPGPPGQQGNPGPQGLPGPQGPIGPPGEKGPQGKPGLAGLPGADGPPGHPGKEGQSGEKGALGPPGPQGPIGYPGPRGVKGADGVRGLKGSKGEKGEDGFPGFKGDMGLKGDRGEVGQIGPRGEDGPEGPKGRAGPTGDPGPSGQAGEKGKLGVPGLPGYPGRQGPKGSTGFPGFPGANGEKGARGVAGKPGPRGQRGPTGPRGSRGARGPTGKPGPKGTSGGDGPPGPPGERGPQGPQGPVGFPGPKGPPGPPGKDGLPGHPGQRGETGFQGKTGPPGPGGVVGPQGPTGETGPIGERGHPGPPGPPGEQGLPGAAGKEGAKGDPGPQGISGKDGPAGLRGFPGERGLPGAQGAPGLKGGEGPQGPPGPVGSPGERGSAGTAGPIGLPGRPGPQGPPGPAGEKGAPGEKGPQGPAGRDGVQGPVGLPGPAGPAGSPGEDGDKGEIGEPGQKGSKGDKGENGPPGPPGLQGPVGAPGIAGGDGEPGPRGQQGMFGQKGDEGARGFPGPPGPIGLQGSA

SEQ ID NO: 15 - protein, 1215 aa, Artificial Sequence
  Synthetic polypeptide
MEPWSSRWKTKRWLWDFTVTTLALTFLFQAREVRGAAPVDVLKALDFHNSPEGISKTTGFCTNRKNSKGSDTAYRVSKQAQLSAPTKQLFPGGTFPEDFSILFTVKPKKGIQSFLLSIYNEHGIQQIGVEVGRSPVFLFEDHTGKPAPEDYPLFRTVNIADGKWHRVAISVEKKTVTMIVDCKKKTTKPLDRSERAIVDTNGITVFGTRILDEEVFEGDIQQFLITGDPKAAYDYCEHYSPDCDSSAPKAAQAQEPQIDEKKKSNFKKKMRTVATKSKEKSKKFTPPKSEKFSSKKKKSYQASAKAKLGVKANIVDDFQEYNYGTMESYQTEAPRHVSGTNEPNPVEEIFTEEYLTGEDYDSQRKNSEDTLYENKEIDGRDSDLLVDGDLGEYDFYEYKEYEDKPTSPPNEEFGPGVPAETDITETSINGHGAYGEKGQKGEPAVVEPGMLVEGPPGPAGPAGIMGPPGLQGPTGPPGDPGDRGPPGRPGLPGADGLPGPPGTMLMLPFRYGGDGSKGPTISAQEAQAQAILQQARIALRGPPGPMGLTGRPGPVGGPGSSGAKGESGDPGPQGPRGVQGPPGPTGKPGKRGRPGADGGRGMPGEPGAKGDRGFDGLPGLPGDKGHRGERGPQGPPGPPGDDGMRGEDGEIGPRGLPGEAGPRGLLGPRGTPGAPGQPGMAGVDGPPGPKGNMGPQGEPGPPGQQGNPGPQGLPGPQGPIGPPGEKGPQGKPGLAGLPGADGPPGHPGKEGQSGEKGALGPPGPQGPIGYPGPRGVKGADGVRGLKGSKGEKGEDGFPGFKGDMGLKGDRGEVGQIGPRGEDGPEGPKGRAGPTGDPGPSGQAGEKGKLGVPGLPGYPGRQGPKGSTGFPGFPGANGEKGARGVAGKPGPRGQRGPTGPRGSRGARGPTGKPGPKGTSGGDGPPGPPGERGPQGPQGPVGFPGPKGPPGPPGKDGLPGHPGQRGETGFQGKTGPPGPGGVVGPQGPTGETGPIGERGHPGPPGPPGEQGLPGAAGKEGAKGDPGPQGISGKDGPAGLRGFPGERGLPGAQGAPGLKGGEGPQGPPGPVGSPGERGSAGTAGPIGLPGRPGPQGPPGPAGEKGAPGEKGPQGPAGRDGVQGPVGLPGPAGPAGSPGEDGDKGEIGEPGQKGSKGDKGENGPPGPPGLQGPVGAPGIAGGDGEPGPRGQQGMFGQKGDEGARGFPGPPGPIGLQGSA

SEQ ID NO: 16 - protein, 1087 aa, Artificial Sequence
  Synthetic polypeptide
MEPWSSRWKTKRWLWDFTVTTLALTFLFQAREVRGAAPVDVLKALDFHNSPEGISKTTGFCTNRKNSKGSDTAYRVSKQAQLSAPTKQLFPGGTFPEDFSILFTVKPKKGIQSFLLSIYNEHGIQQIGVEVGRSPVFLFEDHTGKPAPEDYPLFRTVNIADGKWHRVAISVEKKTVTMIVDCKKKTTKPLDRSERAIVDTNGITVFGTRILDEEVFEGDIQQFLITGDPKAAYDYCEHYSPDCDSSAPKAAQAQEPQIDEYAPEDIIEYDYEYGEAEYKEAESVTEGPTVTEETIAQTEINGHGAYGEKGQKGEPAVVEPGMLVEGPPGPAGPAGIMGPPGLQGPTGPPGDPGDRGPPGRPGLPGADGLPGPPGTMLMLPFRYGGDGSKGPTISAQEAQAQAILQQARIALRGPPGPMGLTGRPGPVGGPGSSGAKGESGDPGPQGPRGVQGPPGPTGKPGKRGRPGADGGRGMPGEPGAKGDRGFDGLPGLPGDKGHRGERGPQGPPGPPGDDGMRGEDGEIGPRGLPGEAGPRGLLGPRGTPGAPGQPGMAGVDGPPGPKGNMGPQGEPGPPGQQGNPGPQGLPGPQGPIGPPGEKGPQGKPGLAGLPGADGPPGHPGKEGQSGEKGALGPPGPQGPIGYPGPRGVKGADGVRGLKGSKGEKGEDGFPGFKGDMGLKGDRGEVGQIGPRGEDGPEGPKGRAGPTGDPGPSGQAGEKGKLGVPGLPGYPGRQGPKGSTGFPGFPGANGEKGARGVAGKPGPRGQRGPTGPRGSRGARGPTGKPGPKGTSGGDGPPGPPGERGPQGPQGPVGFPGPKGPPGPPGKDGLPGHPGQRGETGFQGKTGPPGPGGVVGPQGPTGETGPIGERGHPGPPGPPGEQGLPGAAGKEGAKGDPGPQGISGKDGPAGLRGFPGERGLPGAQGAPGLKGGEGPQGPPGPVGSPGERGSAGTAGPIGLPGRPGPQGPPGPAGEKGAPGEKGPQGPAGRDGVQGPVGLPGPAGPAGSPGEDGDKGEIGEPGQKGSKGDKGENGPPGPPGLQGPVGAPGIAGGDGEPGPRGQQGMFGQKGDEGARGFPGPPGPIGLQGSA

SEQ ID NO: 17 - protein, 241 aa, Artificial Sequence
  Synthetic polypeptide
MEPWSSRWKTKRWLWDFTVTTLALTFLFQAREVRGAAPVDVLKALDFHNSPEGISKTTGFCTNRKNSKGSDTAYRVSKQAQLSAPTKQLFPGGTFPEDFSILFTVKPKKGIQSFLLSIYNEHGIQQIGVEVGRSPVFLFEDHTGKPAPEDYPLFRTVNIADGKWHRVAISVEKKTVTMIVDCKKKTTKPLDRSERAIVDTNGITVFGTRILDEEVFEGGAKMAKWEQLQSTAPSVSDAEDR

SEQ ID NO: 18 - protein, 168 aa, Artificial Sequence
  Synthetic polypeptide
YRVSKQAQLSAPTKQLFPGGTFPEDFSILFTVKPKKGIQSFLLSIYNEHGIQQIGVEVGRSPVFLFEDHTGKPAPEDYPLFRTVNIADGKWHRVAISVEKKTVTMIVDCKKKTTKPLDRSERAIVDTNGITVFGTRILDEEVFEGGAKMAKWEQLQSTAPSVSDAEDR

SEQ ID NO: 19 - protein, 22 aa, Artificial Sequence
  Synthetic polypeptide
MEEEAETEEQQRFSYQQGSCGH

SEQ ID NO: 20 - protein, 20 aa, Artificial Sequence
  Synthetic polypeptide
MEEEAETEEQQRFSYQQLRA

SEQ ID NO: 21 - protein, 150 aa, Artificial Sequence
  Synthetic polypeptide
MEVTGDAGVPESGEIRTLKPCLLRRNYSREQHGVAASCLEDLRSKACDILAIDKSLTPVTLVLAEDGTIVDDDDYFLCLPSNTKFVALASNEKWAYNNSDGGTAWISQESFDVDETDSGAGLKWKNVARQLKEDLSSIILLSEEDLQIGI

SEQ ID NO: 22 - protein, 147 aa, Artificial Sequence
  Synthetic polypeptide
MEVTGDAGVPESGEIRTLKPCLLRRNYSREQHGVAASCLEDLRSKACDILAIDKSLTPVTLVLAEDGTIVDDDDYFLCLPSNTKFVALASNEKWAYNNSDGGTAWISQESFDVDETDSGAGLKWKNVARQLKEDLSSIILLSEEDLQ

SEQ ID NO: 23 - protein, 352 aa, Artificial Sequence
  Synthetic polypeptide
MAPPVAERGLKSVVWQKIKATVFDDCKKEGEWKIMLLDEFTTKLLASCCKMTDLLEEGITVVENIYKNREPVRQMKALYFITPTSKSVDCFLHDFASKSENKYKAAYIYFTDFCPDNLFNKIKASCSKSIRRCKEINISFIPHESQVYTLDVPDAFYYCYSPDPGNAKGKDAIMETMADQIVTVCATLDENPGVRYKSKPLDNASKLAQLVEKKLEDYYKIDEKSLIKGKTHSQLLIIDRGFDPVSTVLHELTFQAMAYDLLPIENDTYKYKTDGKEKEAILEEEDDLWVRIRHRHIAVVLEEIPKLMKEISSTKKATEGKRQKLKTMASGCKKPKTKQNNNNNKIRWVRQA

SEQ ID NO: 24 - protein, 400 aa, Artificial Sequence
  Synthetic polypeptide
MEENLISMREDHSFHVRYRMEASCLELALEGERLCKSGDCRAGVSFFEAAVQVGTEDLKTLSAIYSQLGNAYFYLHDYAKALEYHHHDLTLARTIGDQLGEAKASGNLGNTLKVLGNFDEAIVCCQRHLDISRELNDKVGEARALYNLGNVYHAKGKSFGCPGPQDVGEFPEEVRDALQAAVDFYEENLSLVTALGDRAAQGRAFGNLGNTHYLLGNFRDAVIAHEQRLLIAKEFGDKAAERRAYSNLGNAYIFLGEFETASEYYKKTLLLARQLKDRAVEAQSCYSLGNTYTLLQDYEKAIDYHLKHLAIAQELNDRIGEGRACWSLGNAYTALGNHDQAMHFAEKHLEISREVGDKSGELTARLNLSDLQMVLGLSYSTNNSIMSENTEIDSSLNGKS

SEQ ID NO: 25 - protein, 46 aa, Artificial Sequence
  Synthetic polypeptide
MTRPRKHAETLGGGKLCDLFCGRPGQVSSSRGRQGIPDLYRHLGNC

SEQ ID NO: 26 - protein, 56 aa, Artificial Sequence
  Synthetic polypeptide
MTRPRKHAETLGGGKLCDLFCGRPGQVSSSRGRQGIPDCSSQTSFIVIWEIVKNAN

SEQ ID NO: 27 - protein, 40 aa, Artificial Sequence
  Synthetic polypeptide
MTRPRKHAETLGGGKLCDLFCGRPGQTSFIVIWEIVKNAN

SEQ ID NO: 28 - protein, 2937 aa, Artificial Sequence
  Synthetic polypeptide
MRSPATGVPLPTPPPPLLLLLLLLLPPPLLGDQVGPCRSLGSRGRGSSGACAPMGWLCPSSASNLWLYTSRCRDAGTELTGHLVPHHDGLRVWCPESEAHIPLPPAPEGCPWSCRLLGIGGHLSPQGKLTLPEEHPCLKAPRLRCQSCKLAQAPGLRAGERSPEESLGGRRKRNVNTAPQFQPPSYQATVPENQPAGTPVASLRAIDPDEGEAGRLEYTMDALFDSRSNQFFSLDPVTGAVTTAEELDRETKSTHVFRVTAQDHGMPRRSALATLTILVTDTNDHDPVFEQQEYKESLRENLEVGYEVLTVRATDGDAPPNANILYRLLEGSGGSPSEVFEIDPRSGVIRTRGPVDREEVESYQLTVEASDQGRDPGPRSTTAAVFLSVEDDNDNAPQFSEKRYVVQVREDVTPGAPVLRVTASDRDKGSNAVVHYSIMSGNARGQFYLDAQTGALDVVSPLDYETTKEYTLRVRAQDGGRPPLSNVSGLVTVQVLDINDNAPIFVSTPFQATVLESVPLGYLVLHVQAIDADAGDNARLEYRLAGVGHDFPFTINNGTGWISVAAELDREEVDFYSFGVEARDHGTPALTASASVSVTVLDVNDNNPTFTQPEYTVRLNEDAAVGTSVVTVSAVDRDAHSVITYQITSGNTRNRFSITSQSGGGLVSLALPLDYKLERQYVLAVTASDGTRQDTAQIVVNVTDANTHRPVFQSSHYTVNVNEDRPAGTTVVLISATDEDTGENARITYFMEDSIPQFRIDADTGAVTTQAELDYEDQVSYTLAITARDNGIPQKSDTTYLEILVNDVNDNAPQFLRDSYQGSVYEDVPPFTSVLQISATDRDSGLNGRVFYTFQGGDDGDGDFIVESTSGIVRTLRRLDRENVAQYVLRAYAVDKGMPPARTPMEVTVTVLDVNDNPPVFEQDEFDVFVEENSPIGLAVARVTATDPDEGTNAQIMYQIVEGNIPEVFQLDIFSGELTALVDLDYEDRPEYVLVIQATSAPLVSRATVHVRLLDRNDNPPVLGNFEILFNNYVTNRSSSFPGGAIGRVPAHDPDISDSLTYSFERGNELSLVLLNASTGELKLSRALDNNRPLEAIMSVLVSDGVHSVTAQCALRVTIITDEMLTHSITLRLEDMSPERFLSPLLGLFIQAVAATLATPPDHVVVFNVQRDTDAPGGHILNVSLSVGQPPGPGGGPPFLPSEDLQERLYLNRSLLTAISAQRVLPFDDNICLREPCENYMRCVSVLRFDSSAPFIASSSVLFRPIHPVGGLRCRCPPGFTGDYCETEVDLCYSRPCGPHGRCRSREGGYTCLCRDGYTGEHCEVSARSGRCTPGVCKNGGTCVNLLVGGFKCDCPSGDFEKPYCQVTTRSFPAHSFITFRGLRQRFHFTLALSFATKERDGLLLYNGRFNEKHDFVALEVIQEQVQLTFSAGESTTTVSPFVPGGVSDGQWHTVQLKYYNKPLLGQTGLPQGPSEQKVAVVTVDGCDTGVALRFGSVLGNYSCAAQGTQGGSKKSLDLTGPLLLGGVPDLPESFPVRMRQFVGCMRNLQVDSRHIDMADFIANNGTVPGCPAKKNVCDSNTCHNGGTCVNQWDAFSCECPLGFGGKSCAQEMANPQHFLGSSLVAWHGLSLPISQPWYLSLMFRTRQADGVLLQAITRGRSTITLQLREGHVMLSVEGTGLQASSLRLEPGRANDGDWHHAQLALGASGGPGHAILSFDYGQQRAEGNLGPRLHGLHLSNITVGGIPGPAGGVARGFRGCLQGVRVSDTPEGVNSLDPSHGESINVEQGCSLPDPCDSNPCPANSYCSNDWDSYSCSCDPGYYGDNCTNVCDLNPCEHQSVCTRKPSAPHGYTCECPPNYLGPYCETRIDQPCPRGWWGHPTCGPCNCDVSKGFDPDCNKTSGECHCKENHYRPPGSPTCLLCDCYPTGSLSRVCDPEDGQCPCKPGVIGRQCDRCDNPFAEVTTNGCEVNYDSCPRAIEAGIWWPRTRFGLPAAAPCPKGSFGTAVRHCDEHRGWLPPNLFNCTSITFSELKGFAERLQRNESGLDSGRSQQLALLLRNATQHTAGYFGSDVKVAYQLATRLLAHESTQRGFGLSATQDVHFTENLLRVGSALLDTANKRHWELIQQTEGGTAWLLQHYEAYASALAQNMRHTYLSPFTIVTPNIVISVVRLDKGNFAGAKLPRYEALRGEQPPDLETTVILPESVFRETPPVVRPAGPGEAQEPEELARRQRRHPELSQGEAVASVIIYRTLAGLLPHNYDPDKRSLRVPKRPIINTPVVSISVHDDEELLPRALDKPVTVQFRLLETEERTKPICVFWNHSILVSGTGGWSARGCEVVFRNESHVSCQCNHMTSFAVLMDVSRRENGEILPLKTLTYVALGVTLAALLLTFFFLTLLRILRSNQHGIRRNLTAALGLAQLVFLLGINQADLPFACTVIAILLHFLYLCTFSWALLEALHLYRALTEVRDVNTGPMRFYYMLGWGVPAFITGLAVGLDPEGYGNPDFCWLSIYDTLIWSFAGPVAFAVSMSVFLYILAARASCAAQRQGFEKKGPVSGLQPSFAVLLLLSATWLLALLSVNSDTLLFHYLFATCNCIQGPFIFLSYVVLSKEVRKALKLACSRKPSPDPALTTKSTLTSSYNCPSPYADGRLYQPYGDSAGSLHSTSRSGKSQPSYIPFLLREESALNPGQGPPGLGDPGSLFLEGQDQQHDPDTDSDSDLSLEDDQSGSYASTHSSDSEEEEEEEEEEAAFPGEQGWDSLLGPGAERLPLHSTPKDGGPGPGKAPWPGDFGTTAKESSGNGAPEERLRENGDALSREGSLGPLPGSSAQPHKGILKKKCLPTISEKSSLLRLPLEQCTGSSRGSSASEGSRGGPPPRPPPRQSLQEQLNGVMPIAMSIKAGTVDEDSSGSDRMRSSSRSRPVSHPSPISLMAP

SEQ ID NO: 29 - protein, 16 aa, Artificial Sequence
  Synthetic polypeptide
MFLTRSEYDRYSGSCL

SEQ ID NO: 30 - protein, 83 aa, Artificial Sequence
  Synthetic polypeptide
MSLSFHLPSRRMKNPSIVGVLCTDSQGLNLGCRGTLSDEHAGVISVLAQQAAKLTSDPTDIPVVCLESDNGCNTDGEGLQLHS

SEQ ID NO: 31 - protein, 84 aa, Artificial Sequence
  Synthetic polypeptide
MEATLEQHLEDTMKNPSIVGVLCTDSQGLNLGCRGTLSDEHAGVISVLAQQAAKLTSDPTDIPVVCLESDNGCNTDGEGLQLHS

SEQ ID NO: 32 - protein, 166 aa, Artificial Sequence
  Synthetic polypeptide
MEPGAGHLDGHRAGSPSLRQALCDGSAVMFSSKERGRCTVINFVPLEAPLRSTPRSRQVTEACGGEGRAVPLGSEPEWSVGGMEATLEQHLEDTMKNPSIVGVLCTDSQGLNLGCRGTLSDEHAGVISVLAQQAAKLTSDPTDIPVVCLESDNGCNTDGEGLQLHS

SEQ ID NO: 33 - protein, 72 aa, Artificial Sequence
  Synthetic polypeptide
MKNPSIVGVLCTDSQGLNLGCRGTLSDEHAGVISVLAQQAAKLTSDPTDIPVVCLESDNGCNTDGEGLQLHS

SEQ ID NO: 34 - protein, 96 aa, Artificial Sequence
  Synthetic polypeptide
MSLSFHLPSRRMKNPSIVGVLCTDSQGLNLGCRGTLSDEHAGVISVLAQQAAKLTSDPTDIPVVCLESDNGLWKLCSFTLCNESGYCSLFGSTLSL

SEQ ID NO: 35 - protein, 97 aa, Artificial Sequence
  Synthetic polypeptide
MEATLEQHLEDTMKNPSIVGVLCTDSQGLNLGCRGTLSDEHAGVISVLAQQAAKLTSDPTDIPVVCLESDNGLWKLCSFTLCNESGYCSLFGSTLSL

SEQ ID NO: 36 - protein, 179 aa, Artificial Sequence
  Synthetic polypeptide
MEPGAGHLDGHRAGSPSLRQALCDGSAVMFSSKERGRCTVINFVPLEAPLRSTPRSRQVTEACGGEGRAVPLGSEPEWSVGGMEATLEQHLEDTMKNPSIVGVLCTDSQGLNLGCRGTLSDEHAGVISVLAQQAAKLTSDPTDIPVVCLESDNGLWKLCSFTLCNESGYCSLFGSTLSL

SEQ ID NO: 37 - protein, 85 aa, Artificial Sequence
  Synthetic polypeptide
MKNPSIVGVLCTDSQGLNLGCRGTLSDEHAGVISVLAQQAAKLTSDPTDIPVVCLESDNGLWKLCSFTLCNESGYCSLFGSTLSL

SEQ ID NO: 38 - protein, 283 aa, Artificial Sequence
  Synthetic polypeptide
MEPGPDGPAASGPAAIREGWFRETCSLWPGQALSLQVEQLLHHRRSRYQDILVFRSKTYGNVLVLDGVIQCTERDEFSYQEMIANLPLCSHPNPRKVLIIGGGDGGVLREVVKHPSVESVVQCEIDEDVIQVSKKFLPGMAIGYSSSKLTLHVGDGFEFMKQNQDAFDVIITDSSDPMGPAESLFKESYYQLMKTALKEDGVLCCQGECQWLHLDLIKEMRQFCQSLFPVVAYAYCTIPTYPSGQIGFMLCSKNPAWQRAPVVPAAGEAEAGEWREPGRRSLQ

SEQ ID NO: 39 - protein, 27 aa, Artificial Sequence
  Synthetic polypeptide
QRPDRLHAVQQEPGMAARACSPSCWGG

SEQ ID NO: 40 - protein, 270 aa, Artificial Sequence
  Synthetic polypeptide
MEPGPDGPAASGPAAIREGWFRETCSLWPGQALSLQVEQLLHHRRSRYQDILVFRSKTYGNVLVLDGVIQCTERDEFSYQEMIANLPLCSHPNPRKVLIIGGGDGGVLREVVKHPSVESVVQCEIDEDVIQVSKKFLPGMAIGYSSSKLTLHVGDGFEFMKQNQDAFDVIITDSSDPMGPAESLFKESYYQLMKTALKEDGVLCCQGECQWLHLDLIKEMRQFCQSLFPVVAYAYCTIPTYPSGQIGFMLCSKNPPGMAARACSPSCWGG

SEQ ID NO: 41 - protein, 21 aa, Artificial Sequence
  Synthetic polypeptide
QRPDRLHAVQQEPARHGSARL

SEQ ID NO: 42 - protein, 236 aa, Artificial Sequence
  Synthetic polypeptide
MEPGPDGPAASGPAAIREGWFRETCSLWPGQALSLQVEQLLHHRRSRYQDILVFRSKTYGNVLVLDGVIQCTERDEFSYQEMIANLPLCSHPNPRKVLIIGGGDGGVLREVVKHPSVESVVQCEIDEDVIQVSKKFLPGMAIGYSSSKLTLHVGDGFEFMKQNQDAFDVIITDSSDPMGPAESLFKESYYQLMKTALKEDGVLCCQGQVRCLMPVIPAFWETKVGGSLEVRSTRPA

SEQ ID NO: 43 - protein, 9 aa, Artificial Sequence
  Synthetic polypeptide
EMEVSCGRW

SEQ ID NO: 44 - protein, 380 aa, Artificial Sequence
  Synthetic polypeptide
MAPPSTREPRVLSATSATKSDGEMVLPGFPDADSFVKFALGSVVAVTKASGGLPQFGDEYDFYRSFPGFQAFCETQGDRLLQCMSRVMQYHGCRSNIKDRSKVTELEDKFDLLVDANDVILERVGILLDEASGVNKNQQPVLPAGLQVPKTVVSSWNRKAAEYGKKAKSETFRLLHAKNIIRPQLKFREKIDNSNTPFLPKIFIKPNAQKPLPQALSKERRERPQDRPEDLDVPPALADFIHQQRTQQVEQDMFAHPYQYELNHFTPADAVLQKPQPQLYRPIEETPCHFISSLDELVELNEKLLNCQEFAVDLEHHSYRSFLGLTCLMQISTRTEDFIIDTLELRSDMYILNESLTDPAIVKKYKLPSEITTNTSTQIN

SEQ ID NO: 45 - protein, 646 aa, Artificial Sequence
  Synthetic polypeptide
MSNNLRRVFLKPAEENSGNASRCVSGCMYQVVQTIGSDGKNLLQLLPIPKSSGNLIPLVQSSVMSDALKGNTGKPVQVTFQTQISSSSTSASVQLPIFQPASSSNYFLTRTVDTSEKGRVTSVGTGNFSSSVSKVQSHGVKIDGLTMQTFAVPPSTQKDSSFIVVNTQSLPVTVKSPVLPSGHHLQIPAHAEVKSVPASSLPPSVQQKILATATTSTSGMVEASQMPTVIYVSPVNTVKNVVTKNFQNIYPKPVTEIAKPVILNTTQIPKNVATETQLKGGQHSQAAPVKWIFQDNLQPFTPSLVPVKSSNNVASKILKTFVDRKNLGDNTINMPPLSTIDPSGTRSKNMPIKDNALVMFNGKVYLLAKKGTDVLPSQIDQQNSVSPDTPVRKDTLQTVSSSPVTEISREVVNIVLAKSKSSQMETKSLSNTQLASMANLRAEKNKVEKPSPSTTNPHMNQSSNYLKQSKTLFTNPIFPVGFSTGHNAPRKVTAVIYARKGSVLQSIEKISSSVDATTVTSQQCVFRDQEPKIHNEMASTSDKGAQGRNDKKDSQGRSNKALHLKSDAEFKKIFGLTKDLRVCLTRIPDHLTSGEGFDSFSSLVKSGTYKETEFMVKEGERKQLGWAARDTTVENLEGKSEAAAIL

SEQ ID NO: 46 - protein, 110 aa, Artificial Sequence
  Synthetic polypeptide
MASTSDKGAQGRNDKKDSQGRSNKALHLKSDAEFKKIFGLTKDLRVCLTRIPDHLTSGEGFDSFSSLVKSGTYKETEFMVKEGERKQLGWAARDTTVENLEGKSEAAAIL

SEQ ID NO: 47 - protein, 91 aa, Artificial Sequence
  Synthetic polypeptide
MREYKLVVLGSGGVGKSALTVQFVQGIFVEKYDPTIEDSYRKQVEVDCQQCMLEILDTAGTIVLHTVTIIIPFKCKSDHVFLSLNYALNSE

SEQ ID NO: 48 - protein, 440 aa, Artificial Sequence
  Synthetic polypeptide
MAAAFEASGALAAVATAMPAEHVAVQVPAPEPTPGPVRILRTAQDLSSPRTRTGDVLLAEPADFESLLLSRPVLEGLRAAGFERPSPVQLKAIPLGRCGLDLIVQAKSGTGKTCVFSTIALDSLVLENLSTQILILAPTREIAVQIHSVITAIGIKMEGLECHVFIGGTPLSQDKTRLKKCHIAVGSPGRIKQLIELDYLNPGSIRLFILDEADKLLEEGSFQEQINWIYSSLPASKQMLAVSATYPEFLANALTKYMRDPTFVRLNSSDPSLIGLKQYYKVVNSYPLAHKVFEEKTQHLQELFSRIPFNQALVFSNLHSRAQHLADILSSKGFPAECISGNMNQNQRLDAMAKLKHFHCRVLISTDLTSRGIDAEKVNLVVNLDVPLDWETYMHRIGRAGRFGTLGLTVTYCCRGEEENMMMRIAQKCNINLLPLPELD

SEQ ID NO: 49 - protein, 48 aa, Artificial Sequence
  Synthetic polypeptide
MIYYLTFSLLLGTLGLTVTYCCRGEEENMMMRIAQKCNINLLPLPELD

SEQ ID NO: 50 - protein, 46 aa, Artificial Sequence
  Synthetic polypeptide
MLDGLGVVAISIFGIQLKTEGSLRTAVPGIPTQSAFNKCLQRVYPN

SEQ ID NO: 51 - protein, 68 aa, Artificial Sequence
  Synthetic polypeptide
MLDGLGVVAISIFGIQLKTEGSLRTAVPGIPTQSAFNKCLQSISFCLIHHAWLSRKNYKAHQNAKKTV

SEQ ID NO: 52 - protein, 71 aa, Artificial Sequence
  Synthetic polypeptide
MLDGLGVVAISIFGIQLKTEGSLRTAVPGIPTQSAFNKCLQSQAWWCTLVVPATQEAEMRGSLEPGRLRLQ

SEQ ID NO: 53 - protein, 451 aa, Artificial Sequence
  Synthetic polypeptide
MADRGGVGEAAAVGASPASVPGLNPTLGWRERLRAGLAGTGASLWFVAGLGLLYALRIPLRLCENLAAVTVFLNSLTPKFYVALTGTSSLISGLIFIFEWWYFHKHGTSFIEQVSVSHLQPLMGGTESSISEPGSPSRNRENETSRQNLSECKVWRNPLNLFRGAEYRRYTWVTGKEPLTYYDMNLSAQDHQTFFTCDTDFLRPSDTVMQKAWRERNPPARIKAAYQALELNNDCATAYVLLAEEEATTIVDAERLFKQALKAGETIYRQSQQCQHQSPQHEAQLRRDTNVLVYIKRRLAMCARKLGRIREAVKIMRDLMKEFPPLTMLNIHENLLESLLELQAYPDVQAVLAKYDDISLPKSAAICYTAALLKTRTVSEKFSPETASRRGLSTAEINAVEAIHRAVEFNPHVPKISKVDETAFYWKKMPTKTFIAREEKLFLASKLQRTS

SEQ ID NO: 54 - protein, 386 aa, Artificial Sequence
  Synthetic polypeptide
MADRGGVGEAAAVGASPASVPGLNPTLGWRERLRAGLAGTGASLWFVAGLGLLYALRIPLRLCENLAAVTVFLNSLTPKFYVALTGTSSLISGLIFIFEWWYFHKHGTSFIEQVSVSHLQPLMGGTESSISEPGSPSRNRENETSRQNLSECKVWRNPLNLFRGAEYRSCATAYVLLAEEEATTIVDAERLFKQALKAGETIYRQSQQCQHQSPQHEAQLRRDTNVLVYIKRRLAMCARKLGRIREAVKIMRDLMKEFPPLTMLNIHENLLESLLELQAYPDVQAVLAKYDDISLPKSAAICYTAALLKTRTVSEKFSPETASRRGLSTAEINAVEAIHRAVEFNPHVPKISKVDETAFYWKKMPTKTFIAREEKLFLASKLQRTS

SEQ ID NO: 55 - protein, 268 aa, Artificial Sequence
  Synthetic polypeptide
MNLSAQDHQTFFTCDTDFLRPSDTVMQKAWRERNPPARIKAAYQALELNNDCATAYVLLAEEEATTIVDAERLFKQALKAGETIYRQSQQCQHQSPQHEAQLRRDTNVLVYIKRRLAMCARKLGRIREAVKIMRDLMKEFPPLTMLNIHENLLESLLELQAYPDVQAVLAKYDDISLPKSAAICYTAALLKTRTVSEKFSPETASRRGLSTAEINAVEAIHRAVEFNPHVPKISKVDETAFYWKKMPTKTFIAREEKLFLASKLQRTS

SEQ ID NO: 56 - protein, 434 aa, Artificial Sequence
  Synthetic polypeptide
MADRGGVGEAAAVGASPASVPGLNPTLGWRERLRAGLAGTGASLWFVAGLGLLYALRIPLRLCENLAAGTSSLISGLIFIFEWWYFHKHGTSFIEQVSVSHLQPLMGGTESSISEPGSPSRNRENETSRQNLSECKVWRNPLNLFRGAEYRRYTWVTGKEPLTYYDMNLSAQDHQTFFTCDTDFLRPSDTVMQKAWRERNPPARIKAAYQALELNNDCATAYVLLAEEEATTIVDAERLFKQALKAGETIYRQSQQCQHQSPQHEAQLRRDTNVLVYIKRRLAMCARKLGRIREAVKIMRDLMKEFPPLTMLNIHENLLESLLELQAYPDVQAVLAKYDDISLPKSAAICYTAALLKTRTVSEKFSPETASRRGLSTAEINAVEAIHRAVEFNPHVPKISKVDETAFYWKKMPTKTFIAREEKLFLASKLQRTS

SEQ ID NO: 57 - protein, 395 aa, Artificial Sequence
  Synthetic polypeptide
MSPFLFRDDMKDLTVFLNSLTPKFYVALTGTSSLISGLIFIFEWWYFHKHGTSFIEQVSVSHLQPLMGGTESSISEPGSPSRNRENETSRQNLSECKVWRNPLNLFRGAEYRRYTWVTGKEPLTYYDMNLSAQDHQTFFTCDTDFLRPSDTVMQKAWRERNPPARIKAAYQALELNNDCATAYVLLAEEEATTIVDAERLFKQALKAGETIYRQSQQCQHQSPQHEAQLRRDTNVLVYIKRRLAMCARKLGRIREAVKIMRDLMKEFPPLTMLNIHENLLESLLELQAYPDVQAVLAKYDDISLPKSAAICYTAALLKTRTVSEKFSPETASRRGLSTAEINAVEAIHRAVEFNPHVPKISKVDETAFYWKKMPTKTFIAREEKLFLASKLQRTS

SEQ ID NO: 58 - protein, 151 aa, Artificial Sequence
  Synthetic polypeptide
MADRGGVGEAAAVGASPASVPGLNPTLGWRERLRAGLAGTGASLWFVAGLGLLYALRIPLRLCENLAAVTVFLNSLTPKFYVALTGTSSLISGLIFIFEWWYFHKHGTSFIEQVSVSHLQPLMGGTESSISEPGSPSRNRENETSRQNLSE

SEQ ID NO: 59 - protein, 134 aa, Artificial Sequence
  Synthetic polypeptide
MADRGGVGEAAAVGASPASVPGLNPTLGWRERLRAGLAGTGASLWFVAGLGLLYALRIPLRLCENLAAGTSSLISGLIFIFEWWYFHKHGTSFIEQVSVSHLQPLMGGTESSISEPGSPSRNRENETSRQNLSE

SEQ ID NO: 60 - protein, 95 aa, Artificial Sequence
  Synthetic polypeptide
MSPFLFRDDMKDLTVFLNSLTPKFYVALTGTSSLISGLIFIFEWWYFHKHGTSFIEQVSVSHLQPLMGGTESSISEPGSPSRNRENETSRQNLSE

SEQ ID NO: 61 - protein, 23 aa, Artificial Sequence
  Synthetic polypeptide
AFQNQVLLRGTEKMKPADRICQN

SEQ ID NO: 62 - protein, 166 aa, Artificial Sequence
  Synthetic polypeptide
MADRGGVGEAAAVGASPASVPGLNPTLGWRERLRAGLAGTGASLWFVAGLGLLYALRIPLRLCENLAAVTVFLNSLTPKFYVALTGTSSLISGLIFIFEWWYFHKHGTSFIEQVSVSHLQPLMGGTESSISEPGSPSRNRENETSRQNLSGSLGGDQVMRAVPSGM

SEQ ID NO: 63 - protein, 149 aa, Artificial Sequence
  Synthetic polypeptide
MADRGGVGEAAAVGASPASVPGLNPTLGWRERLRAGLAGTGASLWFVAGLGLLYALRIPLRLCENLAAGTSSLISGLIFIFEWWYFHKHGTSFIEQVSVSHLQPLMGGTESSISEPGSPSRNRENETSRQNLSGSLGGDQVMRAVPSGM

SEQ ID NO: 64 - protein, 110 aa, Artificial Sequence
  Synthetic polypeptide
MSPFLFRDDMKDLTVFLNSLTPKFYVALTGTSSLISGLIFIFEWWYFHKHGTSFIEQVSVSHLQPLMGGTESSISEPGSPSRNRENETSRQNLSGSLGGDQVMRAVPSGM

SEQ ID NO: 65 - protein, 30 aa, Artificial Sequence
  Synthetic polypeptide
AFQNQVLLRGTEKMKPADRICQGLWEVIRS

SEQ ID NO: 66 - protein, 57 aa, Artificial Sequence
  Synthetic polypeptide
MPSKFSCRQLREAGQCFESFLVVRGLDMETDRERLRTIYNRDFKIRLLPCVENQEAV

SEQ ID NO: 67 - protein, 226 aa, Artificial Sequence
  Synthetic polypeptide
MAASQVLGEKINILSGETVKAGDRDPLGNDCPEQDRLPQRSWRQKCASYVLALRPWSFSASLTPVALGSALAYRSHGVLDPRLLVGCAVAVLAVHGAGNLVNTYYDFSKGIDHKKSDDRTLVDRILEPQDVVRFGVFLYTLGCVCAACLYYLSPLKLEHLALIYFGGLSGSFLYTGGIGFKYVALGDLIILITFGPLAVMFAYAIQPISALAQCMVQQSRQSVTGC

SEQ ID NO: 68 - protein, 107 aa, Artificial Sequence
  Synthetic polypeptide
TLVDRILEPQDVVRFGVFLYTLGCVCAACLYYLSPLKLEHLALIYFGGLSGSFLYTGGIGFKYVALGDLIILITFGPLAVMFAYAIQPISALAQCMVQQSRQSVTGC

SEQ ID NO: 69 - protein, 92 aa, Artificial Sequence
  Synthetic polypeptide
GVFLYTLGCVCAACLYYLSPLKLEHLALIYFGGLSGSFLYTGGIGFKYVALGDLIILITFGPLAVMFAYAIQPISALAQCMVQQSRQSVTGC

SEQ ID NO: 70 - protein, 207 aa, Artificial Sequence
  Synthetic polypeptide
MSKTLKKKKHWLSKVQECAVSWAGPPGDFGAEIRGGAERGEFPYLGRLREEPGGGTCCVVSGKAPSPGDVLLEVNGTPVSGLTNRDTLAVIRHFREPIRLKTVKPGKVINKDLRHYLSLQFQKGSIDHKLQQVIRDNLYLRTIPCTTRAPRDGEVPGVDYNFISVEQFKALEESGALLESGTYDDWQQFYSLIIARNGNSHTLLARL

SEQ ID NO: 71 - protein, 351 aa, Artificial Sequence
  Synthetic polypeptide
MSKTLKKKKHWLSKVQECAVSWAGPPGDFGAEIRGGAERGEFPYLGRLREEPGGGTCCVVSGKAPSPGDVLLEVNGTPVSGLTNRDTLAVIRHFREPIRLKTVKPGKVINKDLRHYLSLQFQKGSIDHKLQQVIRDNLYLRTIPCTTRAPRDGEVPGVDYNFISVEQFKALEESGALLESGTYDGNFYGTPKPPAEPSPFQPDPVDQVLFDNEFDAESQRKRTTSVSKMERMDSSLPEEEEDEDKEAINGSGNAENRERHSESSDWMKTVPSYNQTNSSMDFRNYMMRDETLEPLPKNWEMAYTDTGMIYFIDHNTKTTTWLDPRLCKKAKAPEDCEDGVNYQVLSILTFK

SEQ ID NO: 72 - protein, 717 aa, Artificial Sequence
  Synthetic polypeptide
MASNERDAISWYQKKIGAYDQQIWEKSIEQTQIKGLKNKPKKMGHIKPDLIDVDLIRVIAIVLYLMMPIVNISEVLGPLCLMLLMGTVHCQIVSTQITRPSGNNGNRRRRKLRKTVNGDGSRENGNNSSDKVRGIETLESVPIIGGFWETIFGNRIKRVKLISNKGTETDNDPSCVHPIIKRRQCRPEIRMWQTREKAKFSDGEKCRREAFRRLGNGVSDDLSSEEDGEARTQMILLRRSVEGASSDNGCEVKNRKSILSRHLNSQVKKTTTRWCHIVRDSDSLAESEFESAAFSQGSRSGVSGGSRSLNMSRRDSESTRHDSETEDMLWDDLLHGPECRSSVTSDSEGAHVNTLHSGTKRDPKEDVFQQNHLFWLQNSSPSSDRVSAIIWEGNECKKMDMSVLEISGIIMSRVNAYQQGVGYQMLGNVVTIGLAFFPFLHRLFREKSLDQLKSISAEEILTLFCGAPPVTPIIVLSIINFFERLCLTWMFFFMMCVAERTYKQRFLFAKLFSHITSARKARKYEIPHFRLKKVENIKIWLSLRSYLKRRGPQRSVDVVVSSVFLLTLSIAFICCAQVLQGHKTFLNDAYNWEFLIWETALLLFLLRLASLGSETNKKYSNVSILLTEQINLYLKMEKKPNKKEQLTLVNNVLKLSTKLLKELDTPFRLYGLTMNPLIYNITRVVILSAVSGVISDLLGFNIRMGRLVARKQAWGSH

SEQ ID NO: 73 - protein, 770 aa, Artificial Sequence
  Synthetic polypeptide
MASNERDAISWYQKKIGAYDQQIWEKSIEQTQIKGLKNKPKKMGHIKPDLIDVDLIRGSTFAKAKPEIPWTSLTRKGLVRVVFFPLFSNWWIQVTSLRIFVWLLLLYFMQVIAIVLYLMMPIVNISEVLGPLCLMLLMGTVHCQIVSTQITRPSGNNGNRRRRKLRKTVNGDGSRENGNNSSDKVRGIETLESVPIIGGFWETIFGNRIKRVKLISNKGTETDNDPSCVHPIIKRRQCRPEIRMWQTREKAKFSDGEKCRREAFRRLGNGVSDDLSSEEDGEARTQMILLRRSVEGASSDNGCEVKNRKSILSRHLNSQVKKTTTRWCHIVRDSDSLAESEFESAAFSQGSRSGVSGGSRSLNMSRRDSESTRHDSETEDMLWDDLLHGPECRSSVTSDSEGAHVNTLHSGTKRDPKEDVFQQNHLFWLQNSSPSSDRVSAIIWEGNECKKMDMSVLEISGIIMSRVNAYQQGVGYQMLGNVVTIGLAFFPFLHRLFREKSLDQLKSISAEEILTLFCGAPPVTPIIVLSIINFFERLCLTWMFFFMMCVAERTYKQRFLFAKLFSHITSARKARKYEIPHFRLKKVENIKIWLSLRSYLKRRGPQRSVDVVVSSVFLLTLSIAFICCAQVLQGHKTFLNDAYNWEFLIWETALLLFLLRLASLGSETNKKYSNVSILLTEQINLYLKMEKKPNKKEQLTLVNNVLKLSTKLLKELDTPFRLYGLTMNPLIYNITRVVILSAVSGVISDLLGFNIRMGRLVARKQAWGSH

SEQ ID NO: 74 - protein, 725 aa, Artificial Sequence
  Synthetic polypeptide
MASNERDAISWYQKKIGAYDQQIWEKSIEQTQIKGLKNKPKKMGHIKPDLIDVDLIRGSTFAKAKPEIPWTSLTRKGLVRVVFFPLFSNWWIQVTSLRIFVWLLLLYFMQVIAIVLYLMMPIVNISEVLGPLCLMLLMGTVHCQIVSTQITRPSGNNGNRRRRIKRVKLISNKGTETDNDPSCVHPIIKRRQCRPEIRMWQTREKAKFSDGEKCRREAFRRLGNGVSDDLSSEEDGEARTQMILLRRSVEGASSDNGCEVKNRKSILSRHLNSQVKKTTTRWCHIVRDSDSLAESEFESAAFSQGSRSGVSGGSRSLNMSRRDSESTRHDSETEDMLWDDLLHGPECRSSVTSDSEGAHVNTLHSGTKRDPKEDVFQQNHLFWLQNSSPSSDRVSAIIWEGNECKKMDMSVLEISGIIMSRVNAYQQGVGYQMLGNVVTIGLAFFPFLHRLFREKSLDQLKSISAEEILTLFCGAPPVTPIIVLSIINFFERLCLTWMFFFMMCVAERTYKQRFLFAKLFSHITSARKARKYEIPHFRLKKVENIKIWLSLRSYLKRRGPQRSVDVVVSSVFLLTLSIAFICCAQVLQGHKTFLNDAYNWEFLIWETALLLFLLRLASLGSETNKKYSNVSILLTEQINLYLKMEKKPNKKEQLTLVNNVLKLSTKLLKELDTPFRLYGLTMNPLIYNITRVVILSAVSGVISDLLGFNIRMGRLVARKQAWGSH

SEQ ID NO: 75 - protein, 161 aa, Artificial Sequence
  Synthetic polypeptide
MASNERDAISWYQKKIGAYDQQIWEKSIEQTQIKGLKNKPKKMGHIKPDLIDVDLIRVIAIVLYLMMPIVNISEVLGPLCLMLLMGTVHCQIVSTQITRPSGNNGNRRRRKLRKTVNGDGSRENGNNSSDKVRGIETLESVPIIGGFWETIFGNSAFHLLL

SEQ ID NO: 76 - protein, 214 aa, Artificial Sequence
  Synthetic polypeptide
MASNERDAISWYQKKIGAYDQQIWEKSIEQTQIKGLKNKPKKMGHIKPDLIDVDLIRGSTFAKAKPEIPWTSLTRKGLVRVVFFPLFSNWWIQVTSLRIFVWLLLLYFMQVIAIVLYLMMPIVNISEVLGPLCLMLLMGTVHCQIVSTQITRPSGNNGNRRRRKLRKTVNGDGSRENGNNSSDKVRGIETLESVPIIGGFWETIFGNSAFHLLL

SEQ ID NO: 77 - protein, 162 aa, Artificial Sequence
  Synthetic polypeptide
MASNERDAISWYQKKIGAYDQQIWEKSIEQTQIKGLKNKPKKMGHIKPDLIDVDLIRVIAIVLYLMMPIVNISEVLGPLCLMLLMGTVHCQIVSTQITRPSGNNGNRRRRKLRKTVNGDGSRENGNNSSDKVRGIETLESVPIIGGFWETIFGNRSAFHLLL

SEQ ID NO: 78 - protein, 215 aa, Artificial Sequence
  Synthetic polypeptide
MASNERDAISWYQKKIGAYDQQIWEKSIEQTQIKGLKNKPKKMGHIKPDLIDVDLIRGSTFAKAKPEIPWTSLTRKGLVRVVFFPLFSNWWIQVTSLRIFVWLLLLYFMQVIAIVLYLMMPIVNISEVLGPLCLMLLMGTVHCQIVSTQITRPSGNNGNRRRRKLRKTVNGDGSRENGNNSSDKVRGIETLESVPIIGGFWETIFGNRSAFHLLL

SEQ ID NO: 79 - protein, 49 aa, Artificial Sequence
  Synthetic polypeptide
MASNERDAISWYQKKIGAYDQQIWEKSIEQTQIKHFERTQQEDHLRPGV

SEQ ID NO: 80 - protein, 44 aa, Artificial Sequence
  Synthetic polypeptide
MASNERDAISWYQKKIGAYDQQIWEKSIEQTQIKTGLKLALWRG

SEQ ID NO: 81 - protein, 250 aa, Artificial Sequence
  Synthetic polypeptide
MAGTGLVAGEVVVDALPYFDQGYEAPGVREAAAALVEEETRRYRPTKNYLSYLTAPDYSAFETDIMRNEFERLAARQPIELLSMKRYELPAPSSGQKNDITAWQECVNNSMAQLEHQAVRIENLELMSQHGCNAWKVYNENLVHMIEHAQKELQKLRKHIQDLNWQRKNMQLTAGSKLREMESKHKSTKTKKMRDETTARNWRRWNANGRGVTDSTDAKKLNLKPTVRKQNMKVKKQFCLSTQPSGPRIW

SEQ ID NO: 82 - protein, 124 aa, Artificial Sequence
  Synthetic polypeptide
MDTESTYSGYSYYSSHSKKSHRQGERTRERHKSPRNKDGRGSEKSVTIQPPTGEPLLGNDSTRTEEVQGKQLQALRAAQGFSTQGMIINVMSMNQPNRQKDHIMFSLFEKVNTSYILKISMKIV

SEQ ID NO: 83 - protein, 471 aa, Artificial Sequence
  Synthetic polypeptide
MDTESTYSGYSYYSSHSKKSHRQGERTRERHKSPRNKDGRGSEKSVTIQPPTGEPLLGNDSTRTEEVQDDNWGETTTAITGTSEHSISQEDIARISKDMEDSVGLDCKRYLGLTVASFLGLLVFLTPIAFILLPPILWRDELEPCGTICEGLFISMAFKLLILLIGTWALFFRKRRADMPRVFVFRALLLVLIFLFVVSYWLFYGVRILDSRDRNYQGIVQYAVSLVDALLFIHYLAIVLLELRQLQPMFTLQVVRSTDGESRFYSLGHLSIQRAALVVLENYYKDFTIYNPNLLTASKFRAAKHMAGLKVYNVDGPSNNATGQSRAMIAAAARRRDSSHNELYYEEAEHERRVKKRKARLVVAVEEAFIHIQRLQAEEQQKAPGEVMDPREAAQAIFPSMARALQKYLRITRQQNYHSMESILQHLAFCITNGMTPKLLRRLRQENHLNPGGGACSEPRFCHGTPAWATE

SEQ ID NO: 84 - protein, 469 aa, Artificial Sequence
  Synthetic polypeptide
MDTESTYSGYSYYSSHSKKSHRQGERTRERHKSPRNKDGRGSEKSVTIQPPTGEPLLGNDSTRTEEDDNWGETTTAITGTSEHSISQEDIARISKDMEDSVGLDCKRYLGLTVASFLGLLVFLTPIAFILLPPILWRDELEPCGTICEGLFISMAFKLLILLIGTWALFFRKRRADMPRVFVFRALLLVLIFLFVVSYWLFYGVRILDSRDRNYQGIVQYAVSLVDALLFIHYLAIVLLELRQLQPMFTLQVVRSTDGESRFYSLGHLSIQRAALVVLENYYKDFTIYNPNLLTASKFRAAKHMAGLKVYNVDGPSNNATGQSRAMIAAAARRRDSSHNELYYEEAEHERRVKKRKARLVVAVEEAFIHIQRLQAEEQQKAPGEVMDPREAAQAIFPSMARALQKYLRITRQQNYHSMESILQHLAFCITNGMTPKLLRRLRQENHLNPGGGACSEPRFCHGTPAWATE

SEQ ID NO: 85 - protein, 658 aa, Artificial Sequence
  Synthetic polypeptide
MGKGVGRDKYEPAAVSEQGDKKGKKGKKDRDMDELKKEVSMDDHKLSLDELHRKYGTDLSRGLTSARAAEILARDGPNALTPPPTTPEWIKFCRQLFGGFSMLLWIGAILCFLAYSIQAATEEEPQNDNLYLGVVLSAVVIITGCFSYYQEAKSSKIMESFKNMVPQQALVIRNGEKMSINAEEVVVGDLVEVKGGDRIPADLRIISANGCKVDNSSLTGESEPQTRSPDFTNENPLETRNIAFFSTNCVEGTARGIVVYTGDRTVMGRIATLASGLEGGQTPIAAEIEHFIHIITGVAVFLGVSFFILSLILEYTWLEAVIFLIGIIVANVPEGLLATVTVCLTLTAKRMARKNCLVKNLEAVETLGSTSTICSDKTGTLTQNRMTVAHMWFDNQIHEADTTENQSGVSFDKTSATWLALSRIAGLCNRAVFQANQENLPILKRAVAGDASESALLKCIELCCGSVKEMRERYAKIVEIPFNSTNKYQLSIHKNPNTSEPQHLLVMKGAPERILDRCSSILLHGKEQPLDEELKDAFQNAYLELGGLGERVLGFCHLFLPDEQFPEGFQFDTDDVNFPIDNLCFVGLISMIDPPRAAVPDAVGKCRSAGIKVIMVTGDHPITAKAIAKGVGIISEGNETVEDIAARLNIPVSQVNPR

SEQ ID NO: 86 - protein, 658 aa, Artificial Sequence
  Synthetic polypeptide
MAFKVGRDKYEPAAVSEQGDKKGKKGKKDRDMDELKKEVSMDDHKLSLDELHRKYGTDLSRGLTSARAAEILARDGPNALTPPPTTPEWIKFCRQLFGGFSMLLWIGAILCFLAYSIQAATEEEPQNDNLYLGVVLSAVVIITGCFSYYQEAKSSKIMESFKNMVPQQALVIRNGEKMSINAEEVVVGDLVEVKGGDRIPADLRIISANGCKVDNSSLTGESEPQTRSPDFTNENPLETRNIAFFSTNCVEGTARGIVVYTGDRTVMGRIATLASGLEGGQTPIAAEIEHFIHIITGVAVFLGVSFFILSLILEYTWLEAVIFLIGIIVANVPEGLLATVTVCLTLTAKRMARKNCLVKNLEAVETLGSTSTICSDKTGTLTQNRMTVAHMWFDNQIHEADTTENQSGVSFDKTSATWLALSRIAGLCNRAVFQANQENLPILKRAVAGDASESALLKCIELCCGSVKEMRERYAKIVEIPFNSTNKYQLSIHKNPNTSEPQHLLVMKGAPERILDRCSSILLHGKEQPLDEELKDAFQNAYLELGGLGERVLGFCHLFLPDEQFPEGFQFDTDDVNFPIDNLCFVGLISMIDPPRAAVPDAVGKCRSAGIKVIMVTGDHPITAKAIAKGVGIISEGNETVEDIAARLNIPVSQVNPR

SEQ ID NO: 87 - protein, 627 aa, Artificial Sequence
  Synthetic polypeptide
MDELKKEVSMDDHKLSLDELHRKYGTDLSRGLTSARAAEILARDGPNALTPPPTTPEWIKFCRQLFGGFSMLLWIGAILCFLAYSIQAATEEEPQNDNLYLGVVLSAVVIITGCFSYYQEAKSSKIMESFKNMVPQQALVIRNGEKMSINAEEVVVGDLVEVKGGDRIPADLRIISANGCKVDNSSLTGESEPQTRSPDFTNENPLETRNIAFFSTNCVEGTARGIVVYTGDRTVMGRIATLASGLEGGQTPIAAEIEHFIHIITGVAVFLGVSFFILSLILEYTWLEAVIFLIGIIVANVPEGLLATVTVCLTLTAKRMARKNCLVKNLEAVETLGSTSTICSDKTGTLTQNRMTVAHMWFDNQIHEADTTENQSGVSFDKTSATWLALSRIAGLCNRAVFQANQENLPILKRAVAGDASESALLKCIELCCGSVKEMRERYAKIVEIPFNSTNKYQLSIHKNPNTSEPQHLLVMKGAPERILDRCSSILLHGKEQPLDEELKDAFQNAYLELGGLGERVLGFCHLFLPDEQFPEGFQFDTDDVNFPIDNLCFVGLISMIDPPRAAVPDAVGKCRSAGIKVIMVTGDHPITAKAIAKGVGIISEGNETVEDIAARLNIPVSQVNPR

SEQ ID NO: 88 - protein, 29 aa, Artificial Sequence
  Synthetic polypeptide
MKCFFPVLSCLAVLGIGGSVACQSPFYTC

SEQ ID NO: 89 - protein, 17 aa, Artificial Sequence
  Synthetic polypeptide
MGRLASRPLLLALLSLG

SEQ ID NO: 90 - protein, 726 aa, Artificial Sequence
  Synthetic polypeptide
MEEVRCPEHGTFCFLKTGVRDGPNKGKSFYVCRADTCSFVRATDIPVSHCLLHEDFVVELQGLLLPQDKKEYRLFFRCIRSKAEGKRWCGSIPWQDPDSKEHSVSNKSQHASETFHHSSNWLRNPFKVLDKNQEPALWKQLIKGEGEEKKADKKQREKGDQLFDQKKEQKPEMMEKDLSSGLVPKKKQSVVQEKKQEEGAEIQCEAETGGTHKRDFSEIKSQQCQGNELTRPSASSQEKSSGKSQDVQRESEPLREKVTQLLPQNVHSHNSISKPQKGGPLNKEYTNWEAKETKAKDGPSIQATQKSLPQGHFQERPETHSVPAPGGPAAQAAPAAPGLSLGEGREAATSSDDEEEDDVVFVSSKPGSPLLFDSTLDLETKENLQFPDRSVQRKVSPASGVSKKVEPSDPVARRVYLTTQLKQKKSTLASVNIQALPDKGQKLIKQIQELEEVLSGLTLSPEQGTNEKSNSQVPQQSHFTKTTTGPPHLVPPQPLPRRGTQPVGSLELKSACQVTAGGSSQCYRGHTNQDHVHAVWKITSEAIGQLHRSLESCPGETVVAEDPAGLKVPLLLHQKQALAWLLWRESQKPQGGILADDMGLGKTLTMIALILTQKNQEKKEEKEKSTALTWLSKDDSCDFTSHGTLIICPASLIHHWKNEVEKRVNSNKLRVYLYHGPNRDSRARVLSTYDIVITTYSLVAKEIPTNKQEAEIPGANLNVEILSSCR

SEQ ID NO: 91 - protein, 216 aa, Artificial Sequence
  Synthetic polypeptide
MDPLGAPSQFVDVDTLPSWGDSCQDELNSSDTTAEIFQEDTVRSPFLYNKDVNGKVVLWKGDVALLNCTAIVNTSNESLTDKNPVSESIFMLAGPDLKEDLQKLKGCRTGEAKLTKGFNLAARFIIHTVGPKYKSRYRTAAESSLYSCYRNVLQLAKEQSMSSVGFCVINSAKRGYPLEDATHIALRTVRRFLEIHGETIEKVVFAVSDLEEKLSS

SEQ ID NO: 92 - protein, 15 aa, Artificial Sequence
  Synthetic polypeptide
MTPYEGKTRPYRDRS

SEQ ID NO: 93 - protein, 67 aa, Artificial Sequence
  Synthetic polypeptide
MSSTSSKRAPTTATQRLKQDYLRIKKDPVPYICAEPLPSNILEWHYVVRGPEMTPYEGKTRPYRDRS

SEQ ID NO: 94 - protein, 32 aa, Artificial Sequence
  Synthetic polypeptide
MWPQDIAGRHYVVRGPEMTPYEGKTRPYRDRS

SEQ ID NO: 95 - protein, 83 aa, Artificial Sequence
  Synthetic polypeptide
MSSTSSKRAPTTATQRLKQDYLRIKKDPVPYICAEPLPSNILEWFKRFSWLSLLSSWDYRHYVVRGPEMTPYEGKTRPYRDRS

SEQ ID NO: 96 - protein, 263 aa, Artificial Sequence
  Synthetic polypeptide
MRPLLLLALLGWLLLAEAKGDAKPEAPCCQEGLRAGGSGSLHLGRDFTVLAGARGSPSPSVSSIPRFWIPGSDNLLVLTVATKETEGFRRFKRSAQFFNYKIQALGLGEDWNVEKGTSAGGGQKVRLLKKALEKHADKEDLVILFADSYDVLFASGPRELLKKFRQARSQVVFSAEELIYPDRRLETKYPVVSDGKRFLGSGGFIGYAPNLSKLVAEWEGQDSDSDQLFYTKIFLDPEKREQINITLDHRCRIFQNLDGALGK

SEQ ID NO: 97 - protein, 216 aa, Artificial Sequence
  Synthetic polypeptide
MRPLLLLALLGWLLLAEAKGDAKPEDNLLVLTVATKETEGFRRFKRSAQFFNYKIQALGLGEDWNVEKGTSAGGGQKVRLLKKALEKHADKEDLVILFADSYDVLFASGPRELLKKFRQARSQVVFSAEELIYPDRRLETKYPVVSDGKRFLGSGGFIGYAPNLSKLVAEWEGQDSDSDQLFYTKIFLDPEKREQINITLDHRCRIFQNLDGALGK

SEQ ID NO: 98 - protein, 79 aa, Artificial Sequence
  Synthetic polypeptide
MPALRPALLWALLALWLCCAAPAHALQCRDGYEPCVNEGMCVTYHNGTGYCNVAIPQGSRTRNTIWPSNPITEYIPKGL

SEQ ID NO: 99 - protein, 40 aa, Artificial Sequence
  Synthetic polypeptide
MCVTYHNGTGYCNVAIPQGSRTRNTIWPSNPITEYIPKGL

SEQ ID NO: 100 - protein, 406 aa, Artificial Sequence
  Synthetic polypeptide
MAPVAVWAALAVGLELWAAAHALPAQVAFTPYAPEPGSTCRLREYYDQTAQMCCSKCSPGQHAKVFCTKTSDTVCDSCEDSTYTQLWNWVPECLSCGSRCSSDQVETQACTREQNRICTCRPGWYCALSKQEGCRLCAPLRKCRPGFGVARPGTETSDVVCKPCAPGTFSNTTSSTDICRPHQICNVVAIPGNASMDAVCTSTSPTRSMAPGAVHLPQPVSTRSQHTQPTPEPSTAPSTSFLLPMGPSPPAEGSTGDFALPVGLIVGVTALGLLIIGVVNCVIMTQVKKKPLCLQREAKVPHLPADKARGTQGPEQQHLLITAPSSSSSSLESSASALDRRAPTRNQPQAPGVEASGAGEARASTGSSGLSDCMYRHCLLLSPTPGCGTPGEPGSSHSSLYLQAQH

SEQ ID NO: 101 - protein, 130 aa, Artificial Sequence
  Synthetic polypeptide
MTVEFEECVKDSPRFRATIDEVETDVVEIEAKLDKLVKLCSGMVEAGKAYVSTSRLFVSGVRDLSQQCQGDTVISECLQRFADSLQEVVNYHMILFDQAQRSVRQQLQSFVKDLGDKSETPSQKTKNTQT

SEQ ID NO: 102 - protein, 88 aa, Artificial Sequence
  Synthetic polypeptide
MVEAGKAYVSTSRLFVSGVRDLSQQCQGDTVISECLQRFADSLQEVVNYHMILFDQAQRSVRQQLQSFVKDLGDKSETPSQKTKNTQT

SEQ ID NO: 103 - protein, 114 aa, Artificial Sequence
  Synthetic polypeptide
MTVEFEECVKDSPRFRATIDEVETDVVEIEAKLDKLVKLCSGMVEAGKAYVSTSRLFVSGVRDLSQQCQGDTVISECLQRFADSLQEVVNYHMILFDQAQRSVRQQLQSFVKDC

SEQ ID NO: 104 - protein, 72 aa, Artificial Sequence
  Synthetic polypeptide
MVEAGKAYVSTSRLFVSGVRDLSQQCQGDTVISECLQRFADSLQEVVNYHMILFDQAQRSVRQQLQSFVKDC

SEQ ID NO: 105 - protein, 20 aa, Artificial Sequence
  Synthetic polypeptide
FGQWAWQIERNMAEKLQLQV

SEQ ID NO: 106 - protein, 3855 aa, Artificial Sequence
  Synthetic polypeptide
MLEGLVAWVLNTYLGKYVNNLNTDQLSVALLKGAVELENLPLKKDALKELELPFEVKAGFIGKVTLQIPFYRPHVDPWVISISSLHLIGAPEKIQDFNDEKEKLLERERKKALLQALEEKWKNDRQQKGESYWYSVTASVVTRIVENIELKIQDVHLRFEDGVTNPSHPFAFGICIKNVSMQNAVNEPVQKLMRKKQLDVAEFSIYWDVDCTLLGDLPQMELQEAMARSMESRSHHYVLEPVFASALLKRNCSKKPLRSRHSPRIDCDIQLETIPLKLSQLQYRQIMEFLKELERKERQVKFRRWKPKVAISKNCREWWYFALNANLYEIREQRKRCTWDFMLHRARDAVSYTDKYFNKLKGGLLSTDDKEEMCRIEEEQSFEELKILRELVHDRFHKQEELAESLREPQFDSPGACPGAPEPGGGSGMLQYLQSWFPGWGGWYGQQTPEGNVVEGLSAEQQEQWIPEEILGTEEFFDPTADASCMNTYTKRDHVFAKLNLQLQRGTVTLLHKEQGTPQMNESAFMQLEFSDVKLLAESLPRRNSSLLSVRLGGLFLRDLATEGTMFPLLVFPNPQKEVGRVSQSFGLQTTSADRSDHYPAADPDGPVFEMLYERNPAHSHFERRLNVSTRPLNIIYNPQAIKKVADFFYKGKVHTSGFGYQSELELRVAEAARRQYNKLKMQTKAEIRQTLDRLLVGDFIEESKRWTVRLDISAPQVIFPDDFKFKNPVLVVVDLGRMLLTNTQDNSRRKSRDGSASEETQFSDDEYKTPLATPPNTPPPESSSSNGEKTPPFSGVEFSEEQLQAHLMSTKMYERYSLSFMDLQIMVGRVKDNWKHVQDIDVGPTHVVEKFNVHLQLERRLIYTSDPKYPGAVLSGNLPDLKIHINEDKISALKNCFALLTTPEMKTSDTQIKEKIFPQEEQRGSLQDSVMNLTQSIVLLEQHTREVLVESQLLLAEFKVNCMQLGVESNGRYISVLKVFGTNAHFVKRPYDAEVSLTVHGLLLVDTMQTYGADFDLLMASHKNLSFDIPTGSLRDSRAQSPVSGPNVAHLTDGATLNDRSATSVSLDKILTKEQESLIKLEYQFVSSECPSMNLDSTLQVISLQVNNLDIILNPETIVELIGFLQKSFPKEKDDLSPQPLMTDFERSFREQGTYQSTYEQNTEVAVEIHRLNLLLLRTVGMANREKYGRKIATASIGGTKVNVSMGSTFDMNGSLGCLQLMDLTQDNVKNQYVVSIGNSVGYENIISDIGYFESVFVRMEDAALTEALSFTFVERSKQECFLNLKMASLHYNHSAKFLKELTLSMDELEENFRGMLKSAATKVTTVLATKTAEYSEMVSLFETPRKTREPFILEENEIYGFDLASSHLDTVKLILNINIESPVVSIPRKPGSPELLVGHLGQIFIQNFVAGDDESRSDRLQVEIKDIKLYSLNCTQLAGREAVGSEGSRMFCPPSGSGSANSQEEAHFTRHDFFESLHRGQAFHILNNTTIQFKLEKIPIERESELTFSLSPDDLGTSSIMKIEGKFVNPVQVVLAKHVYEQVLQTLDNLVYSEDLNKYPASATSSPCPDSPLPPLSTCGESSVERKENGLFSHSSLSNTSQKSLSVKEVKSFTQIQATFCISELQVQLSGDLTLGAQGLVSLKFQDFEVEFSKDHPQTLSIQIALHSLLMEDLLEKNPDSKYKNLMVSRGAPKPSSLAQKEYLSQSCPSVSNVEYPDMPRSLPSHMEEAPNVFQLYQRPTSASRKKQKEVQDKDYPLTPPPSPTVDEPKILVGKSKFDDSLVHINIFLVDKKHPEFSSSYNRVNRSIDVDFNCLDVLITLQTWVVILDFFGIGSTADNHAMRLPPEGILHNVKLEPHASMESGLQDPVNTKLDLKVHSLSLVLNKTTSELAKANVSKLVAHLEMIEGDLALQGSIGSLSLSDLTCHGEFYRERFTTSGEEALIFQTFKYGRPDPLLRREHDIRVSLRMASVQYVHTQRFQAEVVAFIQHFTQLQDVLGRQRAAIEGQTVRDQAQRCSRVLLDIEAGAPVLLIPESSRSNNLIVANLGKLKVKNKFLFAGFPGTFSLQDKESVPSASPTGIPKHSLRKTTSTEEPRGTHSQGQFTMPLAGMSLGSLKSEFVPSTSTKQQGPQPTLSVGQESSSPEDHVCLLDCVVVDLQDMDIFAAERHPREYSKAPEDSSGDLIFPSYFVRQTGGSLLTEPCRLKLQVERNLDKEISHTVPDISIHGNLSSVHCSLDLYKYKLIRGLLENNLGEPIEEFMRPYDLQDPRIHTVLSGEVYTCMCFLIDMVNVSLELKDPKRKEGAGSLARFDFKKCKLLYESFSNQTKSINLVSHSMMAFDTRYAGQKTSPGMTNVFSCIFQPAKNSSTTQGSIQIELHFRSTKDSSCFTVVLNNLRVFLIFDWLLLVHDFLHTPSDIKKQNHVTPSRHRNSSSESAIVPKTVKSGVVTKRSSLPVSNERHLEVKVNVTGTEFVVIEDVSCFDTNAIILKGTTVLTYKPRFVDRPFSGSLFGIEVFSCRLGNEHDTALSIVDPVQIQMELVGNSSYQNSSGLMDAFNSEDFPPVLEIQLQALDIRLSYNDVQLFLAIAKSIPEQANAAVPDSVALESDSVGTYLPGASRVGEEIREGTRHTLDPVLELQLARLQELGFSMDDCRKALLACQGQLKKAASWLFKNAEPLKSLSLASTSRDSPGAVAAPLISGVEIKAESVCICFIDDCMDCDVPLAELTFSRLNFLQRVRTSPEGYAHFTLSGDYYNRALSGWEPFIEPWPCSVSWQQQAASRLHPPRLKLEAKAKPRLDINITSVLIDQYVSTKESWMADYCKDDKDIESAKSEDWMGSSVDPPCFGQTEVKTPKRRQPFVPFALRNHTGCTLWFATLTTTPTRAALSHSGSPGVVPEGNGTFLDDTHNVSEWREVLTGEEIPFEFEARGKLRHRHTHDLRIHQLQVRVNGWEQVSPVSVDKVGTFFRYAAPDKNSSSSTIGSPSSRTNIIHPQVYFSSLPPVRVVFAVTMEGSARKVITVRSALIVRNRLETPMELRLDSPSAPDKPVVLPAIMPGDSFAVPLHLTSWRLQARPKGLGVFFCKAPIHWTNVVKTAEISSSKRECHSMDTEKSRFFRFCVAIKKENYPDYMPSNIFSDSAKQIFRQPGHTIYLLPTVVICNLLPCELDFYVKGMPINGTLKPGKEAALHTADTSQNIELGVSLENFPLCKELLIPPGTQNYMVRMRLYDVNRRQLNLTIRIVCRAEGSLKIFISAPYWLINKTGLPLIFRQDNAKTDAAGQFEEHELARSLSPLLFCYADKEQPNLCTMRIGRGIHPEGMPGWCQGFSLDGGSGVRALKVIQQGNRPGLIYNIGIDVKKGRGRYIDTCMVIFAPRYLLDNKSSHKLAFAQREFARGQGTANPEGYISTLPGSSVVFHWPRNDYDQLLCVRLMDVPNCIWSGGFEVNKNNSFHINMRDTLGKCFFLRVEITLRGATYRISFSDTDQLPPPFRIDNFSKVPVVFTQHGVAEPRLRTEVKPMTSLDYAWDEPTLPPFITLTVKGAGSSEINCNMNDFQDNRQLYYENFIYIAATYTFSGLQEGTGRPVASNKAITCAELVLDVSPKTQRVILKKKEPGKRSQLWRMTGTGMLAHEGSSVPHNPNKPSAARSTEGSAILDIAGLAAVTDNRYEPLMLRKPDRRRSTTQTWSFREGKLTCGLHGLVVQAKGGLSGLFDGAEVVLGPDTSMELLGPVPPEQQFINQKMRPGSGMLSIRVIPDGPTRALQITDFCHRKSSRSYEVDELPVTEQELQKLKNPDTEQELEVLVRLEGGIGLSLINKVPEELVFASLTGINVHYTQLATSHMLELSIQDVQVK

SEQ ID NO: 107 - protein, 3880 aa, Artificial Sequence
  Synthetic polypeptide
MLEGLVAWVLNTYLGKYVNNLNTDQLSVALLKGAVELENLPLKKDALKELELPFEVKAGFIGKVTLQIPFYRPHVDPWVISISSLHLIGAPEKIQDFNDEKEKLLERERKKALLQALEEKWKNDRQQKGESYWYSVTASVVTRIVENIELKIQDVHLRFEDGVTNPSHPFAFGICIKNVSMQNAVNEPVQKLMRKKQLDVAEFSIYWDVDCTLLGDLPQMELQEAMARSMESRSHHYVLEPVFASALLKRNCSKKPLRSRHSPRIDCDIQLETIPLKLSQLQYRQIMEFLKELERKERQVKFRRWKPKVAISKNCREWWYFALNANLYEIREQRKRCTWDFMLHRARDAVSYTDKYFNKLKGGLLSTDDKEEMCRIEEEQSFEELKILRELVHDRFHKQEELAESLREPQFDSPGACPGAPEPGGGSGMLQYLQSWFPGWGGWYGQQTPEGNVVEGLSAEQQEQWIPEEILGTEEFFDPTADASCMNTYTKRDHVFAKLNLQLQRGTVTLLHKEQGTPQMNESAFMQLEFSDVKLLAESLPRRNSSLLSVRLGGLFLRDLATEGTMFPLLVFPNPQKEVGRVSQSFGLQTTSADRSDHYPAADPDGPVFEMLYERNPAHSHFERRLNVSTRPLNIIYNPQAIKKVADFFYKGKVHTSGFGYQSELELRVAEAARRQYNKLKMQTKAEIRQTLDRLLVGDFIEESKRWTVRLDISAPQVIFPDDFKFKNPVLVVVDLGRMLLTNTQDNSRRKSRDGSASEETQFSDDEYKTPLATPPNTPPPESSSSNGEKTPPFSGVEFSEEQLQAHLMSTKMYERYSLSFMDLQIMVGRVKDNWKHVQDIDVGPTHVVEKFNVHLQLERRLIYTSDPKYPGAVLSGNLPDLKIHINEDKISALKNCFALLTTPEMKTSDTQIKEKIFPQEEQRGSLQDSVMNLTQSIVLLEQHTREVLVESQLLLAEFKVNCMQLGVESNGRYISVLKVFGTNAHFVKRPYDAEVSLTVHGLLLVDTMQTYGADFDLLMASHKNLSFDIPTGSLRDSRAQSPVSGPNVAHLTDGATLNDRSATSVSLDKILTKEQESLIKLEYQFVSSECPSMNLDSTLQVISLQVNNLDIILNPETIVELIGFLQKSFPKEKDDLSPQPLMTDFERSFREQGTYQSTYEQNTEVAVEIHRLNLLLLRTVGMANREKYGRKIATASIGGTKVNVSMGSTFDMNGSLGCLQLMDLTQDNVKNQYVVSIGNSVGYENIISDIGYFESVFVRMEDAALTEALSFTFVERSKQECFLNLKMASLHYNHSAKFLKELTLSMDELEENFRGMLKSAATKVTTVLATKTAEYSEMVSLFETPRKTREPFILEENEIYGFDLASSHLDTVKLILNINIESPVVSIPRKPGSPELLVGHLGQIFIQNFVAGDDESRSDRLQVEIKDIKLYSLNCTQLAGREAVGSEGSRMFCPPSGSGSANSQEEAHFTRHDFFESLHRGQAFHILNNTTIQFKLEKIPIERESELTFSLSPDDLGTSSIMKIEGKFVNPVQVVLAKHVYEQVLQTLDNLVYSEDLNKYPASATSSPCPDSPLPPLSTCGESSVERKENGLFSHSSLSNTSQKSLSVKEVKSFTQIQATFCISELQVQLSGDLTLGAQGLVSLKFQDFEVEFSKDHPQTLSIQIALHSLLMEDLLEKNPDSKYKNLMVSRGAPKPSSLAQKEYLSQSCPSVSNVEYPDMPRSLPSHMEEAPNVFQLYQRPTSASRKKQKEVQDKDYPLTPPPSPTVDEPKILVGKSKFDDSLVHINIFLVDKKHPEFSSSYNRVNRSIDVDFNCLDVLITLQTWVVILDFFGIGSTADNHAMRLPPEGILHNVKLEPHASMESGLQDPVNTKLDLKVHSLSLVLNKTTSELAKANVSKLVAHLEMIEGDLALQGSIGSLSLSDLTCHGEFYRERFTTSGEEALIFQTFKYGRPDPLLRREHDIRVSLRMASVQYVHTQRFQAEVVAFIQHFTQLQDVLGRQRAAIEGQTVRDQAQRCSRVLLDIEAGAPVLLIPESSRSNNLIVANLGKLKVKNKFLFAGFPGTFSLQDKESVPSASPTGIPKHSLRKTTSTEEPRGTHSQGQFTMPLAGMSLGSLKSEFVPSTSTKQQGPQPTLSVGQESSSPEDHVCLLDCVVVDLQDMDIFAAERHPREYSKAPEDSSGDLIFPSYFVRQTGGSLLTEPCRLKLQVERNLDKEISHTVPDISIHGNLSSVHCSLDLYKYKLIRGLLENNLGEPIEEFMRPYDLQDPRIHTVLSGEVYTCMCFLIDMVNVSLELKDPKRKEGAGSLARFDFKKCKLLYESFSNQTKSINLVSHSMMAFDTRYAGQKTSPGMTNVFSCIFQPAKNSSTTQGSIQIELHFRSTKDSSCFTVVLNNLRVFLIFDWLLLVHDFLHTPSDIKKQNHVTPSRHRNSSSESAIVPKTVKSGVVTKRSSLPVSNERHLEVKVNVTGTEFVVIEDVSCFDTNAIILKGTTVLTYKPRFVDRPFSGSLFGIEVFSCRLGNEHDTALSIVDPVQIQMELVGNSSYQNSSGLMDAFNSEDFPPVLEIQLQALDIRLSYNDVQLFLAIAKSIPEQANAAVPDSVALESDSVGTYLPGASRVGEEIREGTRHTLDPVLELQLARLQELGFSMDDCRKALLACQGQLKKAASWLFKNAEPLKSLSLASTSRDSPGAVAAPLISGVEIKAESVCICFIDDCMDCDVPLAELTFSRLNFLQRVRTSPEGYAHFTLSGDYYNRALSGWEPFIEPWPCSVSWQQQAASRLHPPRLKLEAKAKPRLDINITSVLIDQYVSTKESWMADYCKDDKDIESAKSEDWMGSSVDPPCFGQSLPLVYLRTRSTASLTNLEHQIYARAEVKTPKRRQPFVPFALRNHTGCTLWFATLTTTPTRAALSHSGSPGVVPEGNGTFLDDTHNVSEWREVLTGEEIPFEFEARGKLRHRHTHDLRIHQLQVRVNGWEQVSPVSVDKVGTFFRYAAPDKNSSSSTIGSPSSRTNIIHPQVYFSSLPPVRVVFAVTMEGSARKVITVRSALIVRNRLETPMELRLDSPSAPDKPVVLPAIMPGDSFAVPLHLTSWRLQARPKGLGVFFCKAPIHWTNVVKTAEISSSKRECHSMDTEKSRFFRFCVAIKKENYPDYMPSNIFSDSAKQIFRQPGHTIYLLPTVVICNLLPCELDFYVKGMPINGTLKPGKEAALHTADTSQNIELGVSLENFPLCKELLIPPGTQNYMVRMRLYDVNRRQLNLTIRIVCRAEGSLKIFISAPYWLINKTGLPLIFRQDNAKTDAAGQFEEHELARSLSPLLFCYADKEQPNLCTMRIGRGIHPEGMPGWCQGFSLDGGSGVRALKVIQQGNRPGLIYNIGIDVKKGRGRYIDTCMVIFAPRYLLDNKSSHKLAFAQREFARGQGTANPEGYISTLPGSSVVFHWPRNDYDQLLCVRLMDVPNCIWSGGFEVNKNNSFHINMRDTLGKCFFLRVEITLRGATYRISFSDTDQLPPPFRIDNFSKVPVVFTQHGVAEPRLRTEVKPMTSLDYAWDEPTLPPFITLTVKGAGSSEINCNMNDFQDNRQLYYENFIYIAATYTFSGLQEGTGRPVASNKAITCAELVLDVSPKTQRVILKKKEPGKRSQLWRMTGTGMLAHEGSSVPHNPNKPSAARSTEGSAILDIAGLAAVTDNRYEPLMLRKPDRRRSTTQTWSFREGKLTCGLHGLVVQAKGGLSGLFDGAEVVLGPDTSMELLGPVPPEQQFINQKMRPGSGMLSIRVIPDGPTRALQITDFCHRKSSRSYEVDELPVTEQELQKLKNPDTEQELEVLVRLEGGIGLSLINKVPEELVFASLTGINVHYTQLATSHMLELSIQDVQVK

SEQ ID NO: 108 - protein, 48 aa, Artificial Sequence
  Synthetic polypeptide
RRGPKTHTGRHQCVSPPSTAERQKMWELTPVISALGRLKKEVCLRPGD

SEQ ID NO: 109 - protein, 171 aa, Artificial Sequence
  Synthetic polypeptide
MAAAAAAAGAAGSAAPAAAAGAPGSGGAPSGSQGVLIGDRLYSGVLITLENCLLPDDKLRFTPSMSSGLDTDTETDLRVVGCELIQAAGILLRLPQVAMATGQVLFQRFFYTKSFVKHSMEHVSMACVHLASKIEEAPRRIRDVINVFHRLRQLRDKKCGSSHLSSQHLGD

SEQ ID NO: 110 - protein, 192 aa, Artificial Sequence
  Synthetic polypeptide
MAAAAAAAGAAGSAAPAAAAGAPGSGGAPSGSQGVLIGDRLYSGVLITLENCLLPDDKLRFTPSMSSGLDTDTETDLRVVGCELIQAAGILLRLPQVRARPRASGPGGHGYRAGVVPAVLLYQVLREALHGACVNGLCPPGFQDRRGPKTHTGRHQCVSPPSTAERQKMWELTPVISALGRLKKEVCLRPGD

SEQ ID NO: 111 - protein, 73 aa, Artificial Sequence
  Synthetic polypeptide
MATGQVLFQRFFYTKSFVKHSMEHVSMACVHLASKIEEAPRRIRDVINVFHRLRQLRDKKCGSSHLSSQHLGD

SEQ ID NO: 112 - protein, 262 aa, Artificial Sequence
  Synthetic polypeptide
MLTPLGKFSTAKFAVRLPRVWEARAPSLSGAPAPTPPAPPPSRSSRLGLWPRCFLIFPQLRILLLGPQESNNSTGTMWKVSALLFVLGSASLWVLAEGASTGQPEDDTETTGLEGGVAMPGAEDDVVTPGTSEDRYKSGLTTLVATSVNSVTGIRIEDLPTSESTVHAQEQSPSATASNVATSHSTEKVDGDTQTTVEKDGLSTVTLVGIIVGVLLAIGFIGAIIVVVMRKMSGRSFGLGEVSCHVVRMLKQPYGDTHMTKN

SEQ ID NO: 113 - protein, 253 aa, Artificial Sequence
  Synthetic polypeptide
TAKFAVRLPRVWEARAPSLSGAPAPTPPAPPPSRSSRLGLWPRCFLIFPQLRILLLGPQESNNSTGTMWKVSALLFVLGSASLWVLAEGASTGQPEDDTETTGLEGGVAMPGAEDDVVTPGTSEDRYKSGLTTLVATSVNSVTGIRIEDLPTSESTVHAQEQSPSATASNVATSHSTEKVDGDTQTTVEKDGLSTVTLVGIIVGVLLAIGFIGAIIVVVMRKMSGRSFGLGEVSCHVVRMLKQPYGDTHMTKN

SEQ ID NO: 114 - protein, 181 aa, Artificial Sequence
  Synthetic polypeptide
MGTSEQRLAGMPGPGIRASTGQPEDDTETTGLEGGVAMPGAEDDVVTPGTSEDRYKSGLTTLVATSVNSVTGIRIEDLPTSESTVHAQEQSPSATASNVATSHSTEKVDGDTQTTVEKDGLSTVTLVGIIVGVLLAIGFIGAIIVVVMRKMSGRSFGLGEVSCHVVRMLKQPYGDTHMTKN

SEQ ID NO: 115 - protein, 144 aa, Artificial Sequence
  Synthetic polypeptide
MPGAEDDVVTPGTSEDRYKSGLTTLVATSVNSVTGIRIEDLPTSESTVHAQEQSPSATASNVATSHSTEKVDGDTQTTVEKDGLSTVTLVGIIVGVLLAIGFIGAIIVVVMRKMSGRSFGLGEVSCHVVRMLKQPYGDTHMTKN

SEQ ID NO: 116 - protein, 264 aa, Artificial Sequence
  Synthetic polypeptide
MLTPLGKFSTAKFAVRLPRVWEARAPSLSGAPAPTPPAPPPSRSSRLGLWPRCFLIFPQLRILLLGPQESNNSTGTMWKVSALLFVLGSASLWVLAEGASTGQPEDDTETTGLEGGVAMPGAEDDVVTPGTSEDRYKSGLTTLVATSVNSVTGIRIEDLPTSESTVHAQEQSPSATASNVATSHSTEKVDGDTQTTVEKDGLSTVTLVGIIVGVLLAIGFIGAIIVVVMRKMSGRYSSFGLGEVSCHVVRMLKQPYGDTHMTKN

SEQ ID NO: 117 - protein, 255 aa, Artificial Sequence
  Synthetic polypeptide
TAKFAVRLPRVWEARAPSLSGAPAPTPPAPPPSRSSRLGLWPRCFLIFPQLRILLLGPQESNNSTGTMWKVSALLFVLGSASLWVLAEGASTGQPEDDTETTGLEGGVAMPGAEDDVVTPGTSEDRYKSGLTTLVATSVNSVTGIRIEDLPTSESTVHAQEQSPSATASNVATSHSTEKVDGDTQTTVEKDGLSTVTLVGIIVGVLLAIGFIGAIIVVVMRKMSGRYSSFGLGEVSCHVVRMLKQPYGDTHMTKN

SEQ ID NO: 118 - protein, 183 aa, Artificial Sequence
  Synthetic polypeptide
MGTSEQRLAGMPGPGIRASTGQPEDDTETTGLEGGVAMPGAEDDVVTPGTSEDRYKSGLTTLVATSVNSVTGIRIEDLPTSESTVHAQEQSPSATASNVATSHSTEKVDGDTQTTVEKDGLSTVTLVGIIVGVLLAIGFIGAIIVVVMRKMSGRYSSFGLGEVSCHVVRMLKQPYGDTHMTKN

SEQ ID NO: 119 - protein, 146 aa, Artificial Sequence
  Synthetic polypeptide
MPGAEDDVVTPGTSEDRYKSGLTTLVATSVNSVTGIRIEDLPTSESTVHAQEQSPSATASNVATSHSTEKVDGDTQTTVEKDGLSTVTLVGIIVGVLLAIGFIGAIIVVVMRKMSGRYSSFGLGEVSCHVVRMLKQPYGDTHMTKN

SEQ ID NO: 120 - protein, 172 aa, Artificial Sequence
  Synthetic polypeptide
MNQNTTEPVAATETLAEVPEHVLRGLPEEVRLFPSAVDKTRIGVWATKPILKGKKFGPFVGDKKKRSQVKNNVYMWEVYYPNLGWMCIDATDPEKGNWLRYVNWACSGEEQNLFPLEINRAIYYKTLKPIAPGEELLVWYNGEDNPEIAAAIEEERASARSKRSSPKSRKAL

SEQ ID NO: 121 - protein, 429 aa, Artificial Sequence
  Synthetic polypeptide
MSWLFGVNKGPKGEGAGPPPPLPPAQPGAEGGGDRGLGDRPAPKDKWSNFDPTGLERAAKAARELEHSRYAKEALNLAQMQEQTLQLEQQSKLKEYEAAVEQLKSEQIRAQAEERRKTLSEETRQHQARAQYQDKLARQRYEDQLKQQQLLNEENLRKQEESVQKQEAMRRATVEREMELRHKNEMLRVETEARARAKAERENADIIREQIRLKASEHRQTVLESIRTAGTLFGEGFRAFVTDRDKVTATVAGLTLLAVGVYSAKNATAVTGRFIEARLGKPSLVRETSRITVLEALRHPIQVSRRLLSRPQDVLEGVVLSPSLEARVRDIAIATRNTKKNRGLYRHILLYGPPGTGKTLFAKKLALHSGMDYAIMTGGDVAPMGREGVTAMHKLFDWANTSRRGLLLFMDEADAFLRKRATEAEVAVS

SEQ ID NO: 122 - protein, 132 aa, Artificial Sequence
  Synthetic polypeptide
MSTNICSFKDRCVSILCCKFCKQVLSSRGMKAVLLADTEIDLFSTDIPPTNAVDFTGRCYFTKICKCKLKDIACLKCGNIVGYHVIVPCSSCLLSCNNRHFWMFHSQAVYDINRLDSTGMVAFACSPSYSGG

SEQ ID NO: 123 - protein, 131 aa, Artificial Sequence
  Synthetic polypeptide
MDAWVRFSAQSQARERLCRAAQYACSLLGHALQRHGASPELQKQIRQLESHLSLGRKLLRLGNSADALESAKRAVHLSDVVLRFCITVSHLNRALYFACDNVLWAGKSGLAPRVDQEKWAQRSFRCGGGHL

SEQ ID NO: 124 - protein, 117 aa, Artificial Sequence
  Synthetic polypeptide
MGKLRAAQYACSLLGHALQRHGASPELQKQIRQLESHLSLGRKLLRLGNSADALESAKRAVHLSDVVLRFCITVSHLNRALYFACDNVLWAGKSGLAPRVDQEKWAQRSFRCGGGHL

SEQ ID NO: 125 - protein, 144 aa, Artificial Sequence
  Synthetic polypeptide
MDAWVRFSAQSQARERLCRAAQYACSLLGHALQRHGASPELQKQIRQLESHLSLGRKLLRLGNSADALESAKRAVHLSDVVLRFCITVSHLNRALYFACDNVLWAGKSGLAPRVDQEKWAQRSFSLGDKSKTPSQKKKKKKRKE

SEQ ID NO: 126 - protein, 130 aa, Artificial Sequence
  Synthetic polypeptide
MGKLRAAQYACSLLGHALQRHGASPELQKQIRQLESHLSLGRKLLRLGNSADALESAKRAVHLSDVVLRFCITVSHLNRALYFACDNVLWAGKSGLAPRVDQEKWAQRSFSLGDKSKTPSQKKKKKKRKE

SEQ ID NO: 127 - protein, 546 aa, Artificial Sequence
  Synthetic polypeptide
MAELGELKHMVMSFRVSELQVLLGFAGRNKSGRKHELLAKALHLLKSSCAPSVQMKIKELYRRRFPRKTLGPSDLSLLSLPPGTSPVGSPGPLAPIPPTLLAPGTLLGPKREVDMHPPLPQPVHPDVTMKPLPFYEVYGELIRPTTLASTSSQRFEEAHFTFALTPQQVQQILTSREVLPGAKCDYTIQVQLRFCLCETSCPQEDYFPPNLFVKVNGKLCPLPGYLPPTKNGAEPKRPSRPINITPLARLSATVPNTIVVNWSSEFGRNYSLSVYLVRQLTAGTLLQKLRAKGIRNPDHSRALIKEKLTADPDSEVATTSLRVSLMCPLGKMRLTVPCRALTCAHLQSFDAALYLQMNEKKPTWTCPVCDKKAPYESLIIDGLFMEILSSCSDCDEIQFMEDGSWCPMKPKKEASEVCPPPGYGLDGLQYSPVQGGDPSENKKKVEVIDLTIESSSDEEDLPPTKKHCSVTSAAIPALPGSKGVLTSGHQPSSVLRSPAMGTLGGDFLSSLPLHEYPPAFPLGADIQGLDLFSFLQTESQDNDPQT

SEQ ID NO: 128 - protein, 511 aa, Artificial Sequence
  Synthetic polypeptide
MAELGELKHMVMSFRVSELQVLLGFAGRNKSGRKHELLAKALHLLKSSCAPSVQMKIKELYRRRFPRKTLGPSDLSLLSLPPGTSPPVHPDVTMKPLPFYEVYGELIRPTTLASTSSQRFEEAHFTFALTPQQVQQILTSREVLPGAKCDYTIQVQLRFCLCETSCPQEDYFPPNLFVKVNGKLCPLPGYLPPTKNGAEPKRPSRPINITPLARLSATVPNTIVVNWSSEFGRNYSLSVYLVRQLTAGTLLQKLRAKGIRNPDHSRALIKEKLTADPDSEVATTSLRVSLMCPLGKMRLTVPCRALTCAHLQSFDAALYLQMNEKKPTWTCPVCDKKAPYESLIIDGLFMEILSSCSDCDEIQFMEDGSWCPMKPKKEASEVCPPPGYGLDGLQYSPVQGGDPSENKKKVEVIDLTIESSSDEEDLPPTKKHCSVTSAAIPALPGSKGVLTSGHQPSSVLRSPAMGTLGGDFLSSLPLHEYPPAFPLGADIQGLDLFSFLQTESQDNDPQT

SEQ ID NO: 129 - protein, 36 aa, Artificial Sequence
  Synthetic polypeptide
MAEASAAGADSGAAVAAHRFFCHFCKGEVSPKLPMI

SEQ ID NO: 130 - protein, 16 aa, Artificial Sequence
  Synthetic polypeptide
GFSATFARARSAPNYR

SEQ ID NO: 131 - protein, 253 aa, Artificial Sequence
  Synthetic polypeptide
MSFLIDSSIMITSQILFFGFGWLFFMRQLFKDYEIRQYVVQVIFSVTFAFSCTMFELIIFEILGVLNSSSRYFHWKMNLCVILLILVFMVPFYIGYFIVSNIRLLHKQRLLFSCLLWLTFMYFFWKLGDPFPILSPKHGILSIEQLISRVGVIGVTLMALLSGFGAVNCPYTYMSYFLRNVTDTDILALERRLLQTMDMIISKKKRMAMARRTMFQKGEVHNKPSGFWGMIKSVTTSASGSENNPMKIRYKRR

SEQ ID NO: 132 - protein, 133 aa, Artificial Sequence
  Synthetic polypeptide
MYFFWKLGDPFPILSPKHGILSIEQLISRVGVIGVTLMALLSGFGAVNCPYTYMSYFLRNVTDTDILALERRLLQTMDMIISKKKRMAMARRTMFQKGEVHNKPSGFWGMIKSVTTSASGSENNPMKIRYKRR

SEQ ID NO: 133 - protein, 228 aa, Artificial Sequence
  Synthetic polypeptide
MRQLFKDYEIRQYVVQVIFSVTFAFSCTMFELIIFEILGVLNSSSRYFHWKMNLCVILLILVFMVPFYIGYFIVSNIRLLHKQRLLFSCLLWLTFMYFFWKLGDPFPILSPKHGILSIEQLISRVGVIGVTLMALLSGFGAVNCPYTYMSYFLRNVTDTDILALERRLLQTMDMIISKKKRMAMARRTMFQKGEVHNKPSGFWGMIKSVTTSASGSENNPMKIRYKRR

SEQ ID NO: 134 - protein, 233 aa, Artificial Sequence
  Synthetic polypeptide
MSFLIDSSIMITSQIRQYVVQVIFSVTFAFSCTMFELIIFEILGVLNSSSRYFHWKMNLCVILLILVFMVPFYIGYFIVSNIRLLHKQRLLFSCLLWLTFMYFFWKLGDPFPILSPKHGILSIEQLISRVGVIGVTLMALLSGFGAVNCPYTYMSYFLRNVTDTDILALERRLLQTMDMIISKKKRMAMARRTMFQKGEVHNKPSGFWGMIKSVTTSASGSENNPMKIRYKRR

SEQ ID NO: 135 - protein, 75 aa, Artificial Sequence
  Synthetic polypeptide
MSFLIDSSIMITSQITLPRTYSTKVKPKGMISYYEYFLHFNLKGYLCSQPFLPPFLPFQKTGFPYSGLKPFYLPL

SEQ ID NO: 136 - protein, 76 aa, Artificial Sequence
  Synthetic polypeptide
MSFLIDSSIMITSQQITLPRTYSTKVKPKGMISYYEYFLHFNLKGYLCSQPFLPPFLPFQKTGFPYSGLKPFYLPL

SEQ ID NO: 137 - protein, 389 aa, Artificial Sequence
  Synthetic polypeptide
MITGVFSMRLWTPVGVLTSLAYCLHQRRVALAELQEADGQCPVDRSLLKLKMVQVVFRHGARSPLKPLPLEEQVEWNPQLLEVPPQTQFDYTVTNLAGGPKPYSPYDSQYHETTLKGGMFAGQLTKVGMQQMFALGERLRKNYVEDIPFLSPTFNPQEVFIRSTNIFRNLESTRCLLAGLFQCQKEGPIIIHTDEADSEVLYPNYQSCWSLRQRTRGRRQTASLQPGISEDLKKVKDRMGIDSSDKVDFFILLDNVAAEQAHNLPSCPMLKRFARMIEQRAVDTSLYILPKEDRESLQMAVGPFLHILESNLLKAVDSATAPDKIRKLYLYAAHDVTFIPLLMTLGIFDHKWPPFAVDLTMELYQHLESKEWFVQLYYHGKAMRSGSHL

SEQ ID NO: 138 - protein, 538 aa, Artificial Sequence
  Synthetic polypeptide
MFSNSTGRLPGQPTQEIQQYKVLVHSQERELTQLREKLREGRDASRSLNEHLQALLTPDEPDKSQGQDLQEQLAEGCRLAQHLVQKLSPENDEDEDEDVQVEEDEKVLESSAPREVQKAEESKVPEDSLEECAITCSNSHGPCDSIQPHKNIKITFEEDKVNSSLVVDRESSHDGCQDALNILPVPGPTSSATNVSMVVSAGPLSSEKAEMNILEINEKLCPQLAEKKQQFRSLKEKCFVTQVACFLAKQQNKYKYEECKDLIKSMLRNERQFKEEKLAEQLKQAEELRQYKVLVHSQERELTQLREKLREGRDASRSLNEHLQALLTPDEPDKSQGQDLQEQLAEGCRLAQHLVQKLSPENDNDDDEDVQVEVAEKVQKSSSPREMQKAEEKEVPEDSLEECAITCSNSHGPYDSNQPHRKTKITFEEDKVDSTLIGSSSHVEWEDAVHIIPENESDDEEEEEKGPVSPRGMDEAGNHHSQQTIARTKNQIPHVLTHRWELNNENTWTQEGEHHTLGPVVGWGEGGGVALGDIPNVK

SEQ ID NO: 139 - protein, 613 aa, Artificial Sequence
  Synthetic polypeptide
MVVSAGPWSSEKAEMNILEINEKLRPQLAENKQQFRNLKERCFLTQLAGFLANRHKKYKYEECKDLIKFMLRNERQFKEEKLAEQLKQAEELRQYKVLVHSQERELTQLREKLREGRDASRSLNEHLQALLTPDEPDKSQGQDLQEQLAEGCRLAQHLVQKLSPENDEDEDEDVQVEEDEKVLESSAPREVQKAEESKVPEDSLEECAITCSNSHGPCDSIQPHKNIKITFEEDKVNSSLVVDRESSHDGCQDALNILPVPGPTSSATNVSMVVSAGPLSSEKAEMNILEINEKLCPQLAEKKQQFRSLKEKCFVTQVACFLAKQQNKYKYEECKDLIKSMLRNERQFKEEKLAEQLKQAEELRQYKVLVHSQERELTQLREKLREGRDASRSLNEHLQALLTPDEPDKSQGQDLQEQLAEGCRLAQHLVQKLSPENDNDDDEDVQVEVAEKVQKSSSPREMQKAEEKEVPEDSLEECAITCSNSHGPYDSNQPHRKTKITFEEDKVDSTLIGSSSHVEWEDAVHIIPENESDDEEEEEKGPVSPRGMDEAGNHHSQQTIARTKNQIPHVLTHRWELNNENTWTQEGEHHTLGPVVGWGEGGGVALGDIPNVK

SEQ ID NO: 140 - protein, 3 aa, Artificial Sequence
  Synthetic polypeptide
KIS

SEQ ID NO: 141 - protein, 273 aa, Artificial Sequence
  Synthetic polypeptide
MLRNERQFKEEKLAEQLKQAEELRQYKVLVHAQERELTQLREKLREGRDASRSLNEHLQALLTPDEPDKSQGQDLQEQLAEGCRLAQHLVQKLSPENDNDDDEDVQVEVAEKVQKSSAPREMQKAEEKEVPEDSLEECAITCSNSHGPYDSNQPHRKTKITFEEDKVDSTLIGSSSHVEWEDAVHIIPENESDDEEEEEKGPVSPRGMDEAGNHHSQQTIARTKNQIPHVLTHRWELNNENTWTQKGEHHTLGPVVGWGEGGGVALGDIPNVK

SEQ ID NO: 142 - protein, 8 aa, Artificial Sequence
  Synthetic polypeptide
NMKSAKIS

SEQ ID NO: 143 - protein, 12 aa, Artificial Sequence
  Synthetic polypeptide
WEHCSLSCDCSM

SEQ ID NO: 144 - protein, 691 aa, Artificial Sequence
  Synthetic polypeptide
MEEGFRDRAAFIRGAKDIAKEVKKHAAKKVVKGLDRVQDEYSRRSYSRFEEEDDDDDFPAPSDGYYRGEGTQDEEEGGASSDATEGHDEDDEIYEGEYQGIPRAESGGKGERMADGAPLAGVRGGLSDGEGPPGGRGEAQRRKEREELAQQYEAILRECGHGRFQWTLYFVLGLALMADGVEVFVVGFVLPSAEKDMCLSDSNKGMLGLIVYLGMMVGAFLWGGLADRLGRRQCLLISLSVNSVFAFFSSFVQGYGTFLFCRLLSGVGIGGSIPIVFSYFSEFLAQEKRGEHLSWLCMFWMIGGVYAAAMAWAIIPHYGWSFQMGSAYQFHSWRVFVLVCAFPSVFAIGALTTQPESPRFFLENGKHDEAWMVLKQVHDTNMRAKGHPERVFSVTHIKTIHQEDELIEIQSDTGTWYQRWGVRALSLGGQVWGNFLSCFGPEYRRITLMMMGVWFTMSFSYYGLTVWFPDMIRHLQAVDYASRTKVFPGERVEHVTFNFTLENQIHRGGQYFNDKFIGLRLKSVSFEDSLFEECYFEDVTSSNTFFRNCTFINTVFYNTDLFEYKFVNSRLINSTFLHNKEGCPLDVTGTGEGAYMVYFVSFLGTLAVLPGNIVSALLMDKIGRLRMLAGSSVMSCVSCFFLSFGNSESAMIALLCLFGGVSIASWNALDVLTVELYPSDKRWVPSNQLKA

SEQ ID NO: 145 - protein, 301 aa, Artificial Sequence
  Synthetic polypeptide
MTLDMDAVLSDFVRSTGAEPGLARDLLEGKNWDVNAALSDFEQLRQVHAGNLPPSFSEGSGGSRTPEKGFSDREPTRPPRPILQRQDDIVQEKRLSRGISHASSSIVSLARSHVSSNGGGGGSNEHPLEMPICAFQLPDLTVYNEDFRSFIERDLIEQSMLVALEQAGRLNWWVSVDPTSQRLLPLATTGDGNCLLHAASLGMWGFHDRDLMLRKALYALMEKGVEKEALKRRWRWQQTQQNKESGLVYTEDEWQKEWNELIKLASSEPRMHLGTNGANCGGNAAPHQQQNKAGRRMTLTS

SEQ ID NO: 146 - protein, 103 aa, Artificial Sequence
  Synthetic polypeptide
MAKHLKFIARTVMVQEGNVESAYRTLNRILTMDGLIEDIKHRRYYEKPCRRRQRESYERCRRIYNMEMARKINFLMRKNRADPSYCLMGTEFQFGQMKKFRRR

SEQ ID NO: 147 - protein, 49 aa, Artificial Sequence
  Synthetic polypeptide
MAATTANPEMTSDVPSLGPAIASGNSGPGIQGGGAIVQRAIKRRPGFLK

SEQ ID NO: 148 - protein, 40 aa, Artificial Sequence
  Synthetic polypeptide
MTSDVPSLGPAIASGNSGPGIQGGGAIVQRAIKRRPGFLK

SEQ ID NO: 149 - protein, 424 aa, Artificial Sequence
  Synthetic polypeptide
MSLVDLGKRLLEAARKGQDDEVRTLMANGAPFTTDWLGTSPLHLAAQYGHYSTAEVLLRAGVSRDARTKVDRTPLHMAAADGHAHIVELLVRNGADVNAKDMLKMTALHWATERHHRDVVELLIKYGADVHAFSKFDKSAFDIALEKNNAEILVILQEAMQNQVNVNPERANPVTDPVSMAAPFIFTSGEVVNLASLISSTNTKTTSANTEEIIEGNSVDSSIQQVMGSGGQRVITIVTDGVPLGNIQTSIPTGGIGQPFIVTVQDGQQVLTVPAGKVAEETVIKEEEEEKLPLTKKPRIGEKTNSVEESKEGNERELLQQQLQEANRRAQEYRHQLLKKEQEAEQYRLKLEAIARQQPNGVDFTMVEEVAEITLLYSVACSLSWETDLYEHQWASCALASSWIQPIGSPDRRLGEEKRLKSMY

SEQ ID NO: 150 - protein, 462 aa, Artificial Sequence
  Synthetic polypeptide
MSLVDLGKRLLEAARKGQDDEVRTLMANGAPFTTDWLGTSPLHLAAQYGHYSTAEVLLRAGVSRDARTKVDRTPLHMAAADGHAHIVELLVRNGADVNAKDMLKMTALHWATERHHRDVVELLIKYGADVHAFSKFDKSAFDIALEKNNAEILVILQEAMQNQVNVNPERANPVTDPVSMAAPFIFTSGEVVNLASLISSTNTKTTSGDPHASTVQFSNSTTSVLATLAALAEASVPLSNSHRATANTEEIIEGNSVDSSIQQVMGSGGQRVITIVTDGVPLGNIQTSIPTGGIGQPFIVTVQDGQQVLTVPAGKVAEETVIKEEEEEKLPLTKKPRIGEKTNSVEESKEGNERELLQQQLQEANRRAQEYRHQLLKKEQEAEQYRLKLEAIARQQPNGVDFTMVEEVAEITLLYSVACSLSWETDLYEHQWASCALASSWIQPIGSPDRRLGEEKRLKSMY

SEQ ID NO: 151 - protein, 34 aa, Artificial Sequence
  Synthetic polypeptide
MVLESTMVCWHGGARLWSQLPGKLKWEDLLSLGG

SEQ ID NO: 152 - protein, 41 aa, Artificial Sequence
  Synthetic polypeptide
MQNVRREPSPSRAWPSQCAPLLPQLRNVGIVDPATPPLWRP

SEQ ID NO: 153 - protein, 30 aa, Artificial Sequence
  Synthetic polypeptide
MATKCGNCGPGYSTPLEAMKGRLFQKWTEA

SEQ ID NO: 154 - protein, 72 aa, Artificial Sequence
  Synthetic polypeptide
MRLEWGPRPAALPWPAGMCAAERAEGAFTLQSVAQPMRPIASTATKCGNCGPGYSTPLEAMKGRLFQKWTEA

SEQ ID NO: 155 - protein, 12 aa, Artificial Sequence
  Synthetic polypeptide
MKGRLFQKWTEA

SEQ ID NO: 156 - protein, 52 aa, Artificial Sequence
  Synthetic polypeptide
MNGTRNWCTLVDVHPEDQAAVYLKGRSGDKMIHEKNINQLKSEVQYIQENVS

SEQ ID NO: 157 - protein, 111 aa, Artificial Sequence
  Synthetic polypeptide
MNGTRNWCTLVDVHPEDQAAGSVDILRLTLQGELTGDELEHIAQKAGRKTYAMVSSHSAGHSLASELVESHDGHEEIIKVYLKGRSGDKMIHEKNINQLKSEVQYIQENVS

SEQ ID NO: 158 - protein, 86 aa, Artificial Sequence
  Synthetic polypeptide
MNGTRNWCTLVDVHPEDQAAAGRKTYAMVSSHSAGHSLASELVESHDGHEEIIKVYLKGRSGDKMIHEKNINQLKSEVQYIQENVS

SEQ ID NO: 159 - protein, 130 aa, Artificial Sequence
  Synthetic polypeptide
MSSPGMTSLQLEKEECMQCVPCSPRTRVALLELYRAMCQGSVDILRLTLQGELTGDELEHIAQKAGRKTYAMVSSHSAGHSLASELVESHDGHEEIIKVYLKGRSGDKMIHEKNINQLKSEVQYIQENVS

SEQ ID NO: 160 - protein, 419 aa, Artificial Sequence
  Synthetic polypeptide
MELQKGKGAAAAAAASGAAGGGGGGAGAGAPGGGRLLLSTSLDAKDELEERLERCMSIVTSMTAGVSEREANDALNAYVCKGLPQHEEICLGLFTLILTEPAQAQKCYRDLALVSRDGMNIVLNKINQILMEKYLKLQDTCRTQLVWLVRELVKSGVLGADGVCMTFMKQIAGGDVTAKNIWLAESVLDILTEQREWVLKSSILIAMAVYTYLRLIVDHHGTAQLQALRQKEVDFCISLLRERFMECLMIGRDLVRLLQNVARIPEFELLWKDIIHNPQALSPQFTGILQLLQSRTSRKFLACRLTPDMETKLLFMTSRVRFGQQKRYQDWFQRQYLSTPDSQSLRCDLIRYICGVVHPSNEVLSSDILPRWAIIGWLLTTCTSNVAASNAKLALFYDWLFFSPDKDSIMNIAAGEVEA

SEQ ID NO: 161 - protein, 213 aa, Artificial Sequence
  Synthetic polypeptide
MAVYTYLRLIVDHHGTAQLQALRQKEVDFCISLLRERFMECLMIGRDLVRLLQNVARIPEFELLWKDIIHNPQALSPQFTGILQLLQSRTSRKFLACRLTPDMETKLLFMTSRVRFGQQKRYQDWFQRQYLSTPDSQSLRCDLIRYICGVVHPSNEVLSSDILPRWAIIGWLLTTCTSNVAASNAKLALFYDWLFFSPDKDSIMNIAAGEVEA

SEQ ID NO: 162 - protein, 596 aa, Artificial Sequence
  Synthetic polypeptide
MDRMTEDALRLNLLKRSLDPADERDDVLAKRLKMEGHEAMERLKMLALLKRKDLANLEVPHELPTKQDGSGVKGYEEKLNGNLRPHGDNRTAGRPGKENINDEPVDMSARRSEPERGRLTPSPDIIVLSDNEASSPRSSSRMEERLKAANLEMFKGKGIEERQQLIKQLRDELRLEEARLVLLKKLRQSQLQKENVVQKTPVVQNAASIVQPSPAHVGQQGLSKLPSRPGAQGVEPQNLRTLQGHSVIRSATNTTLPHMLMSQRVIAPNPAQLQGQRGPPKPGLVRTTTPNMNPAINYQPQSSSSVPCQRTTSSAIYMNLASHIQPGTVNRVSSPLPSPSAMTDAANSQAAAKLALRKQLEKTLLEIPPPKPPAPLLHFLPSAANSEFIYMVGLEEVVQSVIDSQGKSCASLLRVEPFVCAQCRTDFTPHWKQEKNGKILCEQCMTSNQKKALKAEHTNRLKNAFVKALQQEQEIEQRLQQQAALSPTTAPAVSSVSKQETIMRHHTLRQAPQPQSSLQRGIPTSARSMLSNFAQAPQLSVPGGLLGMPGGPNVIMRVLKSGRGRWRGERDGEPETRCAGGRGHSQGCPASRNRKR

SEQ ID NO: 163 - protein, 87 aa, Artificial Sequence
  Synthetic polypeptide
MASGSNWLSGVNVVLVMAYGSLVFVLLFIFVKRQIMRFAMKSRRGPHVPVGHNAPKTVSFKNAGTMPVLFTTIKPGPTHSRYSVISC

SEQ ID NO: 164 - protein, 53 aa, Artificial Sequence
  Synthetic polypeptide
MASGSNWLSGVNVVLVMAYGSLTVSFKNAGTMPVLFTTIKPGPTHSRYSVISC

SEQ ID NO: 165 - protein, 344 aa, Artificial Sequence
  Synthetic polypeptide
MDTSGHFHDSGVGDLDEDPKCPCPSSGDEQQQQQQQQQQQQPPPPAPPAAPQQPLGPSLQPQPPQLQQQQQQQQQQQQQQPPHPLSQLAQLQSQPVHPGLLHSSPTAFRAPPSSNSTAILHPSSRQGSQLNLNDHLLGHSPSSTATSGPGGGSRHRQASPLVHRRDSNPFTEIAMSSCKYSGGVMKPLSRLSASRRNLIEAETEGQPLQLFSPSNPPEIVISSREDNHAHQTLLHHPNATHNHQHAGTTASSTTFPKANKRKNQNIGYKLGHRRALFEKRKRLSDYALIFGMFGIVVMVIETELSWGLYSKDSMFSLALKCLISLSTIILLGLIIAYHTREVQL

SEQ ID NO: 166 - protein, 39 aa, Artificial Sequence
  Synthetic polypeptide
MERPIKDSMFSLALKCLISLSTIILLGLIIAYHTREVQL

SEQ ID NO: 167 - protein, 31 aa, Artificial Sequence
  Synthetic polypeptide
MFSLALKCLISLSTIILLGLIIAYHTREVQL

SEQ ID NO: 168 - protein, 24 aa, Artificial Sequence
  Synthetic polypeptide
MSHKQIYYSDKYDDEEFEYRILPI

SEQ ID NO: 169 - protein, 49 aa, Artificial Sequence
  Synthetic polypeptide
MAQSRDGGNPFAEPSELDNPFQDPAVIQHRPSRQYATLDVYNPFETREV

SEQ ID NO: 170 - protein, 1953 aa, Artificial Sequence
  Synthetic polypeptide
MDPRNTAMLGLGSDSEGFSRKSPSAISTGTLVSKREVELEKNTKEEEDLRKRNRERNIEAGKDDGLTDAQQQFSVKETNFSEGNLKLKIGLQAKRTKKPPKNLENYVCRPAIKTTIKHPRKALKSGKMTDEKNEHCPSKRDPSKLYKKADDVAAIECQSEEVIRLHSQGENNPLSKKLSPVHSEMADYINATPSTLLGSRDPDLKDRALLNGGTSVTEKLAQLIATCPPSKSSKTKPKKLGTGTTAGLVSKDLIRKAGVGSVAGIIHKDLIKKPTISTAVGLVTKDPGKKPVFNAAVGLVNKDSVKKLGTGTTAVFINKNLGKKPGTITTVGLLSKDSGKKLGIGIVPGLVHKESGKKLGLGTVVGLVNKDLGKKLGSTVGLVAKDCAKKIVASSAMGLVNKDIGKKLMSCPLAGLISKDAINLKAEALLPTQEPLKASCSTNINNQESQELSESLKDSATSKTFEKNVVRQNKESILEKFSVRKEIINLEKEMFNEGTCIQQDSFSSSEKGSYETSKHEKQPPVYCTSPDFKMGGASDVSTAKSPFSAVGESNLPSPSPTVSVNPLTRSPPETSSQLAPNPLLLSSTTELIEEISESVGKNQFTSESTHLNVGHRSVGHSISIECKGIDKEVNDSKTTHIDIPRISSSLGKKPSLTSESSIHTITPSVVNFTSLFSNKPFLKLGAVSASDKHCQVAESLSTSLQSKPLKKRKGRKPRWTKVVARSTCRSPKGLELERSELFKNVSCSSLSNSNSEPAKFMKNIGPPSFVDHDFLKRRLPKLSKSTAPSLALLADSEKPSHKSFATHKLSSSMCVSSDLLSDIYKPKRGRPKSKEMPQLEGPPKRTLKIPASKVFSLQSKEEQEPPILQPEIEIPSFKQGLSVSPFPKKRGRPKRQMRSPVKMKPPVLSVAPFVATESPSKLESESDNHRSSSDFFESEDQLQDPDDLDDSHRPSVCSMSDLEMEPDKKITKRNNGQLMKTIIRKINKMKTLKRKKLLNQILSSSVESSNKGKVQSKLHNTVSSLAATFGSKLGQQINVSKKGTIYIGKRRGRKPKTVLNGILSGSPTSLAVLEQTAQQAAGSALGQILPPLLPSSASSSEILPSPICSQSSGTSGGQSPVSSDAGFVEPSSVPYLHLHSRQGSMIQTLAMKKASKGRRRLSPPTLLPNSPSHLSELTSLKEATPSPISESHSDETIPSDSGIGTDNNSTSDRAEKFCGQKKRRHSFEHVSLIPPETSTVLSSLKEKHKHKCKRRNHDYLSYDKMKRQKRKRKKKYPQLRNRQDPDFIAELEELISRLSEIRITHRSHHFIPRDLLPTIFRINFNSFYTHPSFPLDPLHYIRKPDLKKKRGRPPKMREAMAEMPFMHSLSFPLSSTGFYPSYGMPYSPSPLTAAPIGLGYYGRYPPTLYPPPPSPSFTTPLPPPSYMHAGHLLLNPAKYHKKKHKLLRQEAFLTTSRTPLLSMSTYPSVPPEMAYGWMVEHKHRHRHKHREHRSSEQPQVSMDTGSSRSVLESLKRYRFGKDAVGERYKHKEKHRCHMSCPHLSPSKSLINREEQWVHREPSESSPLALGLQTPLQIDCSESSPSLSLGGFTPNSEPASSDEHTNLFTSAIGSCRVSNPNSSGRKKLTDSPGLFSAQDTSLNRLHRKESLPSNERAVQTLAGSQPTSDKPSQRPSESTNCSPTRKRSSSESTSSTVNGVPSRSPRLVASGDDSVDSLLQRMVQNEDQEPMEKSIDAVIATASAPPSSSPGRSHSKDRTLGKPDSLLVPAVTSDSCNNSISLLSEKLTSSCSPHHIKRSVVEAMQRQARKMCNYDKILATKKNLDHVNKILKAKKLQRQARTGNNFVKRRPGRPRKCPLQAVVSMQAFQAAQFVNPELNRDEEGAALHLSPDTVTDVIEAVVQSVNLNPEHKKGLKRKGWLLEEQTRKKQKPLPEEEEQENNKRTLGGQGRRIT

SEQ ID NO: 171 - protein, 23 aa, Artificial Sequence
  Synthetic polypeptide
MMLKGITRLISRIHKARHGGLHL

SEQ ID NO: 172 - protein, 16 aa, Artificial Sequence
  Synthetic polypeptide
RLISRIHKARHGGLHL

SEQ ID NO: 173 - protein, 135 aa, Artificial Sequence
  Synthetic polypeptide
MRLLSFVVLALFAVTQAEEGARLLASKSLLNRYAVEGRDLTLQYNIYNVGSSAALDVELSDDSFPPEDFGIVSGMLNVKWDRIAPASNVSHTVVLRPLKAGYFNFTSATITYLAQEDGPVVPDEKHLNISIIKKR

SEQ ID NO: 174 - protein, 471 aa, Artificial Sequence
  Synthetic polypeptide
METPSQRRATRSGAQASSTPLSPTRITRLQEKEDLQELNDRLAVYIDRVRSLETENAGLRLRITESEEVVSREVSGIKAAYEAELGDARKTLDSVAKERARLQLELSKVREEFKELKARNTKKEGDLIAAQARLKDLEALLNSKEAALSTALSEKRTLEGELHDLRGQVAKLEAALGEAKKQLQDEMLRRVDAENRLQTMKEELDFQKNIYSEELRETKRRHETRLVEIDNGKQREFESRLADALQELRAQHEDQVEQYKKELEKTYSAKLDNARQSAERNSNLVGAAHEELQQSRIRIDSLSAQLSQLQKQLAAKEAKLRDLEDSLARERDTSRRLLAEKEREMAEMRARMQQQLDEYQELLDIKLALDMEIHAYRKLLEGEEERLRLSPSPTSQRSRGRASSHSSQTQGGGSVTKKRKLESTESRSSFSQHARTSGRVAVEEVDEEGKFVRLRNKSNEAWLLDSLAVRP

SEQ ID NO: 175 - protein, 359 aa, Artificial Sequence
  Synthetic polypeptide
MGNSEGCNTKKEGDLIAAQARLKDLEALLNSKEAALSTALSEKRTLEGELHDLRGQVAKLEAALGEAKKQLQDEMLRRVDAENRLQTMKEELDFQKNIYSEELRETKRRHETRLVEIDNGKQREFESRLADALQELRAQHEDQVEQYKKELEKTYSAKLDNARQSAERNSNLVGAAHEELQQSRIRIDSLSAQLSQLQKQLAAKEAKLRDLEDSLARERDTSRRLLAEKEREMAEMRARMQQQLDEYQELLDIKLALDMEIHAYRKLLEGEEERLRLSPSPTSQRSRGRASSHSSQTQGGGSVTKKRKLESTESRSSFSQHARTSGRVAVEEVDEEGKFVRLRNKSNEAWLLDSLAVRP

SEQ ID NO: 176 - protein, 390 aa, Artificial Sequence
  Synthetic polypeptide
MQPLLCLGNLEDARERTGTLLAQHPAWGRTRAKPGSPLNTKKEGDLIAAQARLKDLEALLNSKEAALSTALSEKRTLEGELHDLRGQVAKLEAALGEAKKQLQDEMLRRVDAENRLQTMKEELDFQKNIYSEELRETKRRHETRLVEIDNGKQREFESRLADALQELRAQHEDQVEQYKKELEKTYSAKLDNARQSAERNSNLVGAAHEELQQSRIRIDSLSAQLSQLQKQLAAKEAKLRDLEDSLARERDTSRRLLAEKEREMAEMRARMQQQLDEYQELLDIKLALDMEIHAYRKLLEGEEERLRLSPSPTSQRSRGRASSHSSQTQGGGSVTKKRKLESTESRSSFSQHARTSGRVAVEEVDEEGKFVRLRNKSNEAWLLDSLAVRP

SEQ ID NO: 177 - protein, 372 aa, Artificial Sequence
  Synthetic polypeptide
MDLEAWDPHLEPDAEAMVDGNTKKEGDLIAAQARLKDLEALLNSKEAALSTALSEKRTLEGELHDLRGQVAKLEAALGEAKKQLQDEMLRRVDAENRLQTMKEELDFQKNIYSEELRETKRRHETRLVEIDNGKQREFESRLADALQELRAQHEDQVEQYKKELEKTYSAKLDNARQSAERNSNLVGAAHEELQQSRIRIDSLSAQLSQLQKQLAAKEAKLRDLEDSLARERDTSRRLLAEKEREMAEMRARMQQQLDEYQELLDIKLALDMEIHAYRKLLEGEEERLRLSPSPTSQRSRGRASSHSSQTQGGGSVTKKRKLESTESRSSFSQHARTSGRVAVEEVDEEGKFVRLRNKSNEAWLLDSLAVRP

SEQ ID NO: 178 - protein, 97 aa, Artificial Sequence
  Synthetic polypeptide
AYRKLLEGEEERLRLSPSPTSQRSRGRASSHSSQTQGGGSVTKKRKLESTESRSSFSQHARTSGRVAVEEVDEEGKFVRLRNKSNEAWLLDSLAVRP

SEQ ID NO: 179 - protein, 58 aa, Artificial Sequence
  Synthetic polypeptide
MAEASSANLGSGCEEKRHEGSSSESVPPGTTISRVKLLDTMVDTFLQKLVAAGSDSCL

SEQ ID NO: 180 - protein, 5 aa, Artificial Sequence
  Synthetic polypeptide
QVAPI

SEQ ID NO: 181 - protein, 59 aa, Artificial Sequence
  Synthetic polypeptide
MAEASSANLGSGCEEKRHEGSSSESVPPGTTISRVKLLDTMVDTFLQKLVAAGSPFSSS

SEQ ID NO: 182 - protein, 5 aa, Artificial Sequence
  Synthetic polypeptide
QVAPI

SEQ ID NO: 183 - protein, 91 aa, Artificial Sequence
  Synthetic polypeptide
MAEASSANLGSGCEEKRHEGSSSESVPPGTTISRVKLLDTMVDTFLQKLVAAGRLICSPFDGRNCTVSSLGLYHQAWPGTWSVLSKYLLNE

SEQ ID NO: 184 - protein, 5 aa, Artificial Sequence
  Synthetic polypeptide
QVAPI

SEQ ID NO: 185 - protein, 241 aa, Artificial Sequence
  Synthetic polypeptide
MSQGPPTGESSEPEAKVLHTKRLYRAVVEAVHRLDLILCNKTAYQEVFKPENISLRNKLRELCVKLMFLHPVDYGRKAEELLWRKVYYEVIQLIKTNKKHIHSRSTLECAYRTHLVAGIGFYQHLLLYIQSHYQLELQCCIDWTHVTDPLIGCKKPVSASGKEMDWAQMACHRCLVYLGDLSRYQNELAGVDTELLAERFYYQALSVAPQIGMPFNQLGTLAGSKYYNVEAMYCYLRWRIT

SEQ ID NO: 186 - protein, 241 aa, Artificial Sequence; identical to SEQ ID NO: 185
  Synthetic polypeptide

SEQ ID NO: 187 - protein, 41 aa, Artificial Sequence
  Synthetic polypeptide
MMGHRPVLVLSQNTKRESGRKVQSGNINAAKILDRYSVNVF

SEQ ID NO: 188 - protein, 65 aa, Artificial Sequence
  Synthetic polypeptide
MYEGDLEGQSMNWTSEEGRGDIIRSGTNIDRAWQCQNTKRESGRKVQSGNINAAKILDRYSVNVF

SEQ ID NO: 189 - protein, 34 aa, Artificial Sequence
  Synthetic polypeptide
MMGHRPVLVLSQNTKRESGRKVQSGNINAAKCPP

SEQ ID NO: 190 - protein, 58 aa, Artificial Sequence
  Synthetic polypeptide
MYEGDLEGQSMNWTSEEGRGDIIRSGTNIDRAWQCQNTKRESGRKVQSGNINAAKCPP

SEQ ID NO: 191 - protein, 457 aa, Artificial Sequence
  Synthetic polypeptide
MKAYLKSAEGFFVLNKSTTIGRHENSDLVLQSPDIDNHHALIEYNEAECSFVLQDFNSRNGTFVNECHIQNVAVKLIPGDILRFGSAGLTYELVIENPPPVSFPWMRGPAPWPGPQPPRATQQPNQAPPPSHIPFHQGVQPAPMQRSWSQAFPRPTVVLPASHRRPVSANKEMFSFVVDDARKPPVIKQVWTNAMKLSEKSVAEGIPGAVPPAEIYVEEDLAQQDKDEIILLLGKEVSRLSDYEIESKYKDVIIANLQNEVAELSQKVSETTTSRQNEKEISQKCQVLDEDIDAKQKEIQSLKSQISALQKGYSKVLCQTLSERNSEITSLKNEGENLKRDNAITSGMVSSLQKDILAKDEQVQQLKEEVSHLKSQNKDKDHQLEALGSRCSVLKEELKQEDAHRELREAQEKELKLCKTQIQDMEKEMKKLRAELRKSCTEQSVISRTLREKSKVQ

SEQ ID NO: 192 - skipped

SEQ ID NO: 193 - protein, 163 aa, Artificial Sequence
  Synthetic polypeptide
MILRPPRPCGTISALQKGYSKVLCQTLSERNSEITSLKNEGENLKRDNAITSGMVSSLQKDILAKDEQVQQLKEEVSHLKSQNKDKDHQLEALGSRCSVLKEELKQEDAHRELREAQEKELKLCKTQIQDMEKEMKKLRAELRKSCTEQSVISRTLREKSKVQ

SEQ ID NO: 194 - protein, 1124 aa, Artificial Sequence
  Synthetic polypeptide
MERRAAGPGWAAYERLTAEEMDEQRRQNVAYQYLCRLEEAKRWMEACLKEELPSPVELEESLRNGVLLAKLGHCFAPSVVPLKKIYDVEQLRYQATGLHFRHTDNINFWLSAIAHIGLPSTFFPETTDIYDKKNMPRVVYCIHALSLFLFRLGLAPQIHDLYGKVKFTAEELSNMASELAKYGLQLPAFSKIGGILANELSVDEAAVHAAVLAINEAVERGVVEDTLAALQNPSALLENLREPLAAVYQEMLAQAKMEKAANARNHDDRESQDIYDHYLTQAEIQGNINHVNVHGALEVVDDALERQSPEALLKALQDPALALRGVRRDFADWYLEQLNSDREQKAQELGLVELLEKEEVQAGVAAANTKGDQEQAMLHAVQRINKAIRRRVAADTVKELMCPEAQLPPVYPVASSMYQLELAVLQQQQGELGQEELFVAVEMLSAVVLINRALEARDASGFWSSLVNPATGLAEVEGENAQRYFDALLKLRQERGMGEDFLSWNDLQATVSQVNAQTQEETDRVLAVSLINEALDKGSPEKTLSALLLPAAGLDDVSLPVAPRYHLLLVAAKRQKAQVTGDPGAVLWLEEIRQGVVRANQDTNTAQRMALGVAAINQAIKEGKAAQTERVLRNPAVALRGVVPDCANGYQRALESAMAKKQRPADTAFWVQHDMKDGTAYYFHLQTFQGIWEQPPGCPLNTSHLTREEIQSAVTKVTAAYDRQQLWKANVGFVIQLQARLRGFLVRQKFAEHSHFLRTWLPAVIKIQAHWRGYRQRKIYLEWLQYFKANLDAIIKIQAWARMWAARRQYLRRLHYFQKNVNSIVKIQAFFRARKAQDDYRILVHAPHPPLSVVRRFAHLLNQSQQDFLAEAELLKLQEEVVRKIRSNQQLEQDLNIMDIKIGLLVKNRITLQEVVSHCKKLTKRNKEQLSDMMVLDKQKGLKSLSKEKRQKLEAYQHLFYLLQTQPIYLAKLIFQMPQNKTTKFMEAVIFSLYNYASSRREAYLLLQLFKTALQEEIKSKVEQPQDVVTGNPTVVRLVVRFYRNGRGQSALQEILGKVIQDVLEDKVLSVHTDPVHLYKNWINQTEAQTGQRRSGVVAHACNPSTLGDRGRRITRSGDRDYPG

SEQ ID NO: 195 - protein, 1081 aa, Artificial Sequence
  Synthetic polypeptide
MEACLKEELPSPVELEESLRNGVLLAKLGHCFAPSVVPLKKIYDVEQLRYQATGLHFRHTDNINFWLSAIAHIGLPSTFFPETTDIYDKKNMPRVVYCIHALSLFLFRLGLAPQIHDLYGKVKFTAEELSNMASELAKYGLQLPAFSKIGGILANELSVDEAAVHAAVLAINEAVERGVVEDTLAALQNPSALLENLREPLAAVYQEMLAQAKMEKAANARNHDDRESQDIYDHYLTQAEIQGNINHVNVHGALEVVDDALERQSPEALLKALQDPALALRGVRRDFADWYLEQLNSDREQKAQELGLVELLEKEEVQAGVAAANTKGDQEQAMLHAVQRINKAIRRRVAADTVKELMCPEAQLPPVYPVASSMYQLELAVLQQQQGELGQEELFVAVEMLSAVVLINRALEARDASGFWSSLVNPATGLAEVEGENAQRYFDALLKLRQERGMGEDFLSWNDLQATVSQVNAQTQEETDRVLAVSLINEALDKGSPEKTLSALLLPAAGLDDVSLPVAPRYHLLLVAAKRQKAQVTGDPGAVLWLEEIRQGVVRANQDTNTAQRMALGVAAINQAIKEGKAAQTERVLRNPAVALRGVVPDCANGYQRALESAMAKKQRPADTAFWVQHDMKDGTAYYFHLQTFQGIWEQPPGCPLNTSHLTREEIQSAVTKVTAAYDRQQLWKANVGFVIQLQARLRGFLVRQKFAEHSHFLRTWLPAVIKIQAHWRGYRQRKIYLEWLQYFKANLDAIIKIQAWARMWAARRQYLRRLHYFQKNVNSIVKIQAFFRARKAQDDYRILVHAPHPPLSVVRRFAHLLNQSQQDFLAEAELLKLQEEVVRKIRSNQQLEQDLNIMDIKIGLLVKNRITLQEVVSHCKKLTKRNKEQLSDMMVLDKQKGLKSLSKEKRQKLEAYQHLFYLLQTQPIYLAKLIFQMPQNKTTKFMEAVIFSLYNYASSRREAYLLLQLFKTALQEEIKSKVEQPQDVVTGNPTVVRLVVRFYRNGRGQSALQEILGKVIQDVLEDKVLSVHTDPVHLYKNWINQTEAQTGQRRSGVVAHACNPSTLGDRGRRITRSGDRDYPG

SEQ ID NO: 196 - protein, 399 aa, Artificial Sequence
  Synthetic polypeptide
MERRAAGPGWAAYERLTAEEMDEQRRQNVAYQYLCRLEEAKRWMEACLKEELPSPVELEESLRNGVLLAKLGHCFAPSVVPLKKIYDVEQLRYQATGLHFRHTDNINFWLSAIAHIGLPSTFFPETTDIYDKKNMPRVVYCIHALSLFLFRLGLAPQIHDLYGKVKFTAEELSNMASELAKYGLQLPAFSKIGGILANELSVDEAAVHAAVLAINEAVERGVVEDTLAALQNPSALLENLREPLAAVYQEMLAQAKMEKAANARNHDDRESQDIYDHYLTQAEIQGNINHVNVHGALEVVDDALERQSPEALLKALQDPALALRGVRRDFADWYLEQLNSDREQKAQLVWWHTLVIPATWKASAENRLNPGGRGCREPRLCHCTPAWETEQDSILKKKK

SEQ ID NO: 197 - protein, 356 aa, Artificial Sequence
  Synthetic polypeptide
MEACLKEELPSPVELEESLRNGVLLAKLGHCFAPSVVPLKKIYDVEQLRYQATGLHFRHTDNINFWLSAIAHIGLPSTFFPETTDIYDKKNMPRVVYCIHALSLFLFRLGLAPQIHDLYGKVKFTAEELSNMASELAKYGLQLPAFSKIGGILANELSVDEAAVHAAVLAINEAVERGVVEDTLAALQNPSALLENLREPLAAVYQEMLAQAKMEKAANARNHDDRESQDIYDHYLTQAEIQGNINHVNVHGALEVVDDALERQSPEALLKALQDPALALRGVRRDFADWYLEQLNSDREQKAQLVWWHTLVIPATWKASAENRLNPGGRGCREPRLCHCTPAWETEQDSILKKKK

SEQ ID NO: 198 - protein, 149 aa, Artificial Sequence
  Synthetic polypeptide
MNVTPEVKSRGMKFAEEQLLKHGWTQGKGLGRKENGITQALRVTLKQDTHGVGHDPAKEFTNHWWNELFNKTAANLVVETGQDGVQIRSLSKETTRYNHPKPNLLYQKFVKMATLTSGGEKPNKDLESCSDDDNQGSKSPKITSKSARS

SEQ ID NO: 199 - protein, 154 aa, Artificial Sequence
  Synthetic polypeptide
MFPRSGPSNDEVKSRGMKFAEEQLLKHGWTQGKGLGRKENGITQALRVTLKQDTHGVGHDPAKEFTNHWWNELFNKTAANLVVETGQDGVQIRSLSKETTRYNHPKPNLLYQKFVKMATLTSGGEKPNKDLESCSDDDNQGSKSPKITSKSARS

SEQ ID NO: 200 - protein, 120 aa, Artificial Sequence
  Synthetic polypeptide
MNVTPEVKSRGMKFAEEQLLKHGWTQGKGLGRKENGITQALRVTLKQDTHGVGHDPAKEFTNHWWNELFNKTAANLVVETGQMATLTSGGEKPNKDLESCSDDDNQGSKSPKITSKSARS

SEQ ID NO: 201 - protein, 18 aa, Artificial Sequence
  Synthetic polypeptide
MFPRSGPSNDGLSRLNEL

SEQ ID NO: 202 - protein, 49 aa, Artificial Sequence
  Synthetic polypeptide
MLLWSLLVIFDAVTEQAERKVGSLQPRRWPSSQPDNAGTLTSDFQRPEL

SEQ ID NO: 203 - protein, 70 aa, Artificial Sequence
  Synthetic polypeptide
MLSLLVWILTLSDTFSQGKLLLIPRILSKTSLPTGFVPAPQVLSSMLPHHGRCRTVWTWCLGMSTRLEAG

SEQ ID NO: 204 - protein, 231 aa, Artificial Sequence
  Synthetic polypeptide
MLSLLVWILTLSDTFSQGTQTRFSQEPADQTVVAGQRAVLPCVLLNYSGIVQWTKDGLALGMGQGLKAWPRYRVVGSADAGQYNLEITDAELSDDASYECQATEAALRSRRAKLTVLIPPEDTRIDGGPVILLQAGTPHNLTCRAFNAKPAATIIWFRDGTQQEGAVASTELLKDGKRETTVSQLLINPTDLDIGRVFTCRSMNEAIPSGKETSIELDVHLLRVSNKGLWT

SEQ ID NO: 205 - protein, 131 aa, Artificial Sequence
  Synthetic polypeptide
MLSLLVWILTLSDTFSQVPPEDTRIDGGPVILLQAGTPHNLTCRAFNAKPAATIIWFRDGTQQEGAVASTELLKDGKRETTVSQLLINPTDLDIGRVFTCRSMNEAIPSGKETSIELDVHLLRVSNKGLWT

SEQ ID NO: 206 - protein, 29 aa, Artificial Sequence
  Synthetic polypeptide
MNEAIPSGKETSIELDVHLLRVSNKGLWT

SEQ ID NO: 207 - protein, 556 aa, Artificial Sequence
  Synthetic polypeptide
MEVRKLSISWQFLIVLVLILQILSALDFDPYRVLGVSRTASQADIKKAYKKLAREWHPDKNKDPGAEDKFIQISKAYEILSNEEKRSNYDQYGDAGENQGYQKQQQQREYRFRHFHENFYFDESFFHFPFNSERRDSIDEKYLLHFSHYVNEVVPDSFKKPYLIKITSDWCFSCIHIEPVWKEVIQELEELGVGIGVVHAGYERRLAHHLGAHSTPSILGIINGKISFFHNAVVRENLRQFVESLLPGNLVEKVTNKNYVRFLSGWQQENKPHVLLFDQTPIVPLLYKLTAFAYKDYLSFGYVYVGLRGTEEMTRRYNINIYAPTLLVFKEHINRPADVIQARGMKKQIIDDFITRNKYLLAARLTSQKLFHELCPVKRSHRQRKYCVVLLTAETTKLSKPFEAFLSFALANTQDTVRFVHVYSNRQQEFADTLLPDSEAFQGKSAVSILERRNTAGRVVYKTLEDPWIGSESDKFILLGYLDQLRKDPALLSSEAVLPDLTDELAPVFLLRWFYSASDYISDCWDSIFHNNWEPLVPSTGPDTRGVQCIDVKGMS

SEQ ID NO: 208 - protein, 2 aa, Artificial Sequence
  Synthetic polypeptide
MT

SEQ ID NO: 209 - protein, 457 aa, Artificial Sequence
  Synthetic polypeptide
MANNYKKIVLLKGLEVINDYHFRIVKSLLSNDLKLNPKMKEEYDKIQIADLMEEKFPGDAGLGKLIEFFKEIPTLGDLAETLKREKLKVANKIESIPVKGIIPSKKTKQKEVYPATPACTPSNRLTAKGAEETLGPQKRKKPSEEETGTKRSKMSKEQTRPSCSAGASTSTAMGRSPPPQTSSSAPPNTSSTESLKPLANRHATASKNIFREDPIIAMVLNATKVFKYESSENEQRRMFHATVATQTQFFHVKVLNINLKRKFIKKRIIIISNYSKRNSLLEVNEASSVSEAGPDQTFEVPKDIIRRAKKIPKINILHKQTSGYIVYGLFMLHTKIVNRKTTIYEIQDKTGSMAVVGKGECHNIPCEKGDKLRLFCFRLRKRENMSKLMSEMHSFIQIQKNTNQRSHDSRSMALPQEQSQHPKPSEASTTLPESHLKTPQMPPTTPSSSSFTKRERL

SEQ ID NO: 210 - protein, 448 aa, Artificial Sequence
  Synthetic polypeptide
MANNYKKIVLLKGLEVINDYHFRIVKSLLSNDLKLNPKMKEEYDKIQIADLMEEKFPGDAGLGKLIEFFKEIPTLGDLAETLKREKLKVKGIIPSKKTKQKEVYPATPACTPSNRLTAKGAEETLGPQKRKKPSEEETGTKRSKMSKEQTRPSCSAGASTSTAMGRSPPPQTSSSAPPNTSSTESLKPLANRHATASKNIFREDPIIAMVLNATKVFKYESSENEQRRMFHATVATQTQFFHVKVLNINLKRKFIKKRIIIISNYSKRNSLLEVNEASSVSEAGPDQTFEVPKDIIRRAKKIPKINILHKQTSGYIVYGLFMLHTKIVNRKTTIYEIQDKTGSMAVVGKGECHNIPCEKGDKLRLFCFRLRKRENMSKLMSEMHSFIQIQKNTNQRSHDSRSMALPQEQSQHPKPSEASTTLPESHLKTPQMPPTTPSSSSFTKRERL

SEQ ID NO: 211 - protein, 138 aa, Artificial Sequence
  Synthetic polypeptide
MGMLAPGPLQGRRPRKGHKGQEDAVAPGCKASGRGSRVTHLLGYPTQNVSRSLRRKYAPPPCGGPEDVALAPCTAAAACEAGPSPVYVKVKSAEPADCAEGPVQCKNGLLVIPAITSFSCLHSRHLQSILHAAASVIF

SEQ ID NO: 212 - protein, 441 aa, Artificial Sequence
  Synthetic polypeptide
MRVGGAFHLLLVCLSPALLSAVRINGDGQEVLYLAEGDNVRLGCPYVLDPEDYGPNGLDIEWMQVNSDPAHHRENVFLSYQDKRINHGSLPHLQQRVRFAASDPSQYDASINLMNLQVSDTATYECRVKKTTMATRKVIVTVQARPAVPMCWTEGHMTYGNDVVLKCYASGGSQPLSYKWAKISGHHYPYRAGSYTSQHSYHSELSYQESFHSSINQGLNNGDLVLKDISRADDGLYQCTVANNVGYSVCVVEVKVSDSRRIGVIIGIVLGSLLALGCLAVGIWGLVCCCCGGSGAGGARGAFGYGNGGGVGGGACGDLASEIREDAVAPGCKASGRGSRVTHLLGYPTQNVSRSLRRKYAPPPCGGPEDVALAPCTAAAACEAGPSPVYVKVKSAEPADCAEGPVQCKNGLLVIPAITSFSCLHSRHLQSILHAAASVIF

SEQ ID NO: 213 - protein, 901 aa, Artificial Sequence
  Synthetic polypeptide
MLTKFETKSARVKGLSFHPKRPWILTSLHNGVIQLWDYRMCTLIDKFDEHDGPVRGIDFHKQQPLFVSGGDDYKIKVWNYKLRRCLFTLLGHLDYIRTTFFHHEYPWILSASDDQTIRVWNWQSRTCVCVLTGHNHYVMCAQFHPTEDLVVSASLDQTVRVWDISGLRKKNLSPGAVESDVRGITGVDLFGTTDAVVKHVLEGHDRGVNWAAFHPTMPLIVSGADDRQVKIWRMNESKAWEVDTCRGHYNNVSCAVFHPRQELILSNSEDKSIRVWDMSKRTGVQTFRRDHDRFWVLAAHPNLNLFAAGHDGGMIVFKLERERPAYAVHGNMLHYVKDRFLRQLDFNSSKDVAVMQLRSGSKFPVFNMSYNPAENAVLLCTRASNLENSTYDLYTIPKDADSQNPDAPEGKRSSGLTAVWVARNRFAVLDRMHSLLIKNLKNEITKKVQVPNCDEIFYAGTGNLLLRDADSITLFDVQQKRTLASVKISKVKYVIWSADMSHVALLAKHEHSCPLPLTAIVICNRKLDALCNIHENIRVKSGAWDESGVFIYTTSNHIKYAVTTGDHGIIRTLDLPIYVTRVKGNNVYCLDRECRPRVLTIDPTEFKFKLALINRKYDEVLHMVRNAKLVGQSIIAYLQKKGYPEVALHFVKDEKTRFSLALECGNIEIALEAAKALDDKNCWEKLGEVALLQGNHQIVEMCYQRTKNFDKLSFLYLITGNLEKLRKMMKIAEIRKDMSGHYQNALYLGDVSERVRILKNCGQKSLAYLTAATHGLDEEAESLKETFDPEKETIPDIDPNAKLLQPPAPIMPLDTNWPLLTVSKGFFEGTIASKGKGGALAADIDIDTVGTEGWGEDAELQLDEDGFVEATEGLGDDALGKGQEEGGGWDVEEDLELPPEL

SEQ ID NO: 214 - protein, 892 aa, Artificial Sequence
  Synthetic polypeptide
MLTKFETKSARVKGLSFHPKRPWILTSLHNGVIQLWDYRMCTLIDKFDEHDGPVRGIDFHKQQPLFVSGGDDYKIKVWNYKLRRCLFTLLGHLDYIRTTFFHHEYPWILSASDDQTIRVWNWQSRTCVCVLTGHNHYVMCAQFHPTEDLVVSASLDQTVRVWDISGLRKKNLSPGAVESDVRGITGVDLFGTTDAVVKHVLEGHDRGVNWAAFHPTMPLIVSGADDRQVKIWRMNESKAWEVDTCRGHYNNVSCAVFHPRQELILSNSEDKSIRVWDMSKRTGVQTFRRDHDRFWVLAAHPNLNLFAAGHDGGMIVFKLERERPAYAVHGNMLHYVKDRFLRQLDFNSSKDVAVMQLRSGSKFPVFNMSYNPAENAVLLCTRASNLENSTYDLYTIPKDADSQNPDAPEGKRSSGLTAVWVARNRFAVLDRMHSLLIKNLKNEITKKVQVPNCDEIFYAGTGNLLLRDADSITLFDVQQKRTLASVKISKVKYVIWSADMSHVALLAKHAIVICNRKLDALCNIHENIRVKSGAWDESGVFIYTTSNHIKYAVTTGDHGIIRTLDLPIYVTRVKGNNVYCLDRECRPRVLTIDPTEFKFKLALINRKYDEVLHMVRNAKLVGQSIIAYLQKKGYPEVALHFVKDEKTRFSLALECGNIEIALEAAKALDDKNCWEKLGEVALLQGNHQIVEMCYQRTKNFDKLSFLYLITGNLEKLRKMMKIAEIRKDMSGHYQNALYLGDVSERVRILKNCGQKSLAYLTAATHGLDEEAESLKETFDPEKETIPDIDPNAKLLQPPAPIMPLDTNWPLLTVSKGFFEGTIASKGKGGALAADIDIDTVGTEGWGEDAELQLDEDGFVEATEGLGDDALGKGQEEGGGWDVEEDLELPPEL

SEQ ID NO: 215 - protein, 39 aa, Artificial Sequence
  Synthetic polypeptide
MCSRGWDSCLALELLLLPLSLLVTSIQGGSSINQKSTHS

SEQ ID NO: 216 - protein, 362 aa, Artificial Sequence
  Synthetic polypeptide
MASKPEKRVASSVFITLAPPRRDVAVAEEVRQAVCEARRGRPWEAPAPMKTPEAGLAGRPSPWTTPGRAAATVPAAPMQLFNGGCPPPPPVLDGEDVLPDLDLLPPPPPPPPVLLPSEEEAPAPMGASLIADLEQLHLSPPPPPPQAPAEGPSVQPGPLRPMEEELPPPPAEPVEKGASTDICAFCHKTVSPRELAVEAMKRQYHAQCFTCRTCRRQLAGQSFYQKDGRPLCEPCYQDTLERCGKCGEVVRDHIIRALGQAFHPSCFTCVTCARCIGDESFALGSQNEVYCLDDFYRKFAPVCSICENPIIPRDGKDAFKIECMGRNFHENCYRCEARRGGSCLYTQHFGRPRRADHLRLGV

SEQ ID NO: 217 - protein, 265 aa, Artificial Sequence
  Synthetic polypeptide
MASKPEKRVASSVFITLAPPRRDVAVAEEVRQAVCEARRGRPWEAPAPMKTPEAGLAGRPSPWTTPGRAAATVPAAPMQLFNGDICAFCHKTVSPRELAVEAMKRQYHAQCFTCRTCRRQLAGQSFYQKDGRPLCEPCYQDTLERCGKCGEVVRDHIIRALGQAFHPSCFTCVTCARCIGDESFALGSQNEVYCLDDFYRKFAPVCSICENPIIPRDGKDAFKIECMGRNFHENCYRCEARRGGSCLYTQHFGRPRRADHLRLGV

SEQ ID NO: 218 - protein, 264 aa, Artificial Sequence
  Synthetic polypeptide
MAPGAPSSSPSPILAVLLFSSLVLSPAQAIVVYTDREVHGAVGSRVTLHCSFWSSEWVSDDISFTWRYQPEGGRDAISIFHYAKGQPYIDEVGTFKERIQWVGDPRWKDGSIVIHNLDYSDNGTFTCDVKNPPDIVGKTSQVTLYVFEKVPTRYGVVLGAVIGGVLGVVLLLLLLFYVVRYCWLRRQAALQRRLSAMEKGKLHKPGKDASKRGRQQPALASQSAEIAASAWLPPHLGSEERLCLAAHRLGCEERLFPAAIPSRK

SEQ ID NO: 219 - protein, 274 aa, Artificial Sequence
  Synthetic polypeptide
MLRAPAPAPAMAPGAPSSSPSPILAVLLFSSLVLSPAQAIVVYTDREVHGAVGSRVTLHCSFWSSEWVSDDISFTWRYQPEGGRDAISIFHYAKGQPYIDEVGTFKERIQWVGDPRWKDGSIVIHNLDYSDNGTFTCDVKNPPDIVGKTSQVTLYVFEKVPTRYGVVLGAVIGGVLGVVLLLLLLFYVVRYCWLRRQAALQRRLSAMEKGKLHKPGKDASKRGRQQPALASQSAEIAASAWLPPHLGSEERLCLAAHRLGCEERLFPAAIPSRK

SEQ ID NO: 220 - protein, 68 aa, Artificial Sequence
  Synthetic polypeptide
MEKGKLHKPGKDASKRGRQQPALASQSAEIAASAWLPPHLGSEERLCLAAHRLGCEERLFPAAIPSRK

SEQ ID NO: 221 - protein, 227 aa, Artificial Sequence
  Synthetic polypeptide
MAPGAPSSSPSPILAVLLFSSLVLSPAQAIVVYTDREVHGAVGSRVTLHCSFWSSEWVSDDISFTWRYQPEGGRDAISIFHYAKGQPYIDEVGTFKERIQWVGDPRWKDGSIVIHNLDYSDNGTFTCDVKNPPDIVGKTSQVTLYVFEKVPTRYGVVLGAVIGGVLGVVLLLLLLFYVVRYCWLRRQAALQRRLSAMEKGKLHKPGKDASKRGRQGFAVLVGLVSSS

SEQ ID NO: 222 - protein, 237 aa, Artificial Sequence
  Synthetic polypeptide
MLRAPAPAPAMAPGAPSSSPSPILAVLLFSSLVLSPAQAIVVYTDREVHGAVGSRVTLHCSFWSSEWVSDDISFTWRYQPEGGRDAISIFHYAKGQPYIDEVGTFKERIQWVGDPRWKDGSIVIHNLDYSDNGTFTCDVKNPPDIVGKTSQVTLYVFEKVPTRYGVVLGAVIGGVLGVVLLLLLLFYVVRYCWLRRQAALQRRLSAMEKGKLHKPGKDASKRGRQGFAVLVGLVSSS

SEQ ID NO: 223 - protein, 31 aa, Artificial Sequence
  Synthetic polypeptide
MEKGKLHKPGKDASKRGRQGFAVLVGLVSSS

SEQ ID NO: 224 - protein, 230 aa, Artificial Sequence
  Synthetic polypeptide
MAPGAPSSSPSPILAVLLFSSLVLSPAQAIVVYTDREVHGAVGSRVTLHCSFWSSEWVSDDISFTWRYQPEGGRDAISIFHYAKGQPYIDEVGTFKERIQWVGDPRWKDGSIVIHNLDYSDNGTFTCDVKNPPDIVGKTSQVTLYVFEKVPTRYGVVLGAVIGGVLGVVLLLLLLFYVVRYCWLRRQAALQRRLSAMEKGKLHKPGKDASKRGRQGFYNNQMRSCVWKTL

SEQ ID NO: 225 - protein, 240 aa, Artificial Sequence
  Synthetic polypeptide
MLRAPAPAPAMAPGAPSSSPSPILAVLLFSSLVLSPAQAIVVYTDREVHGAVGSRVTLHCSFWSSEWVSDDISFTWRYQPEGGRDAISIFHYAKGQPYIDEVGTFKERIQWVGDPRWKDGSIVIHNLDYSDNGTFTCDVKNPPDIVGKTSQVTLYVFEKVPTRYGVVLGAVIGGVLGVVLLLLLLFYVVRYCWLRRQAALQRRLSAMEKGKLHKPGKDASKRGRQGFYNNQMRSCVWKTL

SEQ ID NO: 226 - protein, 34 aa, Artificial Sequence
  Synthetic polypeptide
MEKGKLHKPGKDASKRGRQGFYNNQMRSCVWKTL

SEQ ID NO: 227 - protein, 167 aa, Artificial Sequence
  Synthetic polypeptide
MAALLLRHVGRHCLRAHFSPQLCIRNAVPLGTTAKEEMERFWNKNIGSNRPLSPHITIYSWSLPMAMSICHRGTGIALSAGVSLFGMSALLLPGNFESYLELVKSLCLGPALIHTAKFALVFPLMYHTWNGIRHLKEEVKTKRQKWNPQADSPALRLRLVVKHQPLT

SEQ ID NO: 228 - protein, 133 aa, Artificial Sequence
  Synthetic polypeptide
MAALLLRHVGRHCLRAHFSPQLCIRNWSLPMAMSICHRGTGIALSAGVSLFGMSALLLPGNFESYLELVKSLCLGPALIHTAKFALVFPLMYHTWNGIRHLKEEVKTKRQKWNPQADSPALRLRLVVKHQPLT

SEQ ID NO: 229 - protein, 114 aa, Artificial Sequence
  Synthetic polypeptide
MAALLLSWSLPMAMSICHRGTGIALSAGVSLFGMSALLLPGNFESYLELVKSLCLGPALIHTAKFALVFPLMYHTWNGIRHLKEEVKTKRQKWNPQADSPALRLRLVVKHQPLT

SEQ ID NO: 230 - protein, 274 aa, Artificial Sequence
  Synthetic polypeptide
MTMETQMSQNVCPRNLWLLQPLTVLLLLASADSQAAPPKAVLKLEPPWINVLQEDSVTLTCQGARSPESDSIQWFHNGNLIPTHTQPSYRFKANNNDSGEYTCQTGQTSLSDPVHLTVLSEWLVLQTPHLEFQEGETIMLRCHSWKDKPLVKVTFFQNGKSQKFSHLDPTFSIPQANHSHSGDYHCTGNIGYTLFSSKPVTITVQVPSMGSSSPMGIIVAVVIATAVAAIVAAVVALIYCRKKRISANSTDPVKAAQFELLYLPPRCIELSYGF

SEQ ID NO: 231 - protein, 275 aa, Artificial Sequence
  Synthetic polypeptide
MTMETQMSQNVCPRNLWLLQPLTVLLLLASADSQAAAPPKAVLKLEPPWINVLQEDSVTLTCQGARSPESDSIQWFHNGNLIPTHTQPSYRFKANNNDSGEYTCQTGQTSLSDPVHLTVLSEWLVLQTPHLEFQEGETIMLRCHSWKDKPLVKVTFFQNGKSQKFSHLDPTFSIPQANHSHSGDYHCTGNIGYTLFSSKPVTITVQVPSMGSSSPMGIIVAVVIATAVAAIVAAVVALIYCRKKRISANSTDPVKAAQFELLYLPPRCIELSYGF

SEQ ID NO: 232 - protein, 5 aa, Artificial Sequence
  Synthetic polypeptide
IPLIL

SEQ ID NO: 233 - protein, 612 aa, Artificial Sequence
  Synthetic polypeptide
MGEPAGVAGTMESPFSPGLFHRLDEDWDSALFAELGYFTDTDELQLEAANETYENNFDNLDFDLDLMPWESDIWDINNQICTVKDIKAEPQPLSPASSSYSVSSPRSVDSYSSTQHVPEELDLSSSSQMSPLSLYGENSNSLSSAEPLKEDKPVTGPRNKTENGLTPKKKIQVNSKPSIQPKPLLLPAAPKTQTNSSVPAKTIIIQTVPTLMPLAKQQPIISLQPAPTKGQTVLLSQPTVVQLQAPGVLPSAQPVLAVAGGVTQLPNHVVNVVPAPSANSPVNGKLSVTKPVLQSTMRNVGSDIAVLRRQQRMIKNRESACQSRKKKKEYMLGLEARLKAALSENEQLKKENGTLKRQLDEVVSENQRLKVPSPKRRVVCVMIVLAFIILNYGPMSMLEQDSRRMNPSVSPANQRRHLLGFSAKEAQDTSDGIIQKNSYRYDHSVSNDKALMVLTEEPLLYIPPPPCQPLINTTESLRLNHELRGWVHRHEVERTKSRRMTNNQQKTRILQGALEQGSNSQLMAVQYTETTSSISRNSGSELQVYYASPRSYQDFFEAIRRRGDTFYVVSFRRLEVLLPDSLLQELPCPQLKTTLKDLSQFSMGSTEALRLY

SEQ ID NO: 234 - protein, 492 aa, Artificial Sequence
  Synthetic polypeptide
MAKPRLLVLYFALIVVPAWVSSIVLTGTSEPPDAQTVAPAEDETLQNEADNQENVLSQLLGDYDKVKAMSEGSDCQCKCVVRPLGRDACQRINAGASRKEDFYTVETITSGSSCKCACVAPPSALNPCEGDFRLQKLREADSQDLKLSTIIDMLEGAFYGLDLLKLHSVTTKLVGRVDKLEEEVSKNLTKENEQIKEDMEEIRTEMNKRGKENCSENILDSMPDIRSALQRDAAAAYAHPEYEERFLQEETVSQQINSIELLQTRPLALPEVVKSQRPLQRQVHLRGRPASQPTVIRGITYYKAKVSEEENDIEEQQDEFFSGDNGVDLLIEDQLLRHNGLMTSVTRRPAATRQGHSTAVTSDLNARTAPWSSALPQPSTSDPSIANHASVGPTLQTTSVSPDPTRESVLQPSPQVPATTVAHTATQQPAAPAPPAVSPREALMEAMHTVPVPPTTVRTDSLGKDAPAGWGTTPASPTLSPEEEDDIRNVID

SEQ ID NO: 235 - protein, 493 aa, Artificial Sequence
  Synthetic polypeptide
MAKPRLLVLYFALIVVPAWVSSIVLTGTSEPPDAQTVAPAEDETLQNEADNQENVLSQLLGDYDKVKAMSEGSDCQCKCVVRPLGRDACQRINAGASRKEDFYTVETITSGSSCKCACVAPPSALNPCEGDFRLQKLREADSQDLKLSTIIDMLEGAFYGLDLLKLHSVTTKLVGRVDKLEEEVSKNLTKENEQIKEDMEEIRTEMNKRGKENCSENILDSMPDIRSALQRDAAAAYAHPEQYEERFLQEETVSQQINSIELLQTRPLALPEVVKSQRPLQRQVHLRGRPASQPTVIRGITYYKAKVSEEENDIEEQQDEFFSGDNGVDLLIEDQLLRHNGLMTSVTRRPAATRQGHSTAVTSDLNARTAPWSSALPQPSTSDPSIANHASVGPTLQTTSVSPDPTRESVLQPSPQVPATTVAHTATQQPAAPAPPAVSPREALMEAMHTVPVPPTTVRTDSLGKDAPAGWGTTPASPTLSPEEEDDIRNVID

SEQ ID NO: 236 - protein, 29 aa, Artificial Sequence
  Synthetic polypeptide
MILIPRMLLVLFLLLPILSSAKAQVNPDG

SEQ ID NO: 237 - protein, 138 aa, Artificial Sequence
  Synthetic polypeptide
MDEQPRLMHSHAGVGMAGHPGLSQHLQDGAGGTEGEGGRKQDIGDILQQIMTITDQSLDEAQARKHALNCHRMKPALFNVLCEIKEKTEWEDKNTCRDDKMSLAPRDKLPKSMVVEEHQRGAIISVIRAVPPVLIEHF

SEQ ID NO: 238 - protein, 66 aa, Artificial Sequence
  Synthetic polypeptide
MKPALFNVLCEIKEKTEWEDKNTCRDDKMSLAPRDKLPKSMVVEEHQRGAIISVIRAVPPVLIEHF

SEQ ID NO: 239 - protein, 89 aa, Artificial Sequence
  Synthetic polypeptide
MDEQPRLMHSHAGVGMAGHPGLSQHLQDGAGGTEGEGGRKQDIGDILQQIMTITDQSLDEAQARKHALNCHRMKPALFNVLCEIKEKTV

SEQ ID NO: 240 - protein, 17 aa, Artificial Sequence
  Synthetic polypeptide
MKPALFNVLCEIKEKTV

SEQ ID NO: 241 - protein, 143 aa, Artificial Sequence
  Synthetic polypeptide
MSQSDDRDSKRDSLEEGELRDHCMEITIRNSPYRREDSMEDRGEEDDSLAIKPPQQMSRKEKVHHRKDEKRKEKCRHHSHSAEGGKHARVKEREHERRKRHREEQDKARREWERQKRREMAREHSRRESLGDRARLRLKKKRR

SEQ ID NO: 242 - protein, 177 aa, Artificial Sequence
  Synthetic polypeptide
MGDEKDSWKVKTLDEILQEKKRRKEQEEKAEIKRLKNSDDRDSKRDSLEEGELRDHCMEITIRNSPYRREDSMEDRGEEDDSLAIKPPQQMSRKEKVHHRKDEKRKEKCRHHSHSAEGGKHARVKEREHERRKRHREEQDKARREWERQKRREMAREHSRRESLGDRARLRLKKKRR

SEQ ID NO: 243 - protein, 167 aa, Artificial Sequence
  Synthetic polypeptide
MGDEKDSWKVKTLDEILQEKKRRKEQEEKAEIKRLKNSDDRDSKRDSLEEGELRDHCMEITIRNSPYRREDSMEDRGEEDDSLAIKPPQQMSRKEKVHHRKDEKRKEKWKHARVKEREHERRKRHREEQDKARREWERQKRREMAREHSRRESLGDRARLRLKKKRR

SEQ ID NO: 244 - protein, 169 aa, Artificial Sequence
  Synthetic polypeptide
MSTMFADTLLIVFISVCTALLAEGITWVLVYRTDKYKRLKAEVEKQSKKLEKKKETITESAGRQQKKKIERQEEKLKNNNRDLSMVRMKSMFAIGFCFTALMGMFNSIFDGRVVAKLPFTPLSYIQGLSHRNLLGDDTTDCSFIFLYILCTMSIRQNPFYMEHLAKLVF

SEQ ID NO: 245 - protein, 220 aa, Artificial Sequence
  Synthetic polypeptide
MPRKRKCDLRAVRVGLLLGGGGVYGSRFRFTFPGCRALSPWRVRVQRRRCEMSTMFADTLLIVFISVCTALLAEGITWVLVYRTDKYKRLKAEVEKQSKKLEKKKETITESAGRQQKKKIERQEEKLKNNNRDLSMVRMKSMFAIGFCFTALMGMFNSIFDGRVVAKLPFTPLSYIQGLSHRNLLGDDTTDCSFIFLYILCTMSIRQNPFYMEHLAKLVF

SEQ ID NO: 246 - protein, 85 aa, Artificial Sequence
  Synthetic polypeptide
MVRMKSMFAIGFCFTALMGMFNSIFDGRVVAKLPFTPLSYIQGLSHRNLLGDDTTDCSFIFLYILCTMSIRQNPFYMEHLAKLVF

SEQ ID NO: 247 - protein, 252 aa, Artificial Sequence
  Synthetic polypeptide
MSSSVKTPALEELVPGSEEKPKGRSPLSWGSLFGHRSEKIVFAKSDGGTDENVLTVTITETTVIESDLGVWSSRALLYLTLWFFFSFCTLFLNKYILSLLGGEPSMLGAVQMLSTTVIGCVKTLVPCCLYQHKARLSYPPNFLMTMLFVGLMRFATVVLGLVSLKNVAVSFAETVKSSAPIFTVIMSRMILGEYTGRPSDREEREELQLQPGRGAAASDRRSPVPPSERHGVRPHGENLPGDFQTGCGSSGL

SEQ ID NO: 248 - protein, 47 aa, Artificial Sequence
  Synthetic polypeptide
MADGGAASQDESSAAAAAAADSRMNNPSETSKPSMESGDGNTAWTLL

SEQ ID NO: 249 - protein, 24 aa, Artificial Sequence
  Synthetic polypeptide
MNNPSETSKPSMESGDGNTAWTLL

SEQ ID NO: 250 - protein, 36 aa, Artificial Sequence
  Synthetic polypeptide
MLDCSDYVLDSRMNNPSETSKPSMESGDGNTAWTLL

SEQ ID NO: 251 - protein, 58 aa, Artificial Sequence
  Synthetic polypeptide
MRAFVVSREFGSVDYWEKFFQQRGKKAFEWYGTYLELCGVLHKYIKPREKAGRSGSHL

SEQ ID NO: 252 - protein, 59 aa, Artificial Sequence
  Synthetic polypeptide
MNLLPKSSREFGSVDYWEKFFQQRGKKAFEWYGTYLELCGVLHKYIKPREKAGRSGSHL

SEQ ID NO: 253 - protein, 569 aa, Artificial Sequence
  Synthetic polypeptide
MRGFLARPFLSTNQHLAQWGSPLPQGKGLVQLPSQHTRHSRPFHELCSKEENSATVPKLISLVVSSETIDFSNKTMDSRRDWEREKRILEGKLQLPKALARTQRARDEGRAWTSRWLQRRRSPESCEAPLSAPLWGPQRGLPGREPLRSRSASAIALRTIGHILALLLRLLHLGLGSGGCREDVPPSGRGKKEEKMKKHRRALALVSCLFLCSLVWLPSWRVCCKESSSASASSYYSQDDNCALENEDVQFQKKNTESKKLSPPVVETLPTVDLHEESSNAVVDSETVENISSSSTSEITPISKLDEIEKSGTIPIAKPSETEQSETDCDVGEALDASAPIEQPSFVSPPDSLVGQHIENVSSSHGKGKITKSEFESKVSASEQGGGDPKSALNASDNLKNESSDYTKPGDIDPTSVASPKDPEDIPTFDEWKKKVMEVEKEKSQSMHASSNGGSHATKKVQKNRNNYASVECGAKILAANPEAKSTSAILIENMDLYMLNPCSTKICRLPWPPKVPRLQPVPGRHPVWEVRRVSAWPPIVWDVRSPSAWLPSLESEERLCPAAIPSRK

SEQ ID NO: 254 - protein, 570 aa, Artificial Sequence
  Synthetic polypeptide
MRGFLARPFLSTNQHLAQWGSPLPQGKGLVQLPSQHTRHSRPFHELCSKEENSATVPKLISLVVSSETIDFSNKTMDSRRDWEREKRILEGKLQLPKALARTQRARDEGRRAWTSRWLQRRRSPESCEAPLSAPLWGPQRGLPGREPLRSRSASAIALRTIGHILALLLRLLHLGLGSGGCREDVPPSGRGKKEEKMKKHRRALALVSCLFLCSLVWLPSWRVCCKESSSASASSYYSQDDNCALENEDVQFQKKNTESKKLSPPVVETLPTVDLHEESSNAVVDSETVENISSSSTSEITPISKLDEIEKSGTIPIAKPSETEQSETDCDVGEALDASAPIEQPSFVSPPDSLVGQHIENVSSSHGKGKITKSEFESKVSASEQGGGDPKSALNASDNLKNESSDYTKPGDIDPTSVASPKDPEDIPTFDEWKKKVMEVEKEKSQSMHASSNGGSHATKKVQKNRNNYASVECGAKILAANPEAKSTSAILIENMDLYMLNPCSTKICRLPWPPKVPRLQPVPGRHPVWEVRRVSAWPPIVWDVRSPSAWLPSLESEERLCPAAIPSRK

SEQ ID NO: 255 - protein, 374 aa, Artificial Sequence
  Synthetic polypeptide
MKKHRRALALVSCLFLCSLVWLPSWRVCCKESSSASASSYYSQDDNCALENEDVQFQKKNTESKKLSPPVVETLPTVDLHEESSNAVVDSETVENISSSSTSEITPISKLDEIEKSGTIPIAKPSETEQSETDCDVGEALDASAPIEQPSFVSPPDSLVGQHIENVSSSHGKGKITKSEFESKVSASEQGGGDPKSALNASDNLKNESSDYTKPGDIDPTSVASPKDPEDIPTFDEWKKKVMEVEKEKSQSMHASSNGGSHATKKVQKNRNNYASVECGAKILAANPEAKSTSAILIENMDLYMLNPCSTKICRLPWPPKVPRLQPVPGRHPVWEVRRVSAWPPIVWDVRSPSAWLPSLESEERLCPAAIPSRK

SEQ ID NO: 256 - protein, 411 aa, Artificial Sequence
  Synthetic polypeptide
MKKHRRALALVSCLFLCSLVWLPSWRVCCKESSSASASSYYSQDDNCALENEDVQFQKKDEREGPINAESLGKSGSNLPISPKEHKLKDDSIVDVQNTESKKLSPPVVETLPTVDLHEESSNAVVDSETVENISSSSTSEITPISKLDEIEKSGTIPIAKPSETEQSETDCDVGEALDASAPIEQPSFVSPPDSLVGQHIENVSSSHGKGKITKSEFESKVSASEQGGGDPKSALNASDNLKNESSDYTKPGDIDPTSVASPKDPEDIPTFDEWKKKVMEVEKEKSQSMHASSNGGSHATKKVQKNRNNYASVECGAKILAANPEAKSTSAILIENMDLYMLNPCSTKICRLPWPPKVPRLQPVPGRHPVWEVRRVSAWPPIVWDVRSPSAWLPSLESEERLCPAAIPSRK

SEQ ID NO: 257 - protein, 11 aa, Artificial Sequence
  Synthetic polypeptide
QGDCHPQPLPA

SEQ ID NO: 258 - protein, 685 aa, Artificial Sequence
  Synthetic polypeptide
MSLGLARAQEVELTLETVIQTLESSVLCQEKGLGARDLAQDAQITSLPALIREIVTRNLSQPESPVLLPATEMASLLSLQEENQLLQQELSRVEDLLAQSRAERDELAIKYNAVSERLEQALRLEPGELETQEPRGLVRQSVELRRQLQEEQASYRRKLQAYQEGQQRQAQLVQRLQGKILQYKKRCSELEQQLLERSGELEQQRLRDTEHSQDLESALIRLEEEQQRSASLAQVNAMLREQLDQAGSANQALSEDIRKVTNDWTRCRKELEHREAAWRREEESFNAYFSNEHSRLLLLWRQVVGFRRLVSEVKMFTERDLLQLGGELARTSRAVQEAGLGLSTGLRLAESRAEAALEKQALLQAQLEEQLRDKVLREKDLAQQQMQSDLDKADLSARVTELGLAVKRLEKQNLEKDQVNKDLTEKLEALESLRLQEQAALETEDGEGLQQTLRDLAQAVLSDSESGVQLSGSERTADASNGSLRGLSGQRTPSPPRRSSPGRGRSPRRGPSPACSDSSTLALIHSALHKRQLQVQDMRGRYEASQDLLGTLRKQLSDSESERRALEEQLQRLRDKTDGAMQAHEDAQREVQRLRSANELLSREKSNLAHSLQVAQQQAEELRQEREKLQAAQEELRRQRDRLEEEQEDAVQDGARVRRELERRPGAVAHACNPSTLRGQGRQIA

SEQ ID NO: 259 - protein, 11 aa, Artificial Sequence
  Synthetic polypeptide
QGDCHPQPLPA

SEQ ID NO: 260 - protein, 985 aa, Artificial Sequence
  Synthetic polypeptide
MSLGLARAQEVELTLETVIQTLESSVLCQEKGLGARDLAQDAQITSLPALIREIVTRNLSQPESPVLLPATEMASLLSLQEENQLLQQELSRVEDLLAQSRAERDELAIKYNAVSERLEQALRLEPGELETQEPRGLVRQSVELRRQLQEEQASYRRKLQAYQEGQQRQAQLVQRLQGKILQYKKRCSELEQQLLERSGELEQQRLRDTEHSQDLESALIRLEEEQQRSASLAQVNAMLREQLDQAGSANQALSEDIRKVTNDWTRCRKELEHREAAWRREEESFNAYFSNEHSRLLLLWRQVVGFRRLVSEVKMFTERDLLQLGGELARTSRAVQEAGLGLSTGLRLAESRAEAALEKQALLQAQLEEQLRDKVLREKDLAQQQMQSDLDKADLSARVTELGLAVKRLEKQNLEKDQVNKDLTEKLEALESLRLQEQAALETEDGEGLQQTLRDLAQAVLSDSESGVQLSGSERTADASNGSLRGLSGQRTPSPPRRSSPGRGRSPRRGPSPACSDSSTLALIHSALHKRQLQVQDMRGRYEASQDLLGTLRKQLSDSESERRALEEQLQRLRDKTDGAMQAHEDAQREVQRLRSANELLSREKSNLAHSLQVAQQQAEELRQEREKLQAAQEELRRQRDRLEEEQEDAVQDGARVRRELERSHRQLEQLEGKRSVLAKELVEVREALSRATLQRDMLQAEKAEVAEALTKAEAGRVELELSMTKLRAEEASLQDSLSKLSALNESLAQDKLDLNRLVAQLEEEKSALQGRQRQAEQEATVAREEQERLEELRLEQEVARQGLEGSLRVAEQAQEALEQQLPTLRHERSQLQEQLAQLSRQLSGREQELEQARREAQRQVEALERAAREKEALAKEHAGLAVQLVAAEREGRTLSEEATRLRLEKEALEGSLFEVQRQLAQLEARREQLEAEGQALLLAKETLTGDHVRTPRPAHCCSLALSRPWRVPVIALITPLYLPGHPPS

SEQ ID NO: 261 - protein, 1314 aa, Artificial Sequence
  Synthetic polypeptide
MSLGLARAQEVELTLETVIQTLESSVLCQEKGLGARDLAQDAQITSLPALIREIVTRNLSQPESPVLLPATEMASLLSLQEENQLLQQELSRVEDLLAQSRAERDELAIKYNAVSERLEQALRLEPGELETQEPRGLVRQSVELRRQLQEEQASYRRKLQAYQEGQQRQAQLVQRLQGKILQYKKRCSELEQQLLERSGELEQQRLRDTEHSQDLESALIRLEEEQQRSASLAQVNAMLREQLDQAGSANQALSEDIRKVTNDWTRCRKELEHREAAWRREEESFNAYFSNEHSRLLLLWRQVVGFRRLVSEVKMFTERDLLQLGGELARTSRAVQEAGLGLSTGLRLAESRAEAALEKQALLQAQLEEQLRDKVLREKDLAQQQMQSDLDKADLSARVTELGLAVKRLEKQNLEKDQVNKDLTEKLEALESLRLQEQAALETEDGEGLQQTLRDLAQAVLSDSESGVQLSGSERTADASNGSLRGLSGQRTPSPPRRSSPGRGRSPRRGPSPACSDSSTLALIHSALHKRQLQVQDMRGRYEASQDLLGTLRKQLSDSESERRALEEQLQRLRDKTDGAMQAHEDAQREVQRLRSANELLSREKSNLAHSLQVAQQQAEELRQEREKLQAAQEELRRQRDRLEEEQEDAVQDGARVRRELERSHRQLEQLEGKRSVLAKELVEVREALSRATLQRDMLQAEKAEVAEALTKAEAGRVELELSMTKLRAEEASLQDSLSKLSALNESLAQDKLDLNRLVAQLEEEKSALQGRQRQAEQEATVAREEQERLEELRLEQEVARQGLEGSLRVAEQAQEALEQQLPTLRHERSQLQEQLAQLSRQLSGREQELEQARREAQRQVEALERAAREKEALAKEHAGLAVQLVAAEREGRTLSEEATRLRLEKEALEGSLFEVQRQLAQLEARREQLEAEGQALLLAKETLTGELAGLRQQIIATQEKASLDKELMAQKLVQAEREAQASLREQRAAHEEDLQRLQREKEAAWRELEAERAQLQSQLQREQEELLARLEAEKEELSEEIAALQQERDEGLLLAESEKQQALSLKESEKTALSEKLMGTRHSLATISLEMERQKRDAQSRQEQDRSTVNALTSELRDLRAQREEAAAAHAQEVRRLQEQARDLGKQRDSCLREAEELRTQLRLLEDARDGLRRELLEAQRKLRESQEGREVQRQEAGELRRSLGEGAKEREALRRSNEELRSAVKKAESERISLKLANEDKEQKLALLEEARTAVGKEAGELRTGLQEVERSRLEARRELQELRRQAHISARRGAGVLVQFSKESANNKRYR

SEQ ID NO: 262 - protein, 11 aa, Artificial Sequence
  Synthetic polypeptide
QGDCHPQPLPA

SEQ ID NO: 263 - protein, 43 aa, Artificial Sequence
  Synthetic polypeptide
MVSHRYPRIQSIKVQFTGLLITAFPALPSYKLSHRIVLRIKQN

SEQ ID NO: 264 - protein, 93 aa, Artificial Sequence
  Synthetic polypeptide
MERVQPLEENVGNAARPRFERNKLLLVASVIQGLGLLLCFTYICLHFSALQVSHRYPRIQSIKVQFTGLLITAFPALPSYKLSHRIVLRIKQN

SEQ ID NO: 265 - protein, 26 aa, Artificial Sequence
  Synthetic polypeptide
MVHGRKANAQEPRWPNRNSSSLQLPA

SEQ ID NO: 266 - protein, 61 aa, Artificial Sequence
  Synthetic polypeptide
MEGKPMRRSQDGRIGTAPVYSFQHERCRRRMISAFPTEVLGSSHWGLSDSRCRTVGAAHRA

SEQ ID NO: 267 - protein, 27 aa, Artificial Sequence
  Synthetic polypeptide
MAAFMLGSLLRTFKQTSLTNMEKPHLY

SEQ ID NO: 268 - protein, 46 aa, Artificial Sequence
  Synthetic polypeptide
MAQGTLIRVTPEQPTHAVCVLGTLTQLDICRHCKDPVSPAVQLQGH

SEQ ID NO: 269 - protein, 344 aa, Artificial Sequence
  Synthetic polypeptide
MPRKKAAAAAWEEPSSGNGTARAGPRKRGGPAGRKRERPERCSSSSGGGSSGDEDGLELDGAPGGGKRAARPATAGKAGGAAVVITEPEHTKERVKLEGSKCKGQLLIFGATNWDLIGRKEVPKQQAAYRNLGQNLWGPHRYGCLAGVRVRTVVSGSCAAHSLLITTEGKLWSWGRNEKGQLGHGDTKRVEAPRLIEGLSHEVIVSAACGRNHTLALTETGSVFAFGENKMGQLGLGNQTDAVPSPAQIMYNGQPITKMACGAEFSMIMDCKGNLYSFGCPEYGQLGHNSDGKFIARAQRIEYDCELVPRRVAIFIEKTKDGQILPVPNVVVRDVACGANHTPR

SEQ ID NO: 270 - protein, 87 aa, Artificial Sequence
  Synthetic polypeptide
MFPALESDSPLPPEDLDAVVPVSGAVAGGMLDRILLESVCQQQSWVRVYDHLSKNHLECLLKIRILGPFLHPSLTNQNIWELPRNCI

SEQ ID NO: 271 - protein, 105 aa, Artificial Sequence
  Synthetic polypeptide
MELSPSSGGAAEALSWPEMFPALESDSPLPPEDLDAVVPVSGAVAGGMLDRILLESVCQQQSWVRVYDHLSKNHLECLLKIRILGPFLHPSLTNQNIWELPRNCI

SEQ ID NO: 272 - protein, 52 aa, Artificial Sequence
  Synthetic polypeptide
MFPALESDSPLPPEDLDAVVPVSGAVAGGMLDRILLESVCQQQSWVRVYGDR

SEQ ID NO: 273 - protein, 70 aa, Artificial Sequence
  Synthetic polypeptide
MELSPSSGGAAEALSWPEMFPALESDSPLPPEDLDAVVPVSGAVAGGMLDRILLESVCQQQSWVRVYGDR

SEQ ID NO: 274 - protein, 414 aa, Artificial Sequence
  Synthetic polypeptide
MLRGPWRQLWLFFLLLLPGAPEPRGASRPWEGTDEPGSAWAWPGFQRLQEQLRAAGALSKRYWTLFSCQVWPDDCDEDEEAATGPLGWRLPLLGQRYLDLLTTWYCSFKDCCPRGDCRISNNFTGLEWDLNVRLHGQHLVQQLVLRTVRGYLETPQPEKALALSFHGWSGTGKNFVARMLVENLYRDGLMSDCVRMFIATFHFPHPKYVDLYKEQLMSQIRETQQLCHQTLFIFDEAEKLHPGLLEVLGPHLERRAPEGHRAESPWTIFLFLSNLRGDIINEVVLKLLKAGWSREEITMEHLEPHLQAEIVETIDNGFGHSRLVKENLIDYFIPFLPLEYRHVRLCARDAFLSQELLYKEETLDEIAQMMVFFISNNQMAPPGPANQFCGPHLGTDSAEENSFDSPCFYSPNYP

SEQ ID NO: 275 - protein, 478 aa, Artificial Sequence [sequence omitted]

SEQ ID NO: 276 - protein, 688 aa, Artificial Sequence
  Synthetic polypeptide
MKFAEHLSAHITPEWRKQYIQYEAFKDMLYSAQDQAPSVEVTDEDTVKRYFAKFEEKFFQTCEKELAKINTFYSEKLAEAQRRFATLQNELQSSLDAQKESTGVTTLRQRRKPVFHLSHEERVQHRNIKDLKLAFSEFYLSLILLQNYQNLNFTGFRKILKKHDKILETSRGADWRVAHVEVAPFYTCKKINQLISETEAVVTNELEDGDRQKAMKRLRVPPLGAAQPAPAWTTFRVGLFCGIFIVLNITLVLAAVFKLETDRSIWPLIRIYRGGFLLIEFLFLLGINTYGWRQAGVNHVLIFELNPRSNLSHQHLFEIAGFLGILWCLSLLACFFAPISVIPTYVYPLALYGFMVFFLINPTKTFYYKSRFWLLKLLFRVFTAPFHKVGFADFWLADQLNSLSVILMDLEYMICFYSLELKWDESKGLLPNNSEESGICHKYTYGVRAIVQCIPAWLRFIQCLRRYRDTKRAFPHLVNAGKYSTTFFMVTFAALYSTHKERGHSDTMVFFYLWIVFYIISSCYTLIWDLKMDWGLFDKNAGENTFLREEIVYPQKAYYYCAIIEDVILRFAWTIQISITSTTLLPHSGDIIATVFAPLEVFRRFVWNFFRLENEHLNNCGEFRAVRDISVAPLNADDQTLLEQMMDQDDGVRNRQKNRSWKYNQSISLRRPRLASHQNQKQFTFSWK

SEQ ID NO: 277 - protein, 623 aa, Artificial Sequence
  Synthetic polypeptide
MKFAEHLSAHITPEWRKQYIQYEAFKDMLYSAQDQAPSVEVTDEDTVKRYFAKFEEKFFQTCEKELAKINTFYSEKLAEAQRRFATLQNELQSSLDAQKESTGVTTLRQRRKPVFHLSHEERVQHRNIKDLKLAFSEFYLSLILLQNYQNLNFTGFRKILKKHDKILETSRGADWRVAHVEVAPFYTCKKINQLISETEAVVTNELEDGDRQKAMKRLRVPPLGAAQPAPAWTTFRVGLFCGIFIVLNITLVLAAVFKLETDRSIWPLIRIYRGGFLLIEFLFLLGINTYGWRQAGVNHVLIFELNPRSNLSHQHLFEIAGFLGILWCLSLLACFFAPISVIPTYVYPLALYGFMVFFLINPTKTFYYKSRFWLLKLLFRVFTAPFHKVGFADFWLADQLNSLSVILMDLEYMICFYSLELKWDESKGLLPNNSEERGHSDTMVFFYLWIVFYIISSCYTLIWDLKMDWGLFDKNAGENTFLREEIVYPQKAYYYCAIIEDVILRFAWTIQISITSTTLLPHSGDIIATVFAPLEVFRRFVWNFFRLENEHLNNCGEFRAVRDISVAPLNADDQTLLEQMMDQDDGVRNRQKNRSWKYNQSISLRRPRLASHQNQKQFTFSWK

SEQ ID NO: 278 - protein, 358 aa, Artificial Sequence [sequence omitted]

SEQ ID NO: 279 - protein, 309 aa, Artificial Sequence [sequence omitted]

SEQ ID NO: 280 - protein, 1122 aa, Artificial Sequence
  Synthetic polypeptide
MPALWLGCCLCFSLLLPAARATSRREVCDCNGKSRQCIFDRELHRQTGNGFRCLNCNDNTDGIHCEKCKNGFYRHRERDRCLPCNCNSKGSLSARCDNSGRCSCKPGVTGARCDRCLPGFHMLTDAGCTQDQRLLDSKCDCDPAGIAGPCDAGRCVCKPAVTGERCDRCRSGYYNLDGGNPEGCTQCFCYGHSASCRSSAEYSVHKITSTFHQDVDGWKAVQRNGSPAKLQWSQRHQDVFSSAQRLDPVYFVAPAKFLGNQQVSYGQSLSFDYRVDRGGRHPSAHDVILEGAGLRITAPLMPLGKTLPCGLTKTYTFRLNEHPSNNWSPQLSYFEYRRLLRNLTALRIRATYGEYSTGYIDNVTLISARPVSGAPAPWVEQCICPVGYKGQFCQDCASGYKRDSARLGPFGTCIPCNCQGGGACDPDTGDCYSGDENPDIECADCPIGFYNDPHDPRSCKPCPCHNGFSCSVMPETEEVVCNNCPPGVTGARCELCADGYFGDPFGEHGPVRPCQPCQCNNNVDPSASGNCDRLTGRCLKCIHNTAGIYCDQCKAGYFGDPLAPNPADKCRACNCNPMGSEPVGCRSDGTCVCKPGFGGPNCEHGAFSCPACYNQVKIQMDQFMQQLQRMEALISKAQGGDGVVPDTELEGRMQQAEQALQDILRDAQISEGASRSLGLQLAKVRSQENSYQSRLDDLKMTVERVRALGSQYQNRVRDTHRLITQMQLSLAESEASLGNTNIPASDHYVGPNGFKSLAQEATRLAESHVESASNMEQLTRETEDYSKQALSLVRKALHEGVGSGSGSPDGAVVQGLVEKLEKTKSLAQQLTREATQAEIEADRSYQHSLRLLDSVSRLQGVSDQSFQVEEAKRIKQKADSLSSLVTRHMDEFKRTQKNLGNWKEEAQQLLQNGKSGREKSDQLLSRANLAKSRAQEALSMGNATFYEVESILKNLREFDLQVDNRKAEAEEAMKRLSYISQKVSDASDKTQQAERALGSAAADAQRAKNGAGEALEISSEIEQEIGSLNLEANVTADGALAMEKGLASLKSEMREVEGELERKELEFDTNMDAVQMVITEAQKVDTRAKNAGVTIQDTLNTLDGLLHLMGTDSVQEDSFDSL

SEQ ID NO: 281 - protein, 46 aa, Artificial Sequence
  Synthetic polypeptide
MTETTKTHVILLACGSFNPITKGHIQMFGVVAHSYNPSTLGGEDGH

SEQ ID NO: 282 - protein, 90 aa, Artificial Sequence
  Synthetic polypeptide
MEERGDSEPTPGCSGLGPGGVRGFGDGGGAPSWAPEDAWMGTHPKLYTEESPYEDTARRWLSSSQEERPHQRWNVPALRSGFLVSRTVRK

SEQ ID NO: 283 - protein, 81 aa, Artificial Sequence
  Synthetic polypeptide
RSAAIPSRPPAAAAWVRAVFAALATAVELLRGPLRTPGWALTLSCTQKKAHMRTQQEGGCLQAKKRGLIRDGMFLHFGLDF

SEQ ID NO: 284 - protein, 45 aa, Artificial Sequence
  Synthetic polypeptide
RSAAIPSRPPAAAAWVRAVFAALATAVELLRGPLRTPGWALTLSI

SEQ ID NO: 285 - protein, 80 aa, Artificial Sequence
  Synthetic polypeptide
MEERGDSEPTPGCSGLGPGGVRGFGDGGGAPSWAPEDAWMGTHPKYLEMMELDIGDATQVYVAFLVYLDLMEIVHRRKPI

SEQ ID NO: 286 - protein, 45 aa, Artificial Sequence; identical to SEQ ID NO: 284
  Synthetic polypeptide

SEQ ID NO: 287 - protein, 122 aa, Artificial Sequence
  Synthetic polypeptide
MEERGDSEPTPGCSGLGPGGVRGFGDGGGAPSWAPEDAWMGTHPKYLEMMELDIGDATQVYVAFLVYLDLMESKSWHEVNCVGLPELQLICLVGTEIEGEGLQTVVPTPITASLSHNRRKPI

SEQ ID NO: 288 - protein, 121 aa, Artificial Sequence
  Synthetic polypeptide
MEERGDSEPTPGCSGLGPGGVRGFGDGGGAPSWAPEDAWMGTHPKYLEMMELDIGDATQVYVAFLVYLDLMESKSWHEVNCVGLPELQLICLVGTEIEGEGLQTVVPTPITASLSHNRKPI

SEQ ID NO: 289 - protein, 45 aa, Artificial Sequence; identical to SEQ ID NO: 284
  Synthetic polypeptide

SEQ ID NO: 290 - protein, 97 aa, Artificial Sequence
  Synthetic polypeptide
MGCASAKHVATVQNEEEAQKGKNYQNGDVFGDEYRIKPVEEVKYMKNGAEEEQKIAARNQENLEKSASSNVRLKTNKEVPGLVHQPRAKYITIGKLK

SEQ ID NO: 291 - protein, 619 aa, Artificial Sequence
  Synthetic polypeptide
MSEAGGRGCGSPVPQRARWRLVAATAAFCLVSATSVWTAGAEPMSREEKQKLGNQVLEMFDHAYGNYMEHAYPADELMPLTCRGRVRGQEPSRGDVDDALGKFSLTLIDSLDTLVVLNKTKEFEDAVRKVLRDVNLDNDVVVSVFETNIRVLGGLLGGHSLAIMLKEKGEYMQWYNDELLQMAKQLGYKLLPAFNTTSGLPYPRINLKFGIRKPEARTGTETDTCTACAGTLILEFAALSRFTGATIFEEYARKALDFLWEKRQRSSNLVGVTINIHTGDWVRKDSGVGAGIDSYYEYLLKAYVLLGDDSFLERFNTHYDAIMRYISQPPLLLDVHIHKPMLNARTWMDALLAFFPGLQVLKGDIRPAIETHEMLYQVIKKHNFLPEAFTTDFRVHWAQHPLRPEFAESTYFLYKATGDPYYLEVGKTLIENLNKYARVPCGFAAMKDVRTGSHEDRMDSFFLAEMFKYLYLLFADKEDIIFDIEDYIFTTEAHLLPLWLSTTNQSISKKNTTSEYTELDDSNFDWTCPNTQILFPNDPLYAQSIREPLKNVVDKSCPRGIIRVEESFRSGAKPPLRARDFMATNPEHLEILKKMGVSLIHLKDGRVQLVQHAIQTQIS

SEQ ID NO: 292 - protein, 67 aa, Artificial Sequence
  Synthetic polypeptide
VDKSCPRGIIRVEESFRSGAKPPLRARDFMATNPEHLEILKKMGVSLIHLKDGRVQLVQHAIQTQIS

SEQ ID NO: 293 - protein, 576 aa, Artificial Sequence
  Synthetic polypeptide
MSREEKQKLGNQVLEMFDHAYGNYMEHAYPADELMPLTCRGRVRGQEPSRGDVDDALGKFSLTLIDSLDTLVVLNKTKEFEDAVRKVLRDVNLDNDVVVSVFETNIRVLGGLLGGHSLAIMLKEKGEYMQWYNDELLQMAKQLGYKLLPAFNTTSGLPYPRINLKFGIRKPEARTGTETDTCTACAGTLILEFAALSRFTGATIFEEYARKALDFLWEKRQRSSNLVGVTINIHTGDWVRKDSGVGAGIDSYYEYLLKAYVLLGDDSFLERFNTHYDAIMRYISQPPLLLDVHIHKPMLNARTWMDALLAFFPGLQVLKGDIRPAIETHEMLYQVIKKHNFLPEAFTTDFRVHWAQHPLRPEFAESTYFLYKATGDPYYLEVGKTLIENLNKYARVPCGFAAMKDVRTGSHEDRMDSFFLAEMFKYLYLLFADKEDIIFDIEDYIFTTEAHLLPLWLSTTNQSISKKNTTSEYTELDDSNFDWTCPNTQILFPNDPLYAQSIREPLKNVVDKSCPRGIIRVEESFRSGAKPPLRARDFMATNPEHLEILKKMGVSLIHLKDGRVQLVQHAIQTQIS

SEQ ID NO: 294 - protein, 170 aa, Artificial Sequence
  Synthetic polypeptide
MSQAVQTNGTQPLSKTWELSLYELQRTPQEAITDGLEIVVSPRSLHSELMCPICLDMLKNTMTTKECLHRFCADCIITALRSGNKECPTCRKKLVSKRSLRPDPNFDALISKIYPSRDEYEAHQERVLARINKHNNQQALSHSIEEGLKIQAMNSISRFIQATTIFHLMY

SEQ ID NO: 295 - protein, 137 aa, Artificial Sequence
  Synthetic polypeptide
MAAVLQQVLERTELNKLPKSVQNKLEKFLADQQSEIDGLKGRHEKFKVESEQQYFEIEKRLSHSQERLVNETRECQSLRLELEKLNNQLKALTEKNKELEIAQDRNIAIQGAKKTQWSCDRLLINGVEKTGFPHLKK

SEQ ID NO: 296 - protein, 219 aa, Artificial Sequence
  Synthetic polypeptide
MSFIDPYQHIIVEHQYSHKFTVVVLRATKVTKGAFGDMLDTPDPYVELFISTTPDSRKRTRHFNNDINPVWNETFEFILDPNQENVLEITLMDANYVMDETLGTATFTVSSMKVGEKKEVPFIFNQVTEMVLEMSLEVCSCPDLRFSMALCDQEKTFRQQRKEHIRESMKKLLGPKNSEGLHSARDINCHNDAHQMIMKFLVSDVSGNYLLIYLVELSC

SEQ ID NO: 297 - protein, 230 aa, Artificial Sequence
  Synthetic polypeptide
MEAIPCVVGDEEVWTSDVQYQVSPFNHGHKVAKFCYADKSLLNKAIEAALAARKEWDLKPIADRAQIFLKAADMLSGPRRAEILAKTMVGQGKTVIQAEIDAAAELIDFFRFNAKYAVELEGQQPISVPPSTNSTVYRGLEGFVAAISPFNFTAIGGNLAGAPALMGNVVLWKPSDTAMLASYAVYRILREAGLPPNIIQFVPADGPLFGDTVTSSEHLCGINFTGSVPE

SEQ ID NO: 298 - protein, 290 aa, Artificial Sequence
  Synthetic polypeptide
MLLPAPALRRALLSRPWTGAGLRWKHTSSLKVANEPVLAFTQGSPERDALQKALKDLKGRMEAIPCVVGDEEVWTSDVQYQVSPFNHGHKVAKFCYADKSLLNKAIEAALAARKEWDLKPIADRAQIFLKAADMLSGPRRAEILAKTMVGQGKTVIQAEIDAAAELIDFFRFNAKYAVELEGQQPISVPPSTNSTVYRGLEGFVAAISPFNFTAIGGNLAGAPALMGNVVLWKPSDTAMLASYAVYRILREAGLPPNIIQFVPADGPLFGDTVTSSEHLCGINFTGSVPE

SEQ ID NO: 299 - protein, 318 aa, Artificial Sequence
  Synthetic polypeptide
MTGNAGEWCLMESDPGVFTELIKGFGCRGAQVEEIWSLEPENFEKLKPVHGLIFLFKWQPGEEPAGSVVQDSRLDTIFFAKQVINNACATQAIVSVLLNCTHQDVHLGETLSEFKEFSQSFDAAMKGLALSNSDVIRQVHNSFARQQMFEFDTKTSAKEEDAFHFVSYVPVNGRLYELDGLREGPIDLGACNQDDWISAVRPVIEKRIQKYSEGEIRFNLMAIVSDRKMIYEQKIAELQRQLAEEEPMDTDQGNSMLSAIQSEVAKNQMLIEEEVQKLKRYKIENIRRKHNYLPFIMELLKTLAEHQQLIPLVEKGCC

SEQ ID NO: 300 - protein, 15 aa, Artificial Sequence
  Synthetic polypeptide
HYQSLKNFHKVLMQL

SEQ ID NO: 301 - protein, 317 aa, Artificial Sequence
  Synthetic polypeptide
MTGNAGEWCLMESDPGVFTELIKGFGCRGAQVEEIWSLEPENFEKLKPVHGLIFLFKWQPGEEPAGSVVQDSRLDTIFFAKQVINNACATQAIVSVLLNCTHQDVHLGETLSEFKEFSQSFDAAMKGLALSNSDVIRQVHNSFARQQMFEFDTKTSAKEEDAFHFVSYVPVNGRLYELDGLREGPIDLGACNQDDWISAVRPVIEKRIQKYSEGEIRFNLMAIVSDRKMIYEQKIAELQRQLAEEPMDTDQGNSMLSAIQSEVAKNQMLIEEEVQKLKRYKIENIRRKHNYLPFIMELLKTLAEHQQLIPLVEKGCC

SEQ ID NO: 302 - skipped

SEQ ID NO: 303 - protein, 357 aa, Artificial Sequence
  Synthetic polypeptide
ARGGSGRCVARAMTGNAGEWCLMESDPGVFTELIKGFGCRGAQVEEIWSLEPENFEKLKPVHGLIFLFKWQPGEEPAGSVVQDSRLDTIFFAKQVINNACATQAIVSVLLNCTHQDVHLGETLSEFKEFSQSFDAAMKGLALSNSDVIRQVHNSFARQQMFEFDTKTSAKEEDAFHFVSYVPVNGRLYELDGLREGPIDLGACNQDDWISAVRPVIEKRIQKDGFSPCCPGWSQTPELKPSACLDLPKWYSEGEIRFNLMAIVSDRKMIYEQKIAELQRQLAEEEPMDTDQGNSMLSAIQSEVAKNQMLIEEEVQKLKRYKIENIRRKHNYLPFIMELLKTLAEHQQLIPLVEKGCC

SEQ ID NO: 304 - protein, 344 aa, Artificial Sequence
  Synthetic polypeptide
MTGNAGEWCLMESDPGVFTELIKGFGCRGAQVEEIWSLEPENFEKLKPVHGLIFLFKWQPGEEPAGSVVQDSRLDTIFFAKQVINNACATQAIVSVLLNCTHQDVHLGETLSEFKEFSQSFDAAMKGLALSNSDVIRQVHNSFARQQMFEFDTKTSAKEEDAFHFVSYVPVNGRLYELDGLREGPIDLGACNQDDWISAVRPVIEKRIQKDGFSPCCPGWSQTPELKPSACLDLPKWYSEGEIRFNLMAIVSDRKMIYEQKIAELQRQLAEEPMDTDQGNSMLSAIQSEVAKNQMLIEEEVQKLKRYKIENIRRKHNYLPFIMELLKTLAEHQQLIPLVEKGCC

SEQ ID NO: 305 - protein, 4 aa, Artificial Sequence
  Synthetic polypeptide
TANV

SEQ ID NO: 306 - protein, 193 aa, Artificial Sequence
  Synthetic polypeptide
MKGLALSNSDVIRQVHNSFARQQMFEFDTKTSAKEEDAFHFVSYVPVNGRLYELDGLREGPIDLGACNQDDWISAVRPVIEKRIQKYSEGEIRFNLMAIVSDRKMIYEQKIAELQRQLAEEPMDTDQGNSMLSAIQSEVAKNQMLIEEEVQKLKRYKIENIRRKHNYLPFIMELLKTLAEHQQLIPLVEKGCC

SEQ ID NO: 307 - protein, 194 aa, Artificial Sequence
  Synthetic polypeptide
MKGLALSNSDVIRQVHNSFARQQMFEFDTKTSAKEEDAFHFVSYVPVNGRLYELDGLREGPIDLGACNQDDWISAVRPVIEKRIQKYSEGEIRFNLMAIVSDRKMIYEQKIAELQRQLAEEEPMDTDQGNSMLSAIQSEVAKNQMLIEEEVQKLKRYKIENIRRKHNYLPFIMELLKTLAEHQQLIPLVEKGCC

SEQ ID NO: 308 - protein, 39 aa, Artificial Sequence
  Synthetic polypeptide
MTGNAGEWCLMESDPGVFTELIKGFGPSTMLGTQKIFGK

SEQ ID NO: 309 - protein, 51 aa, Artificial Sequence
  Synthetic polypeptide
ARGGSGRCVARAMTGNAGEWCLMESDPGVFTELIKGFGPSTMLGTQKIFGK

SEQ ID NO: 310 - protein, 30 aa, Artificial Sequence
  Synthetic polypeptide
MSLGWLERPPALSRAAGPSTMLGTQKIFGK

SEQ ID NO: 311 - protein, 170 aa, Artificial Sequence
  Synthetic polypeptide
MVRPGLARMSLPRCWFRYPGWTGAEAGRGRAIVSRRLPSLNPWDAGERHGGLVRICASLGPHKRLPAGLPQCPHLYLAADPLDPQRRQEKSCAALGNDKRRQPDGQRQPQQQQQPHCRRGFQAPALPNPLRVLQGLGRVSMSLGWLERPPALSRAAGPSTMLGTQKIFGK

SEQ ID NO: 312 - protein, 477 aa, Artificial Sequence
  Synthetic polypeptide
MADVLSVLRQYNIQKKEIVVKGDEVIFGEFSWPKNVKTNYVVWGTGKEGQPREYYTLDSILFLLNNVHLSHPVYVRRAATENIPVVRRPDRKDLLGYLNGEASTSASIDRSAPLEIGLQRSTQVKRAADEVLAEAKKPRIEDEECVRLDKERLAARLEGHKEGIVQTEQIRSLSEAMSVEKIAAIKAKIMAKKRSTIKTDLDDDITALKQRSFVDAEVDVTRDIVSRERVWRTRTTILQSTGKNFSKNIFAILQSVKAREEGRAPEQRPAPNAAPVDPTLRTKQPIPAAYNRYDQERFKGKEETEGFKIDTMGTYHGMTLKSVTEGASARKTQTPAAQPVPRPVSQARPPPNQKKGSRTPIIIIPAATTSLITMLNAKDLLQDLKFVPSDEKKKQGCQRENETLIQRRKDQMQPGGTAISVTVPYRVVDQPLKLMPQDWDRVVAVFVQGPAWQFKGWPWLLPDGSPVDIFAKSLSFS

SEQ ID NO: 313 - protein, 33 aa, Artificial Sequence
  Synthetic polypeptide
MTMYLWLKLLAFGFAFLDTEVFVTALIWATHIS

SEQ ID NO: 314 - protein, 31 aa, Artificial Sequence
  Synthetic polypeptide
MYLWLKLLAFGFAFLDTEVFVTALIWATHIS

SEQ ID NO: 315 - protein, 576 aa, Artificial Sequence
  Synthetic polypeptide
MYLWLKLLAFGFAFLDTEVFVTGQSPTPSPTGLTTAKMPSVPLSSDPLPTHTTAFSPASTFERENDFSETTTSLSPDNTSTQVSPDSLDNASAFNTTGVSSVQTPHLPTHADSQTPSAGTDTQTFSGSAANAKLNPTPGSNAISDAYLNASETTTLSPSGSAVISTTTIATTPSKPTCDEKYANITVDYLYNKETKLFTAKLNVNENVECGNNTCTNNEVHNLTECKNASVSISHNSCTAPDKTLILDVPPGVEKFQLHDCTQVEKADTTICLKWKNIETFTCDTQNITYRFQCGNMIFDNKEIKLENLEPEHEYKCDSEILYNNHKFTNASKIIKTDFGSPGEPQIIFCRSEAAHQGVITWNPPQRSFHNFTLCYIKETEKDCLNLDKNLIKYDLQNLKPYTKYVLSLHAYIIAKVQRNGSAAMCHFTTKSAPPSQVWNMTVSMTSDNSMHVKCRPPRDRNGPHERYHLEVEAGNTLVRNESHKNCDFRVKDLQYSTDYTFKAYFHNGDYPGEPFILHHSTSYNSKALIAFLAFLIIVTSIALLVVLYKIYDLHKKRSCNLDEQQELVERECNTI

SEQ ID NO: 316 - protein, 624 aa, Artificial Sequence
  Synthetic polypeptide
MYLWLKLLAFGFAFLDTEVFVTGQSPTPSPTGLTTAKMPSVPLSSDPLPTHTTAFSPASTFERENDFSETTTSLSPDNTSTQVSPDSLDNASAFNTTGVSSVQTPHLPTHADSQTPSAGTDTQTFSGSAANAKLNPTPGSNAISDVPGERSTASTFPTDPVSPLTTTLSLAHHSSAALPARTSNTTITANTSDAYLNASETTTLSPSGSAVISTTTIATTPSKPTCDEKYANITVDYLYNKETKLFTAKLNVNENVECGNNTCTNNEVHNLTECKNASVSISHNSCTAPDKTLILDVPPGVEKFQLHDCTQVEKADTTICLKWKNIETFTCDTQNITYRFQCGNMIFDNKEIKLENLEPEHEYKCDSEILYNNHKFTNASKIIKTDFGSPGEPQIIFCRSEAAHQGVITWNPPQRSFHNFTLCYIKETEKDCLNLDKNLIKYDLQNLKPYTKYVLSLHAYIIAKVQRNGSAAMCHFTTKSAPPSQVWNMTVSMTSDNSMHVKCRPPRDRNGPHERYHLEVEAGNTLVRNESHKNCDFRVKDLQYSTDYTFKAYFHNGDYPGEPFILHHSTSYNSKALIAFLAFLIIVTSIALLVVLYKIYDLHKKRSCNLDEQQELVERECNTI

SEQ ID NO: 317 - protein, 463 aa, Artificial Sequence
  Synthetic polypeptide
MYLWLKLLAFGFAFLDTEVFVTGQSPTPSPTDAYLNASETTTLSPSGSAVISTTTIATTPSKPTCDEKYANITVDYLYNKETKLFTAKLNVNENVECGNNTCTNNEVHNLTECKNASVSISHNSCTAPDKTLILDVPPGVEKFQLHDCTQVEKADTTICLKWKNIETFTCDTQNITYRFQCGNMIFDNKEIKLENLEPEHEYKCDSEILYNNHKFTNASKIIKTDFGSPGEPQIIFCRSEAAHQGVITWNPPQRSFHNFTLCYIKETEKDCLNLDKNLIKYDLQNLKPYTKYVLSLHAYIIAKVQRNGSAAMCHFTTKSAPPSQVWNMTVSMTSDNSMHVKCRPPRDRNGPHERYHLEVEAGNTLVRNESHKNCDFRVKDLQYSTDYTFKAYFHNGDYPGEPFILHHSTSYNSKALIAFLAFLIIVTSIALLVVLYKIYDLHKKRSCNLDEQQELVERECNTI

SEQ ID NO: 318 - protein, 512 aa, Artificial Sequence
  Synthetic polypeptide
MTMYLWLKLLAFGFAFLDTEVFVTGQSPTPSPTGVSSVQTPHLPTHADSQTPSAGTDTQTFSGSAANAKLNPTPGSNAISDAYLNASETTTLSPSGSAVISTTTIATTPSKPTCDEKYANITVDYLYNKETKLFTAKLNVNENVECGNNTCTNNEVHNLTECKNASVSISHNSCTAPDKTLILDVPPGVEKFQLHDCTQVEKADTTICLKWKNIETFTCDTQNITYRFQCGNMIFDNKEIKLENLEPEHEYKCDSEILYNNHKFTNASKIIKTDFGSPGEPQIIFCRSEAAHQGVITWNPPQRSFHNFTLCYIKETEKDCLNLDKNLIKYDLQNLKPYTKYVLSLHAYIIAKVQRNGSAAMCHFTTKSAPPSQVWNMTVSMTSDNSMHVKCRPPRDRNGPHERYHLEVEAGNTLVRNESHKNCDFRVKDLQYSTDYTFKAYFHNGDYPGEPFILHHSTSYNSKALIAFLAFLIIVTSIALLVVLYKIYDLHKKRSCNLDEQQELVERECNTI

SEQ ID NO: 319 - protein, 626 aa, Artificial Sequence
  Synthetic polypeptide
MTMYLWLKLLAFGFAFLDTEVFVTGQSPTPSPTGLTTAKMPSVPLSSDPLPTHTTAFSPASTFERENDFSETTTSLSPDNTSTQVSPDSLDNASAFNTTGVSSVQTPHLPTHADSQTPSAGTDTQTFSGSAANAKLNPTPGSNAISDVPGERSTASTFPTDPVSPLTTTLSLAHHSSAALPARTSNTTITANTSDAYLNASETTTLSPSGSAVISTTTIATTPSKPTCDEKYANITVDYLYNKETKLFTAKLNVNENVECGNNTCTNNEVHNLTECKNASVSISHNSCTAPDKTLILDVPPGVEKFQLHDCTQVEKADTTICLKWKNIETFTCDTQNITYRFQCGNMIFDNKEIKLENLEPEHEYKCDSEILYNNHKFTNASKIIKTDFGSPGEPQIIFCRSEAAHQGVITWNPPQRSFHNFTLCYIKETEKDCLNLDKNLIKYDLQNLKPYTKYVLSLHAYIIAKVQRNGSAAMCHFTTKSAPPSQVWNMTVSMTSDNSMHVKCRPPRDRNGPHERYHLEVEAGNTLVRNESHKNCDFRVKDLQYSTDYTFKAYFHNGDYPGEPFILHHSTSYNSKALIAFLAFLIIVTSIALLVVLYKIYDLHKKRSCNLDEQQELVERECNTI

SEQ ID NO: 320 - protein, 560 aa, Artificial Sequence
  Synthetic polypeptide
MTMYLWLKLLAFGFAFLDTEVFVTGQSPTPSPTGVSSVQTPHLPTHADSQTPSAGTDTQTFSGSAANAKLNPTPGSNAISDVPGERSTASTFPTDPVSPLTTTLSLAHHSSAALPARTSNTTITANTSDAYLNASETTTLSPSGSAVISTTTIATTPSKPTCDEKYANITVDYLYNKETKLFTAKLNVNENVECGNNTCTNNEVHNLTECKNASVSISHNSCTAPDKTLILDVPPGVEKFQLHDCTQVEKADTTICLKWKNIETFTCDTQNITYRFQCGNMIFDNKEIKLENLEPEHEYKCDSEILYNNHKFTNASKIIKTDFGSPGEPQIIFCRSEAAHQGVITWNPPQRSFHNFTLCYIKETEKDCLNLDKNLIKYDLQNLKPYTKYVLSLHAYIIAKVQRNGSAAMCHFTTKSAPPSQVWNMTVSMTSDNSMHVKCRPPRDRNGPHERYHLEVEAGNTLVRNESHKNCDFRVKDLQYSTDYTFKAYFHNGDYPGEPFILHHSTSYNSKALIAFLAFLIIVTSIALLVVLYKIYDLHKKRSCNLDEQQELVERECNTI

SEQ ID NO: 321 - protein, 465 aa, Artificial Sequence
  Synthetic polypeptide
MTMYLWLKLLAFGFAFLDTEVFVTGQSPTPSPTDAYLNASETTTLSPSGSAVISTTTIATTPSKPTCDEKYANITVDYLYNKETKLFTAKLNVNENVECGNNTCTNNEVHNLTECKNASVSISHNSCTAPDKTLILDVPPGVEKFQLHDCTQVEKADTTICLKWKNIETFTCDTQNITYRFQCGNMIFDNKEIKLENLEPEHEYKCDSEILYNNHKFTNASKIIKTDFGSPGEPQIIFCRSEAAHQGVITWNPPQRSFHNFTLCYIKETEKDCLNLDKNLIKYDLQNLKPYTKYVLSLHAYIIAKVQRNGSAAMCHFTTKSAPPSQVWNMTVSMTSDNSMHVKCRPPRDRNGPHERYHLEVEAGNTLVRNESHKNCDFRVKDLQYSTDYTFKAYFHNGDYPGEPFILHHSTSYNSKALIAFLAFLIIVTSIALLVVLYKIYDLHKKRSCNLDEQQELVERECNTI

SEQ ID NO: 322 - protein, 578 aa, Artificial Sequence
  Synthetic polypeptide
MTMYLWLKLLAFGFAFLDTEVFVTGQSPTPSPTGLTTAKMPSVPLSSDPLPTHTTAFSPASTFERENDFSETTTSLSPDNTSTQVSPDSLDNASAFNTTGVSSVQTPHLPTHADSQTPSAGTDTQTFSGSAANAKLNPTPGSNAISDAYLNASETTTLSPSGSAVISTTTIATTPSKPTCDEKYANITVDYLYNKETKLFTAKLNVNENVECGNNTCTNNEVHNLTECKNASVSISHNSCTAPDKTLILDVPPGVEKFQLHDCTQVEKADTTICLKWKNIETFTCDTQNITYRFQCGNMIFDNKEIKLENLEPEHEYKCDSEILYNNHKFTNASKIIKTDFGSPGEPQIIFCRSEAAHQGVITWNPPQRSFHNFTLCYIKETEKDCLNLDKNLIKYDLQNLKPYTKYVLSLHAYIIAKVQRNGSAAMCHFTTKSAPPSQVWNMTVSMTSDNSMHVKCRPPRDRNGPHERYHLEVEAGNTLVRNESHKNCDFRVKDLQYSTDYTFKAYFHNGDYPGEPFILHHSTSYNSKALIAFLAFLIIVTSIALLVVLYKIYDLHKKRSCNLDEQQELVERECNTI

SEQ ID NO: 323 - protein, 756 aa, Artificial Sequence
  Synthetic polypeptide
MYLWLKLLAFGFAFLDTEVFVTGQSPTPSPTGLTTAKMPSVPLSSDPLPTHTTAFSPASTFERENDFSETTTSLSPDNTSTQVSPDSLDNASAFNTTGVSSVQTPHLPTHADSQTPSAGTDTQTFSGSAANAKLNPTPGSNAISDAYLNASETTTLSPSGSAVISTTTIATTPSKPTCDEKYANITVDYLYNKETKLFTAKLNVNENVECGNNTCTNNEVHNLTECKNASVSISHNSCTAPDKTLILDVPPGVEKFQLHDCTQVEKADTTICLKWKNIETFTCDTQNITYRFQCGNMIFDNKEIKLENLEPEHEYKCDSEILYNNHKFTNASKIIKTDFGSPGEPQIIFCRSEAAHQGVITWNPPQRSFHNFTLCYIKETEKDCLNLDKNLIKYDLQNLKPYTKYVLSLHAYIIAKVQRNGSAAMCHFTTKSAPPSQVWNMTVSMTSDNSMHVKCRPPRDRNGPHERYHLEVEAGNTLVRNESHKNCDFRVKDLQYSTDYTFKAYFHNGDYPGEPFILHHSTSYNSKALIAFLAFLIIVTSIALLVVLYKIYDLHKKRSCNLDEQQELVERDDEKQLMNVEPIHADILLETYKRKIADEGRLFLAEFQSIPRVFSKFPIKEARKPFNQNKNRYVDILPYDYNRVELSEINGDAGSNYINASYIDGFKEPRKYIAAQGPRDETVDDFWRMIWEQKATVIVMVTRCEEGNRNKCAEYWPSMEEGTRAFGDVVVKINQHKRCPDYIIQKLNIVNHSTDT

SEQ ID NO: 324 - protein, 804 aa, Artificial Sequence
  Synthetic polypeptide
MYLWLKLLAFGFAFLDTEVFVTGQSPTPSPTGLTTAKMPSVPLSSDPLPTHTTAFSPASTFERENDFSETTTSLSPDNTSTQVSPDSLDNASAFNTTGVSSVQTPHLPTHADSQTPSAGTDTQTFSGSAANAKLNPTPGSNAISDVPGERSTASTFPTDPVSPLTTTLSLAHHSSAALPARTSNTTITANTSDAYLNASETTTLSPSGSAVISTTTIATTPSKPTCDEKYANITVDYLYNKETKLFTAKLNVNENVECGNNTCTNNEVHNLTECKNASVSISHNSCTAPDKTLILDVPPGVEKFQLHDCTQVEKADTTICLKWKNIETFTCDTQNITYRFQCGNMIFDNKEIKLENLEPEHEYKCDSEILYNNHKFTNASKIIKTDFGSPGEPQIIFCRSEAAHQGVITWNPPQRSFHNFTLCYIKETEKDCLNLDKNLIKYDLQNLKPYTKYVLSLHAYIIAKVQRNGSAAMCHFTTKSAPPSQVWNMTVSMTSDNSMHVKCRPPRDRNGPHERYHLEVEAGNTLVRNESHKNCDFRVKDLQYSTDYTFKAYFHNGDYPGEPFILHHSTSYNSKALIAFLAFLIIVTSIALLVVLYKIYDLHKKRSCNLDEQQELVERDDEKQLMNVEPIHADILLETYKRKIADEGRLFLAEFQSIPRVFSKFPIKEARKPFNQNKNRYVDILPYDYNRVELSEINGDAGSNYINASYIDGFKEPRKYIAAQGPRDETVDDFWRMIWEQKATVIVMVTRCEEGNRNKCAEYWPSMEEGTRAFGDVVVKINQHKRCPDYIIQKLNIVNHSTDT

SEQ ID NO: 325 - protein, 643 aa, Artificial Sequence
  Synthetic polypeptide
MYLWLKLLAFGFAFLDTEVFVTGQSPTPSPTDAYLNASETTTLSPSGSAVISTTTIATTPSKPTCDEKYANITVDYLYNKETKLFTAKLNVNENVECGNNTCTNNEVHNLTECKNASVSISHNSCTAPDKTLILDVPPGVEKFQLHDCTQVEKADTTICLKWKNIETFTCDTQNITYRFQCGNMIFDNKEIKLENLEPEHEYKCDSEILYNNHKFTNASKIIKTDFGSPGEPQIIFCRSEAAHQGVITWNPPQRSFHNFTLCYIKETEKDCLNLDKNLIKYDLQNLKPYTKYVLSLHAYIIAKVQRNGSAAMCHFTTKSAPPSQVWNMTVSMTSDNSMHVKCRPPRDRNGPHERYHLEVEAGNTLVRNESHKNCDFRVKDLQYSTDYTFKAYFHNGDYPGEPFILHHSTSYNSKALIAFLAFLIIVTSIALLVVLYKIYDLHKKRSCNLDEQQELVERDDEKQLMNVEPIHADILLETYKRKIADEGRLFLAEFQSIPRVFSKFPIKEARKPFNQNKNRYVDILPYDYNRVELSEINGDAGSNYINASYIDGFKEPRKYIAAQGPRDETVDDFWRMIWEQKATVIVMVTRCEEGNRNKCAEYWPSMEEGTRAFGDVVVKINQHKRCPDYIIQKLNIVNHSTDT

SEQ ID NO: 326 - protein, 806 aa, Artificial Sequence
  Synthetic polypeptide
MTMYLWLKLLAFGFAFLDTEVFVTGQSPTPSPTGLTTAKMPSVPLSSDPLPTHTTAFSPASTFERENDFSETTTSLSPDNTSTQVSPDSLDNASAFNTTGVSSVQTPHLPTHADSQTPSAGTDTQTFSGSAANAKLNPTPGSNAISDVPGERSTASTFPTDPVSPLTTTLSLAHHSSAALPARTSNTTITANTSDAYLNASETTTLSPSGSAVISTTTIATTPSKPTCDEKYANITVDYLYNKETKLFTAKLNVNENVECGNNTCTNNEVHNLTECKNASVSISHNSCTAPDKTLILDVPPGVEKFQLHDCTQVEKADTTICLKWKNIETFTCDTQNITYRFQCGNMIFDNKEIKLENLEPEHEYKCDSEILYNNHKFTNASKIIKTDFGSPGEPQIIFCRSEAAHQGVITWNPPQRSFHNFTLCYIKETEKDCLNLDKNLIKYDLQNLKPYTKYVLSLHAYIIAKVQRNGSAAMCHFTTKSAPPSQVWNMTVSMTSDNSMHVKCRPPRDRNGPHERYHLEVEAGNTLVRNESHKNCDFRVKDLQYSTDYTFKAYFHNGDYPGEPFILHHSTSYNSKALIAFLAFLIIVTSIALLVVLYKIYDLHKKRSCNLDEQQELVERDDEKQLMNVEPIHADILLETYKRKIADEGRLFLAEFQSIPRVFSKFPIKEARKPFNQNKNRYVDILPYDYNRVELSEINGDAGSNYINASYIDGFKEPRKYIAAQGPRDETVDDFWRMIWEQKATVIVMVTRCEEGNRNKCAEYWPSMEEGTRAFGDVVVKINQHKRCPDYIIQKLNIVNHSTDT

SEQ ID NO: 327 - protein, 740 aa, Artificial Sequence
  Synthetic polypeptide
MTMYLWLKLLAFGFAFLDTEVFVTGQSPTPSPTGVSSVQTPHLPTHADSQTPSAGTDTQTFSGSAANAKLNPTPGSNAISDVPGERSTASTFPTDPVSPLTTTLSLAHHSSAALPARTSNTTITANTSDAYLNASETTTLSPSGSAVISTTTIATTPSKPTCDEKYANITVDYLYNKETKLFTAKLNVNENVECGNNTCTNNEVHNLTECKNASVSISHNSCTAPDKTLILDVPPGVEKFQLHDCTQVEKADTTICLKWKNIETFTCDTQNITYRFQCGNMIFDNKEIKLENLEPEHEYKCDSEILYNNHKFTNASKIIKTDFGSPGEPQIIFCRSEAAHQGVITWNPPQRSFHNFTLCYIKETEKDCLNLDKNLIKYDLQNLKPYTKYVLSLHAYIIAKVQRNGSAAMCHFTTKSAPPSQVWNMTVSMTSDNSMHVKCRPPRDRNGPHERYHLEVEAGNTLVRNESHKNCDFRVKDLQYSTDYTFKAYFHNGDYPGEPFILHHSTSYNSKALIAFLAFLIIVTSIALLVVLYKIYDLHKKRSCNLDEQQELVERDDEKQLMNVEPIHADILLETYKRKIADEGRLFLAEFQSIPRVFSKFPIKEARKPFNQNKNRYVDILPYDYNRVELSEINGDAGSNYINASYIDGFKEPRKYIAAQGPRDETVDDFWRMIWEQKATVIVMVTRCEEGNRNKCAEYWPSMEEGTRAFGDVVVKINQHKRCPDYIIQKLNIVNHSTDT

SEQ ID NO: 328 - protein, 645 aa, Artificial Sequence
  Synthetic polypeptide
MTMYLWLKLLAFGFAFLDTEVFVTGQSPTPSPTDAYLNASETTTLSPSGSAVISTTTIATTPSKPTCDEKYANITVDYLYNKETKLFTAKLNVNENVECGNNTCTNNEVHNLTECKNASVSISHNSCTAPDKTLILDVPPGVEKFQLHDCTQVEKADTTICLKWKNIETFTCDTQNITYRFQCGNMIFDNKEIKLENLEPEHEYKCDSEILYNNHKFTNASKIIKTDFGSPGEPQIIFCRSEAAHQGVITWNPPQRSFHNFTLCYIKETEKDCLNLDKNLIKYDLQNLKPYTKYVLSLHAYIIAKVQRNGSAAMCHFTTKSAPPSQVWNMTVSMTSDNSMHVKCRPPRDRNGPHERYHLEVEAGNTLVRNESHKNCDFRVKDLQYSTDYTFKAYFHNGDYPGEPFILHHSTSYNSKALIAFLAFLIIVTSIALLVVLYKIYDLHKKRSCNLDEQQELVERDDEKQLMNVEPIHADILLETYKRKIADEGRLFLAEFQSIPRVFSKFPIKEARKPFNQNKNRYVDILPYDYNRVELSEINGDAGSNYINASYIDGFKEPRKYIAAQGPRDETVDDFWRMIWEQKATVIVMVTRCEEGNRNKCAEYWPSMEEGTRAFGDVVVKINQHKRCPDYIIQKLNIVNHSTDT

SEQ ID NO: 329 - protein, 758 aa, Artificial Sequence
  Synthetic polypeptide
MTMYLWLKLLAFGFAFLDTEVFVTGQSPTPSPTGLTTAKMPSVPLSSDPLPTHTTAFSPASTFERENDFSETTTSLSPDNTSTQVSPDSLDNASAFNTTGVSSVQTPHLPTHADSQTPSAGTDTQTFSGSAANAKLNPTPGSNAISDAYLNASETTTLSPSGSAVISTTTIATTPSKPTCDEKYANITVDYLYNKETKLFTAKLNVNENVECGNNTCTNNEVHNLTECKNASVSISHNSCTAPDKTLILDVPPGVEKFQLHDCTQVEKADTTICLKWKNIETFTCDTQNITYRFQCGNMIFDNKEIKLENLEPEHEYKCDSEILYNNHKFTNASKIIKTDFGSPGEPQIIFCRSEAAHQGVITWNPPQRSFHNFTLCYIKETEKDCLNLDKNLIKYDLQNLKPYTKYVLSLHAYIIAKVQRNGSAAMCHFTTKSAPPSQVWNMTVSMTSDNSMHVKCRPPRDRNGPHERYHLEVEAGNTLVRNESHKNCDFRVKDLQYSTDYTFKAYFHNGDYPGEPFILHHSTSYNSKALIAFLAFLIIVTSIALLVVLYKIYDLHKKRSCNLDEQQELVERDDEKQLMNVEPIHADILLETYKRKIADEGRLFLAEFQSIPRVFSKFPIKEARKPFNQNKNRYVDILPYDYNRVELSEINGDAGSNYINASYIDGFKEPRKYIAAQGPRDETVDDFWRMIWEQKATVIVMVTRCEEGNRNKCAEYWPSMEEGTRAFGDVVVKINQHKRCPDYIIQKLNIVNHSTDT

SEQ ID NO: 330 - protein, 22 aa, Artificial Sequence
  Synthetic polypeptide
MSESELGRKWDRCLADAVVKIG

SEQ ID NO: 331 - protein, 15 aa, Artificial Sequence
  Synthetic polypeptide
RKWDRCLADAVVKIG

SEQ ID NO: 332 - protein, 11 aa, Artificial Sequence
  Synthetic polypeptide
GSGTGVWRMRS

SEQ ID NO: 333 - protein, 424 aa, Artificial Sequence
  Synthetic polypeptide
MAMWNRPCQRLPQQPLVAEPTAEGEPHLPTGRELTEANRFAYAALCGISLSQLFPEPEHSSFCTEFMAGLVQWLELSEAVLPTMTAFASGLGGEGADVFVQILLKDPILKDDPTVITQDLLSFSLKDGHYDARARVLVCHMTSLLQVPLEELDVLEEMFLESLKEIKEEESEMAEASRKKKENRRKWKRYLLIGLATVGGGTVIGVTGGLAAPLVAAGAATIIGSAGAAALGSAAGIAIMTSLFGAAGAGLTGYKMKKRVGAIEEFTFLPLTEGRQLHITIAVTGWLASGKYRTFSAPWAALAHSREQYCLAWEAKYLMELGNALETILSGLANMVAQEALKYTVLSGIVAALTWPASLLSVANVIDNPWGVCLHRSAEVGKHLAHILLSRQQGRRPVTLIGFSLGARVIYFCLQEMAQEKGLL

SEQ ID NO: 334 - protein, 384 aa, Artificial Sequence
  Synthetic polypeptide
MAMWNRPCQRLPQQPLVAEPTAEGEPHLPTGRELTEANRFAYAALCGISLSQLFPEPEHSSFCTEFMAGLVQWLELSEAVLPTMTAFASGLGGEGADVFVQILLKDPILKDDPTVITQDLLSFSLKDGHYDARARVLVCHMTSLLQVPLEELDVLEEMFLESLKEIKEEESEMAEASRKKKENRRKWKRYLLIGLATVGGGTVIGVTGGLAAPLVAAGAATIIGSAGAAALGSAAGIAIMTSLFGAAGAGLTGTFSAPWAALAHSREQYCLAWEAKYLMELGNALETILSGLANMVAQEALKYTVLSGIVAALTWPASLLSVANVIDNPWGVCLHRSAEVGKHLAHILLSRQQGRRPVTLIGFSLGARVIYFCLQEMAQEKGLL

SEQ ID NO: 335 - protein, 81 aa, Artificial Sequence
  Synthetic polypeptide
MAMWNRPCQRLPQQPLVAEPTAEGEPHLPTGRELTEANRFAYAALCGISLSQLFPEPEHRWIACAQEFETSLVNMVKPHLY

SEQ ID NO: 336 - protein, 33 aa, Artificial Sequence
  Synthetic polypeptide
RQKGRLREFSGDRSGSGQRLYAWGKGQVNIRAC

SEQ ID NO: 337 - protein, 418 aa, Artificial Sequence
  Synthetic polypeptide
MGWQPMGENWGCLEEMLNEDQSREPPGHLGSRRSGKDGRLDIYGERRDATRSSTSRYKPGTGSFSKDAQGPMGHFSQGLADMEVQPGEAATLSCTLTSDLGPGTWFKDGVKLTTQDGVIFKQDGLVHSLFITHVQGTQAGRYTFVAGDQQSEATLTVQDSPTIAPDVTEKLREPLVVKAGKPVIVKIPFQSHLPIQAAWRKDGAEVVGSSDREAQVDLGDGYTRLCLPSAGRKDCGQYSVTLRSEGGSVQAELTLQVIDKPDPPQGPMEVQDCHRAGVCLRWRPPRDNGGRTVECYVVERRQAGRSTWLKVGEAPADSTTFTDAHVEPGRKYTFRVRAVTSEGAGEALESEEILVAPEALPKAPSAPAILSASSQGITLTWTAPRGPGSAHILGYLIERRKKGSNTWTAVNDQPVPGQ

SEQ ID NO: 338 - protein, 3258 aa, Artificial Sequence
  Synthetic polypeptide
MAGKLRKSHIPGVSIWQLVEEIPEGCSTPDFEQKPVTSALPEGKNAVFRAVVCGEPRPEVRWQNSKGDLSDSSKYKISSSPGSKEHVLQINKLTGEDTDLYRCTAVNAYGEAACSVRLTVIEVGFRKNRKRHREPQEDLRKELMDFRKLLKKRAPPAPKKKMDLEQIWQLLMTADRKDYEKICLKYGIVDYRGMLRRLQEMKKEQEDKMAQYINTISSLRHIRVTKDGNAKFDLELDLKDSQSKIYLYKDGEMIPYGFNNQTKHCLRRLGKRYEFQIQDLRPEDSGIYQVKVEDAVVFSTELEASAIPPRVVVPLAETHCEEQGDAVFECTLSSPCPSAAWHFRHRLLHPSDKYEVYVSPDGLTHRLVVRGARFSDMGPYSLGTGLYTSSAWLVVEAGKDKDLQSTSADHKLQRQGAQASGAEESGSIESQGEKSREQGPRGGSLEGAGPASGLQHIASPDRDGLGRHGYSLMGDKGTADSAWGPGQEGEGFPVAEGSRATLPRENQSHREGGWARSLAERPHLQGESSESGLGLPEKQQQDRGRDSNSDECWRKAGGWEAGSSRLQAGGLGSSREGKEHRGDSGRQLDRHAPEQLWDARLGPGRGKSDLQGCQSDPVGSWPRGKQIEISQDDSLAEMDRGDAPSRERGRGIVVWGGGTGLGEAGDSNGAGGPGTLELTGGRGSGSKVGMAPESWGSQGGRDADYGEARGYWGSGELLEQIPGGKDFQEPSISGGRKFLLGDGSPEIKAEDSLQEADGICRGESVVTGSAYKTGPGGPGDPRGCEGVLQELRGRDGQETAWASGEVEYDPRSFQSSQGWTAGHRAAGGIGRIESKGTSPWDDTPSSLRKTGAHHGPGVLGPSGGQEGMGGIWVAGLTESGQGVDARSHWLSRAPGLGAQGSGGTLGDKKGLRGPGSIGSEPDFWNGSGSSRVKGPRGETGYKDGLEGPGRMESRYEGGLGYSREISSKSGAGYSYGSGVPGEMGSGHGAGCRVSPRAPAGVESEEGGGYRHGSGAPGGVWSGNEDSGPAGGGSGRVASLKNGSGGPDGAPMNDTRNWASACQAGMDPRGGHHSDGGLGSPGVTGSAGRGGLKAPGVVETVGMGCVEAEPESSGRIRPWGQTGNYGGFRASEALGAFGEGGYEDGSGGPGAMGPGSLRAGSKVGEGDGTRCPGAKASGAGAGYRDDTRHPESLAPHNGAASGSQWAYGAGNVLGYEDGSELPGPQGTGVRTAYGERSRGLGPRSTGPGGEAGFRDGSGGLQGMGSADGPGCRKGIGSSGEMGSVDKEGYKKDLGAPENMGSGSKADYRDGVGGSGAMGSMDEAGYRKDLGAPEGISSGSKADYRGGLQDSREAGSGSKADYSGGLKGSREIGSMDETDNRKDLGVPEGMGAGYRAGLRGPGEMGSLDESGHRNGIGGYGEMGSGYREDLGAPEGMGTGSKAGYRDGLRGSGEMRSMDEAGYRKNLGAPERMDSGSKAGYRGGLRGSGEMGLIEAGYRKDLGVSEGGGSGSKAGYRGGLGSGEMGSVDKAGYRKDLGASEAIGSGSKAGFTDGLGGSEEMGSVNKAGYRKDLGAPKGMGSGSKASFRDGLGGSGEMGSVNEAGYRKDLGVPEGIGSGSKAGFRDGLGGSEEMGSVNKAGYRKDLGAPKGIGSGSKAGFRDGLGSSGEMGSMDEAGYRKNLGAPEGIGSGSKAGFRDGLGSSVEMGSVNEAGYRKDLGAPEGMGSGSKAGFRDGLGGSGEMGSVNEAGYRKDLGAPKGIGSGSKADFRDALGSSGEMGSMDEAGYRKDLWAPEGIGSGSKAGFRDGLGSSVEMGSVNEAGYRKDLGAPEGMGSGSKAGFRDGLGGSGEMGSVNEAGYRKDLGAPKGIGSGSKADFRDALGSSGEMGSMDEAGYRKDLWAPEGIGSGSKAGFRDGLGSSVEMGSVNEAGYRKDLGAPEGMGSGSKEGFRDGLGGSEEMGSVNKAGYRKDLGAPKGMGSGSKEGFRDGLGGSEEMGSMDEAGYRKDLGAPEGIGSGSKAGFRDGLGGSEEMRSMDEAGYRKDLGAPERIGSGSKAGFRDGLGSSVEMGSVNEAGYRKDLGAPKGMGSGSKTGFRDGLGGSEEMESMDEAGYRKDLGAPEGIGSGSKAGFRDGLGSSTEMGSVNEAGYRKDLGAPKGMGSESKAGFRDGLGSSGEMGSMDEAGYRKDLGAPEGMGSGSKAGFRDGLGGSEEMGSVNKAGYRKDLGAPKGMGSGSKAGFRDGLGSSGEMGSMDEADYRKDLGAPEEMGSGSYTDYRNGLGSSGKISSGDEAGYKNVLGGSGRNPLGSEAGSRGSLEDSGYILSWNEAGSRQGFGGTSGMGSGSEVSYRGGSGGSGETGPEGKMGYGDGSGRLGVPGSLAGIGHEAGPRGHKAMGHRSGYWVASEGDTNSKDGPERARETRLVDGAGPGVEPGMAGMPGTAGGMAHRDSLRGTGVLGSQGGRQTLSDERGSTKDLGGYGTSGIPEASEAAGAKGKPDVKEWQDSSGTPGSSRDRGAPRVKDRSPDQAGIMGASGFLDGKGAVEGETWAGMAALGSGYERDIWKAGPGMTDRGRVAGQGGLASQGGGDSLLGGRRVGSGSSVGTGQDLDSGSMPGGRGKSTSGPADRQGTSNAWAPDWENQGFSQGSIDAGKQPAGSRASGSLQEKDAAFGGTHEGPGGFKGGEGAPGQEAAGGCRSPWSLDSKGSSPGRGSSVDAEDSGILGKGNSTEWGNALTPKPGESGPQGAWNGLDGPFGRKASRDRSGGTQDLSSQRGKGQRGGKRSLGEQGSLEAENGEVQGPGALKEDEGQGVEEAGRSGRRPGSLRSRSQAQSGAEVGGGKRRGADEAGSMGWQPMGENWGCLEEMLNEDQSREPPGHLGSRRSGKDGRLDIYGERRDATRSSTSRYKPGTGSFSKDAQGPMGHFSQGLADMEVQPGEAATLSCTLTSDLGPGTWFKDGVKLTTQDGVIFKQDGLVHSLFITHVQGTQAGRYTFVAGDQQSEATLTVQDSPTIAPDVTEKLREPLVVKAGKPVIVKIPFQSHLPIQAAWRKDGAEVVGSSDREAQVDLGDGYTRLCLPSAGRKDCGQYSVTLRSEGGSVQAELTLQVIDKPDPPQGPMEVQDCHRAGVCLRWRPPRDNGGRTVECYVVERRQAGRSTWLKVGEAPADSTTFTDAHVEPGRKYTFRVRAVTSEGAGEALESEEILVAPEALPKAPSAPAILSASSQGITLTWTAPRGPGSAHILGYLIERRKKGSNTWTAVNDQPVPGQ

SEQ ID NO: 339 - protein, 603 aa, Artificial Sequence
  Synthetic polypeptide
MGWQPMGENWGCLEEMLNEDQSREPPGHLGSRRSGKDGRLDIYGERRDATRSSTSRYKPGTGSFSKDAQGPMGHFSQGLADMEVQPGEAATLSCTLTSDLGPGTWFKDGVKLTTQDGVIFKQDGLVHSLFITHVQGTQAGRYTFVAGDQQSEATLTVQDSPTIAPDVTEKLREPLVVKAGKPVIVKIPFQSHLPIQAAWRKDGAEVVGSSDREAQVDLGDGYTRLCLPSAGRKDCGQYSVTLRSEGGSVQAELTLQVIDKPDPPQGPMEVQDCHRAGVCLRWRPPRDNGGRTVECYVVERRQAGRSTWLKVGEAPADSTTFTDAHVEPGRKYTFRVRAVTSEGAGEALESEEILVAPEALPKAPSAPAILSASSQGITLTWTAPRGPGSAHILGYLIERRKKGSNTWTAVNDQPVPERRWTVADVRQGCQYEFRVTAVAPSGPGEPGPPSDAVFARDPMRPPGLVRNLQVTDRSNTSITLSWAGPDTQEGDEAQGYVVELCSSDSLQWLPCHVGTVPVTTYTAKGLRPGEGYFVRVTAVNEGGQSQPSALDTLVQAMPVTVGSHKHSTRSPKSQNLVLALSRTRCDLRQVISCLRLVFISSAK

SEQ ID NO: 340 - protein, 3443 aa, Artificial Sequence
  Synthetic polypeptide
MAGKLRKSHIPGVSIWQLVEEIPEGCSTPDFEQKPVTSALPEGKNAVFRAVVCGEPRPEVRWQNSKGDLSDSSKYKISSSPGSKEHVLQINKLTGEDTDLYRCTAVNAYGEAACSVRLTVIEVGFRKNRKRHREPQEDLRKELMDFRKLLKKRAPPAPKKKMDLEQIWQLLMTADRKDYEKICLKYGIVDYRGMLRRLQEMKKEQEDKMAQYINTISSLRHIRVTKDGNAKFDLELDLKDSQSKIYLYKDGEMIPYGFNNQTKHCLRRLGKRYEFQIQDLRPEDSGIYQVKVEDAVVFSTELEASAIPPRVVVPLAETHCEEQGDAVFECTLSSPCPSAAWHFRHRLLHPSDKYEVYVSPDGLTHRLVVRGARFSDMGPYSLGTGLYTSSAWLVVEAGKDKDLQSTSADHKLQRQGAQASGAEESGSIESQGEKSREQGPRGGSLEGAGPASGLQHIASPDRDGLGRHGYSLMGDKGTADSAWGPGQEGEGFPVAEGSRATLPRENQSHREGGWARSLAERPHLQGESSESGLGLPEKQQQDRGRDSNSDECWRKAGGWEAGSSRLQAGGLGSSREGKEHRGDSGRQLDRHAPEQLWDARLGPGRGKSDLQGCQSDPVGSWPRGKQIEISQDDSLAEMDRGDAPSRERGRGIVVWGGGTGLGEAGDSNGAGGPGTLELTGGRGSGSKVGMAPESWGSQGGRDADYGEARGYWGSGELLEQIPGGKDFQEPSISGGRKFLLGDGSPEIKAEDSLQEADGICRGESVVTGSAYKTGPGGPGDPRGCEGVLQELRGRDGQETAWASGEVEYDPRSFQSSQGWTAGHRAAGGIGRIESKGTSPWDDTPSSLRKTGAHHGPGVLGPSGGQEGMGGIWVAGLTESGQGVDARSHWLSRAPGLGAQGSGGTLGDKKGLRGPGSIGSEPDFWNGSGSSRVKGPRGETGYKDGLEGPGRMESRYEGGLGYSREISSKSGAGYSYGSGVPGEMGSGHGAGCRVSPRAPAGVESEEGGGYRHGSGAPGGVWSGNEDSGPAGGGSGRVASLKNGSGGPDGAPMNDTRNWASACQAGMDPRGGHHSDGGLGSPGVTGSAGRGGLKAPGVVETVGMGCVEAEPESSGRIRPWGQTGNYGGFRASEALGAFGEGGYEDGSGGPGAMGPGSLRAGSKVGEGDGTRCPGAKASGAGAGYRDDTRHPESLAPHNGAASGSQWAYGAGNVLGYEDGSELPGPQGTGVRTAYGERSRGLGPRSTGPGGEAGFRDGSGGLQGMGSADGPGCRKGIGSSGEMGSVDKEGYKKDLGAPENMGSGSKADYRDGVGGSGAMGSMDEAGYRKDLGAPEGISSGSKADYRGGLQDSREAGSGSKADYSGGLKGSREIGSMDETDNRKDLGVPEGMGAGYRAGLRGPGEMGSLDESGHRNGIGGYGEMGSGYREDLGAPEGMGTGSKAGYRDGLRGSGEMRSMDEAGYRKNLGAPERMDSGSKAGYRGGLRGSGEMGLIEAGYRKDLGVSEGGGSGSKAGYRGGLGSGEMGSVDKAGYRKDLGASEAIGSGSKAGFTDGLGGSEEMGSVNKAGYRKDLGAPKGMGSGSKASFRDGLGGSGEMGSVNEAGYRKDLGVPEGIGSGSKAGFRDGLGGSEEMGSVNKAGYRKDLGAPKGIGSGSKAGFRDGLGSSGEMGSMDEAGYRKNLGAPEGIGSGSKAGFRDGLGSSVEMGSVNEAGYRKDLGAPEGMGSGSKAGFRDGLGGSGEMGSVNEAGYRKDLGAPKGIGSGSKADFRDALGSSGEMGSMDEAGYRKDLWAPEGIGSGSKAGFRDGLGSSVEMGSVNEAGYRKDLGAPEGMGSGSKAGFRDGLGGSGEMGSVNEAGYRKDLGAPKGIGSGSKADFRDALGSSGEMGSMDEAGYRKDLWAPEGIGSGSKAGFRDGLGSSVEMGSVNEAGYRKDLGAPEGMGSGSKEGFRDGLGGSEEMGSVNKAGYRKDLGAPKGMGSGSKEGFRDGLGGSEEMGSMDEAGYRKDLGAPEGIGSGSKAGFRDGLGGSEEMRSMDEAGYRKDLGAPERIGSGSKAGFRDGLGSSVEMGSVNEAGYRKDLGAPKGMGSGSKTGFRDGLGGSEEMESMDEAGYRKDLGAPEGIGSGSKAGFRDGLGSSTEMGSVNEAGYRKDLGAPKGMGSESKAGFRDGLGSSGEMGSMDEAGYRKDLGAPEGMGSGSKAGFRDGLGGSEEMGSVNKAGYRKDLGAPKGMGSGSKAGFRDGLGSSGEMGSMDEADYRKDLGAPEEMGSGSYTDYRNGLGSSGKISSGDEAGYKNVLGGSGRNPLGSEAGSRGSLEDSGYILSWNEAGSRQGFGGTSGMGSGSEVSYRGGSGGSGETGPEGKMGYGDGSGRLGVPGSLAGIGHEAGPRGHKAMGHRSGYWVASEGDTNSKDGPERARETRLVDGAGPGVEPGMAGMPGTAGGMAHRDSLRGTGVLGSQGGRQTLSDERGSTKDLGGYGTSGIPEASEAAGAKGKPDVKEWQDSSGTPGSSRDRGAPRVKDRSPDQAGIMGASGFLDGKGAVEGETWAGMAALGSGYERDIWKAGPGMTDRGRVAGQGGLASQGGGDSLLGGRRVGSGSSVGTGQDLDSGSMPGGRGKSTSGPADRQGTSNAWAPDWENQGFSQGSIDAGKQPAGSRASGSLQEKDAAFGGTHEGPGGFKGGEGAPGQEAAGGCRSPWSLDSKGSSPGRGSSVDAEDSGILGKGNSTEWGNALTPKPGESGPQGAWNGLDGPFGRKASRDRSGGTQDLSSQRGKGQRGGKRSLGEQGSLEAENGEVQGPGALKEDEGQGVEEAGRSGRRPGSLRSRSQAQSGAEVGGGKRRGADEAGSMGWQPMGENWGCLEEMLNEDQSREPPGHLGSRRSGKDGRLDIYGERRDATRSSTSRYKPGTGSFSKDAQGPMGHFSQGLADMEVQPGEAATLSCTLTSDLGPGTWFKDGVKLTTQDGVIFKQDGLVHSLFITHVQGTQAGRYTFVAGDQQSEATLTVQDSPTIAPDVTEKLREPLVVKAGKPVIVKIPFQSHLPIQAAWRKDGAEVVGSSDREAQVDLGDGYTRLCLPSAGRKDCGQYSVTLRSEGGSVQAELTLQVIDKPDPPQGPMEVQDCHRAGVCLRWRPPRDNGGRTVECYVVERRQAGRSTWLKVGEAPADSTTFTDAHVEPGRKYTFRVRAVTSEGAGEALESEEILVAPEALPKAPSAPAILSASSQGITLTWTAPRGPGSAHILGYLIERRKKGSNTWTAVNDQPVPERRWTVADVRQGCQYEFRVTAVAPSGPGEPGPPSDAVFARDPMRPPGLVRNLQVTDRSNTSITLSWAGPDTQEGDEAQGYVVELCSSDSLQWLPCHVGTVPVTTYTAKGLRPGEGYFVRVTAVNEGGQSQPSALDTLVQAMPVTVGSHKHSTRSPKSQNLVLALSRTRCDLRQVISCLRLVFISSAK

SEQ ID NO: 341 - protein, 33 aa, Artificial Sequence; identical to SEQ ID NO: 336
  Synthetic polypeptide

SEQ ID NO: 342 - protein, 266 aa, Artificial Sequence
  Synthetic polypeptide
MNHSPLKTALAYECFQDQDNSTLALPSDQKMKTGTSGRQRVQEQVMMTVKRQKSKSSQSSTLSHSNRGSMYDGLADNYNYGTTSRSSYYSKFQAGNGSWGYPIYNGTLKREPDNRRFSSYSQMENWSRHYPRGSCNTTGAGSDICFMQKIKASRSEPDLYCDPRGTLRKGTLGSKGQKTTQNRYSFYSTCSGQKAIKKCPVRPPSCASKQDPVYIPPISCNKDLSFGHSRASSKWTDRRTDGWTDGWTDGRTDGRMDGRMDGWMDG

SEQ ID NO: 343 - protein, 69 aa, Artificial Sequence
  Synthetic polypeptide
MSDIEEVVEEYEEEEQEEAAVEEQEEAAEEDAEAEAETEETRAEEDEEEEEAKEAEDGPMEESKPKPRC

SEQ ID NO: 344 - protein, 74 aa, Artificial Sequence
  Synthetic polypeptide
MSDIEEVVEEYEEEHPEEEEDWREDEDEQEEAAEEDAEAEAETEETRAEEDEEEEEAKEAEDGPMEESKPKPRC

SEQ ID NO: 345 - protein, 64 aa, Artificial Sequence
  Synthetic polypeptide
MSDIEEVVEEYEEEAKLEQEEAAEEDAEAEAETEETRAEEDEEEEEAKEAEDGPMEESKPKPRC

SEQ ID NO: 346 - protein, 71 aa, Artificial Sequence
  Synthetic polypeptide
MSDIEEVVEEYEEEYLEHAEAAVEEQEEAAEEDAEAEAETEETRAEEDEEEEEAKEAEDGPMEESKPKPRC

SEQ ID NO: 347 - protein, 81 aa, Artificial Sequence
  Synthetic polypeptide
MSDIEEVVEEYEEEYLEHAEAAVEEEEDWREDEDEQEEAAEEDAEAEAETEETRAEEDEEEEEAKEAEDGPMEESKPKPRC

SEQ ID NO: 348 - protein, 78 aa, Artificial Sequence
  Synthetic polypeptide
MSDIEEVVEEYEEEEQEEAAVEEEEDWREDEDEQEEAAEEDAEAEAETEETRAEDEEEEEAKEAEDGPMEESKPKPRC

SEQ ID NO: 349 - protein, 64 aa, Artificial Sequence
  Synthetic polypeptide
MSDIEEVVEEYEEEEQEEQEEAAEEDAEAEAETEETRAEEDEEEEEAKEAEDGPMEESKPKPRC

SEQ ID NO: 350 - protein, 79 aa, Artificial Sequence
  Synthetic polypeptide
MSDIEEVVEEYEEEEQEEAAVEEEEDWREDEDEQEEAAEEDAEAEAETEETRAEEDEEEEEAKEAEDGPMEESKPKPRC

SEQ ID NO: 351 - protein, 74 aa, Artificial Sequence
  Synthetic polypeptide
MSDIEEVVEEYEEEEQEEEEDWREDEDEQEEAAEEDAEAEAETEETRAEEDEEEEEAKEAEDGPMEESKPKPRC

SEQ ID NO: 352 - protein, 68 aa, Artificial Sequence
  Synthetic polypeptide
MSDIEEVVEEYEEEEQEEAAVEEQEEAAEEDAEAEAETEETRAEDEEEEEAKEAEDGPMEESKPKPRC

SEQ ID NO: 353 - protein, 28 aa, Artificial Sequence
  Synthetic polypeptide
MLHLPLPRSGRTVNFPRSSVSVSASREP

SEQ ID NO: 354 - protein, 35 aa, Artificial Sequence
  Synthetic polypeptide
MTCCSCTSLSALLDFWAEPDNTTALQPEQQSATLF

SEQ ID NO: 355 - protein, 288 aa, Artificial Sequence
  Synthetic polypeptide
MARGPGPLGRPRPDTVAMPKRGKRLKFRAHDACSGRVTVADYANSDPAVVRSGRVKKAVANAVQQEVKSLCGLEASQVPAEEALSGAGEPCDIIDSSDEMDAQEESIHERTVSRKKKSKRHKEELDGAGGEEYPMDIWLLLASYIRPEDIVNFSLICKNAWTVTCTAAFWTRLYRRHYTLDASLPLRLRPESMEKLRCLRACVIRSLYHMYEPFAARISKNPAIPESTPSTLKNSKCLLFWCRKIVGNRQEPMWEFNFKFKKQMLNWYNANIPKSEKMGNTSGPKRFG

SEQ ID NO: 356 - protein, 91 aa, Artificial Sequence
  Synthetic polypeptide
MAYRGQGQKVQKVMVQPINLIFRYLQNRSRIQVWLYEQVNMRIEGCIIGFDEYMNLVLDDAEEIHSKTKSRKQLAFGTVGCSLLKALCSRV

SEQ ID NO: 357 - protein, 51 aa, Artificial Sequence
  Synthetic polypeptide
MRIEGCIIGFDEYMNLVLDDAEEIHSKTKSRKQLAFGTVGCSLLKALCSRV

SEQ ID NO: 358 - protein, 76 aa, Artificial Sequence
  Synthetic polypeptide
MAYRGQGQKVQKVMVQPINLIFRYLQNRSRIQVWLYEQVNMRIEGCIIGFDEYMNLVLDDAEEIHSKTKSRKQLEL

SEQ ID NO: 359 - protein, 36 aa, Artificial Sequence
  Synthetic polypeptide
MRIEGCIIGFDEYMNLVLDDAEEIHSKTKSRKQLEL

SEQ ID NO: 360 - protein, 47 aa, Artificial Sequence [sequence omitted]

SEQ ID NO: 361 - protein, 170 aa, Artificial Sequence
  Synthetic polypeptide
MKVIAILTLLLFCSPTHSSFWQFQRRVKHITGRSAFFSYYGYGCYCGLGDKGIPVDDTDRHSPSSPSPYEKLKEFSCQPVLNSYQFHIVNGAVVCGCTLGPGASCHCRLKACECDKQSVHCFKESLPTYEKNFKQFSSQPSCPHPAKKPGLACWRMRAHLDQLSQLISDT

SEQ ID NO: 362 - protein, 171 aa, Artificial Sequence
  Synthetic polypeptide
MLIATSFFLFFSSVVAAPTHSSFWQFQRRVKHITGRSAFFSYYGYGCYCGLGDKGIPVDDTDSPSSPSPYEKLKEFSCQPVLNSYQFHIVNGAVVCGCTLGPGASCHCRLKACECDKQSVHCFKESLPTYEKNFKQFSSQPSCPHPAKKPGLACWRMRAHLDQLSQLISDT

SEQ ID NO: 363 - protein, 71 aa, Artificial Sequence
  Synthetic polypeptide
MKVIAILTLLLFCSPTHSSFWQFQRRVKHITGRSAFFSYYGYGCYCGLGDKGIPVDDTDRTAAPTLQKSLG

SEQ ID NO: 364 - protein, 74 aa, Artificial Sequence
  Synthetic polypeptide
MLIATSFFLFFSSVVAAPTHSSFWQFQRRVKHITGRSAFFSYYGYGCYCGLGDKGIPVDDTDRTAAPTLQKSLG

SEQ ID NO: 365 - protein, 84 aa, Artificial Sequence
  Synthetic polypeptide
MKVIAILTLLLFCSPTHSSFWQFQRRVKHITGRSAFFSYYGYGCYCGLGDKGIPVDDTDSWALISSSVKWRESPVLHKAAGRIS

SEQ ID NO: 366 - protein, 87 aa, Artificial Sequence
  Synthetic polypeptide
MLIATSFFLFFSSVVAAPTHSSFWQFQRRVKHITGRSAFFSYYGYGCYCGLGDKGIPVDDTDSWALISSSVKWRESPVLHKAAGRIS

SEQ ID NO: 367 - protein, 132 aa, Artificial Sequence
  Synthetic polypeptide
MPTTTALRWTAAARVRRKGRGGWVPAALRSVSQDGVPGCTVMGGETRSPENAVDFTGRCYFTKICKCKLKDIACLKCGNIVGYHVIVPCSSCLLSCNNGHFWMFHSQAVYDINRLDSTGMVAFACSPSYSGG

SEQ ID NO: 368 - protein, 132 aa, Artificial Sequence
  Synthetic polypeptide
MSTNICSFKDRCVSILCCKFCKQVLSSRGMKAVLLADTEIDLFSTDIPPTNAVDFTGRCYFTKICKCKLKDIACLKCGNIVGYHVIVPCSSCLLSCNNGHFWMFHSQAVYDINRLDSTGMVAFACSPSYSGG

SEQ ID NO: 369 - protein, 103 aa, Artificial Sequence
  Synthetic polypeptide
MKAVLLADTEIDLFSTDIPPTNAVDFTGRCYFTKICKCKLKDIACLKCGNIVGYHVIVPCSSCLLSCNNGHFWMFHSQAVYDINRLDSTGMVAFACSPSYSGG

SEQ ID NO: 370 - protein, 92 aa, Artificial Sequence
  Synthetic polypeptide
MSTNICSFKDSAVDFTGRCYFTKICKCKLKDIACLKCGNIVGYHVIVPCSSCLLSCNNGHFWMFHSQAVYDINRLDSTGMVAFACSPSYSGG

SEQ ID NO: 371 - protein, 30 aa, Artificial Sequence
  Synthetic polypeptide
EGSECSLSSQLLESPLKPGEAGKQGPYHPE

SEQ ID NO: 372 - protein, 419 aa, Artificial Sequence
  Synthetic polypeptide
QSKEVGQQLQDDLMKVLNELYSVMKTYHMYNADSISAQSKLKEAEKQEEKQIGKSVKQEDRQTPRSPDSTANVRIEEKHVRRSSVKKIEKMKEKRQAKYTENKLKAIKARNEYLLALEATNASVFKYYIHDLSDLIDQCCDLGYHASLNRALRTFLSAELNLEQSKHEGLDAIENAVENLDATSDKQRLMEMYNNVFCPPMKFEFQPHMGDMASQLCAQQPVQSELVQRCQQLQSRLSTLKIENEEVKKTMEATLQTIQDIVTVEDFDVSDCFQYSNSMESVKSTVSETFMSKPSIAKRRANQQETEQFYFTKMKEYLEGRNLITKLQAKHDLLQKTLGESQRTDCSLARRSSTVRKQDSSQAIPLVVESCIRFISRHGDGWKKREKNGAMGNGKEWHFSYLSVVLTFRTTLVFPVLKR

SEQ ID NO: 373 - protein, 173 aa, Artificial Sequence
  Synthetic polypeptide
VKKTMEATLQTIQDIVTVEDFDVSDCFQYSNSMESVKSTVSETFMSKPSIAKRRANQQETEQFYFTKMKEYLEGRNLITKLQAKHDLLQKTLGESQRTDCSLARRSSTVRKQDSSQAIPLVVESCIRFISRHGDGWKKREKNGAMGNGKEWHFSYLSVVLTFRTTLVFPVLKR

SEQ ID NO: 374 - protein, 168 aa, Artificial Sequence
  Synthetic polypeptide
MAMASPAIGQRPYPLLLDPEPPRYLQSLSGPELPPPPPDRSSRLCVPAPLSTAPGAREGRSARRAARGNLEPPPRASRPARPLRPGLQQRLRRRPGAPRPRDVRSIFEQPQDPRVPAERGEGHCFAELVLPGGPGWCDLCGREVLRQALRCTIAGVIKMRSHWSRMAS

SEQ ID NO: 375 - protein, 44 aa, Artificial Sequence
  Synthetic polypeptide
MCTEGAFPHRSACSLPLTHVHTHIHVCVPVLWGSVPRDLGQFQT

SEQ ID NO: 376 - protein, 42 aa, Artificial Sequence
  Synthetic polypeptide
MCTEGAFPHRSACSLPLTHVHTHIHVCVPVLWGSVPRGFVGS

SEQ ID NO: 377 - protein, 362 aa, Artificial Sequence
  Synthetic polypeptide
MTVARPSVPAALPLLGELPRLLLLVLLCLPAVWGDCGLPPDVPNAQPALEGRTSFPEDTVITYKCEESFVKIPGEKDSVICLKGSQWSDIEEFCNRSCEVPTRLNSASLKQPYITQNYFPVGTVVEYECRPGYRREPSLSPKLTCLQNLKWSTAVEFCKKKSCPNPGEIRNGQIDVPGGILFGATISFSCNTGYKLFGSTSSFCLISGSSVQWSDPLPECREIYCPAPPQIDNGIIQGERDHYGYRQSVTYACNKGFTMIGEHSIYCTVNNDEGEWSGPPPECRGKSLTSKVPPTVQKPTTVNVPTTEVSPTSQKTTTKTTTPNAQATRSTPVSRTTKHFHETTPNKGSGTTSGTTRLLSEL

SEQ ID NO: 378 - protein, 298 aa, Artificial Sequence
  Synthetic polypeptide
MTVARPSVPAALPLLGELPRLLLLVLLCLPAVWGDCGLPPDVPNAQPALEGRTSFPEDTVITYKCEESFVKIPGEKDSVICLKGSQWSDIEEFCNQKSCPNPGEIRNGQIDVPGGILFGATISFSCNTGYKLFGSTSSFCLISGSSVQWSDPLPECREIYCPAPPQIDNGIIQGERDHYGYRQSVTYACNKGFTMIGEHSIYCTVNNDEGEWSGPPPECRGKSLTSKVPPTVQKPTTVNVPTTEVSPTSQKTTTKTTTPNAQATRSTPVSRTTKHFHETTPNKGSGTTSGTTRLLSEL

SEQ ID NO: 379 - protein, 157 aa, Artificial Sequence
  Synthetic polypeptide
MGAAGLLGVFLALVAPGVLGISCGSPPPILNGRISYYSTPIAVGTVIRYSCSGTFRLIGEKSLLCITKDKVDGTWDKPAPKCEYFNKYSSCPEPIVPGGYKIRGSTPYRHGDSVTFACKTNFSMNGNKSVWCQANNMWGPTRLPTCVSGKPKDWTPL

SEQ ID NO: 380 - protein, 524 aa, Artificial Sequence
  Synthetic polypeptide
MGAAGLLGVFLALVAPGVLGISCGSPPPILNGRISYYSTPIAVGTVIRYSCSGTFRLIGEKSLLCITKDKVDGTWDKPAPKCEYFNKYSSCPEPIVPGGYKIRGSTPYRHGDSVTFACKTNFSMNGNKSVWCQANNMWGPTRLPTCVSVFPLECPALPMIHNGHHTSENVGSIAPGLSVTYSCESGYLLVGEKIINCLSSGKWSAVPPTCEEARCKSLGRFPNGKVKEPPILRVGVTANFFCDEGYRLQGPPSSRCVIAGQGVAWTKMPVCEEIFCPSPPPILNGRHIGNSLANVSYGSIVTYTCDPDPEEGVNFILIGESTLRCTVDSQKTGTWSGPAPRCELSTSAVQCPHPQILRGRMVSGQKDRYTYNDTVIFACMFGFTLKGSKQIRCNAQGTWEPSAPVCEKECQAPPNILNGQKEDRHMVRFDPGTSIKYSCNPGYVLVGEESIQCTSEGVWTPPVPQCKVAACEATGRQLLTKPQHQFVRPDVNSSCGEGYKLSGSVYQECQGTIPWFMEIRLCKV

SEQ ID NO: 381 - protein, 71 aa, Artificial Sequence
  Synthetic polypeptide
MAPPVRLERPFPSRRFPGLLLAALVLLLSSFSVLERSPHDLLHKWAVSSASSAGMLPLQRPSWNPPTQVEH

SEQ ID NO: 382 - protein, 92 aa, Artificial Sequence
  Synthetic polypeptide
MAQKRPACTLKPECVQQLLVCSQEAKKSAYCPYSHFPVGAALLTQEGRIFKGCNIENACYPLGICAERTAIQKAVSEGYKDFRAIAIARNVE

SEQ ID NO: 383 - protein, 90 aa, Artificial Sequence
  Synthetic polypeptide
MAQKRPACTLKPECVQQLLVCSQEAKKSAYCPYSHFPVGAALLTQEGRIFKGCNIENACYPLGICAERTAIQKAVSEGYKDFRAIAIARG

SEQ ID NO: 384 - protein, 138 aa, Artificial Sequence
  Synthetic polypeptide
MAQKRPACTLKPECVQQLLVCSQEAKKSAYCPYSHFPVGAALLTQEGRIFKGCNIENACYPLGICAERTAIQKAVSEGYKDFRAIAIASDMQDDFISPCGACRQVMREVRHPFALPSSSAMVVRLPQPCGTVSPLNLL

SEQ ID NO: 385 - protein, 377 aa, Artificial Sequence
  Synthetic polypeptide
MRPFFLLCFALPGLLHAQQACSRGACYPPVGDLLVGRTRFLRASSTCGLTKPETYCTQYGEWQMKCCKCDSRQPHNYYSHRVENVASSSGPMRWWQSQNDVNPVSLQLDLDRRFQLQEVMMEFQGPMPAGMLIERSSDFGKTWRVYQYLAADCTSTFPRVRQGRPQSWQDVRCQSLPQRPNARLNGGKVQLNLMDLVSGIPATQSQKIQEVGEITNLRVNFTRLAPVPQRGYHPPSAYYAVSQLRLQGSCFCHGHADRCAPKPGASAGPSTAVQVHDVCVCQHNTAGPNCERCAPFYNNRPWRPAEGQDAHECQRCDCNGHSETCHFDPAVFAASQGAYGGVCDNCRDHTEGKNCERCQLHYFRNRRPGASIQETCI

SEQ ID NO: 386 - protein, 377 aa, Artificial Sequence; identical to SEQ ID NO: 385
  Synthetic polypeptide

SEQ ID NO: 387 - protein, 758 aa, Artificial Sequence
  Synthetic polypeptide
MQGLPDPPSQRGIIPRAFEHVFESVQCAENTKFLVRASYLEIYNEDVRDLLGADTKQKLELKEHPEKGVYVKGLSMHTVHSVAQCEHIMETGWKNRSVGYTLMNKDSSRSHSIFTISIEMSAVDERGKDHLRAGKLNLVDLAGSERQSKTGATGERLKEATKINLSLSALGNVISALVDGRCKHVPYRDSKLTRLLQDSLGGNTKTLMVACLSPADNNYDETLSTLRYANRAKNIRNKPRINEDPKDALLREYQEEIKKLKAILTQQMSPSSLSALLSRQVPPDPVQVEEKLLPQPVIQHDVEAEKQLIREEYEERLARLKADYKAEQESRARLEEDITAMRNSYDVRLSTLEENLRKETEAVLQVGVLYKAEVMSRAEFASSAEYPPAFQYETVVKPKVFSTTDTLPSDDVSKTQVSSRFAELPKVEPSKSEISLGSSESSSLEETSVSEAFPGPEEPSNVEVSMPTEESRSRYFLDECLGQEAAGHLLGEQNYLPQEEPQEVPLQGLLGLQDPFAEVEAKLARLSSTVARTDAPQADVPKVPVQVPAPTDLLEPSDARPEAEAADDFPPRPEVDLASEVALEVVRTAEPGVWLEAQAPVALVAQPEPLPATAGVKRESVGMEVAVLTDDPLPVVDQQQVLARLQLLEQQVVGGEQAKNKDLKEKHKRRKRYADERRKQLVAALQNSDEDSGDWVLLNVYDSIQEEVRAKSKLLEKMQRKMCLSPSTMIVRPPQPCGTVSPLNFFFFINYPVSGMSL

SEQ ID NO: 388 - protein, 858 aa, Artificial Sequence
  Synthetic polypeptide
MASEAVKVVVRCRPMNQRERELRCQPVVTVDCARAQCCIQNPGAADEPPKQFTFDGAYHVDHVTEQIYNEIAYPLVEGVTEGYNGTIFAYGQTGSGKSFTMQGLPDPPSQRGIIPRAFEHVFESVQCAENTKFLVRASYLEIYNEDVRDLLGADTKQKLELKEHPEKGVYVKGLSMHTVHSVAQCEHIMETGWKNRSVGYTLMNKDSSRSHSIFTISIEMSAVDERGKDHLRAGKLNLVDLAGSERQSKTGATGERLKEATKINLSLSALGNVISALVDGRCKHVPYRDSKLTRLLQDSLGGNTKTLMVACLSPADNNYDETLSTLRYANRAKNIRNKPRINEDPKDALLREYQEEIKKLKAILTQQMSPSSLSALLSRQVPPDPVQVEEKLLPQPVIQHDVEAEKQLIREEYEERLARLKADYKAEQESRARLEEDITAMRNSYDVRLSTLEENLRKETEAVLQVGVLYKAEVMSRAEFASSAEYPPAFQYETVVKPKVFSTTDTLPSDDVSKTQVSSRFAELPKVEPSKSEISLGSSESSSLEETSVSEAFPGPEEPSNVEVSMPTEESRSRYFLDECLGQEAAGHLLGEQNYLPQEEPQEVPLQGLLGLQDPFAEVEAKLARLSSTVARTDAPQADVPKVPVQVPAPTDLLEPSDARPEAEAADDFPPRPEVDLASEVALEVVRTAEPGVWLEAQAPVALVAQPEPLPATAGVKRESVGMEVAVLTDDPLPVVDQQQVLARLQLLEQQVVGGEQAKNKDLKEKHKRRKRYADERRKQLVAALQNSDEDSGDWVLLNVYDSIQEEVRAKSKLLEKMQRKMCLSPSTMIVRPPQPCGTVSPLNFFFFINYPVSGMSL

SEQ ID NO: 389 - protein, 348 aa, Artificial Sequence
  Synthetic polypeptide
MLPRWELALYLLASLGFHFYSFYEVYKVSREHEEELDQEFELETDTLFGGLKKDATDFEWSFWMEWGKQWLVWLLLGHMVVSQMATLLARKHRPWILMLYGMWACWCVLGTPGVAMVLLHTTISFCVAQFRSQLLTWLCSLLLLSTLRLQGVEEVKRRWYKTENEYYLLQFTLTVRCLYYTSFSLELCWQQLPAASTSYSFPWMLAYVFYYPVLHNGPILSFSEFIKQMQQQEHDSLKASLCVLALGLGRLLCWWWLAELMAHLMYMHAIYSSIPLLETVSCWTLGGLALAQVLFFYVKYLVLFGVPALLMRLDGLTPPALPRCVSTMFSFTGMWRYFDVGLHNFLIS

SEQ ID NO: 390 - protein, 211 aa, Artificial Sequence
  Synthetic polypeptide
MLPRWELALYLLASLGFHFYSFYEVYKVSREHEEELDQEFELETDTLFGGLKKDATDFEWSFWMEWGKQWLVWLLLGHMVVSQMATLLARKMQQQEHDSLKASLCVLALGLGRLLCWWWLAELMAHLMYMHAIYSSIPLLETVSCWTLGGLALAQVLFFYVKYLVLFGVPALLMRLDGLTPPALPRCVSTMFSFTGMWRYFDVGLHNFLIS

SEQ ID NO: 391 - protein, 283 aa, Artificial Sequence
  Synthetic polypeptide
MLPRWELALYLLASLGFHFYSFYEVYKVSREHEEELDQEFELETDTLFGGLKKDATDFEWSFWMEWGKQWLVWLLLGHMVVSQMATLLARKRRWYKTENEYYLLQFTLTVRCLYYTSFSLELCWQQLPAASTSYSFPWMLAYVFYYPVLHNGPILSFSEFIKQMQQQEHDSLKASLCVLALGLGRLLCWWWLAELMAHLMYMHAIYSSIPLLETVSCWTLGGLALAQVLFFYVKYLVLFGVPALLMRLDGLTPPALPRCVSTMFSFTGMWRYFDVGLHNFLIS

SEQ ID NO: 392 - protein, 349 aa, Artificial Sequence
  Synthetic polypeptide
MSLGLGSAERGVLGTRGARERCRRRRPGQPGEHEEELDQEFELETDTLFGGLKKDATDFEWSFWMEWGKQWLVWLLLGHMVVSQMATLLARKHRPWILMLYGMWACWCVLGTPGVAMVLLHTTISFCVAQFRSQLLTWLCSLLLLSTLRLQGVEEVKRRWYKTENEYYLLQFTLTVRCLYYTSFSLELCWQQLPAASTSYSFPWMLAYVFYYPVLHNGPILSFSEFIKQMQQQEHDSLKASLCVLALGLGRLLCWWWLAELMAHLMYMHAIYSSIPLLETVSCWTLGGLALAQVLFFYVKYLVLFGVPALLMRLDGLTPPALPRCVSTMFSFTGMWRYFDVGLHNFLIS

SEQ ID NO: 393 - protein, 285 aa, Artificial Sequence
  Synthetic polypeptide
MEWGKQWLVWLLLGHMVVSQMATLLARKHRPWILMLYGMWACWCVLGTPGVAMVLLHTTISFCVAQFRSQLLTWLCSLLLLSTLRLQGVEEVKRRWYKTENEYYLLQFTLTVRCLYYTSFSLELCWQQLPAASTSYSFPWMLAYVFYYPVLHNGPILSFSEFIKQMQQQEHDSLKASLCVLALGLGRLLCWWWLAELMAHLMYMHAIYSSIPLLETVSCWTLGGLALAQVLFFYVKYLVLFGVPALLMRLDGLTPPALPRCVSTMFSFTGMWRYFDVGLHNFLIS

SEQ ID NO: 394 - protein, 303 aa, Artificial Sequence
  Synthetic polypeptide
MKFTKSPEDATDFEWSFWMEWGKQWLVWLLLGHMVVSQMATLLARKHRPWILMLYGMWACWCVLGTPGVAMVLLHTTISFCVAQFRSQLLTWLCSLLLLSTLRLQGVEEVKRRWYKTENEYYLLQFTLTVRCLYYTSFSLELCWQQLPAASTSYSFPWMLAYVFYYPVLHNGPILSFSEFIKQMQQQEHDSLKASLCVLALGLGRLLCWWWLAELMAHLMYMHAIYSSIPLLETVSCWTLGGLALAQVLFFYVKYLVLFGVPALLMRLDGLTPPALPRCVSTMFSFTGMWRYFDVGLHNFLIS

SEQ ID NO: 395 - protein, 38 aa, Artificial Sequence
  Synthetic polypeptide
MRLDGLTPPALPRCVSTMFSFTGMWRYFDVGLHNFLIS

SEQ ID NO: 396 - protein, 325 aa, Artificial Sequence
  Synthetic polypeptide
MPGMMEKGPELLGKNRSANGSAKSPAGGGGSGASSTNGGLHYSEPESGCSSDDEHDVGMRVGAEYQARIPEFDPGATKYTDKDNGGMLVWSPYHSIPDAKLDEYIAIAKEKHGYNVEQALGMLFWHKHNIEKSLADLPNFTPFPDEWTVEDKVLFEQAFSFHGKSFHRIQQMLPDKTIASLVKYYYSWKKTRSRTSLMDRQARKLANRHNQGDSDDDVEETHPMDGNDSDYDPKKEAKKEGNTEQPVQTSKIGLGRREYQSLQHRHHSQRSKCRPPKGMYLTQEDVVAVSCSPNAANTILRQLDMELISLKRQPQFSHLEMWIIV

SEQ ID NO: 397 - protein, 357 aa, Artificial Sequence
  Synthetic polypeptide
MPGMMEKGPELLGKNRSANGSAKSPAGGGGSGASSTNGGLHYSEPESGCSSDDEHDVGMRVGAEYQARIPEFDPVETRSCYVSQAGLKLRGSSHPPSLASQSAGIIGATKYTDKDNGGMLVWSPYHSIPDAKLDEYIAIAKEKHGYNVEQALGMLFWHKHNIEKSLADLPNFTPFPDEWTVEDKVLFEQAFSFHGKSFHRIQQMLPDKTIASLVKYYYSWKKTRSRTSLMDRQARKLANRHNQGDSDDDVEETHPMDGNDSDYDPKKEAKKEGNTEQPVQTSKIGLGRREYQSLQHRHHSQRSKCRPPKGMYLTQEDVVAVSCSPNAANTILRQLDMELISLKRQPQFSHLEMWIIV

SEQ ID NO: 398 - protein, 267 aa, Artificial Sequence
  Synthetic polypeptide
MRVGAEYQARIPEFDPGATKYTDKDNGGMLVWSPYHSIPDAKLDEYIAIAKEKHGYNVEQALGMLFWHKHNIEKSLADLPNFTPFPDEWTVEDKVLFEQAFSFHGKSFHRIQQMLPDKTIASLVKYYYSWKKTRSRTSLMDRQARKLANRHNQGDSDDDVEETHPMDGNDSDYDPKKEAKKEGNTEQPVQTSKIGLGRREYQSLQHRHHSQRSKCRPPKGMYLTQEDVVAVSCSPNAANTILRQLDMELISLKRQPQFSHLEMWIIV

SEQ ID NO: 399 - skipped

SEQ ID NO: 400 - protein, 85 aa, Artificial Sequence
  Synthetic polypeptide
GNTEQPVQTSKIGLGRREYQSLQHRHHSQRSKCRPPKGMYLTQEDVVAVSCSPNAANTILRQLDMELISLKRQPQFSHLEMWIIV

SEQ ID NO: 401 - protein, 8 aa, Artificial Sequence
  Synthetic polypeptide
VPMQPTPS

SEQ ID NO: 402 - protein, 183 aa, Artificial Sequence
  Synthetic polypeptide
MEAWGLCAWPRGLRGNFHTCAPGLTQRHEVARPPLPGSSEDGSATPDTWQLAALPLGSLSSGQLCLHLRGTSTPAPTCVPLAPKLPPYVWVASEMWGRRHSRKKGIRGASTSSEHFIPQDATRSLSWRSSVWAPSWKQRSGLTRHQACWHHDPGLPTSTAGKELCSLEITQARSGILLQQHQE

SEQ ID NO: 403 - protein, 314 aa, Artificial Sequence
  Synthetic polypeptide
MAITLEEAPWLGWLLVKALMRFAFMVVNNLVAIPSYICYVIILQPLRVLDSKRFWYIEGIMYKWLLGMVASWGWYAGYTVMEWGEDIKAVSKDEAVMLVNHQATGDVCTLMMCLQDKGLVVAQMMWLMDHIFKYTNFGIVSLVHGDFFIRQGRSYRDQQLLLLKKHLENNYRSRDRKWIVLFPEGGFLRKRRETSQAFAKKNNLPFLTNVTLPRSGATKIILNALVAQQKNGSPAGGDAKELDSKSKGLQWIIDTTIAYPKAEPIDIQTWILGYRKPTVTHVHYRWEECAYVMGIGRGKNFILIFHTGKSVEKA

SEQ ID NO: 404 - protein, 301 aa, Artificial Sequence
  Synthetic polypeptide
MAITLEEAPWLGWLLVKALMRFAFMVVNNLVAIPSYICYVIILQPLRVLDSKRFWYIEGIMYKWLLGMVASWGWYAGYTVMEWGEDIKAVSKDEAVMLVNHQATGDVCTLMMCLQDKGLVVAQMMWLMDHIFKYTNFGIVSLVHGDFFIRQGRSYRDQQLLLLKKHLENNYRSRDRKWIVLFPEGGFLRKRRETSQAFAKKNNLPFLTNVTLPRSGATKIILNALVAQQKNGSPAGGDAKELDSKSKGLQWIIDTTIAYPKAEPIDIQTWILGYRKPTVTHVHYRLVICGTLLSGDTGQWQ

SEQ ID NO: 405 - protein, 74 aa, Artificial Sequence
  Synthetic polypeptide
MSSSSPPAGAASAAISASEKVDGFTRKSVRKAQRQKRSQGSSQFRSQGSQAELHPLPQLKETETKNHGFRMLKA

SEQ ID NO: 406 - protein, 13 aa, Artificial Sequence
  Synthetic polypeptide
MIRQERSTSYQEV

SEQ ID NO: 407 - protein, 107 aa, Artificial Sequence
  Synthetic polypeptide
MSQGLPAAGSVLQRSVAAPGNQPQPQPQQQSPEDDDRKVRRREKNRVAAQRSRKKQTQKADKLHEAQRESSAAWAQHRRGHCHTFALGMVSRTMHCILGATFSEIFW

SEQ ID NO: 408 - protein, 127 aa, Artificial Sequence
  Synthetic polypeptide
MDSDIKVLEDQFDEIIVDIATKRKQYPRKILECVIKTIKAKQEILKQYHPVVHPLDLKYDPDPGHTKNTLALRLSYSQLPVFETALRNYLPDSCTSFSSLFKVSLHLIHLTTCVRFSYDSLDHTVSL

SEQ ID NO: 409 - protein, 230 aa, Artificial Sequence
  Synthetic polypeptide
MAGSPELVVLDPPWDKELAAGTESQALVSATPREDFRVRCTSKRAVTEMLQLCGRFVQKLGDALPEEIREPALRDAQWTFESAVQENISINGQAWQEASDNCFMDSDIKVLEDQFDEIIVDIATKRKQYPRKILECVIKTIKAKQEILKQYHPVVHPLDLKYDPDPGHTKNTLALRLSYSQLPVFETALRNYLPDSCTSFSSLFKVSLHLIHLTTCVRFSYDSLDHTVSL

SEQ ID NO: 410 - protein, 264 aa, Artificial Sequence
  Synthetic polypeptide
MRAAGVGLVDCHCHLSAPDFDRDLDDVLEKAKKANVVALVAVAEHSGEFEKIMQLSERYNGFVLPCLGVHPVQGLPPEDQRSVTLKDLDVALPIIENYKDRLLAIGEVGLDFSPRFAGTGEQKEEQRQVLIRQIQLAKRLNLPVNVHSRSAGRPTINLLQEQGAEKVLLHAFDGRPSVAMEGVRAGYFFSIPPSIIRSGQLLSLFSKKQKLVKQLPLTSICLETDSPALGPEKQLGVVAHAPVIAATREAEAGESLEPGRWRLQ

SEQ ID NO: 411 - protein, 257 aa, Artificial Sequence
  Synthetic polypeptide
MRAAGVGLVDCHCHLSAPDFDRDLDDVLEKAKKANVVALVAVAEHSGEFEKIMQLSERYNGFVLPCLGVHPVQGLPPEDQRSVTLKDLDVALPIIENYKDRLLAIGEVGLDFSPRFAGTGEQKEEQRQVLIRQIQLAKRLNLPVNVHSRSAGRPTINLLQEQGAEKVLLHAFDGRPSVAMEGVRAGYFFSIPPSIIRSGQKQKLVKQLPLTSICLETDSPALGPEKQLGVVAHAPVIAATREAEAGESLEPGRWRLQ

SEQ ID NO: 412 - protein, 236 aa, Artificial Sequence
  Synthetic polypeptide
MRAAGVGLVDCHCHLSAPDFDRDLDDVLEKAKKANVVALVAVAEHSGEFEKIMQLSERYNGFVLPCLGVHPVQGLPPEDQRSVTLKVGLDFSPRFAGTGEQKEEQRQVLIRQIQLAKRLNLPVNVHSRSAGRPTINLLQEQGAEKVLLHAFDGRPSVAMEGVRAGYFFSIPPSIIRSGQKQKLVKQLPLTSICLETDSPALGPEKQLGVVAHAPVIAATREAEAGESLEPGRWRLQ

SEQ ID NO: 413 - protein, 256 aa, Artificial Sequence
  Synthetic polypeptide
MRAAGVGLVDCHCHLSAPDFDRDLDDVLEKAKKANVVALVAVAEHSGEFEKIMQLSERYNGFVLPCLGVHPVQGLPPEDQRSVTLKDLDVALPIIENYKDRLLAIGEVGLDFSPRFAGTGEQKEEQRQVLIRQIQLAKRLNLPVNVHSRSAGRPTINLLQEQGAEKVLLHAFDGRPSVAMEGVRAGYFFSIPPSIIRSGQQKLVKQLPLTSICLETDSPALGPEKQLGVVAHAPVIAATREAEAGESLEPGRWRLQ

SEQ ID NO: 414 - protein, 204 aa, Artificial Sequence
  Synthetic polypeptide
MRAAGVGLVDCHCHLSAPDFDRDLDDVLEKAKKANVVALVAVAEHSGEFEKIMQLSERYNGFVLPCLGVHPVQGLPPEDQRSVTLKDLDVALPIIENYKDRLLAIGEVGLDFSPRFAGTGEQKEEQRQVLIRQIQLAKRLNLPVNVHSRSAGRPTINLLQEQAETCETIAFNFYMLRNRFTCTRTRKTAGRGGTCACNRSYSGG

SEQ ID NO: 415 - protein, 68 aa, Artificial Sequence
  Synthetic polypeptide
EDLPSTFYKSKKQKLVKQLPLTSICLETDSPALGPEKQLGVVAHAPVIAATREAEAGESLEPGRWRLQ

SEQ ID NO: 416 - protein, 368 aa, Artificial Sequence
  Synthetic polypeptide
MSWALEEWKEGLPTRALQKIQELEGQLDKLKKEKQQRQFQLDSLEAALQKQKQKVENEKTEGTNLKRENQRLMEICESLEKTKQKISHELQVKESQVNFQEGQLNSGKKQIEKLEQELKRCKSELERSQQAAQSADVSLNPCNTPQKIFTTPLTPSQYYSGSKYEDLKEKYNKEVEERKRLEAEVKALQAKKASQTLPQATMNHRDIARHQASSSVFSWQQEKTPSHLSSNSQRTPIRRDFSASYFSGEQEVTPSRSTLQIGKRDANSSFFDNSSSPHLLDQLKAQNQELRNKINELELRLQGHEKEMKGQVNKFQELQLQLEKAKVELIEKEKVLNKCRDELVRTTAQYDQASTKVQKLARCGGAHL

SEQ ID NO: 417 - protein, 100 aa, Artificial Sequence
  Synthetic polypeptide
MATLARLQARSSTVGNQYYFRNSVVDPFRKKENDAAVKIQSWFRGCQVRAYIRHLNRIVTIIQKWWRSFLGRKQYQLTVQMVSFLRVGTAAHFLFGSPTF

SEQ ID NO: 418 - protein, 96 aa, Artificial Sequence
  Synthetic polypeptide
MAAASGSVLQRCIVSPAGRHSASLIFLHGSGDSGQGLRMWIKQVLNQDLTFQHIKIIYPTAPPRSLAIVSVSVFFVWPKTIFFQCGPGKPKNWTHL

SEQ ID NO: 419 - protein, 199 aa, Artificial Sequence
  Synthetic polypeptide
MASSNTVLMRLVASAYSIAQKAGMIVRRVIAEGDLGIVEKTCATDLQTKADRLAQMSICSSLARKFPKLTIIGEEDLPSEEVDQELIEDSQWEEILKQPCPSQYSAIKEEDLVVWVDPLDGTKEYTEGLLDNVTVLIGIAYEGKAIAGVINQPYYNYENNEKQQLREHRNEAKVLIPSALPNKHTTCLRVCFPGNPTCD

SEQ ID NO: 420 - protein, 292 aa, Artificial Sequence
  Synthetic polypeptide
MACSIVQFCYFQDLQAARDFLFPHLREEILSGALRRDPSKSTDWEDDGWGAWEENEPQEPEEEGNTCKTQKTSWLQDCVLSLSPTNDLMVIAREQKAVFLVPKWKYSDKGKEEMQFAVGWSGSLNVEEGECVTSALCIPLASQKRSSTGRPDWTCIVVGFTSGYVRFYTENGVLLLAQLLNEDPVLQLKCRTYEIPRHPGVTEQNEELSILYPAAIVTIDGFSLFQSLRACRNQVAKAAASGNENIQPPPLAYKKWGLQDIDTIIDHASVDLCACGLECLLCVCSLGQVLLI

SEQ ID NO: 421 - protein, 1 aa, Artificial Sequence
  Synthetic polypeptide
S

SEQ ID NO: 422 - protein, 281 aa, Artificial Sequence
  Synthetic polypeptide
MPPSPLDDRVVVALSRPVRPQDLNLCLDSSYLGSANPGSNSHPPVIATTVVSLKAANLTYMPSSSGSARSLNCGCSSASCCTVATYDKDNQAQTQAIAAGTTTTAIGTSTTCPANQMVNNNENTGSLSPSSGVGSPVSGTPKQLASIKIIYPNDLAKKMTKCSKSHLPSQGPVIIDCRPFMEYNKSHIQGAVHINCADKISRRRLQQGKITVLDLISCREGKDSFKRIFSKEIIVYDENTNEPSRVMPSQPLHIVLESLKREGKEPLVLKGALYTPDGISS

SEQ ID NO: 423 - protein, 29 aa, Artificial Sequence
  Synthetic polypeptide
MGWRAAGALLLALLLHGRLLALLDVLKHT

SEQ ID NO: 424 - protein, 176 aa, Artificial Sequence
  Synthetic polypeptide
MESFNTFANRMKNIGVMNYLKISLQHALYLLHHGMLKDAKRNLSEAETWRHGENTSSREILINLIQAYKGLLQYYTWSEKKMELSKLDKDDYAYNAVAQDVFNHSWKTSANISALIKIPGVWDPFVKSYVEMLEFYGDRDGAQEMGSSSCRKTRALTDSTYGELYNYFIIYYNVII

SEQ ID NO: 425 - protein, 290 aa, Artificial Sequence
  Synthetic polypeptide
MSDFSEELKGPVTDDEEVETSVLSGAGMHFPWLQTYVETVAIGGKRRKDFAQTTSACLSFIQEALLKHQWQQAAEYMYSYFQTLEDSDSYKRQAAPEIIWKLGSEILFYHPKSNMESFNTFANRMKNIGVMNYLKISLQHALYLLHHGMLKDAKRNLSEAETWRHGENTSSREILINLIQAYKGLLQYYTWSEKKMELSKLDKDDYAYNAVAQDVFNHSWKTSANISALIKIPGVWDPFVKSYVEMLEFYGDRDGAQEMGSSSCRKTRALTDSTYGELYNYFIIYYNVII

SEQ ID NO: 426 - protein, 252 aa, Artificial Sequence
  Synthetic polypeptide
MSDFSEELKGPVTDDEEVETSVLSGAGMHFPWLQTYVETVAIGGKRRKDFAQTTSACLSFIQEALLKHQWQQAAEYMYSYFQTLEDSDSYKRQAAPEISLQHALYLLHHGMLKDAKRNLSEAETWRHGENTSSREILINLIQAYKGLLQYYTWSEKKMELSKLDKDDYAYNAVAQDVFNHSWKTSANISALIKIPGVWDPFVKSYVEMLEFYGDRDGAQEMGSSSCRKTRALTDSTYGELYNYFIIYYNVII

SEQ ID NO: 427 - protein, 68 aa, Artificial Sequence
  Synthetic polypeptide
MSDFSEELKGPVTDDEEVETSVLSGAGMHFPWLQTYVETVGVVAHAHNPSTLGGQKEGSLEPRRSRLW

SEQ ID NO: 428 - protein, 657 aa, Artificial Sequence
  Synthetic polypeptide
MEICADPQFIIGGATRTDICQGALGDCWLLAAIASLTLNEEILARVVPLNQSFQENYAGIFHFQFWQYGEWVEVVVDDRLPTKDGELLFVHSAEGSEFWSALLEKAYAKINGCYEALSGGATTEGFEDFTGGIAEWYELKKPPPNLFKIIQKALQKGSLLGCSIDITSAADSEAITFQKLVKGHAYSVTGAEEVESNGSLQKLIRIRNPWGEVEWTGRWNDNCPSWNTIDPEERERLTRRHEDGEFWMSFSDFLRHYSRLEICNLTPDTLTSDTYKKWKLTKMDGNWRRGSTAGGCRNYPNTFWMNPQYLIKLEEEDEDEEDGESGCTFLVGLIQKHRRRQRKMGEDMHTIGFGIYEVPEELSGQTNIHLSKNFFLTNRARERSDTFINLREVLNRFKLPPGEYILVPSTFEPNKDGDFCIRVFSEKKADYQAVDDEIEANLEEFDISEDDIDDGFRRLFAQLAGEDAEISAFELQTILRRVLAKRQDIKSDGFSIETCKIMVDMLDSDGSGKLGLKEFYILWTKIQKYQKIYREIDVDRSGTMNSYEMRKALEEAGFKMPCQLHQVIVARFADDQLIIDFDNFVRCLVRLETLFKIFKQLDPENTGTIELDLISLLGRLKRKDCLNPGGGGCGELRLHHCTPSSLGNKSKTASKKK

SEQ ID NO: 429 - protein, 735 aa, Artificial Sequence
  Synthetic polypeptide
MAGIAAKLAKDREAAEGLGSHDRAIKYLNQDYEALRNECLEAGTLFQDPSFPAIPSALGFKELGPYSSKTRGIEWKRPTEICADPQFIIGGATRTDICQGALGDCWLLAAIASLTLNEEILARVVPLNQSFQENYAGIFHFQFWQYGEWVEVVVDDRLPTKDGELLFVHSAEGSEFWSALLEKAYAKINGCYEALSGGATTEGFEDFTGGIAEWYELKKPPPNLFKIIQKALQKGSLLGCSIDITSAADSEAITFQKLVKGHAYSVTGAEEVESNGSLQKLIRIRNPWGEVEWTGRWNDNCPSWNTIDPEERERLTRRHEDGEFWMSFSDFLRHYSRLEICNLTPDTLTSDTYKKWKLTKMDGNWRRGSTAGGCRNYPNTFWMNPQYLIKLEEEDEDEEDGESGCTFLVGLIQKHRRRQRKMGEDMHTIGFGIYEVPEELSGQTNIHLSKNFFLTNRARERSDTFINLREVLNRFKLPPGEYILVPSTFEPNKDGDFCIRVFSEKKADYQAVDDEIEANLEEFDISEDDIDDGFRRLFAQLAGEDAEISAFELQTILRRVLAKRQDIKSDGFSIETCKIMVDMLDSDGSGKLGLKEFYILWTKIQKYQKIYREIDVDRSGTMNSYEMRKALEEAGFKMPCQLHQVIVARFADDQLIIDFDNFVRCLVRLETLFKIFKQLDPENTGTIELDLISLLGRLKRKDCLNPGGGGCGELRLHHCTPSSLGNKSKTASKKK

SEQ ID NO: 430 - protein, 115 aa, Artificial Sequence
  Synthetic polypeptide
MRFGSKMMPMFLTVYLSNNEQHFTEVPVTPETICRDVVDLCKEPGESDCHLAEVWCGSERPVADNERMFDVLQRFGSQRNEVRFFLRHERPPGRDIATWEAEVEESLEPGRRMLQ

SEQ ID NO: 431 - protein, 2 aa, Artificial Sequence
  Synthetic polypeptide
NV

SEQ ID NO: 432 - protein, 88 aa, Artificial Sequence
  Synthetic polypeptide
MRFGSKMMPNVQLRIMSECLMFFNDLEVRGTKFASSFVMNAPLAGTLLLGRLKWKNRLNPGGGCCSEPRSHHLHSSLGDRARLRLQKK

SEQ ID NO: 433 - protein, 51 aa, Artificial Sequence
  Synthetic polypeptide
MEAVVFVFSLLDCCALIFLSVYFIITLSDLECDYINARSCCSKLNKASCSG

SEQ ID NO: 434 - protein, 92 aa, Artificial Sequence
  Synthetic polypeptide
MAFTFAAFCYMLSLVLCAALIFFAIWHIIAFDELRTDFKSPIDQCNPVHARERLRNIERICFLLRKSLCYTWSFTLSLPSWMALHSPPSKCF

SEQ ID NO: 435 - protein, 136 aa, Artificial Sequence
  Synthetic polypeptide
METFIPIDLTTENQEMDKEETKTKPRLLRYEEKKYEDVKPLETQPAEIAEKETLEYKTVRTFSESLKSEKTEDYLRESIIQQHMVSPEPASLKEKGKSRRKKDQTHACPNVRKARPVSYDRTESLPFAGFEEASCY

SEQ ID NO: 436 - protein, 274 aa, Artificial Sequence
  Synthetic polypeptide
METFIPIDLTTENQEMDKEETKTKPRLLRYEEKKYEDVKPLETQPAEIAEKETLEYKTVRTFSESLKSEKTEDYLRESIIQQHMVSPEPASLKEKGKSRRKKDQTHACPNVRKARPVSYDRTEPKDDDVIRNIIRLREKLGWQTILPQHSLKYGSSKIAIQKITLKKPLEDDGEFVYCLPRKSPKSLYNPYDLQVVSAHTAKHCKEFWVITASFISKVINIVGSVKEVELIPTLEWLSERRHYYLLRQFKIFSDFRQGPRTEGPAEAMAEERGL

SEQ ID NO: 437 - protein, 251 aa, Artificial Sequence
  Synthetic polypeptide
METFIPIDLTTENQEMDKEETKTKPRLLRYEEKKYEDVKPLETQPAEIAEKETLEYKTVRTFSESLKSEKTEDYLRESIIQQHMVSPEPASLKEKGKSRRKKDQTHACPNVRKARPVSYDRTEPKDDDVIRNIIRLREKLGWQTILPQHSLKYGSSKIAIQKITLKKPLEDDGEFVYCLPRKSPKSLYNPYDLQVINIVGSVKEVELIPTLEWLSERRHYYLLRQFKIFSDFRQGPRTEGPAEAMAEERGL

SEQ ID NO: 438 - protein, 1028 aa, Artificial Sequence
  Synthetic polypeptide
MGRRSQWIWAMRCQMLVPVLSLHIGLARALGCGCIASKIECLIRCNAPFPLLDAVGSVASQELQSLTGTVGVTSGAAAYPRWNLARARAPPHLPGTQDPLRRVRDPTPIVASSPGRRRGSWSGGYGQEASEPGVVGLCCAVLPIHPSLALAGVGGPDLRRFQEGPQRPSDHGAAEKHMETFIPIDLTTENQEMDKEETKTKPRLLRYEEKKYEDVKPLETQPAEIAEKETLEYKTVRTFSESLKSEKTEEPKDDDVIRNIIRLREKLGWQTILPQHSLKYGSSKIAIQKITLKKPLEDDGEFVYCLPRKSPKSLYNPYDLQVVSAHTAKHCKEFWVITASFISKLDSSRTYSLDEFCEEQLQQATQALKQLEDIRNKAISEMKSTFLKVAEKNEIKEYFESKLSEDDTTHFKLPKYRRLLETFFKFVMLVDYIFQELIRQLMNTAVTLLLELFNGSAGMPFSVEKKNENLIRTFKDNSFPTGKTTNDCEELVDNSKLHAISVQKSEVKTDTDINEILNSVEVGKDLRKTYAPIFEVNLCLRIPAESDSSENSKENFHESDQCPEECVMFEDEMSENKDNCVKKHSSEELLPKAKKSKEISYNLEDIISATITPLCQDPQLSIFIDLVSIMDLPNKTGSIIHYKEQTRWPDCHILFETDPAYQNIIVNLLTIIGNSMGLVNAYSHKFIKYCTMTEKAKIMSMKISSMGELTSKEFEAILNRFRNYFRHIVNMAIEKRIGIFNVVVESSLQQLECDPTEIEEFLEHFIFLNAISSKISKLEKEFLTMSQLYSVAKHHQIHISEEQIAIFQVLLLKFSQLKSSMKLSKINKDTAITKFRDNLEACISGLHVDVGNLKAKIRTPLLLCAGTQVSTAMEMIQTLSGEAASLTNKAKAYSHYQDCFSDSQSHMHSVNVEEITQIVLSEISDIEGDLTLRKKLWEAQEEWKRASWEWRNSSLQSIDVESVQRNVSKLMHIISVLEKEIYSIFIIPSIDDISAQLEESQVILATIKGSPHIGPIKILKARPKMMKL

SEQ ID NO: 439 - protein, 1202 aa, Artificial Sequence
  Synthetic polypeptide
METFIPIDLTTENQEMDKEETKTKPRLLRYEEKKYEDVKPLETQPAEIAEKETLEYKTVRTFSESLKSEKTEDYLRESIIQQHMVSPEPASLKEKGKSRRKKDQTHACPNVRKARPVSYDRTEPKDDDVIRNIIRLREKLGWQTILPQHSLKYGSSKIAIQKITLKKPLEDDGEFVYCLPRKSPKSLYNPYDLQVVSAHTAKHCKEFWVITASFISKVINIVGSVKEVELIPTLEWLSERRHYYLLRQFKIFSDFRMNKAFVTWKLNVKRIKTEKSRSFLYHHLFLADDLFQTCLVYIRGLCEDAINLKNYNDHENNLSAICLVKLDSSRTYSLDEFCEEQLQQATQALKQLEDIRNKAISEMKSTFLKVAEKNEIKEYFESKLSEDDTTHFKLPKYRRLLETFFKFVMLVDYIFQELIRQLMNTAVTLLLELFNGSAGMPFSVEKKNENLIRTFKDNSFPTGKTTNDCEELVDNSKLHAISVQKSEVKTDTDINEILNSVEVGKDLRKTYAPIFEVNLCLRIPAESDSSENSKENFHESDQCPEECVMFEDEMSENKDNCVKKHSSEELLPKAKKSKEISYNLEDIISDTEIETEFENKYMYYEFPEFPTNLFIDPNRLEFSVKIQNMLTNMEKCITTITPLCQDPQLSIFIDLVSIMDLPNKTGSIIHYKEQTRWPDCHILFETDPAYQNIIVNLLTIIGNSMGLVNAYSHKFIKYCTMTEKAKIMSMKISSMGELTSKEFEAILNRFRNYFRHIVNMAIEKRIGIFNVVSLDYQSECLLYIDNVIHMSHTLIQSVIEKKNKNLLEVVESSLQQLECDPTEIEEFLEHFIFLNAISSKISKLEKEFLTMSQLYSVAKHHQIHISEEQIAIFQVLLLKFSQLKSSMKLSKINKDTAITKFRDNLEACISGLHVDVGNLKAKIRTPLLLCAGTQVSTAMEMIQTLSGEAASLTNKAKAYSHYQDCFSDSQSHMHSVNVEEITQIVLSEISDIEGDLTLRKKLWEAQEEWKRASWEWRNSSLQSIDVESVQRNVSKLMHIISVLEKGLPKSDMVTHLKQVVTEFKQELPIIIALGNPCLKPRHWEALQEIIGKSVPLDKNCKVENLLALKMFQYENEINDMSTSATNEAALEKMLFKIIDFWNTTPLPLILHHTEIYSIFIIPSIDDISAQLEESQVILATIKGSPHIGPIKILKARPKMMKL

SEQ ID NO: 440 - protein, 280 aa, Artificial Sequence
  Synthetic polypeptide
IRTPLLLCAGTQVSTAMEMIQTLSGEAASLTNKAKAYSHYQDCFSDSQSHMHSVNVEEITQIVLSEISDIEGDLTLRKKLWEAQEEWKRASWEWRNSSLQSIDVESVQRNVSKLMHIISVLEKGLPKSDMVTHLKQVVTEFKQELPIIIALGNPCLKPRHWEALQEIIGKSVPLDKNCKVENLLALKMFQYENEINDMSTSATNEAALEKMLFKIIDFWNTTPLPLILHHTEIYSIFIIPSIDDISAQLEESQVILATIKGSPHIGPIKILKARPKMMKL

SEQ ID NO: 441 - protein, 1421 aa, Artificial Sequence
  Synthetic polypeptide
MGRRSQWIWAMRCQMLVPVLSLHIGLARALGCGCIASKIECLIRCNAPFPLLDAVGSVASQELQSLTGTVGVTSGAAAYPRWNLARARAPPHLPGTQDPLRRVRDPTPIVASSPGRRRGSWSGGYGQEASEPGVVGLCCAVLPIHPSLALAGVGGPDLRRFQEGPQRPSDHGAAEKHMETFIPIDLTTENQEMDKEETKTKPRLLRYEEKKYEDVKPLETQPAEIAEKETLEYKTVRTFSESLKSEKTEEPKDDDVIRNIIRLREKLGWQTILPQHSLKYGSSKIAIQKITLKKPLEDDGEFVYCLPRKSPKSLYNPYDLQVVSAHTAKHCKEFWVITASFISKLDSSRTYSLDEFCEEQLQQATQALKQLEDIRNKAISEMKSTFLKVAEKNEIKEYFESKLSEDDTTHFKLPKYRRLLETFFKFVMLVDYIFQELIRQLMNTAVTLLLELFNGSAGMPFSVEKKNENLIRTFKDNSFPTGKTTNDCEELVDNSKLHAISVQKSEVKTDTDINEILNSVEVGKDLRKTYAPIFEVNLCLRIPAESDSSENSKENFHESDQCPEECVMFEDEMSENKDNCVKKHSSEELLPKAKKSKEISYNLEDIISATITPLCQDPQLSIFIDLVSIMDLPNKTGSIIHYKEQTRWPDCHILFETDPAYQNIIVNLLTIIGNSMGLVNAYSHKFIKYCTMTEKAKIMSMKISSMGELTSKEFEAILNRFRNYFRHIVNMAIEKRIGIFNVVVESSLQQLECDPTEIEEFLEHFIFLNAISSKISKLEKEFLTMSQLYSVAKHHQIHISEEQIAIFQVLLLKFSQLKSSMKLSKINKDTAITKFRDNLEACISGLHVDVGNLKAKIRTPLLLCAGTQVSTAMEMIQTLSGEAASLTNKAKAYSHYQDCFSDSQSHMHSVNVEEITQIVLSEISDIEGDLTLRKKLWEAQEEWKRASWEWRNSSLQSIDVESVQRNVSKLMHIISVLEKEIYSIFIIPSIDDISAQLEESQVILATIKGSPHIGPIKSQIMFYNDCVKSFVSSYSREKLEKVHAGLMCHLEEVADLVVLDTSNSRTKAILGALLILYVHCRDIVINLLLKNIFNAEDFEWTRHLQYKWNEKQKLCYVSQGNASFTYGYEYLGCTSRLVITPLTDRCWLTLMEALHLNLGGCPAGPAGTGKTETVKDLAKCALFAFKCNTALIKLPNSLIVLTCFGLEKTVLVMNTVMSFRFVLEGKEIRINMSCAVFITMNPRYGGGVELPDNLKSLFRPVAMMVPHYQMIAEIILFSFGFKSANSLSGKLTNLYELARKQLSQQDHYNFGLRSLKIVLIMAGTKKREFKCDTSDSLSEADETLIVIEAIREASLPKCPPEDVPLFENIIGDIFPEVTVLKVNQLALEKVIYTATQQLGLQNWSSQKEKIIQFYNQLQMAK

SEQ ID NO: 442 - protein, 1826 aa, Artificial Sequence
  Synthetic polypeptide
METFIPIDLTTENQEMDKEETKTKPRLLRYEEKKYEDVKPLETQPAEIAEKETLEYKTVRTFSESLKSEKTEDYLRESIIQQHMVSPEPASLKEKGKSRRKKDQTHACPNVRKARPVSYDRTEPKDDDVIRNIIRLREKLGWQTILPQHSLKYGSSKIAIQKITLKKPLEDDGEFVYCLPRKSPKSLYNPYDLQVVSAHTAKHCKEFWVITASFISKVINIVGSVKEVELIPTLEWLSERRHYYLLRQFKIFSDFRMNKAFVTWKLNVKRIKTEKSRSFLYHHLFLADDLFQTCLVYIRGLCEDAINLKNYNDHENNLSAICLVKLDSSRTYSLDEFCEEQLQQATQALKQLEDIRNKAISEMKSTFLKVAEKNEIKEYFESKLSEDDTTHFKLPKYRRLLETFFKFVMLVDYIFQELIRQLMNTAVTLLLELFNGSAGMPFSVEKKNENLIRTFKDNSFPTGKTTNDCEELVDNSKLHAISVQKSEVKTDTDINEILNSVEVGKDLRKTYAPIFEVNLCLRIPAESDSSENSKENFHESDQCPEECVMFEDEMSENKDNCVKKHSSEELLPKAKKSKEISYNLEDIISDTEIETEFENKYMYYEFPEFPTNLFIDPNRLEFSVKIQNMLTNMEKCITTITPLCQDPQLSIFIDLVSIMDLPNKTGSIIHYKEQTRWPDCHILFETDPAYQNIIVNLLTIIGNSMGLVNAYSHKFIKYCTMTEKAKIMSMKISSMGELTSKEFEAILNRFRNYFRHIVNMAIEKRIGIFNVVSLDYQSECLLYIDNVIHMSHTLIQSVIEKKNKNLLEVVESSLQQLECDPTEIEEFLEHFIFLNAISSKISKLEKEFLTMSQLYSVAKHHQIHISEEQIAIFQVLLLKFSQLKSSMKLSKINKDTAITKFRDNLEACISGLHVDVGNLKAKIRTPLLLCAGTQVSTAMEMIQTLSGEAASLTNKAKAYSHYQDCFSDSQSHMHSVNVEEITQIVLSEISDIEGDLTLRKKLWEAQEEWKRASWEWRNSSLQSIDVESVQRNVSKLMHIISVLEKGLPKSDMVTHLKQVVTEFKQELPIIIALGNPCLKPRHWEALQEIIGKSVPLDKNCKVENLLALKMFQYENEINDMSTSATNEAALEKMLFKIIDFWNTTPLPLILHHTEIYSIFIIPSIDDISAQLEESQVILATIKGSPHIGPIKDLVNEWDQNLTLFSYTLEEWMNCQRNWLYLEPVFHSSEIRRQLPAETELFSQVISMWKKIMSKIQNKQNALQITTSAGVLEILQNCNIHLEHIKKSLEDYLEVKRLIFPRFYFLSNAELLDILADSRNPESVQPHLVKCFENIKQLLIWKQDIGPPAVKMLISAEGEGLVLPKKIRVRSAVEQWLVNVEKSMFDVLKKERYIYNIILLFQSQIMFYNDCVKSFVSSYSREKLEKVHAGLMCHLEEVADLVVLDTSNSRTKAILGALLILYVHCRDIVINLLLKNIFNAEDFEWTRHLQYKWNEKQKLCYVSQGNASFTYGYEYLGCTSRLVITPLTDRCWLTLMEALHLNLGGCPAGPAGTGKTETVKDLAKSLGKHCVVFNCFEDLDYKIVRKFFFGLVQSGAWSCFDEFNLIDLEVLSVIASQILTIKAAKDNYSARFVLEGKEIRINMSCAVFITMNPRYGGGVELPDNLKSLFRPVAMMVPHYQMIAEIILFSFGFKSANSLSGKLTNLYELARKQLSQQDHYNFGLRSLKIVLIMAGTKKREFKCLSEADETLIVIEAIREASLPKCPPEDVPLFENIIGDIFPEVTVLKVNQLALEKVIYTATQQLGLQNWSSQKEKIIQFYNQLQMAK

SEQ ID NO: 443 - protein, 920 aa, Artificial Sequence
  Synthetic polypeptide
IRTPLLLCAGTQVSTAMEMIQTLSGEAASLTNKAKAYSHYQDCFSDSQSHMHSVNVEEITQIVLSEISDIEGDLTLRKKLWEAQEEWKRASWEWRNSSLQSIDVESVQRNVSKLMHIISVLEKGLPKSDMVTHLKQVVTEFKQELPIIIALGNPCLKPRHWEALQEIIGKSVPLDKNCKVENLLALKMFQYENEINDMSTSATNEAALEKMLFKIIDFWNTTPLPLILHHTEIYSIFIIPSIDDISAQLEESQVILATIKGSPHIGPIKDLVNEWDQNLTLFSYTLEEWMNCQRNWLYLEPVFHSSEIRRQLPAETELFSQVISMWKKIMSKIQNKQNALQITTSAGVLEILQNCNIHLEHIKKSLEDYLEVKRLIFPRFYFLSNAELLDILADSRNPESVQPHLVKCFENIKQLLIWKQDIGPPAVKMLISAEGEGLVLPKKIRVRSAVEQWLVNVEKSMFDVLKKFLSQGIEDWNCQMFSQWVLSHPGQVVLTVSQIMFYNDCVKSFVSSYSREKLEKVHAGLMCHLEEVADLVVLDTSNSRTKAILGALLILYVHCRDIVINLLLKNIFNAEDFEWTRHLQYKWNEKQKLCYVSQGNASFTYGYEYLGCTSRLVITPLTDRCWLTLMEALHLNLGGCPAGPAGTGKTETVKDLAKSLGKHCVVFNCFEDLDYKIVRKFFFGLVQSGAWSCFDEFNLIDLEVLSVIASQILTIKAAKDNYSARYLFVLEGKEIRINMSCAVFITMNPRYGGGVELPDNLKSLFRPVAMMVPHYQMIAEIILFSFGFKSANSLSGKLTNLYELARKQLSQQDHYNFGLRSLKIVLIMAGTKKRDLSEADETLIVIEAIREASLPKCPPEDVPLFENIIGDIFPEVTVLKVNQLALEKVIYTATQQLGLQNWSSQKEKIIQFYNQLQMAK

SEQ ID NO: 444 - protein, 1471 aa, Artificial Sequence
  Synthetic polypeptide
MGRRSQWIWAMRCQMLVPVLSLHIGLARALGCGCIASKIECLIRCNAPFPLLDAVGSVASQELQSLTGTVGVTSGAAAYPRWNLARARAPPHLPGTQDPLRRVRDPTPIVASSPGRRRGSWSGGYGQEASEPGVVGLCCAVLPIHPSLALAGVGGPDLRRFQEGPQRPSDHGAAEKHMETFIPIDLTTENQEMDKEETKTKPRLLRYEEKKYEDVKPLETQPAEIAEKETLEYKTVRTFSESLKSEKTEEPKDDDVIRNIIRLREKLGWQTILPQHSLKYGSSKIAIQKITLKKPLEDDGEFVYCLPRKSPKSLYNPYDLQVVSAHTAKHCKEFWVITASFISKLDSSRTYSLDEFCEEQLQQATQALKQLEDIRNKAISEMKSTFLKVAEKNEIKEYFESKLSEDDTTHFKLPKYRRLLETFFKFVMLVDYIFQELIRQLMNTAVTLLLELFNGSAGMPFSVEKKNENLIRTFKDNSFPTGKTTNDCEELVDNSKLHAISVQKSEVKTDTDINEILNSVEVGKDLRKTYAPIFEVNLCLRIPAESDSSENSKENFHESDQCPEECVMFEDEMSENKDNCVKKHSSEELLPKAKKSKEISYNLEDIISATITPLCQDPQLSIFIDLVSIMDLPNKTGSIIHYKEQTRWPDCHILFETDPAYQNIIVNLLTIIGNSMGLVNAYSHKFIKYCTMTEKAKIMSMKISSMGELTSKEFEAILNRFRNYFRHIVNMAIEKRIGIFNVVVESSLQQLECDPTEIEEFLEHFIFLNAISSKISKLEKEFLTMSQLYSVAKHHQIHISEEQIAIFQVLLLKFSQLKSSMKLSKINKDTAITKFRDNLEACISGLHVDVGNLKAKIRTPLLLCAGTQVSTAMEMIQTLSGEAASLTNKAKAYSHYQDCFSDSQSHMHSVNVEEITQIVLSEISDIEGDLTLRKKLWEAQEEWKRASWEWRNSSLQSIDVESVQRNVSKLMHIISVLEKEIYSIFIIPSIDDISAQLEESQVILATIKGSPHIGPIKSQIMFYNDCVKSFVSSYSREKLEKVHAGLMCHLEEVADLVVLDTSNSRTKAILGALLILYVHCRDIVINLLLKNIFNAEDFEWTRHLQYKWNEKQKLCYVSQGNASFTYGYEYLGCTSRLVITPLTDRCWLTLMEALHLNLGGCPAGPAGTGKTETVKDLAKCALFAFKCNTALIKLPNSLIVLTCFGLEKTVLVMNTVMSFRFVLEGKEIRINMSCAVFITMNPRYGGGVELPDNLKSLFRPVAMMVPHYQMIAEIILFSFGFKSANSLSGKLTNLYELARKQLSQQDHYNFGLRSLKIVLIMAGTKKREFKCDTSDSLSEADETLIVIEAIREASLPKCPPEDVPLFENIIGDIFPEVTVLKVNQLALEKVIYTATQQLGLQNWSSQKEKIIQFYNQLQVCVGVMLVGPTGGGKTTVRRILEKALTLLPIADFLSVAERKSASKDAKLEYEL

SEQ ID NO: 445 - protein, 1876 aa, Artificial Sequence
  Synthetic polypeptide
METFIPIDLTTENQEMDKEETKTKPRLLRYEEKKYEDVKPLETQPAEIAEKETLEYKTVRTFSESLKSEKTEDYLRESIIQQHMVSPEPASLKEKGKSRRKKDQTHACPNVRKARPVSYDRTEPKDDDVIRNIIRLREKLGWQTILPQHSLKYGSSKIAIQKITLKKPLEDDGEFVYCLPRKSPKSLYNPYDLQVVSAHTAKHCKEFWVITASFISKVINIVGSVKEVELIPTLEWLSERRHYYLLRQFKIFSDFRMNKAFVTWKLNVKRIKTEKSRSFLYHHLFLADDLFQTCLVYIRGLCEDAINLKNYNDHENNLSAICLVKLDSSRTYSLDEFCEEQLQQATQALKQLEDIRNKAISEMKSTFLKVAEKNEIKEYFESKLSEDDTTHFKLPKYRRLLETFFKFVMLVDYIFQELIRQLMNTAVTLLLELFNGSAGMPFSVEKKNENLIRTFKDNSFPTGKTTNDCEELVDNSKLHAISVQKSEVKTDTDINEILNSVEVGKDLRKTYAPIFEVNLCLRIPAESDSSENSKENFHESDQCPEECVMFEDEMSENKDNCVKKHSSEELLPKAKKSKEISYNLEDIISDTEIETEFENKYMYYEFPEFPTNLFIDPNRLEFSVKIQNMLTNMEKCITTITPLCQDPQLSIFIDLVSIMDLPNKTGSIIHYKEQTRWPDCHILFETDPAYQNIIVNLLTIIGNSMGLVNAYSHKFIKYCTMTEKAKIMSMKISSMGELTSKEFEAILNRFRNYFRHIVNMAIEKRIGIFNVVSLDYQSECLLYIDNVIHMSHTLIQSVIEKKNKNLLEVVESSLQQLECDPTEIEEFLEHFIFLNAISSKISKLEKEFLTMSQLYSVAKHHQIHISEEQIAIFQVLLLKFSQLKSSMKLSKINKDTAITKFRDNLEACISGLHVDVGNLKAKIRTPLLLCAGTQVSTAMEMIQTLSGEAASLTNKAKAYSHYQDCFSDSQSHMHSVNVEEITQIVLSEISDIEGDLTLRKKLWEAQEEWKRASWEWRNSSLQSIDVESVQRNVSKLMHIISVLEKGLPKSDMVTHLKQVVTEFKQELPIIIALGNPCLKPRHWEALQEIIGKSVPLDKNCKVENLLALKMFQYENEINDMSTSATNEAALEKMLFKIIDFWNTTPLPLILHHTEIYSIFIIPSIDDISAQLEESQVILATIKGSPHIGPIKDLVNEWDQNLTLFSYTLEEWMNCQRNWLYLEPVFHSSEIRRQLPAETELFSQVISMWKKIMSKIQNKQNALQITTSAGVLEILQNCNIHLEHIKKSLEDYLEVKRLIFPRFYFLSNAELLDILADSRNPESVQPHLVKCFENIKQLLIWKQDIGPPAVKMLISAEGEGLVLPKKIRVRSAVEQWLVNVEKSMFDVLKKERYIYNIILLFQSQIMFYNDCVKSFVSSYSREKLEKVHAGLMCHLEEVADLVVLDTSNSRTKAILGALLILYVHCRDIVINLLLKNIFNAEDFEWTRHLQYKWNEKQKLCYVSQGNASFTYGYEYLGCTSRLVITPLTDRCWLTLMEALHLNLGGCPAGPAGTGKTETVKDLAKSLGKHCVVFNCFEDLDYKIVRKFFFGLVQSGAWSCFDEFNLIDLEVLSVIASQILTIKAAKDNYSARFVLEGKEIRINMSCAVFITMNPRYGGGVELPDNLKSLFRPVAMMVPHYQMIAEIILFSFGFKSANSLSGKLTNLYELARKQLSQQDHYNFGLRSLKIVLIMAGTKKREFKCLSEADETLIVIEAIREASLPKCPPEDVPLFENIIGDIFPEVTVLKVNQLALEKVIYTATQQLGLQNWSSQKEKIIQFYNQLQVCVGVMLVGPTGGGKTTVRRILEKALTLLPIADFLSVAERKSASKDAKLEYEL

SEQ ID NO: 446 - protein, 970 aa, Artificial Sequence
  Synthetic polypeptide
IRTPLLLCAGTQVSTAMEMIQTLSGEAASLTNKAKAYSHYQDCFSDSQSHMHSVNVEEITQIVLSEISDIEGDLTLRKKLWEAQEEWKRASWEWRNSSLQSIDVESVQRNVSKLMHIISVLEKGLPKSDMVTHLKQVVTEFKQELPIIIALGNPCLKPRHWEALQEIIGKSVPLDKNCKVENLLALKMFQYENEINDMSTSATNEAALEKMLFKIIDFWNTTPLPLILHHTEIYSIFIIPSIDDISAQLEESQVILATIKGSPHIGPIKDLVNEWDQNLTLFSYTLEEWMNCQRNWLYLEPVFHSSEIRRQLPAETELFSQVISMWKKIMSKIQNKQNALQITTSAGVLEILQNCNIHLEHIKKSLEDYLEVKRLIFPRFYFLSNAELLDILADSRNPESVQPHLVKCFENIKQLLIWKQDIGPPAVKMLISAEGEGLVLPKKIRVRSAVEQWLVNVEKSMFDVLKKFLSQGIEDWNCQMFSQWVLSHPGQVVLTVSQIMFYNDCVKSFVSSYSREKLEKVHAGLMCHLEEVADLVVLDTSNSRTKAILGALLILYVHCRDIVINLLLKNIFNAEDFEWTRHLQYKWNEKQKLCYVSQGNASFTYGYEYLGCTSRLVITPLTDRCWLTLMEALHLNLGGCPAGPAGTGKTETVKDLAKSLGKHCVVFNCFEDLDYKIVRKFFFGLVQSGAWSCFDEFNLIDLEVLSVIASQILTIKAAKDNYSARYLFVLEGKEIRINMSCAVFITMNPRYGGGVELPDNLKSLFRPVAMMVPHYQMIAEIILFSFGFKSANSLSGKLTNLYELARKQLSQQDHYNFGLRSLKIVLIMAGTKKRDLSEADETLIVIEAIREASLPKCPPEDVPLFENIIGDIFPEVTVLKVNQLALEKVIYTATQQLGLQNWSSQKEKIIQFYNQLQVCVGVMLVGPTGGGKTTVRRILEKALTLLPIADFLSVAERKSASKDAKLEYEL

SEQ ID NO: 447 - protein, 1756 aa, Artificial Sequence
  Synthetic polypeptide
MGRRSQWIWAMRCQMLVPVLSLHIGLARALGCGCIASKIECLIRCNAPFPLLDAVGSVASQELQSLTGTVGVTSGAAAYPRWNLARARAPPHLPGTQDPLRRVRDPTPIVASSPGRRRGSWSGGYGQEASEPGVVGLCCAVLPIHPSLALAGVGGPDLRRFQEGPQRPSDHGAAEKHMETFIPIDLTTENQEMDKEETKTKPRLLRYEEKKYEDVKPLETQPAEIAEKETLEYKTVRTFSESLKSEKTEEPKDDDVIRNIIRLREKLGWQTILPQHSLKYGSSKIAIQKITLKKPLEDDGEFVYCLPRKSPKSLYNPYDLQVVSAHTAKHCKEFWVITASFISKLDSSRTYSLDEFCEEQLQQATQALKQLEDIRNKAISEMKSTFLKVAEKNEIKEYFESKLSEDDTTHFKLPKYRRLLETFFKFVMLVDYIFQELIRQLMNTAVTLLLELFNGSAGMPFSVEKKNENLIRTFKDNSFPTGKTTNDCEELVDNSKLHAISVQKSEVKTDTDINEILNSVEVGKDLRKTYAPIFEVNLCLRIPAESDSSENSKENFHESDQCPEECVMFEDEMSENKDNCVKKHSSEELLPKAKKSKEISYNLEDIISATITPLCQDPQLSIFIDLVSIMDLPNKTGSIIHYKEQTRWPDCHILFETDPAYQNIIVNLLTIIGNSMGLVNAYSHKFIKYCTMTEKAKIMSMKISSMGELTSKEFEAILNRFRNYFRHIVNMAIEKRIGIFNVVVESSLQQLECDPTEIEEFLEHFIFLNAISSKISKLEKEFLTMSQLYSVAKHHQIHISEEQIAIFQVLLLKFSQLKSSMKLSKINKDTAITKFRDNLEACISGLHVDVGNLKAKIRTPLLLCAGTQVSTAMEMIQTLSGEAASLTNKAKAYSHYQDCFSDSQSHMHSVNVEEITQIVLSEISDIEGDLTLRKKLWEAQEEWKRASWEWRNSSLQSIDVESVQRNVSKLMHIISVLEKEIYSIFIIPSIDDISAQLEESQVILATIKGSPHIGPIKSQIMFYNDCVKSFVSSYSREKLEKVHAGLMCHLEEVADLVVLDTSNSRTKAILGALLILYVHCRDIVINLLLKNIFNAEDFEWTRHLQYKWNEKQKLCYVSQGNASFTYGYEYLGCTSRLVITPLTDRCWLTLMEALHLNLGGCPAGPAGTGKTETVKDLAKCALFAFKCNTALIKLPNSLIVLTCFGLEKTVLVMNTVMSFRFVLEGKEIRINMSCAVFITMNPRYGGGVELPDNLKSLFRPVAMMVPHYQMIAEIILFSFGFKSANSLSGKLTNLYELARKQLSQQDHYNFGLRSLKIVLIMAGTKKREFKCDTSDSLSEADETLIVIEAIREASLPKCPPEDVPLFENIIGDIFPEVTVLKVNQLALEKVIYTATQQLGLQNWSSQKEKIIQFYNQLQVCVGVMLVGPTGGGKTTVRRILEKALTLLPIADFLSVAERKSASKISERKGKVDICVLNPKCVTLSELYGQLDPNTMEWTDGLLSATIRSYVYFNTPKNTKKDIDLRLKSRISDLSNVFKLDSSDTTETDDNIFEEIEKVVKIPENHNFDWQWIILDGPVDTFWVENLNSVLDDTRTLCLANSERIALTNKIRVIFEVDNLSQASPATVSRCAMVYMDPVDLGWEPYVKSWLLKTSKIISQSGVDCLEFMIKNSVTDGLQFIRNRQKFQPYPMEDITVVITLCRILDAFFDFMGKNGGFEQRCKAGIRVITTAPDKPVAACVCTLQSTKPDAKNRKGG

SEQ ID NO: 448 - protein, 2161 aa, Artificial Sequence
  Synthetic polypeptide
METFIPIDLTTENQEMDKEETKTKPRLLRYEEKKYEDVKPLETQPAEIAEKETLEYKTVRTFSESLKSEKTEDYLRESIIQQHMVSPEPASLKEKGKSRRKKDQTHACPNVRKARPVSYDRTEPKDDDVIRNIIRLREKLGWQTILPQHSLKYGSSKIAIQKITLKKPLEDDGEFVYCLPRKSPKSLYNPYDLQVVSAHTAKHCKEFWVITASFISKVINIVGSVKEVELIPTLEWLSERRHYYLLRQFKIFSDFRMNKAFVTWKLNVKRIKTEKSRSFLYHHLFLADDLFQTCLVYIRGLCEDAINLKNYNDHENNLSAICLVKLDSSRTYSLDEFCEEQLQQATQALKQLEDIRNKAISEMKSTFLKVAEKNEIKEYFESKLSEDDTTHFKLPKYRRLLETFFKFVMLVDYIFQELIRQLMNTAVTLLLELFNGSAGMPFSVEKKNENLIRTFKDNSFPTGKTTNDCEELVDNSKLHAISVQKSEVKTDTDINEILNSVEVGKDLRKTYAPIFEVNLCLRIPAESDSSENSKENFHESDQCPEECVMFEDEMSENKDNCVKKHSSEELLPKAKKSKEISYNLEDIISDTEIETEFENKYMYYEFPEFPTNLFIDPNRLEFSVKIQNMLTNMEKCITTITPLCQDPQLSIFIDLVSIMDLPNKTGSIIHYKEQTRWPDCHILFETDPAYQNIIVNLLTIIGNSMGLVNAYSHKFIKYCTMTEKAKIMSMKISSMGELTSKEFEAILNRFRNYFRHIVNMAIEKRIGIFNVVSLDYQSECLLYIDNVIHMSHTLIQSVIEKKNKNLLEVVESSLQQLECDPTEIEEFLEHFIFLNAISSKISKLEKEFLTMSQLYSVAKHHQIHISEEQIAIFQVLLLKFSQLKSSMKLSKINKDTAITKFRDNLEACISGLHVDVGNLKAKIRTPLLLCAGTQVSTAMEMIQTLSGEAASLTNKAKAYSHYQDCFSDSQSHMHSVNVEEITQIVLSEISDIEGDLTLRKKLWEAQEEWKRASWEWRNSSLQSIDVESVQRNVSKLMHIISVLEKGLPKSDMVTHLKQVVTEFKQELPIIIALGNPCLKPRHWEALQEIIGKSVPLDKNCKVENLLALKMFQYENEINDMSTSATNEAALEKMLFKIIDFWNTTPLPLILHHTEIYSIFIIPSIDDISAQLEESQVILATIKGSPHIGPIKDLVNEWDQNLTLFSYTLEEWMNCQRNWLYLEPVFHSSEIRRQLPAETELFSQVISMWKKIMSKIQNKQNALQITTSAGVLEILQNCNIHLEHIKKSLEDYLEVKRLIFPRFYFLSNAELLDILADSRNPESVQPHLVKCFENIKQLLIWKQDIGPPAVKMLISAEGEGLVLPKKIRVRSAVEQWLVNVEKSMFDVLKKERYIYNIILLFQSQIMFYNDCVKSFVSSYSREKLEKVHAGLMCHLEEVADLVVLDTSNSRTKAILGALLILYVHCRDIVINLLLKNIFNAEDFEWTRHLQYKWNEKQKLCYVSQGNASFTYGYEYLGCTSRLVITPLTDRCWLTLMEALHLNLGGCPAGPAGTGKTETVKDLAKSLGKHCVVFNCFEDLDYKIVRKFFFGLVQSGAWSCFDEFNLIDLEVLSVIASQILTIKAAKDNYSARFVLEGKEIRINMSCAVFITMNPRYGGGVELPDNLKSLFRPVAMMVPHYQMIAEIILFSFGFKSANSLSGKLTNLYELARKQLSQQDHYNFGLRSLKIVLIMAGTKKREFKCLSEADETLIVIEAIREASLPKCPPEDVPLFENIIGDIFPEVTVLKVNQLALEKVIYTATQQLGLQNWSSQKEKIIQFYNQLQVCVGVMLVGPTGGGKTTVRRILEKALTLLPIADFLSVAERKSASKISERKGKVDICVLNPKCVTLSELYGQLDPNTMEWTDGLLSATIRSYVYFNTPKNTKKDIDLRLKSRISDLSNVFKLDSSDTTETDDNIFEEIEKVVKIPENHNFDWQWIILDGPVDTFWVENLNSVLDDTRTLCLANSERIALTNKIRVIFEVDNLSQASPATVSRCAMVYMDPVDLGWEPYVKSWLLKTSKIISQSGVDCLEFMIKNSVTDGLQFIRNRQKFQPYPMEDITVVITLCRILDAFFDFMGKNGGFEQRCKAGIRVITTAPDKPVAACVCTLQSTKPDAKNRKGG

SEQ ID NO: 449 - protein, 752 aa, Artificial Sequence
  Synthetic polypeptide
MMDSPFLELWQSKAVSIREQLGLGDRPNDSYCYNSAKNSTVLQGVTFGGIPTVLLIDVSCFLFLILVFSIIRRRFWDYGRIALVSEADSESRFQRLSSTSSSGQQDFENELGCCPWLTAIFRLHDDQILEWCGEDAIHYLSFQRHIIFLLVVVSFLSLCVILPVNLSGDLLDKDPYSFGRTTIANLQTDNDLLWLHTIFAVIYLFLTVGFMRHHTQSIKYKEENLVRRTLFITGLPRDARKETVESHFRDAYPTCEVVDVQLCYNVAKLIYLCKEKKKTEKSLTYYTNLQVKTGQRTLINPKPCGQFCCCEVLGCEWEDAISYYTRMKDRLLERITEEERHVQDQPLGMAFVTFQEKSMATYILKDFNACKCQSLQCKGEPQPSSHSRELYTSKWTVTFAADPEDICWKNLSIQGLRWWLQWLGINFTLFLGLFFLTTPSIILSTMDKFNVTKPIHALNNPIISQFFPTLLLWSFSALLPSIVYYSTLLESHWTKSGENQIMMTKVYIFLIFMVLILPSLGLTSLDFFFRWLFDKTSSEASIRLECVFLPDQGAFFVNYVIASAFIGNGMELLRLPGLILYTFRMIMAKTAADRRNVKQNQAFQYEFGAMYAWMLCVFTVIVAYSITCPIIAPFGLIYILLKHMVDRHNLYFVYLPAKLEKGIHFAAVNQALAAPILCLFWLYFFSFLRLGMKAPATLFTFLVLLLTILVCLAHTCFGCFKHLSPLNYKTEEPASDKGSEAEAHMPPPFTEI

SEQ ID NO: 450 - protein, 55 aa, Artificial Sequence
  Synthetic polypeptide
MSVGFIGAGQLAYALARGFTAAGILSAHKIIASSPEMNLPTVSALRWPLCCYSES

SEQ ID NO: 451 - protein, 99 aa, Artificial Sequence
  Synthetic polypeptide
MAAVLNAERLEVSVDGLTLSPDPEERPGAEGAPLLPPPLPPPSPPGSGRGPGASGEQPEPGEAAAGGAAEEARRLEQRWGFGLEELYGLALRFFKDTRG

SEQ ID NO: 452 - protein, 351 aa, Artificial Sequence
  Synthetic polypeptide
QPLKKRRGSFKMAELDQLPDESSSAKALVSLKEGSLSNTWNEKYSSLQKTPVWKGRNTSSAVEMKFTATMSTPDKKASQKIGFRLRNLLKLPKAHKWCIYEWFYSNIDKPLFEGDNDFCVCLKESFPNLKTRKLTRVEWGKIRRLMGKPRRCSSAFFEEERSALKQKRQKIRLLQQRKVADVSQFKDLPDEIPLPLVIGTKVTARLRGVHDGLFTGQIDAVDTLNATYRVTFDRTGLGTHTIPDYEVLSNEPHETMPIAAFGQKQRPSRFFMTPPRLHYTPPLQSPIIDNDPLLGQSPWRSKISGSDTETLGGFPVEFLIQVTRLSKILMIKKEHIKKLREMNTEAEKLKQ

SEQ ID NO: 453 - protein, 391 aa, Artificial Sequence
  Synthetic polypeptide
MHRGGQPLKKRRGSFKMAELDQLPDESSSAKALVSLKEGSLSNTWNEKYSSLQKTPVWKGRNTSSAVEMPFRNSKRSRLFSDEDDRQINTRSPKRNQRVAMVPQKFTATMSTPDKKASQKIGFRLRNLLKLPKAHKWCIYEWFYSNIDKPLFEGDNDFCVCLKESFPNLKTRKLTRVEWGKIRRLMGKPRRCSSAFFEEERSALKQKRQKIRLLQQRKVADVSQFKDLPDEIPLPLVIGTKVTARLRGVHDGLFTGQIDAVDTLNATYRVTFDRTGLGTHTIPDYEVLSNEPHETMPIAAFGQKQRPSRFFMTPPRLHYTPPLQSPIIDNDPLLGQSPWRSKISGSDTETLGGFPVEFLIQVTRLSKILMIKKEHIKKLREMNTEAEKLKQ

SEQ ID NO: 454 - protein, 446 aa, Artificial Sequence
  Synthetic polypeptide
ETAEQNSSLAVGLNDQLHDLSRSRSPAARSSASNIRERRARIARGRWDRVPDVATRRGLLRPAVSGKVRGRRRPSNVGFGNCSSAKALVSLKEGSLSNTWNEKYSSLQKTPVWKGRNTSSAVEMPFRNSKRSRLFSDEDDRQINTRSPKRNQRVAMVPQKFTATMSTPDKKASQKIGFRLRNLLKLPKAHKWCIYEWFYSNIDKPLFEGDNDFCVCLKESFPNLKTRKLTRVEWGKIRRLMGKPRRCSSAFFEEERSALKQKRQKIRLLQQRKVADVSQFKDLPDEIPLPLVIGTKVTARLRGVHDGLFTGQIDAVDTLNATYRVTFDRTGLGTHTIPDYEVLSNEPHETMPIAAFGQKQRPSRFFMTPPRLHYTPPLQSPIIDNDPLLGQSPWRSKISGSDTETLGGFPVEFLIQVTRLSKILMIKKEHIKKLREMNTEAEKLKQ

SEQ ID NO: 455 - protein, 340 aa, Artificial Sequence
  Synthetic polypeptide
MAELDQLPDESSSAKALVSLKEGSLSNTWNEKYSSLQKTPVWKGRNTSSAVEMKFTATMSTPDKKASQKIGFRLRNLLKLPKAHKWCIYEWFYSNIDKPLFEGDNDFCVCLKESFPNLKTRKLTRVEWGKIRRLMGKPRRCSSAFFEEERSALKQKRQKIRLLQQRKVADVSQFKDLPDEIPLPLVIGTKVTARLRGVHDGLFTGQIDAVDTLNATYRVTFDRTGLGTHTIPDYEVLSNEPHETMPIAAFGQKQRPSRFFMTPPRLHYTPPLQSPIIDNDPLLGQSPWRSKISGSDTETLGGFPVEFLIQVTRLSKILMIKKEHIKKLREMNTEAEKLKQ

SEQ ID NO: 456 - protein, 356 aa, Artificial Sequence
  Synthetic polypeptide
MHRGGQPLKKRRGSFKMAELDQLPDESSSAKALVSLKEGSLSNTWNEKYSSLQKTPVWKGRNTSSAVEMKFTATMSTPDKKASQKIGFRLRNLLKLPKAHKWCIYEWFYSNIDKPLFEGDNDFCVCLKESFPNLKTRKLTRVEWGKIRRLMGKPRRCSSAFFEEERSALKQKRQKIRLLQQRKVADVSQFKDLPDEIPLPLVIGTKVTARLRGVHDGLFTGQIDAVDTLNATYRVTFDRTGLGTHTIPDYEVLSNEPHETMPIAAFGQKQRPSRFFMTPPRLHYTPPLQSPIIDNDPLLGQSPWRSKISGSDTETLGGFPVEFLIQVTRLSKILMIKKEHIKKLREMNTEAEKLKQ

SEQ ID NO: 457 - protein, 354 aa, Artificial Sequence
  Synthetic polypeptide
QPLKKRRGSFKMAELDQLPDESSSAKALVSLKEGSLSNTWNEKYSSLQKTPVWKGRNTSSAVEMKFTATMSTPDKKASQKIGFRLRNLLKLPKAHKWCIYEWFYSNIDKPLFEGDNDFCVCLKESFPNLKTRKLTRVEWGKIRRLMGKPRRCSSAFFEEERSALKQKRQKIRLLQQRKVADVSQFKDLPDEIPLPLVIGTKVTARLRGVHDGLFTGQIDAVDTLNATYRVTFDRTGLGTHTIPDYEVLSNEPHETMPIAAFGQKQRPSRFFMTPPRLHYTPPLQSPIIDNDPLLGQSPWRSKISGSDTETLGGFPVEFLIQVFGRPRWADHLRSGVRDQSGQHGETLSLLKIQK

SEQ ID NO: 458 - protein, 394 aa, Artificial Sequence
  Synthetic polypeptide
MHRGGQPLKKRRGSFKMAELDQLPDESSSAKALVSLKEGSLSNTWNEKYSSLQKTPVWKGRNTSSAVEMPFRNSKRSRLFSDEDDRQINTRSPKRNQRVAMVPQKFTATMSTPDKKASQKIGFRLRNLLKLPKAHKWCIYEWFYSNIDKPLFEGDNDFCVCLKESFPNLKTRKLTRVEWGKIRRLMGKPRRCSSAFFEEERSALKQKRQKIRLLQQRKVADVSQFKDLPDEIPLPLVIGTKVTARLRGVHDGLFTGQIDAVDTLNATYRVTFDRTGLGTHTIPDYEVLSNEPHETMPIAAFGQKQRPSRFFMTPPRLHYTPPLQSPIIDNDPLLGQSPWRSKISGSDTETLGGFPVEFLIQVFGRPRWADHLRSGVRDQSGQHGETLSLLKIQK

SEQ ID NO: 459 - protein, 449 aa, Artificial Sequence
  Synthetic polypeptide
ETAEQNSSLAVGLNDQLHDLSRSRSPAARSSASNIRERRARIARGRWDRVPDVATRRGLLRPAVSGKVRGRRRPSNVGFGNCSSAKALVSLKEGSLSNTWNEKYSSLQKTPVWKGRNTSSAVEMPFRNSKRSRLFSDEDDRQINTRSPKRNQRVAMVPQKFTATMSTPDKKASQKIGFRLRNLLKLPKAHKWCIYEWFYSNIDKPLFEGDNDFCVCLKESFPNLKTRKLTRVEWGKIRRLMGKPRRCSSAFFEEERSALKQKRQKIRLLQQRKVADVSQFKDLPDEIPLPLVIGTKVTARLRGVHDGLFTGQIDAVDTLNATYRVTFDRTGLGTHTIPDYEVLSNEPHETMPIAAFGQKQRPSRFFMTPPRLHYTPPLQSPIIDNDPLLGQSPWRSKISGSDTETLGGFPVEFLIQVFGRPRWADHLRSGVRDQSGQHGETLSLLKIQK

SEQ ID NO: 460 - protein, 343 aa, Artificial Sequence
  Synthetic polypeptide
MAELDQLPDESSSAKALVSLKEGSLSNTWNEKYSSLQKTPVWKGRNTSSAVEMKFTATMSTPDKKASQKIGFRLRNLLKLPKAHKWCIYEWFYSNIDKPLFEGDNDFCVCLKESFPNLKTRKLTRVEWGKIRRLMGKPRRCSSAFFEEERSALKQKRQKIRLLQQRKVADVSQFKDLPDEIPLPLVIGTKVTARLRGVHDGLFTGQIDAVDTLNATYRVTFDRTGLGTHTIPDYEVLSNEPHETMPIAAFGQKQRPSRFFMTPPRLHYTPPLQSPIIDNDPLLGQSPWRSKISGSDTETLGGFPVEFLIQVFGRPRWADHLRSGVRDQSGQHGETLSLLKIQK

SEQ ID NO: 461 - protein, 359 aa, Artificial Sequence
  Synthetic polypeptide
MHRGGQPLKKRRGSFKMAELDQLPDESSSAKALVSLKEGSLSNTWNEKYSSLQKTPVWKGRNTSSAVEMKFTATMSTPDKKASQKIGFRLRNLLKLPKAHKWCIYEWFYSNIDKPLFEGDNDFCVCLKESFPNLKTRKLTRVEWGKIRRLMGKPRRCSSAFFEEERSALKQKRQKIRLLQQRKVADVSQFKDLPDEIPLPLVIGTKVTARLRGVHDGLFTGQIDAVDTLNATYRVTFDRTGLGTHTIPDYEVLSNEPHETMPIAAFGQKQRPSRFFMTPPRLHYTPPLQSPIIDNDPLLGQSPWRSKISGSDTETLGGFPVEFLIQVFGRPRWADHLRSGVRDQSGQHGETLSLLKIQK

SEQ ID NO: 462 - protein, 355 aa, Artificial Sequence
  Synthetic polypeptide
QPLKKRRGSFKMAELDQLPDESSSAKALVSLKEGSLSNTWNEKYSSLQKTPVWKGRNTSSAVEMKFTATMSTPDKKASQKIGFRLRNLLKLPKAHKWCIYEWFYSNIDKPLFEGDNDFCVCLKESFPNLKTRKLTRVEWGKIRRLMGKPRRCSSAFFEEERSALKQKRQKIRLLQQRKVADVSQFKDLPDEIPLPLVIGTKVTARLRGVHDGLFTGQIDAVDTLNATYRVTFDRTGLGTHTIPDYEVLSNEPHETMPIAAFGQKQRPSRFFMTPPRLHYTPPLQSPIIDNDPLLGQSPWRSKISGSDTETLGGFPVEFLIQVQFGRPRWADHLRSGVRDQSGQHGETLSLLKIQK

SEQ ID NO: 463 - protein, 395 aa, Artificial Sequence
  Synthetic polypeptide
MHRGGQPLKKRRGSFKMAELDQLPDESSSAKALVSLKEGSLSNTWNEKYSSLQKTPVWKGRNTSSAVEMPFRNSKRSRLFSDEDDRQINTRSPKRNQRVAMVPQKFTATMSTPDKKASQKIGFRLRNLLKLPKAHKWCIYEWFYSNIDKPLFEGDNDFCVCLKESFPNLKTRKLTRVEWGKIRRLMGKPRRCSSAFFEEERSALKQKRQKIRLLQQRKVADVSQFKDLPDEIPLPLVIGTKVTARLRGVHDGLFTGQIDAVDTLNATYRVTFDRTGLGTHTIPDYEVLSNEPHETMPIAAFGQKQRPSRFFMTPPRLHYTPPLQSPIIDNDPLLGQSPWRSKISGSDTETLGGFPVEFLIQVQFGRPRWADHLRSGVRDQSGQHGETLSLLKIQK

SEQ ID NO: 464 - protein, 450 aa, Artificial Sequence
  Synthetic polypeptide
ETAEQNSSLAVGLNDQLHDLSRSRSPAARSSASNIRERRARIARGRWDRVPDVATRRGLLRPAVSGKVRGRRRPSNVGFGNCSSAKALVSLKEGSLSNTWNEKYSSLQKTPVWKGRNTSSAVEMPFRNSKRSRLFSDEDDRQINTRSPKRNQRVAMVPQKFTATMSTPDKKASQKIGFRLRNLLKLPKAHKWCIYEWFYSNIDKPLFEGDNDFCVCLKESFPNLKTRKLTRVEWGKIRRLMGKPRRCSSAFFEEERSALKQKRQKIRLLQQRKVADVSQFKDLPDEIPLPLVIGTKVTARLRGVHDGLFTGQIDAVDTLNATYRVTFDRTGLGTHTIPDYEVLSNEPHETMPIAAFGQKQRPSRFFMTPPRLHYTPPLQSPIIDNDPLLGQSPWRSKISGSDTETLGGFPVEFLIQVQFGRPRWADHLRSGVRDQSGQHGETLSLLKIQK

SEQ ID NO: 465 - protein, 344 aa, Artificial Sequence
  Synthetic polypeptide
MAELDQLPDESSSAKALVSLKEGSLSNTWNEKYSSLQKTPVWKGRNTSSAVEMKFTATMSTPDKKASQKIGFRLRNLLKLPKAHKWCIYEWFYSNIDKPLFEGDNDFCVCLKESFPNLKTRKLTRVEWGKIRRLMGKPRRCSSAFFEEERSALKQKRQKIRLLQQRKVADVSQFKDLPDEIPLPLVIGTKVTARLRGVHDGLFTGQIDAVDTLNATYRVTFDRTGLGTHTIPDYEVLSNEPHETMPIAAFGQKQRPSRFFMTPPRLHYTPPLQSPIIDNDPLLGQSPWRSKISGSDTETLGGFPVEFLIQVQFGRPRWADHLRSGVRDQSGQHGETLSLLKIQK

SEQ ID NO: 466 - protein, 360 aa, Artificial Sequence
  Synthetic polypeptide
MHRGGQPLKKRRGSFKMAELDQLPDESSSAKALVSLKEGSLSNTWNEKYSSLQKTPVWKGRNTSSAVEMKFTATMSTPDKKASQKIGFRLRNLLKLPKAHKWCIYEWFYSNIDKPLFEGDNDFCVCLKESFPNLKTRKLTRVEWGKIRRLMGKPRRCSSAFFEEERSALKQKRQKIRLLQQRKVADVSQFKDLPDEIPLPLVIGTKVTARLRGVHDGLFTGQIDAVDTLNATYRVTFDRTGLGTHTIPDYEVLSNEPHETMPIAAFGQKQRPSRFFMTPPRLHYTPPLQSPIIDNDPLLGQSPWRSKISGSDTETLGGFPVEFLIQVQFGRPRWADHLRSGVRDQSGQHGETLSLLKIQK

SEQ ID NO: 467 - protein, 673 aa, Artificial Sequence
  Synthetic polypeptide
MAVYCYALNSLVIMNSANEMKSGGGPGPSGSETPPPPRRAVLSPGSVFSPGRGASFLFPPAESLSPEEPRSPGGWRSGRRRLNSSSGSGSGSSGSSVSSPSWAGRLRGDRQQVVAAGTLSPPGPEEAKRKLRILQRELQNVQVNQKVGMFEAHIQAQSSAIQAPRSPRLGRARSPSPCPFRSSSQPPGRVLVQGARSEERRTKSWGEQCPETSGTDSGRKGGPSLCSSQVKKGMPPLPGRAAPTGSEAQGPSAFVRMEKGIPASPRCGSPTAMEIDKRGSPTPGTRSCLAPSLGLFGASLTMATEVAARVTSTGPHRPQDLALTEPSGRARELEDLQPPEALVERQGQFLGSETSPAPERGGPRDGEPPGKMGKGYLPCGMPGSGEPEVGKRPEETTVSVQSAESSDSLSWSRLPRALASVGPEEARSGAPVGGGRWQLSDRVEGGSPTLGLLGGSPSAQPGTGNVEAGIPSGRMLEPLPCWDAAKDLKEPQCPPGDRVGVQPGNSRVWQGTMEKAGLAWTRGTGVQSEGTWESQRQDSDALPSPELLPQDPDKPFLRKACSPSNIPAVIITDMGTQEDGALEETQGSPRGNLPLRKLSSSSASSTGFSSSYEDSEEDISSDPERTLDPNSAFLHTLDQQKPRVTLKFFSFGTWTSSPCFSACRQPIVGPVIM

SEQ ID NO: 468 - protein, 1199 aa, Artificial Sequence
  Synthetic polypeptide
MSGEVRLRQLEQFILDGPAQTNGQCFSVETLLDILICLYDECNNSPLRREKNILEYLEWAKPFTSKVKQMRLHREDFEILKVIGRGAFGEVAVVKLKNADKVFAMKILNKWEMLKRAETACFREERDVLVNGDNKWITTLHYAFQDDNNLYLVMDYYVGGDLLTLLSKFEDRLPEDMARFYLAEMVIAIDSVHQLHYVHRDIKPDNILMDMNGHIRLADFGSCLKLMEDGTVQSSVAVGTPDYISPEILQAMEDGKGRYGPECDWWSLGVCMYEMLYGETPFYAESLVETYGKIMNHKERFQFPAQVTDVSENAKDLIRRLICSREHRLGQNGIEDFKKHPFFSGIDWDNIRNCEAPYIPEVSSPTDTSNFDVDDDCLKNSETMPPPTHTAFSGHHLPFVGFTYTSSCVLSDRSCLRVTAGPTSLDLDVNVQRTLDNNLATEAYERRIKRLEQEKLELSRKLQESTQTVQALQYSTVDGPLTASKDLEIKNLKEEIEKLRKQVTESSHLEQQLEEANAVRQELDDAFRQIKAYEKQIKTLQQEREDLNKLEVHTEALAAEASKDRKLREQSEHYSKQLENELEGLKQKQISYSPGVCSIEHQQEITKLKTDLEKKSIFYEEELSKREGIHANEIKNLKKELHDSEGQQLALNKEIMILKDKLEKTRRESQSEREEFESEFKQQYEREKVLLTEENKKLTSELDKLTTLYENLSIHNQQLEEEVKDLADKKESVAHWEAQITEIIQWVSDEKDARGYLQALASKMTEELEALRNSSLGTRATDMPWKMRRFAKLDMSARLELQSALDAEIRAKQAIQEELNKVKASNIITECKLKDSEKKNLELLSEIEQLIKDTEELRSEKGIEHQDSQHSFLAFLNTPTDALDQFETVDSTPLSVHTPTLRKKGCPGSTGFPPKRKTHQFFVKSFTTPTKCHQCTSLMVGLIRQGCSCEVCGFSCHITCVNKAPTTCPVPPEQTKGPLGIDPQKGIGTAYEGHVRIPKPAGVKKGWQRALAIVCDFKLFLYDIAEGKASQPSVVISQVIDMRDEEFSVSSVLASDVIHASRKDIPCIFRVTASQLSASNNKCSILMLADTENEKNKWVGVLSELHKILKKNKFRDRSVYVPKEAYDSTLPLIKTTQAAAIIDHERIALGNEEGLFVVHVTKDEFSASRKVSLKIWHTFTQESFGVCLGCQKSQDSNLI

SEQ ID NO: 469 - protein, 1280 aa, Artificial Sequence
  Synthetic polypeptide
MSGEVRLRQLEQFILDGPAQTNGQCFSVETLLDILICLYDECNNSPLRREKNILEYLEWAKPFTSKVKQMRLHREDFEILKVIGRGAFGEVAVVKLKNADKVFAMKILNKWEMLKRAETACFREERDVLVNGDNKWITTLHYAFQDDNNLYLVMDYYVGGDLLTLLSKFEDRLPEDMARFYLAEMVIAIDSVHQLHYVHRDIKPDNILMDMNGHIRLADFGSCLKLMEDGTVQSSVAVGTPDYISPEILQAMEDGKGRYGPECDWWSLGVCMYEMLYGETPFYAESLVETYGKIMNHKERFQFPAQVTDVSENAKDLIRRLICSREHRLGQNGIEDFKKHPFFSGIDWDNIRNCEAPYIPEVSSPTDTSNFDVDDDCLKNSETMPPPTHTAFSGHHLPFVGFTYTSSCVLSDRSCLRVTAGPTSLDLDVNVQRTLDNNLATEAYERRIKRLEQEKLELSRKLQESTQTVQALQYSTVDGPLTASKDLEIKNLKEEIEKLRKQVTESSHLEQQLEEANAVRQELDDAFRQIKAYEKQIKTLQQEREDLNKELVQASERLKNQSKELKDAHCQRKLAMQEFMEINERLTELHTQKQKLARHVRDKEEEVDLVMQKVESLRQELRRTERAKKELEVHTEALAAEASKDRKLREQSEHYSKQLENELEGLKQKQISYSPGVCSIEHQQEITKLKTDLEKKSIFYEEELSKREGIHANEIKNLKKELHDSEGQQLALNKEIMILKDKLEKTRRESQSEREEFESEFKQQYEREKVLLTEENKKLTSELDKLTTLYENLSIHNQQLEEEVKDLADKKESVAHWEAQITEIIQWVSDEKDARGYLQALASKMTEELEALRNSSLGTRATDMPWKMRRFAKLDMSARLELQSALDAEIRAKQAIQEELNKVKASNIITECKLKDSEKKNLELLSEIEQLIKDTEELRSEKGIEHQDSQHSFLAFLNTPTDALDQFETVDSTPLSVHTPTLRKKGCPGSTGFPPKRKTHQFFVKSFTTPTKCHQCTSLMVGLIRQGCSCEVCGFSCHITCVNKAPTTCPVPPEQTKGPLGIDPQKGIGTAYEGHVRIPKPAGVKKGWQRALAIVCDFKLFLYDIAEGKASQPSVVISQVIDMRDEEFSVSSVLASDVIHASRKDIPCIFRVTASQLSASNNKCSILMLADTENEKNKWVGVLSELHKILKKNKFRDRSVYVPKEAYDSTLPLIKTTQAAAIIDHERIALGNEEGLFVVHVTKDEFSASRKVSLKIWHTFTQESFGVCLGCQKSQDSNLI

SEQ ID NO: 470 - protein, 6 aa, Artificial Sequence
  Synthetic polypeptide
AVRRRG

SEQ ID NO: 471 - protein, 1252 aa, Artificial Sequence
  Synthetic polypeptide
MSGEVRLRQLEQFILDGPAQTNGQCFSVETLLDILICLYDECNNSPLRREKNILEYLEWAKPFTSKVKQMRLHREDFEILKVIGRGAFGEVAVVKLKNADKVFAMKILNKWEMLKRAETACFREERDVLVNGDNKWITTLHYAFQDDNNLYLVMDYYVGGDLLTLLSKFEDRLPEDMARFYLAEMVIAIDSVHQLHYVHRDIKPDNILMDMNGHIRLADFGSCLKLMEDGTVQSSVAVGTPDYISPEILQAMEDGKGRYGPECDWWSLGVCMYEMLYGETPFYAESLVETYGKIMNHKERFQFPAQVTDVSENAKDLIRRLICSREHRLGQNGIEDFKKHPFFSGIDWDNIRNCEAPYIPEVSSPTDTSNFDVDDDCLKNSETMPPPTHTAFSGHHLPFVGFTYTSSCVLSDRSCLRVTAGPTSLDLDVNVQRTLDNNLATEAYERRIKRLEQEKLELSRKLQESTQTVQALQYSTVDGPLTASKDLEIKNLKEEIEKLRKQVTESSHLEQQLEEANAVRQELDDAFRQIKAYEKQIKTLQQEREDLNKELVQASERLKNQSKELKDAHCQRKLAMQEFMEINERLTELHTQKQKLARHVRDKEEEVDLVMQKVESLRQELRRTERAKKELEVHTEALAAEASKDRKLREQSEHYSKQLENELEGLKQKQISYSPGVCSIEHQQEITKLKTDLEKKSIFYEEELSKREGIHANEIKNLKKELHDSEGQQLALNKEIMILKDKLEKTRRESQSEREEFESEFKQQYEREKVLLTEENKKLTSELDKLTTLYENLSIHNQQLEEEVKDLADKKESVAHWEAQITEIIQWVSDEKDARGYLQALASKMTEELEALRNSSLGTRATDMPWKMRRFAKLDMSARLELQSALDAEIRAKQAIQEELNKVKASNIITECKLKDSEKKNLELLSEIEQLIKDTEELRSEKGIEHQDSQHSFLAFLNTPTDALDQFERKTHQFFVKSFTTPTKCHQCTSLMVGLIRQGCSCEVCGFSCHITCVNKAPTTCPVPPEQTKGPLGIDPQKGIGTAYEGHVRIPKPAGVKKGWQRALAIVCDFKLFLYDIAEGKASQPSVVISQVIDMRDEEFSVSSVLASDVIHASRKDIPCIFRVTASQLSASNNKCSILMLADTENEKNKWVGVLSELHKILKKNKFRDRSVYVPKEAYDSTLPLIKTTQAAAIIDHERIALGNEEGLFVVHVTKDEFSASRKVSLKIWHTFTQESFGVCLGCQKSQDSNLI

SEQ ID NO: 472 - protein, 1315 aa, Artificial Sequence
  Synthetic polypeptide
MSGEVRLRQLEQFILDGPAQTNGQCFSVETLLDILICLYDECNNSPLRREKNILEYLEWAKPFTSKVKQMRLHREDFEILKVIGRGAFGEVAVVKLKNADKVFAMKILNKWEMLKRAETACFREERDVLVNGDNKWITTLHYAFQDDNNLYLVMDYYVGGDLLTLLSKFEDRLPEDMARFYLAEMVIAIDSVHQLHYVHRDIKPDNILMDMNGHIRLADFGSCLKLMEDGTVQSSVAVGTPDYISPEILQAMEDGKGRYGPECDWWSLGVCMYEMLYGETPFYAESLVETYGKIMNHKERFQFPAQVTDVSENAKDLIRRLICSREHRLGQNGIEDFKKHPFFSGIDWDNIRNCEAPYIPEVSSPTDTSNFDVDDDCLKNSETMPPPTHTAFSGHHLPFVGFTYTSSCVLSDRSCLRVTAGPTSLDLDVNVQRTLDNNLATEAYERRIKRLEQEKLELSRKLQESTQTVQALQYSTVDGPLTASKDLEIKNLKEEIEKLRKQVTESSHLEQQLEEANAVRQELDDAFRQIKAYEKQIKTLQQEREDLNKELVQASERLKNQSKELKDAHCQRKLAMQEFMEINERLTELHTQKQKLARHVRDKEEEVDLVMQKVESLRQELRRTERAKKELEVHTEALAAEASKDRKLREQSEHYSKQLENELEGLKQKQISYSPGVCSIEHQQEITKLKTDLEKKSIFYEEELSKREGIHANEIKNLKKELHDSEGQQLALNKEIMILKDKLEKTRRESQSEREEFESEFKQQYEREKVLLTEENKKLTSELDKLTTLYENLSIHNQQLEEEVKDLADKKESVAHWEAQITEIIQWVSDEKDARGYLQALASKMTEELEALRNSSLGTRATDMPWKMRRFAKLDMSARLELQSALDAEIRAKQAIQEELNKVKASNIITECKLKDSEKKNLELLSEIEQLIKDTEELRSEKGIEHQDSQHSFLAFLNTPTDALDQFETDPVENTYVWNPSVKFHIQSRSTSPSTSSEAEPVKTVDSTPLSVHTPTLRKKGCPGSTGFPPKRKTHQFFVKSFTTPTKCHQCTSLMVGLIRQGCSCEVCGFSCHITCVNKAPTTCPVPPEQTKGPLGIDPQKGIGTAYEGHVRIPKPAGVKKGWQRALAIVCDFKLFLYDIAEGKASQPSVVISQVIDMRDEEFSVSSVLASDVIHASRKDIPCIFRVTASQLSASNNKCSILMLADTENEKNKWVGVLSELHKILKKNKFRDRSVYVPKEAYDSTLPLIKTTQAAAIIDHERIALGNEEGLFVVHVTKDEFSASRKVSLKIWHTFTQESFGVCLGCQKSQDSNLI

SEQ ID NO: 473 - protein, 6 aa, Artificial Sequence
  Synthetic polypeptide
RRNTCK

SEQ ID NO: 474 - protein, 1260 aa, Artificial Sequence
  Synthetic polypeptide
MSGEVRLRQLEQFILDGPAQTNGQCFSVETLLDILICLYDECNNSPLRREKNILEYLEWAKPFTSKVKQMRLHREDFEILKVIGRGAFGEVAVVKLKNADKVFAMKILNKWEMLKRAETACFREERDVLVNGDNKWITTLHYAFQDDNNLYLVMDYYVGGDLLTLLSKFEDRLPEDMARFYLAEMVIAIDSVHQLHYVHRDIKPDNILMDMNGHIRLADFGSCLKLMEDGTVQSSVAVGTPDYISPEILQAMEDGKGRYGPECDWWSLGVCMYEMLYGETPFYAESLVETYGKIMNHKERFQFPAQVTDVSENAKDLIRRLICSREHRLGQNGIEDFKKHPFFSGIDWDNIRNCEAPYIPEVSSPTDTSNFDVDDDCLKNSETMPPPTHTAFSGHHLPFVGFTYTSSCVLSDRSCLRVTAGPTSLDLDVNVQRTLDNNLATEAYERRIKRLEQEKLELSRKLQESTQTVQALQYSTVDGPLTASKDLEIKNLKEEIEKLRKQVTESSHLEQQLEEANAVRQELDDAFRQIKAYEKQIKTLQQEREDLNKELVQASERLKNQSKELKDAHCQRKLAMQEFMEINERLTELHTQKQKLARHVRDKEEEVDLVMQKVESLRQELRRTERAKKELEVHTEALAAEASKDRKLREQSEHYSKQLENELEGLKQKQISYSPGVCSIEHQQEITKLKTDLEKKSIFYEEELSKREGIHANEIKNLKKELHDSEGQQLALNKEIMILKDKLEKTRRESQSEREEFESEFKQQYEREKVLLTEENKKLTSELDKLTTLYENLSIHNQQLEEEVKDLADKKESVAHWEAQITEIIQWVSDEKDARGYLQALASKMTEELEALRNSSLGTRATDMPWKMRRFAKLDMSARLELQSALDAEIRAKQAIQEELNKVKASNIITECKLKDSEKKNLELLSEIEQLIKDTEELRSEKASKGRRTVDSTPLSVHTPTLRKKGCPGSTGFPPKRKTHQFFVKSFTTPTKCHQCTSLMVGLIRQGCSCEVCGFSCHITCVNKAPTTCPVPPEQTKGPLGIDPQKGIGTAYEGHVRIPKPAGVKKGWQRALAIVCDFKLFLYDIAEGKASQPSVVISQVIDMRDEEFSVSSVLASDVIHASRKDIPCIFRVTASQLSASNNKCSILMLADTENEKNKWVGVLSELHKILKKNKFRDRSVYVPKEAYDSTLPLIKTTQAAAIIDHERIALGNEEGLFVVHVTKDEFSASRKVSLKIWHTFTQESFGVCLGCQKSQDSNLI

SEQ ID NO: 475 - protein, 1293 aa, Artificial Sequence
  Synthetic polypeptide
MSGEVRLRQLEQFILDGPAQTNGQCFSVETLLDILICLYDECNNSPLRREKNILEYLEWAKPFTSKVKQMRLHREDFEILKVIGRGAFGEVAVVKLKNADKVFAMKILNKWEMLKRAETACFREERDVLVNGDNKWITTLHYAFQDDNNLYLVMDYYVGGDLLTLLSKFEDRLPEDMARFYLAEMVIAIDSVHQLHYVHRDIKPDNILMDMNGHIRLADFGSCLKLMEDGTVQSSVAVGTPDYISPEILQAMEDGKGRYGPECDWWSLGVCMYEMLYGETPFYAESLVETYGKIMNHKERFQFPAQVTDVSENAKDLIRRLICSREHRLGQNGIEDFKKHPFFSGIDWDNIRNCEAPYIPEVSSPTDTSNFDVDDDCLKNSETMPPPTHTAFSGHHLPFVGFTYTSSCVLSDRSCLRVTAGPTSLDLDVNVQRTLDNNLATEAYERRIKRLEQEKLELSRKLQESTQTVQALQYSTVDGPLTASKDLEIKNLKEEIEKLRKQVTESSHLEQQLEEANAVRQELDDAFRQIKAYEKQIKTLQQEREDLNKELVQASERLKNQSKELKDAHCQRKLAMQEFMEINERLTELHTQKQKLARHVRDKEEEVDLVMQKVESLRQELRRTERAKKELEVHTEALAAEASKDRKLREQSEHYSKQLENELEGLKQKQISYSPGVCSIEHQQEITKLKTDLEKKSIFYEEELSKREGIHANEIKNLKKELHDSEGQQLALNKEIMILKDKLEKTRRESQSEREEFESEFKQQYEREKVLLTEENKKLTSELDKLTTLYENLSIHNQQLEEEVKDLADKKESVAHWEAQITEIIQWVSDEKDARGYLQALASKMTEELEALRNSSLGTRATDMPWKMRRFAKLDMSARLELQSALDAEIRAKQAIQEELNKVKASNIITECKLKDSEKKNLELLSEIEQLIKDTEELRSEKGIEHQDSQHSFLAFLNTPTDALDQFERSPSCTPASKGRRTVDSTPLSVHTPTLRKKGCPGSTGFPPKRKTHQFFVKSFTTPTKCHQCTSLMVGLIRQGCSCEVCGFSCHITCVNKAPTTCPVPPEQTKGPLGIDPQKGIGTAYEGHVRIPKPAGVKKGWQRALAIVCDFKLFLYDIAEGKASQPSVVISQVIDMRDEEFSVSSVLASDVIHASRKDIPCIFRVTASQLSASNNKCSILMLADTENEKNKWVGVLSELHKILKKNKFRDRSVYVPKEAYDSTLPLIKTTQAAAIIDHERIALGNEEGLFVVHVTKDEFSASRKVSLKIWHTFTQESFGVCLGCQKSQDSNLI

SEQ ID NO: 476 - protein, 3 aa, Artificial Sequence
  Synthetic polypeptide
RYC

SEQ ID NO: 477 - protein, 3 aa, Artificial Sequence
  Synthetic polypeptide
GQR

SEQ ID NO: 478 - protein, 87 aa, Artificial Sequence
  Synthetic polypeptide
MSGEVRLRQLEQFILDGPAQTNGQCFSVETLLDILICLYDECNNSPLRREKNILEYLEWALWEAKTGGSLGQEFETSPANMVTPHLY

SEQ ID NO: 479 - protein, 5231 aa, Artificial Sequence
  Synthetic polypeptide
MDQPQFSGAPRFLTRPKAFVVSVGKDATLSCQIVGNPTPQVSWEKDQQPVAAGARFRLAQDGDLYRLTILDLALGDSGQYVCRARNAIGEAFAAVGLQVDAEAACAEQAPHFLLRPTSIRVREGSEATFRCRVGGSPRPAVSWSKDGRRLGEPDGPRVRVEELGEASALRIRAARPRDGGTYEVRAENPLGAASAAAALVVDSDAADTASRPGTSTAALLAHLQRRREAMRAEGAPASPPSTGTRTCTVTEGKHARLSCYVTGEPKPETVWKKDGQLVTEGRRHVVYEDAQENFVLKILFCKQSDRGLYTCTASNLVGQTYSSVLVVVREPAVPFKKRLQDLEVREKESATFLCEVPQPSTEAAWFKEETRLWASAKYGIEEEGTERRLTVRNVSADDDAVYICETPEGSRTVAELAVQGNLLRKLPRKTAVRVGDTAMFCVELAVPVGPVHWLRNQEEVVAGGRVAISAEGTRHTLTISQCCLEDVGQVAFMAGDCQTSTQFCVSAPRKPPLQPPVDPVVKARMESSVILSWSPPPHGERPVTIDGYLVEKKKLGTYTWIRCHEAEWVATPELTVADVAEEGNFQFRVSALNSFGQSPYLEFPGTVHLAPKLAVRTPLKAVQAVEGGEVTFSVDLTVASAGEWFLDGQALKASSVYEIHCDRTRHTLTIREVPASLHGAQLKFVANGIESSIRMEVRAAPGLTANKPPAAAAREVLARLHEEAQLLAELSDQAAAVTWLKDGRTLSPGPKYEVQASAGRRVLLVRDVARDDAGLYECVSRGGRIAYQLSVQGLARFLHKDMAGSCVDAVAGGPAQFECETSEAHVHVHWYKDGMELGHSGERFLQEDVGTRHRLVAATVTRQDEGTYSCRVGEDSVDFRLRVSEPKVVFAKEQLARRKLQAEAGASATLSCEVAQAQTEVTWYKDGKKLSSSSKVCMEATGCTRRLVVQQAGQADAGEYSCEAGGQRLSFHLDVKEPKVVFAKDQVAHSEVQAEAGASATLSCEVAQAQTEVMWYKDGKKLSSSLKVHVEAKGCRRRLVVQQAGKTDAGDYSCEARGQRVSFRLHITEPKMMFAKEQSVHNEVQAEAGASAMLSCEVAQAQTEVTWYKDGKKLSSSSKVGMEVKGCTRRLVLPQAGKADAGEYSCEAGGQRVSFHLHITEPKGVFAKEQSVHNEVQAEAGTTAMLSCEVAQPQTEVTWYKDGKKLSSSSKVRMEVKGCTRRLVVQQVGKADAGEYSCEAGGQRVSFQLHITEPKAVFAKEQLVHNEVRTEAGASATLSCEVAQAQTEVTWYKDGKKLSSSSKVRIEAAGCMRQLVVQQAGQADAGEYTCEAGGQRLSFHLDVSEPKAVFAKEQLAHRKVQAEAGAIATLSCEVAQAQTEVTWYKDGKKLSSSSKVRMEAVGCTRRLVVQQACQADTGEYSCEAGGQRLSFSLDVAEPKVVFAKEQPVHREVQAQAGASTTLSCEVAQAQTEVMWYKDGKKLSFSSKVRMEAVGCTRRLVVQQAGQAVAGEYSCEAGSQRLSFHLHVAEPKAVFAKEQPASREVQAEAGTSATLSCEVAQAQTEVTWYKDGKKLSSSSKVRMEAVGCTRRLVVQEAGQADAGEYSCKAGDQRLSFHLHVAEPKVVFAKEQPAHREVQAEAGASATLSCEVAQAQTEVTWYKDGKKLSSSSKVRVEAVGCTRRLVVQQAGQAEAGEYSCEAGGQQLSFRLQVAELEPQISERPCRREPLVVKEHEDIILTATLATPSAATVTWLKDGVEIRRSKRHETASQGDTHTLTVHGAQVLDSAIYSCRVGAEGQDFPVQVEEVAAKFCRLLEPVCGELGGTVTLACELSPACAEVVWRCGNTQLRVGKRFQMVAEGPVRSLTVLGLRAEDAGEYVCESRDDHTSAQLTVSVPRVVKFMSGLSTVVAEEGGEATFQCVVSPSDVAVVWFRDGALLQPSEKFAISQSGASHSLTISDLVLEDAGQITVEAEGASSSAALRVREAPVLFKKKLEPQTVEERSSVTLEVELTRPWPELRWTRNATALAPGKNVEIHAEGARHRLVLHNVGFADRGFFGCETPDDKTQAKLTVEMRQVRLVRGLQAVEAREQGTATMEVQLSHADVDGSWTRDGLRFQQGPTCHLAVRGPMHTLTLSGLRPEDSGLMVFKAEGVHTSARLVVTELPVSFSRPLQDVVTTEKEKVTLECELSRPNVDVRWLKDGVELRAGKTMAIAAQGACRSLTIYRCEFADQGVYVCDAHDAQSSASVKVQGRTYTLIYRRVLAEDAGEIQFVAENAESRAQLRVKELPVTLVRPLRDKIAMEKHRGVLECQVSRASAQVRWFKGSQELQPGPKYELVSDGLYRKLIISDVHAEDEDTYTCDAGDVKTSAQFFVEEQSITIVRGLQDVTVMEPAPAWFECETSIPSVRPPKWLLGKTVLQAGGNVGLEQEGTVHRLMLRRTCSTMTGPVHFTVGKSRSSARLVVSDIPVVLTRPLEPKTGRELQSVVLSCDFRPAPKAVQWYKDDTPLSPSEKFKMSLEGQMAELRILRLMPADAGVYRCQAGSAHSSTEVTVEAREVTVTGPLQDAEATEEGWASFSCELSHEDEEVEWSLNGMPLYNDSFHEISHKGRRHTLVLKSIQRADAGIVRASSLKVSTSARLEVRVKPVVFLKALDDLSAEERGTLALQCEVSDPEAHVVWRKDGVQLGPSDKYDFLHTAGTRGLVVHDVSPEDAGLYTCHVGSEETRARVRVHDLHVGITKRLKTMEVLEGESCSFECVLSHESASDPAMWTVGGKTVGSSSRFQATRQGRKYILVVREAAPSDAGEVVFSVRGLTSKASLIVRERPAAIIKPLEDQWVAPGEDVELRCELSRAGTPVHWLKDRKAIRKSQKYDVVCEGTMAMLVIRGASLKDAGEYTCEVEASKSTASLHVEEKANCFTEELTNLQVEEKGTAVFTCKTEHPAATVTWRKGLLELRASGKHQPSQEGLTLRLTISALEKADSDTYTCDIGQAQSRAQLLVQGRRVHIIEDLEDVDVQEGSSATFRCRISPANYEPVHWFLDKTPLHANELNEIDAQPGGYHVLTLRQLALKDSGTIYFEAGDQRASAALRVTEKPSVFSRELTDATITEGEDLTLVCETSTCDIPVCWTKDGKTLRGSARCQLSHEGHRAQLLITGATLQDSGRYKCEAGGACSSSIVRVHARPVRFQEALKDLEVLEGGAATLRCVLSSVAAPVKWCYGNNVLRPGDKYSLRQEGAMLELVVRNLRPQDSGRYSCSFGDQTTSATLTVTALPAQFIGKLRNKEATEGATATLRCELSKAAPVEWRKGSETLRDGDRYCLRQDGAMCELQIRGLAMVDAAEYSCVCGEERTSASLTIRPMPAHFIGRLRHQESIEGATATLRCELSKAAPVEWRKGRESLRDGDRHSLRQDGAVCELQICGLAVADAGEYSCVCGEERTSATLTVKALPAKFTEGLRNEEAVEGATAMLWCELSKVAPVEWRKGPENLRDGDRYILRQEGTRCELQICGLAMADAGEYLCVCGQERTSATLTIRALPARFIEDVKNQEAREGATAVLQCELNSAAPVEWRKGSETLRDGDRYSLRQDGTKCELQIRGLAMADTGEYSCVCGQERTSAMLTVRALPIKFTEGLRNEEATEGATAVLRCELSKMAPVEWWKGHETLRDGDRHSLRQDGARCELQIRGLVAEDAGEYLCMCGKERTSAMLTVRAMPSKFIEGLRNEEATEGDTATLWCELSKAAPVEWRKGHETLRDGDRHSLRQDGSRCELQIRGLAVVDAGEYSCVCGQERTSATLTVRALPARFIEDVKNQEAREGATAVLQCELSKAAPVEWRKGSETLRGGDRYSLRQDGTRCELQIHGLSVADTGEYSCVCGQERTSATLTVRAPQPVFREPLQSLQAEEGSTATLQCELSEPTATVVWSKGGLQLQANGRREPRLQGCTAELVLQDLQREDTGEYTCTCGSQATSATLTVTAAPVRFLRELQHQEVDEGGTAHLCCELSRAGASVEWRKGSLQLFPCAKYQMVQDGAAAELLVRGVEQEDAGDYTCDTGHTQSMASLSVRVPRPKFKTRLQSLEQETGDIARLCCQLSDAESGAVVQWLKEGVELHAGPKYEMRSQGATRELLIHQLEAKDTGEYACVTGGQKTAASLRVTEPEVTIVRGLVDAEVTADEDVEFSCEVSRAGATGVQWCLQGLPLQSNEVTEVAVRDGRIHTLRLKGVTPEDAGTVSFHLGNHASSAQLTVRAPEVTILEPLQDVQLSEGQDASFQCRLSRASGQEARWALGGVPLQANEMNDITVEQGTLHLLTLHKVTLEDAGTVSFHVGTCSSEAQLKVTAKNTVVRGLENVEALEGGEALFECQLSQPEVAAHTWLLDDEPVHTSENAEVVFFENGLRHLLLLKNLRPQDSCRVTFLAGDMVTSAFLTVRGWRLEILEPLKNAAVRAGAQACFTCTLSEAVPVGEASWYINGAAVQPDDSDWTVTADGSHHALLLRSAQPHHAGEVTFACRDAVASARLTVLGLPDPPEDAEVVARSSHTVTLSWAAPMSDGGGGLCGYRVEVKEGATGQWRLCHELVPGPECVVDGLAPGETYRFRVAAVGPVGAGEPVHLPQTVRLAEPPKPVPPQPSAPESRQVAAGEDVSLELEVVAEAGEVIWHKGMERIQPGGRFEVVSQGRQQMLVIKGFTAEDQGEYHCGLAQGSICPAAATFQVALSPASVDEAPQPSLPPEAAQEGDLHLLWEALARKRRMSREPTLDSISELPEEDGRSQRLPQEAEEVAPDLSEGYSTADELARTGDADLSHTSSDDESRAGTPSLVTYLKKAGRPGTSPLASKVGAPAAPSVKPQQQQEPLAAVRPPLGDLSTKDLGDPSMDKAAVKIQAAFKGYKVRKEMKQQEGPMFSHTFGDTEAQVGDALRLECVVASKADVRARWLKDGVELTDGRHHHIDQLGDGTCSLLITGLDRADAGCYTCQVSNKFGQVTHSACVVVSGSESEAESSSGGELDDAFRRAARRLHRLFRTKSPAEVSDEELFLSADEGPAEPEEPADWQTYREDEHFICIRFEALTEARQAVTRFQEMFATLGIGVEIKLVEQGPRRVEMCISKETPAPVVPPEPLPSLLTSDAAPVFLTELQNQEVQDGYPVSFDCVVTGQPMPSVRWFKDGKLLEEDDHYMINEDQQGGHQLIITAVVPADMGVYRCLAENSMGVSSTKAELRVDFPDTELLNPLEFPG

SEQ ID NO: 480 - protein, 6188 aa, Artificial Sequence
  Synthetic polypeptide
MDQPQFSGAPRFLTRPKAFVVSVGKDATLSCQIVGNPTPQVSWEKDQQPVAAGARFRLAQDGDLYRLTILDLALGDSGQYVCRARNAIGEAFAAVGLQVDAEAACAEQAPHFLLRPTSIRVREGSEATFRCRVGGSPRPAVSWSKDGRRLGEPDGPRVRVEELGEASALRIRAARPRDGGTYEVRAENPLGAASAAAALVVDSDAADTASRPGTSTAALLAHLQRRREAMRAEGAPASPPSTGTRTCTVTEGKHARLSCYVTGEPKPETVWKKDGQLVTEGRRHVVYEDAQENFVLKILFCKQSDRGLYTCTASNLVGQTYSSVLVVVREPAVPFKKRLQDLEVREKESATFLCEVPQPSTEAAWFKEETRLWASAKYGIEEEGTERRLTVRNVSADDDAVYICETPEGSRTVAELAVQGNLLRKLPRKTAVRVGDTAMFCVELAVPVGPVHWLRNQEEVVAGGRVAISAEGTRHTLTISQCCLEDVGQVAFMAGDCQTSTQFCVSAPRKPPLQPPVDPVVKARMESSVILSWSPPPHGERPVTIDGYLVEKKKLGTYTWIRCHEAEWVATPELTVADVAEEGNFQFRVSALNSFGQSPYLEFPGTVHLAPKLAVRTPLKAVQAVEGGEVTFSVDLTVASAGEWFLDGQALKASSVYEIHCDRTRHTLTIREVPASLHGAQLKFVANGIESSIRMEVRAAPGLTANKPPAAAAREVLARLHEEAQLLAELSDQAAAVTWLKDGRTLSPGPKYEVQASAGRRVLLVRDVARDDAGLYECVSRGGRIAYQLSVQGLARFLHKDMAGSCVDAVAGGPAQFECETSEAHVHVHWYKDGMELGHSGERFLQEDVGTRHRLVAATVTRQDEGTYSCRVGEDSVDFRLRVSEPKAVFAKEQPACREVQAEVGASATLSCEVAQDQMEVTWYKDGKKLSSSSKVHVEAVGCMRRLVVQQVGQADSGEYSCEARGQRVSFRLDVAEPKVVFAKEQLARRKLQAEAGASATLSCEVAQAQTEVTWYKDGKKLSSSSKVCMEATGCTRRLVVQQAGQADAGEYSCEAGGQRLSFHLDVKEPKVVFAKDQVAHSEVQAEAGASATLSCEVAQAQTEVMWYKDGKKLSSSLKVHVEAKGCRRRLVVQQAGKTDAGDYSCEARGQRVSFRLHITEPKMMFAKEQSVHNEVQAEAGASAMLSCEVAQAQTEVTWYKDGKKLSSSSKVGMEVKGCTRRLVLPQAGKADAGEYSCEAGGQRVSFHLHITEPKGVFAKEQSVHNEVQAEAGTTAMLSCEVAQPQTEVTWYKDGKKLSSSSKVRMEVKGCTRRLVVQQVGKADAGEYSCEAGGQRVSFQLHITEPKAVFAKEQLVHNEVRTEAGASATLSCEVAQAQTEVTWYKDGKKLSSSSKVRIEAAGCMRQLVVQQAGQADAGEYTCEAGGQRLSFHLDVSEPKAVFAKEQLAHRKVQAEAGAIATLSCEVAQAQTEVTWYKDGKKLSSSSKVRMEAVGCTRRLVVQQACQADTGEYSCEAGGQRLSFSLDVAEPKVVFAKEQPVHREVQAQAGASTTLSCEVAQAQTEVMWYKDGKKLSFSSKVRMEAVGCTRRLVVQQAGQAVAGEYSCEAGSQRLSFHLHVAEPKAVFAKEQPAHREVQAEAGASATLSCEVAQAQTEVTWYKDGKKLSSSLKVHVEAAGCTRRLVVQQAGQADTGEYSCEAGGQQLSFRLQVAEPKAVFAKEQPASREVQAEAGTSATLSCEVAQAQTEVTWYKDGKKLSSSSKVRMEAVGCTRRLVVQEAGQADAGEYSCKAGDQRLSFHLHVAEPKVVFAKEQPAHREVQAEAGASATLSCEVAQAQTEVTWYKDGKKLSSSSKVRVEAVGCTRRLVVQQAGQAEAGEYSCEAGGQQLSFRLQVAEPKAVFAKEQVVFAKDQPVHREVQAEAGTSTMLSCEVAQAQTEVMWYKDGKKLSSSSKMRVEAVGCTRRLVVQEAGQADAGEYSCEAGGQRLSFHLHVAEPKVVFAKEQPACREVQAEAGASATLSCEVAQGQMEVTWYKDGKKLSSSSKVHMEASGYTRRLVVQQAGQADAGEYSCEAGGQRLSFRLHVAELEPQISERPCRREPLVVKEHEDIILTATLATPSAATVTWLKDGVEIRRSKRHETASQGDTHTLTVHGAQVLDSAIYSCRVGAEGQDFPVQVEEVAAKFCRLLEPVCGELGGTVTLACELSPACAEVVWRCGNTQLRVGKRFQMVAEGPVRSLTVLGLRAEDAGEYVCESRDDHTSAQLTVSVPRVVKFMSGLSTVVAEEGGEATFQCVVSPSDVAVVWFRDGALLQPSEKFAISQSGASHSLTISDLVLEDAGQITVEAEGASSSAALRVREAPVLFKKKLEPQTVEERSSVTLEVELTRPWPELRWTRNATALAPGKNVEIHAEGARHRLVLHNVGFADRGFFGCETPDDKTQAKLTVEMRQVRLVRGLQAVEAREQGTATMEVQLSHADVDGSWTRDGLRFQQGPTCHLAVRGPMHTLTLSGLRPEDSGLMVFKAEGVHTSARLVVTELPVSFSRPLQDVVTTEKEKVTLECELSRPNVDVRWLKDGVELRAGKTMAIAAQGACRSLTIYRCEFADQGVYVCDAHDAQSSASVKVQGRNIQIVRPLEDVEVMEKDGATFSCEVSHDEVPGQWFWEGSKLRPTDNVRIRQEGRTYTLIYRRVLAEDAGEIQFVAENAESRAQLRVKELPVTLVRPLRDKIAMEKHRGVLECQVSRASAQVRWFKGSQELQPGPKYELVSDGLYRKLIISDVHAEDEDTYTCDAGDVKTSAQFFVEEQSITIVRGLQDVTVMEPAPAWFECETSIPSVRPPKWLLGKTVLQAGGNVGLEQEGTVHRLMLRRTCSTMTGPVHFTVGKSRSSARLVVSDIPVVLTRPLEPKTGRELQSVVLSCDFRPAPKAVQWYKDDTPLSPSEKFKMSLEGQMAELRILRLMPADAGVYRCQAGSAHSSTEVTVEAREVTVTGPLQDAEATEEGWASFSCELSHEDEEVEWSLNGMPLYNDSFHEISHKGRRHTLVLKSIQRADAGIVRASSLKVSTSARLEVRVKPVVFLKALDDLSAEERGTLALQCEVSDPEAHVVWRKDGVQLGPSDKYDFLHTAGTRGLVVHDVSPEDAGLYTCHVGSEETRARVRVHDLHVGITKRLKTMEVLEGESCSFECVLSHESASDPAMWTVGGKTVGSSSRFQATRQGRKYILVVREAAPSDAGEVVFSVRGLTSKASLIVRERPAAIIKPLEDQWVAPGEDVELRCELSRAGTPVHWLKDRKAIRKSQKYDVVCEGTMAMLVIRGASLKDAGEYTCEVEASKSTASLHVEEKANCFTEELTNLQVEEKGTAVFTCKTEHPAATVTWRKGLLELRASGKHQPSQEGLTLRLTISALEKADSDTYTCDIGQAQSRAQLLVQGRRVHIIEDLEDVDVQEGSSATFRCRISPANYEPVHWFLDKTPLHANELNEIDAQPGGYHVLTLRQLALKDSGTIYFEAGDQRASAALRVTEKPSVFSRELTDATITEGEDLTLVCETSTCDIPVCWTKDGKTLRGSARCQLSHEGHRAQLLITGATLQDSGRYKCEAGGACSSSIVRVHARPVRFQEALKDLEVLEGGAATLRCVLSSVAAPVKWCYGNNVLRPGDKYSLRQEGAMLELVVRNLRPQDSGRYSCSFGDQTTSATLTVTALPAQFIGKLRNKEATEGATATLRCELSKAAPVEWRKGSETLRDGDRYCLRQDGAMCELQIRGLAMVDAAEYSCVCGEERTSASLTIRPMPAHFIGRLRHQESIEGATATLRCELSKAAPVEWRKGRESLRDGDRHSLRQDGAVCELQICGLAVADAGEYSCVCGEERTSATLTVKALPAKFTEGLRNEEAVEGATAMLWCELSKVAPVEWRKGPENLRDGDRYILRQEGTRCELQICGLAMADAGEYLCVCGQERTSATLTIRALPARFIEDVKNQEAREGATAVLQCELNSAAPVEWRKGSETLRDGDRYSLRQDGTKCELQIRGLAMADTGEYSCVCGQERTSAMLTVRALPIKFTEGLRNEEATEGATAVLRCELSKMAPVEWWKGHETLRDGDRHSLRQDGARCELQIRGLVAEDAGEYLCMCGKERTSAMLTVRAMPSKFIEGLRNEEATEGDTATLWCELSKAAPVEWRKGHETLRDGDRHSLRQDGSRCELQIRGLAVVDAGEYSCVCGQERTSATLTVRALPARFIEDVKNQEAREGATAVLQCELSKAAPVEWRKGSETLRGGDRYSLRQDGTRCELQIHGLSVADTGEYSCVCGQERTSATLTVRALPARFTQDLKTKEASEGATATLQCELSKVAPVEWKKGPETLRDGGRYSLKQDGTRCELQIHDLSVADAGEYSCMCGQERTSATLTVRALPARFTEGLRNEEAMEGATATLQCELSKAAPVEWRKGLEALRDGDKYSLRQDGAVCELQIHGLAMADNGVYSCVCGQERTSATLTVRALPARFIEDMRNQKATEGATVTLQCKLRKAAPVEWRKGPNTLKDGDRYSLKQDGTSCELQIRGLVIADAGEYSCICEQERTSATLTVRALPARFIEDVRNHEATEGATAVLQCELSKAAPVEWRKGSETLRDGDRYSLRQDGTRCELQIRGLAVEDTGEYLCVCGQERTSATLTVRALPARFIDNMTNQEAREGATATLHCELSKVAPVEWRKGPETLRDGDRHSLRQDGTRCELQIRGLSVADAGEYSCVCGQERTSATLTIRALPAKFTKGLRNEEATEGATAMLQCELSKVAPVEWRKGPETLRDGDRYNLRQDGTRCELQIHGLSVADTGEYSCVCGQEKTSATLTVKAPQPVFREPLQSLQAEEGSTATLQCELSEPTATVVWSKGGLQLQANGRREPRLQGCTAELVLQDLQREDTGEYTCTCGSQATSATLTVTAAPVRFLRELQHQEVDEGGTAHLCCELSRAGASVEWRKGSLQLFPCAKYQMVQDGAAAELLVRGVEQEDAGDYTCDTGHTQSMASLSVRVPRPKFKTRLQSLEQETGDIARLCCQLSDAESGAVVQWLKEGVELHAGPKYEMRSQGATRELLIHQLEAKDTGEYACVTGGQKTAASLRVTEPEVTIVRGLVDAEVTADEDVEFSCEVSRAGATGVQWCLQGLPLQSNEVTEVAVRDGRIHTLRLKGVTPEDAGTVSFHLGNHASSAQLTVRAPEVTILEPLQDVQLSEGQDASFQCRLSRASGQEARWALGGVPLQANEMNDITVEQGTLHLLTLHKVTLEDAGTVSFHVGTCSSEAQLKVTAKNTVVRGLENVEALEGGEALFECQLSQPEVAAHTWLLDDEPVHTSENAEVVFFENGLRHLLLLKNLRPQDSCRVTFLAGDMVTSAFLTVRGWRLEILEPLKNAAVRAGAQACFTCTLSEAVPVGEASWYINGAAVQPDDSDWTVTADGSHHALLLRSAQPHHAGEVTFACRDAVASARLTVLGLPDPPEDAEVVARSSHTVTLSWAAPMSDGGGGLCGYRVEVKEGATGQWRLCHELVPGPECVVDGLAPGETYRFRVAAVGPVGAGEPVHLPQTVRLAEPPKPVPPQPSAPESRQVAAGEDVSLELEVVAEAGEVIWHKGMERIQPGGRFEVVSQGRQQMLVIKGFTAEDQGEYHCGLAQGSICPAAATFQVALSPASVDEAPQPSLPPEAAQEGDLHLLWEALARKRRMSREPTLDSISELPEEDGRSQRLPQEAEEVAPDLSEGYSTADELARTGDADLSHTSSDDESRAGTPSLVTYLKKAGRPGTSPLASKVGAPAAPSVKPQQQQEPLAAVRPPLGDLSTKDLGDPSMDKAAVKIQAAFKGYKVRKEMKQQEGPMFSHTFGDTEAQVGDALRLECVVASKADVRARWLKDGVELTDGRHHHIDQLGDGTCSLLITGLDRADAGCYTCQVSNKFGQVTHSACVVVSGSESEAESSSGGELDDAFRRAARRLHRLFRTKSPAEVSDEELFLSADEGPAEPEEPADWQTYREDEHFICIRFEALTEARQAVTRFQEMFATLGIGVEIKLVEQGPRRVEMCISKETPAPVVPPEPLPSLLTSDAAPVFLTELQNQEVQDGYPVSFDCVVTGQPMPSVRWFKDGKLLEEDDHYMINEDQQGGHQLIITAVVPADMGVYRCLAENSMGVSSTKAELRVDFPDTELLNPLEFPG

SEQ ID NO: 481 - protein, 2350 aa, Artificial Sequence
  Synthetic polypeptide
MLVIRGASLKDAGEYTCEVEASKSTASLHVEEKANCFTEELTNLQVEEKGTAVFTCKTEHPAATVTWRKGLLELRASGKHQPSQEGLTLRLTISALEKADSDTYTCDIGQAQSRAQLLVQGRRVHIIEDLEDVDVQEGSSATFRCRISPANYEPVHWFLDKTPLHANELNEIDAQPGGYHVLTLRQLALKDSGTIYFEAGDQRASAALRVTEKPSVFSRELTDATITEGEDLTLVCETSTCDIPVCWTKDGKTLRGSARCQLSHEGHRAQLLITGATLQDSGRYKCEAGGACSSSIVRVHARPVRFQEALKDLEVLEGGAATLRCVLSSVAAPVKWCYGNNVLRPGDKYSLRQEGAMLELVVRNLRPQDSGRYSCSFGDQTTSATLTVTALPAQFIGKLRNKEATEGATATLRCELSKAAPVEWRKGSETLRDGDRYCLRQDGAMCELQIRGLAMVDAAEYSCVCGEERTSASLTIRPMPAHFIGRLRHQESIEGATATLRCELSKAAPVEWRKGRESLRDGDRHSLRQDGAVCELQICGLAVADAGEYSCVCGEERTSATLTVKALPAKFTEGLRNEEAVEGATAMLWCELSKVAPVEWRKGPENLRDGDRYILRQEGTRCELQICGLAMADAGEYLCVCGQERTSATLTIRALPARFIEDVKNQEAREGATAVLQCELNSAAPVEWRKGSETLRDGDRYSLRQDGTKCELQIRGLAMADTGEYSCVCGQERTSAMLTVRALPIKFTEGLRNEEATEGATAVLRCELSKMAPVEWWKGHETLRDGDRHSLRQDGARCELQIRGLVAEDAGEYLCMCGKERTSAMLTVRAMPSKFIEGLRNEEATEGDTATLWCELSKAAPVEWRKGHETLRDGDRHSLRQDGSRCELQIRGLAVVDAGEYSCVCGQERTSATLTVRALPARFIEDVKNQEAREGATAVLQCELSKAAPVEWRKGSETLRGGDRYSLRQDGTRCELQIHGLSVADTGEYSCVCGQERTSATLTVRAPQPVFREPLQSLQAEEGSTATLQCELSEPTATVVWSKGGLQLQANGRREPRLQGCTAELVLQDLQREDTGEYTCTCGSQATSATLTVTAAPVRFLRELQHQEVDEGGTAHLCCELSRAGASVEWRKGSLQLFPCAKYQMVQDGAAAELLVRGVEQEDAGDYTCDTGHTQSMASLSVRVPRPKFKTRLQSLEQETGDIARLCCQLSDAESGAVVQWLKEGVELHAGPKYEMRSQGATRELLIHQLEAKDTGEYACVTGGQKTAASLRVTEPEVTIVRGLVDAEVTADEDVEFSCEVSRAGATGVQWCLQGLPLQSNEVTEVAVRDGRIHTLRLKGVTPEDAGTVSFHLGNHASSAQLTVRAPEVTILEPLQDVQLSEGQDASFQCRLSRASGQEARWALGGVPLQANEMNDITVEQGTLHLLTLHKVTLEDAGTVSFHVGTCSSEAQLKVTAKNTVVRGLENVEALEGGEALFECQLSQPEVAAHTWLLDDEPVHTSENAEVVFFENGLRHLLLLKNLRPQDSCRVTFLAGDMVTSAFLTVRGWRLEILEPLKNAAVRAGAQACFTCTLSEAVPVGEASWYINGAAVQPDDSDWTVTADGSHHALLLRSAQPHHAGEVTFACRDAVASARLTVLGLPDPPEDAEVVARSSHTVTLSWAAPMSDGGGGLCGYRVEVKEGATGQWRLCHELVPGPECVVDGLAPGETYRFRVAAVGPVGAGEPVHLPQTVRLAEPPKPVPPQPSAPESRQVAAGEDVSLELEVVAEAGEVIWHKGMERIQPGGRFEVVSQGRQQMLVIKGFTAEDQGEYHCGLAQGSICPAAATFQVALSPASVDEAPQPSLPPEAAQEGDLHLLWEALARKRRMSREPTLDSISELPEEDGRSQRLPQEAEEVAPDLSEGYSTADELARTGDADLSHTSSDDESRAGTPSLVTYLKKAGRPGTSPLASKVGAPAAPSVKPQQQQEPLAAVRPPLGDLSTKDLGDPSMDKAAVKIQAAFKGYKVRKEMKQQEGPMFSHTFGDTEAQVGDALRLECVVASKADVRARWLKDGVELTDGRHHHIDQLGDGTCSLLITGLDRADAGCYTCQVSNKFGQVTHSACVVVSGSESEAESSSGGELDDAFRRAARRLHRLFRTKSPAEVSDEELFLSADEGPAEPEEPADWQTYREDEHFICIRFEALTEARQAVTRFQEMFATLGIGVEIKLVEQGPRRVEMCISKETPAPVVPPEPLPSLLTSDAAPVFLTELQNQEVQDGYPVSFDCVVTGQPMPSVRWFKDGKLLEEDDHYMINEDQQGGHQLIITAVVPADMGVYRCLAENSMGVSSTKAELRVDFPDTELLNPLEFPG

SEQ ID NO: 482 - protein, 2865 aa, Artificial Sequence
  Synthetic polypeptide
MLVIRGASLKDAGEYTCEVEASKSTASLHVEEKANCFTEELTNLQVEEKGTAVFTCKTEHPAATVTWRKGLLELRASGKHQPSQEGLTLRLTISALEKADSDTYTCDIGQAQSRAQLLVQGRRVHIIEDLEDVDVQEGSSATFRCRISPANYEPVHWFLDKTPLHANELNEIDAQPGGYHVLTLRQLALKDSGTIYFEAGDQRASAALRVTEKPSVFSRELTDATITEGEDLTLVCETSTCDIPVCWTKDGKTLRGSARCQLSHEGHRAQLLITGATLQDSGRYKCEAGGACSSSIVRVHARPVRFQEALKDLEVLEGGAATLRCVLSSVAAPVKWCYGNNVLRPGDKYSLRQEGAMLELVVRNLRPQDSGRYSCSFGDQTTSATLTVTALPAQFIGKLRNKEATEGATATLRCELSKAAPVEWRKGSETLRDGDRYCLRQDGAMCELQIRGLAMVDAAEYSCVCGEERTSASLTIRPMPAHFIGRLRHQESIEGATATLRCELSKAAPVEWRKGRESLRDGDRHSLRQDGAVCELQICGLAVADAGEYSCVCGEERTSATLTVKALPAKFTEGLRNEEAVEGATAMLWCELSKVAPVEWRKGPENLRDGDRYILRQEGTRCELQICGLAMADAGEYLCVCGQERTSATLTIRALPARFIEDVKNQEAREGATAVLQCELNSAAPVEWRKGSETLRDGDRYSLRQDGTKCELQIRGLAMADTGEYSCVCGQERTSAMLTVRALPIKFTEGLRNEEATEGATAVLRCELSKMAPVEWWKGHETLRDGDRHSLRQDGARCELQIRGLVAEDAGEYLCMCGKERTSAMLTVRAMPSKFIEGLRNEEATEGDTATLWCELSKAAPVEWRKGHETLRDGDRHSLRQDGSRCELQIRGLAVVDAGEYSCVCGQERTSATLTVRALPARFIEDVKNQEAREGATAVLQCELSKAAPVEWRKGSETLRGGDRYSLRQDGTRCELQIHGLSVADTGEYSCVCGQERTSATLTVRALPARFTQDLKTKEASEGATATLQCELSKVAPVEWKKGPETLRDGGRYSLKQDGTRCELQIHDLSVADAGEYSCMCGQERTSATLTVRALPARFTEGLRNEEAMEGATATLQCELSKAAPVEWRKGLEALRDGDKYSLRQDGAVCELQIHGLAMADNGVYSCVCGQERTSATLTVRALPARFIEDMRNQKATEGATVTLQCKLRKAAPVEWRKGPNTLKDGDRYSLKQDGTSCELQIRGLVIADAGEYSCICEQERTSATLTVRALPARFIEDVRNHEATEGATAVLQCELSKAAPVEWRKGSETLRDGDRYSLRQDGTRCELQIRGLAVEDTGEYLCVCGQERTSATLTVRALPARFIDNMTNQEAREGATATLHCELSKVAPVEWRKGPETLRDGDRHSLRQDGTRCELQIRGLSVADAGEYSCVCGQERTSATLTIREATEGATAMLQCELSKVAPVEWRKGPETLRDGDRYNLRQDGTRCELQIHGLSVADTGEYSCVCGQEKTSATLTVKAPQPVFREPLQSLQAEEGSTATLQCELSEPTATVVWSKGGLQLQANGRREPRLQGCTAELVLQDLQREDTGEYTCTCGSQATSATLTVTAAPVRFLRELQHQEVDEGGTAHLCCELSRAGASVEWRKGSLQLFPCAKYQMVQDGAAAELLVRGVEQEDAGDYTCDTGHTQSMASLSVRVPRPKFKTRLQSLEQETGDIARLCCQLSDAESGAVVQWLKEGVELHAGPKYEMRSQGATRELLIHQLEAKDTGEYACVTGGQKTAASLRVTEPEVTIVRGLVDAEVTADEDVEFSCEVSRAGATGVQWCLQGLPLQSNEVTEVAVRDGRIHTLRLKGVTPEDAGTVSFHLGNHASSAQLTVRAPEVTILEPLQDVQLSEGQDASFQCRLSRASGQEARWALGGVPLQANEMNDITVEQGTLHLLTLHKVTLEDAGTVSFHVGTCSSEAQLKVTAKNTVVRGLENVEALEGGEALFECQLSQPEVAAHTWLLDDEPVHTSENAEVVFFENGLRHLLLLKNLRPQDSCRVTFLAGDMVTSAFLTVRGWRLEILEPLKNAAVRAGAQACFTCTLSEAVPVGEASWYINGAAVQPDDSDWTVTADGSHHALLLRSAQPHHAGEVTFACRDAVASARLTVLGLPDPPEDAEVVARSSHTVTLSWAAPMSDGGGGLCGYRVEVKEGATGQWRLCHELVPGPECVVDGLAPGETYRFRVAAVGPVGAGEPVHLPQTVRLAEPPKPVPPQPSAPESRQVAAGEDVSLELEVVAEAGEVIWHKGMERIQPGGRFEVVSQGRQQMLVIKGFTAEDQGEYHCGLAQGSICPAAATFQVALSPASVDEAPQPSLPPEAAQEGDLHLLWEALARKRRMSREPTLDSISELPEEDGRSQRLPQEAEEVAPDLSEGYSTADELARTGDADLSHTSSDDESRAGTPSLVTYLKKAGRPGTSPLASKVGAPAAPSVKPQQQQEPLAAVRPPLGDLSTKDLGDPSMDKAAVKIQAAFKGYKVRKEMKQQEGPMFSHTFGDTEAQVGDALRLECVVASKADVRARWLKDGVELTDGRHHHIDQLGDGTCSLLITGLDRADAGCYTCQVSNKFGQVTHSACVVVSGSESEAESSSGGELDDAFRRAARRLHRLFRTKSPAEVSDEELFLSADEGPAEPEEPADWQTYREDEHFICIRFEALTEARQAVTRFQEMFATLGIGVEIKLVEQGPRRVEMCISKETPAPVVPPEPLPSLLTSDAAPVFLTELQNQEVQDGYPVSFDCVVTGQPMPSVRWFKDGKLLEEDDHYMINEDQQGGHQLIITAVVPADMGVYRCLAENSMGVSSTKAELRVDFPDTELLNPLEFPG

SEQ ID NO: 483 - protein, 496 aa, Artificial Sequence
  Synthetic polypeptide
MAPAGCCCCCCFWGGAVAAAGAARRVLLLLLLGVLSAGLRPGALATEHYSPLSLLKQELQHRQQQEAPAGGGGCSPQSGDWGDQYSAECGESSFLNFHDSDCEPKGSSPCDSLLSLNTEKILSQAKSIAEQKRFPFATDNDSTNEELAIAYVLIGSGLYDEAIRHFSTMLQEEPDLVSAIYGRGIAYGKKGLHDIKNAELALFELSRVITLEPDRPEVFEQRAEILSPLGRINEAVNDLTKAIQLQPSARLYRHRGTLYFISEDYATAHEDFQQSLELNKNQPIAMLYKGLTFFHRGLLKEAIESFKEALKQKVDFIDAYKSLGQAYRELGNFEAATESFQKALLLNQNHVQTLQLRGMMLYHHGSLQEALKNFKRCLQLEPYNEVCQYMKGLSHVAMGQFYEGIKAQTKVMLNDPLPGQKASPEYLKVKYLREYSRYLHAHLDTPLTEYNIDVDLPGSFKDHWAKNLPFLIEDYEEQPGLQPHINFFEALVKQMY

SEQ ID NO: 484 - protein, 443 aa, Artificial Sequence
  Synthetic polypeptide
MAPAGCCCCCCFWGGAVAAAGAARRVLLLLLLGVLSAGLRPGALATEHYSPLSLLKQELQHRQQQEAPAGGGGCSPQSGDWGDQYSAECGESSFLNFHDSDCEPKGSSPCDSLLSLNTEKILSQAKSIAEQKRFPFATDNDSTNEELAIAYVLIGSGLYDEAIRHFSTMLQILSPLGRINEAVNDLTKAIQLQPSARLYRHRGTLYFISEDYATAHEDFQQSLELNKNQPIAMLYKGLTFFHRGLLKEAIESFKEALKQKVDFIDAYKSLGQAYRELGNFEAATESFQKALLLNQNHVQTLQLRGMMLYHHGSLQEALKNFKRCLQLEPYNEVCQYMKGLSHVAMGQFYEGIKAQTKVMLNDPLPGQKASPEYLKVKYLREYSRYLHAHLDTPLTEYNIDVDLPGSFKDHWAKNLPFLIEDYEEQPGLQPHINFFEALVKQMY

SEQ ID NO: 485 - protein, 299 aa, Artificial Sequence
  Synthetic polypeptide
MDDDLMLALRLQEEWNLQEAERDHAQESLSLVDASWELVDPTPDLQALFVQFNDQFFWGQLEAVEVKWSVRMTLCAGICSYEGKGGMCSIRLSEPLLKLRPRKDLVETLLHEMIHAYLFVTNNDKDREGHGPEFCKHMHRINSLTGANITVYHTFHDEVDEYRRHWWRCNGPCQHRPPYYGYVKRATNREPSAHDYWWAEHQKTCGGTYIKIKEPENYSKKGKGKAKLGKEPVLAAENKGSIRGHAPFSKPRKMKTWDPGNRRADRRVVKEISRTQVKGDPRKTAVPQALRATSPDWCK

SEQ ID NO: 486 - protein, 256 aa, Artificial Sequence
  Synthetic polypeptide
MDDDLMLALRLQEEWNLQEAERDHAQESLSLVDASWELVDPTPDLQALFVQFNDQFFWGQLEAVEVKWSVRMTLCAGICSYEGKGGMCSIRLSEPLLKLRPRKDLVEVYHTFHDEVDEYRRHWWRCNGPCQHRPPYYGYVKRATNREPSAHDYWWAEHQKTCGGTYIKIKEPENYSKKGKGKAKLGKEPVLAAENKGSIRGHAPFSKPRKMKTWDPGNRRADRRVVKEISRTQVKGDPRKTAVPQALRATSPDWCK

SEQ ID NO: 487 - protein, 195 aa, Artificial Sequence
  Synthetic polypeptide
MKKTLLHEMIHAYLFVTNNDKDREGHGPEFCKHMHRINSLTGANITVYHTFHDEVDEYRRHWWRCNGPCQHRPPYYGYVKRATNREPSAHDYWWAEHQKTCGGTYIKIKEPENYSKKGKGKAKLGKEPVLAAENKGSIRGHAPFSKPRKMKTWDPGNRRADRRVVKEISRTQVKGDPRKTAVPQALRATSPDWCK

SEQ ID NO: 488 - protein, 130 aa, Artificial Sequence
  Synthetic polypeptide
MSNKEGSGGFRKRKHDNFPHNQRREGKDVNSSSPVMLAFKSFQQELDARHDKYERLVKLSRDITVESKRTIFLLHRITSAPDMEDILTESEIKLDGVRQKIFQVAQELSGEDMHQFHRAITTARCVGGRL

SEQ ID NO: 489 - protein, 137 aa, Artificial Sequence
  Synthetic polypeptide
MSNKEGSGGFRKRKHDNFPHNQRREGKDVNSSSPVMLAFKSFQQELDARHDKYERLVKLSRDITVESKRTIFLLHRITSSQYLDHSAPDMEDILTESEIKLDGVRQKIFQVAQELSGEDMHQFHRAITTARCVGGRL

SEQ ID NO: 490 - protein, 136 aa, Artificial Sequence
  Synthetic polypeptide
MSNKEGSGGFRKRKHDNFPHNQRREGKDVNSSSPVMLAFKSFQQELDARHDKYERLVKLSRDITVESKRTIFLLHRITSAPDMEDILTESEIKLDGVRQKIFQVAQELSGEDMHQFHRAITTGALAGACNPSYSGG

SEQ ID NO: 491 - protein, 143 aa, Artificial Sequence
  Synthetic polypeptide
MSNKEGSGGFRKRKHDNFPHNQRREGKDVNSSSPVMLAFKSFQQELDARHDKYERLVKLSRDITVESKRTIFLLHRITSSQYLDHSAPDMEDILTESEIKLDGVRQKIFQVAQELSGEDMHQFHRAITTGALAGACNPSYSGG

SEQ ID NO: 492 - protein, 858 aa, Artificial Sequence
  Synthetic polypeptide
MVSQVLQLLRQGVWAALTGGWYHDPEQSKFTNSCHLYLWLFLLLLPLALHLAFPPNAIIVFFYCSAVTIFFTIIKLVSYRLHLMFDKGEVIQQKPSRKEEKPNKDKEAKGEHITNHRNPSNNRQIHNGKKEEASRNLSTPPLRCSSRGQSITSHHSSGPLELSAQETVEDLKGVILLEDHPIAPVSSTSPGIKVESLPASQAHMLETTTKSVIPVKPVATETLINGKGKERGGKGQPPLRHRSEGGLVDKGPLKKLPHLSLSQYDLLETDVSFQPWGSENSVLIPEPVSCPRGSIRERVQSKSPQDSLSSSCPQCDTIVAKPVEEPADTSCQVDTSCQGDLPLHQEVDSSDSEVAVTLIDTSQPGDPLSLHEPIKIVITMSSTPNSMTDLESSLHLRVVGTEKTSVKSDAEPTNPGAAGSPNAEQISIPVITLDLPEGGGGGVPCPEGNGSERTPERLKTRVSTNQCSGYGSGEGGNAIKDHSSSSREPWESVSRLTPDTGSESKVGKEGQTNLDPSSCKSSHEKRHARVLSVDSGTDVFLSKSSAEIVNDTEKTMPTSKSDLEAKEGQMPNESNFLEFVSLLESINTSKMTASSQLNGSAEQNEESGLLRDNCSQEKKEEILENEKPSGHSSKQGKPDLQSQDHTSTGPACTQPAKTTAFFQGNRQRQIIYRVTSQQDSSVLQVISGPETSVQEEISVDAMHVFIDEHGEIRSCYLKSGNQKEGPLQPLPSNNDCLSQAREMQVSSSSTTTSESQDPSSGDPAVSALQQQLLLMVARRTQSETPRHVSQDLEASSCSSTQGKFNREQFYKFIIFPGKWIKVWYDRLTLLALLDRMEENILKNEGLSSSIQRTLKTQQ

SEQ ID NO: 493 - protein, 38 aa, Artificial Sequence
  Synthetic polypeptide
KVWYDRLTLLALLDRMEENILKNEGLSSSIQRTLKTQQ

SEQ ID NO: 494 - protein, 157 aa, Artificial Sequence
  Synthetic polypeptide
MHVFIDEHGEIRSCYLKSGNQKEGPLQPLPSNNDCLSQAREMQVSSSSTTTSESQDPSSGDPAVSALQQQLLLMVARRTQSETPRHVSQDLEASSCSSTQGKFNREQFYKFIIFPGKWIKVWYDRLTLLALLDRMEENILKNEGLSSSIQRTLKTQQ

SEQ ID NO: 495 - protein, 226 aa, Artificial Sequence
  Synthetic polypeptide
MVSQVLQLLRQGVWAALTGGWYHDPEQSKFTNSCHLYLWLFLLLLPLALHLAFPPNAIIVFFYCSAVTIFFTIIKLVSYRLHLMFDKGEVIQQKPSRKEEKPNKDKEAKGEHITNHRNPSNNRQIHNGKKEEASRNLSTPPLRCSSRGQSITSHHSSGPLELSAQETVEDLKGSWMKLETIILSKLTQEQKTKLTHKWELNNENTWTQGGEHHTLGPVRGGGQGER

SEQ ID NO: 496 - protein, 57 aa, Artificial Sequence
  Synthetic polypeptide
MVSQVLQLLRQGVWAALTGGWYHDPEQSKFTNSCHLYLWLFLLLLPLALHLYLKRQS

SEQ ID NO: 497 - protein, 486 aa, Artificial Sequence
  Synthetic polypeptide
MLSGKKAAAAAAAAAAAATGTEAGPGTAGGSENGSEVAAQPAGLSGPAEVGPGAVGERTPRKKEPPRASPPGGLAEPPGSAGPQAGPTVVPGSATPMETGIAETPEGRRTSRRKRAKVEYREMDESLANLSEDEYYSEEERNAKAEKEKKLPPPPPQAPPEEENESEPEEPSGVEGAAFQSRLPHDRMTSQEAACFPDIISGPQQTQKVFLFIRNRTLQLWLDNPKIQLTFEATLQQLEAPYNSDTVLVHRVHSYLERHGLINFGIYKRIKPLPTKKTGKVIIIGSGVSGLAAARQLQSFGMDVTLLEARDRVGGRVATFRKGNYVADLGAMVVTGLGGNPMAVVSKQVNMELAKIKQKCPLYEANGQAVPKEKDEMVEQEFNRLLEATSYLSHQLDFNVLNNKPVSLGQALEVVIQLQEKHVKDEQIEHWKKIVKTQEELKELLNKDQAWWLTPVIPALWEAEEGRSRGQEIETILANMVKPHLY

SEQ ID NO: 498 - protein, 510 aa, Artificial Sequence
  Synthetic polypeptide
MLSGKKAAAAAAAAAAAATGTEAGPGTAGGSENGSEVAAQPAGLSGPAEVGPGAVGERTPRKKEPPRASPPGGLAEPPGSAGPQAGPTVVPGSATPMETGIAETPEGRRTSRRKRAKVEYREMDESLANLSEDEYYSEEERNAKAEKEKKLPPPPPQAPPEEENESEPEEPSGQAGGLQDDSSGGYGDGQASGVEGAAFQSRLPHDRMTSQEAACFPDIISGPQQTQKVFLFIRNRTLQLWLDNPKIQLTFEATLQQLEAPYNSDTVLVHRVHSYLERHGLINFGIYKRIKPLPTKKTGKVIIIGSGVSGLAAARQLQSFGMDVTLLEARDRVGGRVATFRKGNYVADLGAMVVTGLGGNPMAVVSKQVNMELAKIKQKCPLYEANGQADTVKVPKEKDEMVEQEFNRLLEATSYLSHQLDFNVLNNKPVSLGQALEVVIQLQEKHVKDEQIEHWKKIVKTQEELKELLNKDQAWWLTPVIPALWEAEEGRSRGQEIETILANMVKPHLY

SEQ ID NO: 499 - protein, 510 aa, Artificial Sequence
  Synthetic polypeptide
MLSGKKAAAAAAAAAAAATGTEAGPGTAGGSENGSEVAAQPAGLSGPAEVGPGAVGERTPRKKEPPRASPPGGLAEPPGSAGPQAGPTVVPGSATPMETGIAETPEGRRTSRRKRAKVEYREMDESLANLSEDEYYSEEERNAKAEKEKKLPPPPPQAPPEEENESEPEEPSGQAGGLQDDSSGGYGDGQASGVEGAAFQSRLPHDRMTSQEAACFPDIISGPQQTQKVFLFIRNRTLQLWLDNPKIQLTFEATLQQLEAPYNSDTVLVHRVHSYLERHGLINFGIYKRIKPLPTKKTGKVIIIGSGVSGLAAARQLQSFGMDVTLLEARDRVGGRVATFRKGNYVADLGAMVVTGLGGNPMAVVSKQVNMELAKIKQKCPLYEANGQAERIIVPKEKDEMVEQEFNRLLEATSYLSHQLDFNVLNNKPVSLGQALEVVIQLQEKHVKDEQIEHWKKIVKTQEELKELLNKDQAWWLTPVIPALWEAEEGRSRGQEIETILANMVKPHLY

SEQ ID NO: 500 - protein, 206 aa, Artificial Sequence
  Synthetic polypeptide
MAPAAASPPEVIRAAQKDEYYRGGLRSAAGGALHSLAGARKWLEWRKEVELLSDVAYFGLTTLAGYQTLGEEYVSIIQVDPSRIHVPSSLRRGVLVTLHAVLPYLLDKALLPLEQELQADPDSGRPLQGSLGPGGRGCSGARRWMRHHTATLTEQQRRALLRAVFVLRQGLACLQRLHVAWFYIHGVFYHLAKRLTGITRWHLCLS

SEQ ID NO: 501 - protein, 132 aa, Artificial Sequence
  Synthetic polypeptide
MGIREFPSGAPRGKSIAVGMRRSPDVSPRRLSDISPQLRQLKYLVVDEAIKEDLKWSRSVEDLTSGPVGLTSIEERILRITGYYGYQPWAASCKIDFPRSSRSDPFKHKPDHAAALLRTVRGLLPRAIATGH

SEQ ID NO: 502 - protein, 85 aa, Artificial Sequence
  Synthetic polypeptide
MVGRNSAIAAGVCGALFIGYCIYFDRKRRSDPNFKNRLRERAVTHACNPSTLGGQGGKIMRSGDRDQPGQHGETPSLLKIQKKKN

SEQ ID NO: 503 - protein, 537 aa, Artificial Sequence
  Synthetic polypeptide
MKALDEPPYLTVGTDVSAKYRGAFCEAKIKTAKRLVKVKVTFRHDSSTVEVQDDHIKGPLKVGAIVEVKNLDGAYQEAVINKLTDASWYTVVFDDGDEKTLRRSSLCLKGERHFAESETLDQLPLTNPEHFGTPVIGKKTNRGRRSNHIPEEESSSSSSDEDEDDRKQIDELLGKVVCVDYISLDKKKALWFPALVVCPDCSDEIAVKKDNILVRSFKDGKFTSVPRKDVHEITSDTAPKPDAVLKQAFEQALEFHKSRTIPANWKTELKEDSSSSEAEEEEEEEDDEKEKEDNSSEEEEEIEPFPEERENFLQQLYKFMEDRGTPINKRPVLGYRNLNLFKLFRLVHKLGGFDNIESGAVWKQVYQDLGIPVLNSAAGYNVKCAYKKYLYGFEEYCRSANIEFQMALPEKVVNKQCKECENVKEIKVKEENETEIKEIKMEEERNIIPREEKPIEDEIERKENIKPSLGSKKNLLESIPTHSDQEKEVNIKKPEDNENLDDKDDDTTRVDESLNIKVEAEEEKAKSGFSYLWSTVV

SEQ ID NO: 504 - protein, 302 aa, Artificial Sequence
  Synthetic polypeptide
MKALDEPPYLTVGTDVSAKYRGAFCEAKIKTAKRLVKVKVTFRHDSSTVEVQDDHIKGPLKVGAIVEVKNLDGAYQEAVINKLTDASWYTVVFDDGDEKTLRRSSLCLKGERHFAESETLDQLPLTNPEHFGTPVIGKKTNRGRRSNHIPEEESSSSSSDEDEDDRKQIDELLGKVVCVDYISLDKKKALWFPALVVCPDCSDEIAVKKDNILVRSFKDGKFTSVPRKDVHEITSDTAPKPDAVLKQAFEQALEFHKSRTIPANWKTELKEDSSSSEAEEEEEEEDDEKEKEDNSSEEEHLA

SEQ ID NO: 505 - protein, 37 aa, Artificial Sequence
  Synthetic polypeptide
MEKTQETVQRILLEPYKYLLQLPGAVIHTCCPTYLGG

SEQ ID NO: 506 - protein, 74 aa, Artificial Sequence
  Synthetic polypeptide
MSDTLTADVIGRRVEVNGEHATVRFAGVVPPVAGPWLGVEWDNPERGKHDGSHEGTVYFKCRIFMGQYKRDHWV

SEQ ID NO: 507 - protein, 220 aa, Artificial Sequence
  Synthetic polypeptide
MSDTLTADVIGRRVEVNGEHATVRFAGVVPPVAGPWLGVEWDNPERGKHDGSHEGTVYFKCRHPTGGSFIRPNKVNFGTDFLTAIKNRYVLEDGPEEDRKEQIVTIGNKPVETIGFDSIMKQQSQLSKLQEVSLRNCAVSCAGEKGGVAEACPNIRKVDLSKNLLSSWDEVIHIADQLRHLEVLNVSHVYSKEQTRWCQPKGNFIYIVRLGWGGQPFLAV

SEQ ID NO: 508 - protein, 505 aa, Artificial Sequence
  Synthetic polypeptide
MSDTLTADVIGRRVEVNGEHATVRFAGVVPPVAGPWLGVEWDNPERGKHDGSHEGTVYFKCRHPTGGSFIRPNKVNFGTDFLTAIKNRYVLEDGPEEDRKEQIVTIGNKPVETIGFDSIMKQQSQLSKLQEVSLRNCAVSCAGEKGGVAEACPNIRKVDLSKNLLSSWDEVIHIADQLRHLEVLNVSENKLKFPSGSVLTGTLSVLKVLVLNQTGITWAEVLRCVAGCPGLEELYLESNNIFISERPTDVLQTVKLLDLSSNQLIDENQLYLIAHLPRLEQLILSDTGISSLHFPDAGIGCKTSMFPSLKYLVVNDNQISQWSFFNELEKLPSLRALSCLRNPLTKEDKEAETARLLIIASIGQLKTLNKCEILPEERRRAELDYRKAFGNEWKQAGGHKDPEKNRLSEEFLTAHPRYQFLCLKYGAPEDWELKTQQPLMLKNQLLTLKIKYPHQLDQKVLEKQLPGQAQWLTPVIPALWEAEAGGSRGQDIKTILANTVKPCLY

SEQ ID NO: 509 - protein, 556 aa, Artificial Sequence
  Synthetic polypeptide
MSDTLTADVIGRRVEVNGEHATVRFAGVVPPVAGPWLGVEWDNPERGKHDGSHEGTVYFKCRHPTGGSFIRPNKVNFGTDFLTAIKNRYVLEDGPEEDRKEQIVTIGNKPVETIGFDSIMKQQSQLSKLQEVSLRNCAVSCAGEKGGVAEACPNIRKVDLSKNLLSSWDEVIHIADQLRHLEVLNVSENKLKFPSGSVLTGTLSVLKVLVLNQTGITWAEAHAQCGGSRHGLDMQKDASKFVDLCVLQKCSTSNCIISAKDHTSMRMNVAKVLRCVAGCPGLEELYLESNNIFISERPTDVLQTVKLLDLSSNQLIDENQLYLIAHLPRLEQLILSDTGISSLHFPDAGIGCKTSMFPSLKYLVVNDNQISQWSFFNELEKLPSLRALSCLRNPLTKEDKEAETARLLIIASIGQLKTLNKCEILPEERRRAELDYRKAFGNEWKQAGGHKDPEKNRLSEEFLTAHPRYQFLCLKYGAPEDWELKTQQPLMLKNQLLTLKIKYPHQLDQKVLEKQLPGQAQWLTPVIPALWEAEAGGSRGQDIKTILANTVKPCLY

SEQ ID NO: 510 - protein, 412 aa, Artificial Sequence
  Synthetic polypeptide
MRNWLVLLCPCVLGAALHLWLRLRSPPPACASGAGPADQLALFPQWKSTHYDVVVGVLSARNNHELRNVIRSTWMRHLLQHPTLSQRVLVKFIIGAHGCEVPVEDREDPYSCKLLNITNPVLNQEIEAFSLSEDTSSGLPEDRVVSVSFRVLYPIVITSLGVFYDANDVGFQRNITVKLYQAEQEEALFIARFSPPSCGVQVNKLWYKPVEQFILPESFEGTIVWESQDLHGLVSRNLHKVTVNDGGGVLRVITAGEGALPHEFLEGVEGVAGGFIYTIQEGDALLHNLHSRPQRLIDHIRNLHEEDALLKEESSIYDDIVFVDVVDTYRNVPAKLLNFYRWTVETTSFNLLLKTDDDCYIDLEAVFNRIVQKNLDGPNFWWGKSVMLAHICHPRVLGRLRWEDPLRPRVQN

SEQ ID NO: 511 - protein, 3208 aa, Artificial Sequence
  Synthetic polypeptide
MSTDSNSLAREFLTDVNRLCNAVVQRVEAREEEEEETHMATLGQYLVHGRGFLLLTKLNSIIDQALTCREELLTLLLSLLPLVWKIPVQEEKATDFNLPLSADIILTKEKNSSSQRSTQEKLHLEGSALSSQVSAKVNVFRKSRRQRKITHRYSVRDARKTQLSTSDSEANSDEKGIAMNKHRRPHLLHHFLTSFPKQDHPKAKLDRLATKEQTPPDAMALENSREIIPRQGSNTDILSEPAALSVISNMNNSPFDLCHVLLSLLEKVCKFDVTLNHNSPLAASVVPTLTEFLAGFGDCCSLSDNLESRVVSAGWTEEPVALIQRMLFRTVLHLLSVDVSTAEMMPENLRKNLTELLRAALKIRICLEKQPDPFAPRQKKTLQEVQEDFVFSKYRHRALLLPELLEGVLQILICCLQSAASNPFYFSQAMDLVQEFIQHHGFNLFETAVLQMEWLVLRDGVPPEASEHLKALINSVMKIMSTVKKVKSEQLHHSMCTRKRHRRCEYSHFMHHHRDLSGLLVSAFKNQVSKNPFEETADGDVYYPERCCCIAVCAHQCLRLLQQASLSSTCVQILSGVHNIGICCCMDPKSVIIPLLHAFKLPALKNFQQHILNILNKLILDQLGGAEISPKIKKAACNICTVDSDQLAQLEETLQGNLCDAELSSSLSSPSYRFQGILPSSGSEDLLWKWDALKAYQNFVFEEDRLHSIQIANHICNLIQKGNIVVQWKLYNYIFNPVLQRGVELAHHCQHLSVTSAQSHVCSHHNQCLPQDVLQIYVKTLPILLKSRVIRDLFLSCNGVSQIIELNCLNGIRSHSLKAFETLIISLGEQQKDASVPDIDGIDIEQKELSSVHVGTSFHHQQAYSDSPQSLSKFYAGLKEAYPKRRKTVNQDVHINTINLFLCVAFLCVSKEAESDRESANDSEDTSGYDSTASEPLSHMLPCISLESLVLPSPEHMHQAADIWSMCRWIYMLSSVFQKQFYRLGGFRVCHKLIFMIIQKLFRSHKEEQGKKEGDTSVNENQDLNRISQPKRTMKEDLLSLAIKSDPIPSELGSLKKSADSLGKLELQHISSINVEEVSATEAAPEEAKLFTSQESETSLQSIRLLEALLAICLHGARTSQQKMELELPNQNLSVESILFEMRDHLSQSKVIETQLAKPLFDALLRVALGNYSADFEHNDAMTEKSHQSAEELSSQPGDFSEEAEDSQCCSFKLLVEEEGYEADSESNPEDGETQDDGVDLKSETEGFSASSSPNDLLENLTQGEIIYPEICMLELNLLSASKAKLDVLAHVFESFLKIIRQKEKNVFLLMQQGTVKNLLGGFLSILTQDDSDFQACQRVLVDLLVSLMSSRTCSEELTLLLRIFLEKSPCTKILLLGILKIIESDTTMSPSQYLTFPLLHAPNLSNGVSSQKYPGILNSKAMGLLRRARVSRSKKEADRESFPHRLLSSWHIAPVHLPLLGQNCWPHLSEGFSVSLWFNVECIHEAESTTEKGKKIKKRNKSLILPDSSFDGTESDRPEGAEYINPGERLIEEGCIHIISLGSKALMIQVWADPHNATLIFRVCMDSNDDMKAVLLAQVESQENIFLPSKWQHLVLTYLQQPQGKRRIHGKISIWVSGQRKPDVTLDFMLPRKTSLSSDSNKTFCMIGHCLSSQEEFLQLAGKWDLGNLLLFNGAKVGSQEAFYLYACGPNHTSVMPCKYGKPVNDYSKYINKEILRCEQIRELFMTKKDVDIGLLIESLSVVYTTYCPAQYTIYEPVIRLKGQMKTQLSQRPFSSKEVQSILLEPHHLKNLQPTEYKTIQGILHEIGGTGIFVFLFARVVELSSCEETQALALRVILSLIKYNQQRVHELENCNGLSMIHQVLIKQKCIVGFYILKTLLEGCCGEDIIYMNENGEFKLDVDSNAIIQDVKLLEELLLDWKIWSKAEQGVWETLLAALEVLIRADHHQQMFNIKQLLKAQVVHHFLLTCQVLQEYKEGQLTPMPREVCRSFVKIIAEVLGSPPDLELLTIIFNFLLAVHPPTNTYVCHNPTNFYFSLHIDGKIFQEKVRSIMYLRHSSSGGRSLMSPGFMVISPSGFTASPYEGENSSNIIPQQMAAHMLRSRSLPAFPTSSLLTQSQKLTGSLGCSIDRLQNIADTYVATQSKKQNSLGSSDTLKKGKEDAFISSCESAKTVCEMEAVLSAQVSVSDVPKGVLGFPVVKADHKQLGAEPRSEDDSPGDESCPRRPDYLKGLASFQRSHSTIASLGLAFPSQNGSAAVGRWPSLVDRNTDDWENFAYSLGYEPNYNRTASAHSVTEDCLVPICCGLYELLSGVLLILPDVLLEDVMDKLIQADTLLVLVNHPSPAIQQGVIKLLDAYFARASKEQKDKFLKNRGFSLLANQLYLHRGTQELLECFIEMFFGRHIGLDEEFDLEDVRNMGLFQKWSVIPILGLIETSLYDNILLHNALLLLLQILNSCSKVADMLLDNGLLYVLCNTVAALNGLEKNIPMSEYKLLACDIQQLFIAVTIHACSSSGSQYFRVIEDLIVMLGYLQNSKNKRTQNMAVALQLRVLQAAMEFIRTTANHDSENLTDSLQSPSAPHHAVVQKRKSIAGPRKFPLAQTESLLMKMRSVANDELHVMMQRRMSQENPSQATETELAQRLQRLTVLAVNRIIYQEFNSDIIDILRTPENVTQSKTSVFQTEISEENIHHEQSSVFNPFQKEIFTYLVEGFKVSIGSSKASGSKQQWTKILWSCKETFRMQLGRLLVHILSPAHAAQERKQIFEIVHEPNHQEILRDCLSPSLQHGAKLVLYLSELIHNHQGELTEEELGTAELLMNALKLCGHKCIPPSASTKADLIKMIKEEQKKYETEEGVNKAAWQKTVNNNQQSLFQRLDSKSKDISKIAADITQAVSLSQGNERKKVIQHIRGMYKVDLSASRHWQELIQQLTHDRAVWYDPIYYPTSWQLDPTEGPNRERRRLQRCYLTIPNKYLLRDRQKSEDVVKPPLSYLFEDKTHSSFSSTVKDKAASESIRVNRRCISVAPSRETAGELLLGKCGMYFVEDNASDTVESSSLQGELEPASFSWTYEEIKEVHKRWWQLRDNAVEIFLTNGRTLLLAFDNTKVRDDVYHNILTNNLPNLLEYGNITALTNLWYTGQITNFEYLTHLNKHAGRSFNDLMQYPVFPFILADYVSETLDLNDLLIYRPGVVAHACNPSTLGGRGGWIT

SEQ ID NO: 512 - protein, 2822 aa, Artificial Sequence
  Synthetic polypeptide
MSTDSNSLAREFLTDVNRLCNAVVQRVEAREEEEEETHMATLGQYLVHGRGFLLLTKLNSIIDQALTCREELLTLLLSLLPLVWKIPVQEEKATDFNLPLSADIILTKEKNSSSQRSTQEKLHLEGSALSSQVSAKVNVFRKSRRQRKITHRYSVRDARKTQLSTSDSEANSDEKGIAMNKHRRPHLLHHFLTSFPKQDHPKAKLDRLATKEQTPPDAMALENSREIIPRQGSNTDILSEPAALSVISNMNNSPFDLCHVLLSLLEKVCKFDVTLNHNSPLAASVVPTLTEFLAGFGDCCSLSDNLESRVVSAGWTEEPVALIQRMLFRTVLHLLSVDVSTAEMMPENLRKNLTELLRAALKIRICLEKQPDPFAPRQKKTLQEVQEDFVFSKYRHRALLLPELLEGVLQILICCLQSAASNPFYFSQAMDLVQEFIQHHGFNLFETAVLQMEWLVLRDGVPPEASEHLKALINSVMKIMSTVKKVKSEQLHHSMCTRKRHRRCEYSHFMHHHRDLSGLLVSAFKNQVSKNPFEETADGDVYYPERCCCIAVCAHQCLRLLQQASLSSTCVQILSGVHNIGICCCMDPKSVIIPLLHAFKLPALKNFQQHILNILNKLILDQLGGAEISPKIKKAACNICTVDSDQLAQLEETLQGNLCDAELSSSLSSPSYRFQGILPSSGSEDLLWKWDALKAYQNFVFEEDRLHSIQIANHICNLIQKGNIVVQWKLYNYIFNPVLQRGVELAHHCQHLSVTSAQSHVCSHHNQCLPQDVLQIYVKTLPILLKSRVIRDLFLSCNGVSQIIELNCLNGIRSHSLKAFETLIISLGEQQKDASVPDIDGIDIEQKELSSVHVGTSFHHQQAYSDSPQSLSKFYAGLKEAYPKRRKTVNQDVHINTINLFLCVAFLCVSKEAESDRESANDSEDTSGYDSTASEPLSHMLPCISLESLVLPSPEHMHQAADIWSMCRWIYMLSSVFQKQFYRLGGFRVCHKLIFMIIQKLFRSHKEEQGKKEGDTSVNENQDLNRISQPKRTMKEDLLSLAIKSDPIPSELGSLKKSADSLGKLELQHISSINVEEVSATEAAPEEAKLFTSQESETSLQSIRLLEALLAICLHGARTSQQKMELELPNQNLSVESILFEMRDHLSQSKVIETQLAKPLFDALLRVALGNYSADFEHNDAMTEKSHQSAEELSSQPGDFSEEAEDSQCCSFKLLVEEEGYEADSESNPEDGETQDDGVDLKSETEGFSASSSPNDLLENLTQGEIIYPEICMLELNLLSASKAKLDVLAHVFESFLKIIRQKEKNVFLLMQQGTVKNLLGGFLSILTQDDSDFQACQRVLVDLLVSLMSSRTCSEELTLLLRIFLEKSPCTKILLLGILKIIESDTTMSPSQYLTFPLLHAPNLSNGVSSQKYPGILNSKAMGLLRRARVSRSKKEADRESFPHRLLSSWHIAPVHLPLLGQNCWPHLSEGFSVSLWFNVECIHEAESTTEKGKKIKKRNKSLILPDSSFDGTESDRPEGAEYINPGERLIEEGCIHIISLGSKALMIQVWADPHNATLIFRVCMDSNDDMKAVLLAQVESQENIFLPSKWQHLVLTYLQQPQGKRRIHGKISIWVSGQRKPDVTLDFMLPRKTSLSSDSNKTFCMIGHCLSSQEEFLQLAGKWDLGNLLLFNGAKVGSQEAFYLYACGPNHTSVMPCKYGKPVNDYSKYINKEILRCEQIRELFMTKKDVDIGLLIESLSVVYTTYCPAQYTIYEPVIRLKGQMKTQLSQRPFSSKEVQSILLEPHHLKNLQPTEYKTIQGILHEIGGTGIFVFLFARVVELSSCEETQALALRVILSLIKYNQQRVHELENCNGLSMIHQVLIKQKCIVGFYILKTLLEGCCGEDIIYMNENGEFKLDVDSNAIIQDVKLLEELLLDWKIWSKAEQGVWETLLAALEVLIRADHHQQMFNIKQLLKAQVVHHFLLTCQVLQEYKEGQLTPMPREVCRSFVKIIAEVLGSPPDLELLTIIFNFLLAVHPPTNTYVCHNPTNFYFSLHIDGKIFQEKVRSIMYLRHSSSGGRSLMSPGFMVISPSGFTASPYEGENSSNIIPQQMAAHMLRSRSLPAFPTSSLLTQSQKLTGSLGCSIDRLQNIADTYVATQSKKQNSLGSSDTLKKGKEDAFISSCESAKTVCEMEAVLSAQVSVSDVPKGVLGFPVVKADHKQLGAEPRSEDDSPGDESCPRRPDYLKGLASFQRSHSTIASLGLAFPSQNGSAAVGRWPSLVDRNTDDWENFAYSLGYEPNYNRTASAHSVTEDCLVPICCGLYELLSGVLLILPDVLLEDVMDKLIQADTLLVLVNHPSPAIQQGVIKLLDAYFARASKEQKDKFLKNRGFSLLANQLYLHRGTQELLECFIEMFFGRHIGLDEEFDLEDVRNMGLFQKWSVIPILGLIETSLYDNILLHNALLLLLQILNSCSKVADMLLDNGLLYVLCNTVAALNGLEKNIPMSEYKLLACDIQQLFIAVTIHACSSSGSQYFRVIEDLIVMLGYLQNSKNKRTQNMAVALQLRVLQAAMEFIRTTANHDSENLTDSLQSPSAPHHAVVQKRKSIAGPRKFPLAQTESLLMKMRSVANDELHVMMQRRMSQENPSQATETELAQRLQRLTVLAVNRIIYQEFNSDIIDILRTPENVTQSKTSVFQTEISEENIHHEQSSVFNPFQKEIFTYLVEGFKVSIGSSKASGSKQQWTKILWSCKETFRMQLGRLLVHILSPAHAAQERKQIFEIVHEPNHQEILRDCLSPSLQREICIDYSTAPYRLLYSSKKEQTTGTSTIMDESQKH

SEQ ID NO: 513 - protein, 365 aa, Artificial Sequence
  Synthetic polypeptide
MRPERPRPRGSAPGPMETPPWDPARNDSLPPTLTPAVPPYVKLGLTVVYTVFYALLFVFIYVQLWLVLRYRHKRLSYQSVFLFLCLFWASLRTVLFSFYFKDFVAANSLSPFVFWLLYCFPVCLQFFTLTLMNLYFTQVIFKAKSKYSPELLKYRLPLYLASLFISLVFLLVNLTCAVLVKTGNWERKVIVSVRVAINDTLFVLCAVSLSICLYKISKMSLANIYLESKGSSVCQVTAIGVTVILLYTSRACYNLFILSFSQNKSVHSFDYDWYNVSDQADLKNQLGDAGYVLFGVVLFVWELLPTTLVVYFFRVRNPTKDLICISNCLPEISKWMSHRQLKLNKSKFDYNFVSDLLLLQLSTGQ

SEQ ID NO: 514 - protein, 147 aa, Artificial Sequence
  Synthetic polypeptide
MSLANIYLESKGSSVCQVTAIGVTVILLYTSRACYNLFILSFSQNKSVHSFDYDWYNVSDQADLKNQLGDAGYVLFGVVLFVWELLPTTLVVYFFRVRNPTKDLICISNCLPEISKWMSHRQLKLNKSKFDYNFVSDLLLLQLSTGQ

SEQ ID NO: 515 - protein, 2 aa, Artificial Sequence
  Synthetic polypeptide
CR

SEQ ID NO: 516 - protein, 239 aa, Artificial Sequence
  Synthetic polypeptide
MSQGVRRAGAGQGVAAAVQLLVTLSFLRSVVEAQVTGVLDDCLCDIDSIDNFNTYKIFPKIKKLQERDYFRYYKVNLKRPCPFWAEDGHCSIKDCHVEPCPESKIPVGIKAGHSNKYLKMANNTKELEDCEQANKLGAINSTLSNQSKEAFIDWARYDDSRDHFCELDDERSPAAQYVDLLLNPERYTGYKGTSAWRVWNSIYEENCFKPRSVYRPLNPLAPSRGEDDGESFYTWLEGS

SEQ ID NO: 517 - protein, 57 aa, Artificial Sequence
  Synthetic polypeptide
MVKEPVEDTDPSTLSFNMSDKYPIQDTELPKAEECDTITLNCPRNSDMKNQKLPFPP

SEQ ID NO: 518 - protein, 79 aa, Artificial Sequence
  Synthetic polypeptide
MGLRTTKQMGRGTKAPGHQEDHMVKEPVEDTDPSTLSFNMSDKYPIQDTELPKAEECDTITLNCPRNSDMKNQKLPFPP

SEQ ID NO: 519 - protein, 69 aa, Artificial Sequence
  Synthetic polypeptide
MASPDDPLRADHMVKEPVEDTDPSTLSFNMSDKYPIQDTELPKAEECDTITLNCPRNSDMKNQKLPFPP

SEQ ID NO: 520 - protein, 55 aa, Artificial Sequence
  Synthetic polypeptide
MVKEPVEDTDPSTLSFNMSDKYPIQDTELPKAEECDTITLNCPRNSDMKNQQPPP

SEQ ID NO: 521 - protein, 77 aa, Artificial Sequence
  Synthetic polypeptide
MGLRTTKQMGRGTKAPGHQEDHMVKEPVEDTDPSTLSFNMSDKYPIQDTELPKAEECDTITLNCPRNSDMKNQQPPP

SEQ ID NO: 522 - protein, 67 aa, Artificial Sequence
  Synthetic polypeptide
MASPDDPLRADHMVKEPVEDTDPSTLSFNMSDKYPIQDTELPKAEECDTITLNCPRNSDMKNQQPPP

SEQ ID NO: 523 - protein, 89 aa, Artificial Sequence
  Synthetic polypeptide
MVKEPVEDTDPSTLSFNMSDKYPIQDTELPKAEECDTITLNCPRNSDMKNQGEENGFPDSTGDPLPALWEAKVGGSPEVRSSRPAWPTW

SEQ ID NO: 524 - protein, 111 aa, Artificial Sequence
  Synthetic polypeptide
MGLRTTKQMGRGTKAPGHQEDHMVKEPVEDTDPSTLSFNMSDKYPIQDTELPKAEECDTITLNCPRNSDMKNQGEENGFPDSTGDPLPALWEAKVGGSPEVRSSRPAWPTW

SEQ ID NO: 525 - protein, 101 aa, Artificial Sequence
  Synthetic polypeptide
MASPDDPLRADHMVKEPVEDTDPSTLSFNMSDKYPIQDTELPKAEECDTITLNCPRNSDMKNQGEENGFPDSTGDPLPALWEAKVGGSPEVRSSRPAWPTW

SEQ ID NO: 526 - protein, 1974 aa, Artificial Sequence
  Synthetic polypeptide
MADGGEGEDEIQFLRTDDEVVLQCTATIHKEQQKLCLAAEGFGNRLCFLESTSNSKNVPPDLSICTFVLEQSLSVRALQEMLANTVEKSEGQVDVEKWKFMMKTAQGGGHRTLLYGHAILLRHSYSGMYLCCLSTSRSSTDKLAFDVGLQEDTTGEACWWTIHPASKQRSEGEKVRVGDDLILVSVSSERYLHLSYGNGSLHVDAAFQQTLWSVAPISSGSEAAQGYLIGGDVLRLLHGHMDECLTVPSGEHGEEQRRTVHYEGGAVSVHARSLWRLETLRVAWSGSHIRWGQPFRLRHVTTGKYLSLMEDKNLLLMDKEKADVKSTAFTFRSSKEKLDVGVRKEVDGMGTSEIKYGDSVCYIQHVDTGLWLTYQSVDVKSVRMGSIQRKAIMHHEGHMDDGISLSRSQHEESRTARVIRSTVFLFNRFIRGLDALSKKAKASTVDLPIESVSLSLQDLIGYFHPPDEHLEHEDKQNRLRALKNRQNLFQEEGMINLVLECIDRLHVYSSAAHFADVAGREAGESWKSILNSLYELLAALIRGNRKNCAQFSGSLDWLISRLERLEASSGILEVLHCVLVESPEALNIIKEGHIKSIISLLDKHGRNHKVLDVLCSLCVCHGVAVRSNQHLICDNLLPGRDLLLQTRLVNHVSSMRPNIFLGVSEGSAQYKKWYYELMVDHTEPFVTAEATHLRVGWASTEGYSPYPGGGEEWGGNGVGDDLFSYGFDGLHLWSGCIARTVSSPNQHLLRTDDVISCCLDLSAPSISFRINGQPVQGMFENFNIDGLFFPVVSFSAGIKVRFLLGGRHGEFKFLPPPGYAPCYEAVLPKEKLKVEHSREYKQERTYTRDLLGPTVSLTQAAFTPIPVDTSQIVLPPHLERIREKLAENIHELWVMNKIELGWQYGPVRDDNKRQHPCLVEFSKLPEQERNYNLQMSLETLKTLLALGCHVGISDEHAEDKVKKMKLPKNYQLTSGYKPAPMDLSFIKLTPSQEAMVDKLAENAHNVWARDRIRQGWTYGIQQDVKNRRNPRLVPYTLLDDRTKKSNKDSLREAVRTLLGYGYNLEAPDQDHAARAEVCSGTGERFRIFRAEKTYAVKAGRWYFEFETVTAGDMRVGWSRPGCQPDQELGSDERAFAFDGFKAQRWHQGNEHYGRSWQAGDVVGCMVDMNEHTMMFTLNGEILLDDSGSELAFKDFDVGDGFIPVCSLGVAQVGRMNFGKDVSTLKYFTICGLQEGYEPFAVNTNRDITMWLSKRLPQFLQVPSNHEHIEVTRIDGTIDSSPCLKVTQKSFGSQNSNTDIMFYRLSMPIECAEVFSKTVAGGLPGAGLFGPKNDLEDYDADSDFEVLMKTAHGHLVPDRVDKDKEATKPEFNNHKDYAQEKPSRLKQRFLLRRTKPDYSTSHSARLTEDVLADDRDDYDFLMQTSTYYYSVRIFPGQEPANVWVGWITSDFHQYDTGFDLDRVRTVTVTLGDEKGKVHESIKRSNCYMVCAGESMSPGQGRNNNGLEIGCVVDAASGLLTFIANGKELSTYYQVEPSTKLFPAVFAQATSPNVFQFELGRIKNVMPLSAGLFKSEHKNPVPQCPPRLHVQFLSHVLWSRMPNQFLKVDVSRISERQGWLVQCLDPLQFMSLHIPEENRSVDILELTEQEELLKFHYHTLRLYSAVCALGNHRVAHALCSHVDEPQLLYAIENKYMPGLLRAGYYDLLIDIHLSSYATARLMMNNEYIVPMTEETKSITLFPDENKKHGLPGIGLSTSLRPRMQFSSPSFVSISNECYQYSPEFPLDILKSKTIQMLTEAVKEGSLHARDPVGGTTEFLFVPLIKLFYTLLIMGIFHNEDLKHILQLIEPSVFKEAATPEEESDTLEKELSVDDAKLQGAGEEEAKGGKRPKEGLLQMKLPEPVKLQMCLLLQYLCDCQVRHRIEAIVAFSDDFVAKLQDNQRFRYNEVMQALNMSAALTARKTKEFRSPPQEQYN

SEQ ID NO: 527 - protein, 1972 aa, Artificial Sequence
  Synthetic polypeptide
MGPRSSSNKLSNKKMMKWFCSAPQPSTKNNRSYAWQQKDLATDFVSWSPLPIPRMCPQTSPSAPLCWSSPSLSGRCRRCWLTPWRNQKGQLDIIKWSFGLKTAQGGGHRTLLYGHAILLRHSYSGMYLCCLSTSRSSTDKLAFDVGLQEDTTGEACWWTIHPASKQRSEGEKVRVGDDLILVSVSSERYLHLSYGNGSLHVDAAFQQTLWSVAPISSGSEAAQGYLIGGDVLRLLHGHMDECLTVPSGEHGEEQRRTVHYEGGAVSVHARSLWRLETLRVAWSGSHIRWGQPFRLRHVTTGKYLSLMEDKNLLLMDKEKADVKSTAFTFRSSKEKLDVGVRKEVDGMGTSEIKYGDSVCYIQHVDTGLWLTYQSVDVKSVRMGSIQRKAIMHHEGHMDDGISLSRSQHEESRTARVIRSTVFLFNRFIRGLDALSKKAKASTVDLPIESVSLSLQDLIGYFHPPDEHLEHEDKQNRLRALKNRQNLFQEEGMINLVLECIDRLHVYSSAAHFADVAGREAGESWKSILNSLYELLAALIRGNRKNCAQFSGSLDWLISRLERLEASSGILEVLHCVLVESPEALNIIKEGHIKSIISLLDKHGRNHKVLDVLCSLCVCHGVAVRSNQHLICDNLLPGRDLLLQTRLVNHVSSMRPNIFLGVSEGSAQYKKWYYELMVDHTEPFVTAEATHLRVGWASTEGYSPYPGGGEEWGGNGVGDDLFSYGFDGLHLWSGCIARTVSSPNQHLLRTDDVISCCLDLSAPSISFRINGQPVQGMFENFNIDGLFFPVVSFSAGIKVRFLLGGRHGEFKFLPPPGYAPCYEAVLPKEKLKVEHSREYKQERTYTRDLLGPTVSLTQAAFTPIPVDTSQIVLPPHLERIREKLAENIHELWVMNKIELGWQYGPVRDDNKRQHPCLVEFSKLPEQERNYNLQMSLETLKTLLALGCHVGISDEHAEDKVKKMKLPKNYQLTSGYKPAPMDLSFIKLTPSQEAMVDKLAENAHNVWARDRIRQGWTYGIQQDVKNRRNPRLVPYTLLDDRTKKSNKDSLREAVRTLLGYGYNLEAPDQDHAARAEVCSGTGERFRIFRAEKTYAVKAGRWYFEFETVTAGDMRVGWSRPGCQPDQELGSDERAFAFDGFKAQRWHQGNEHYGRSWQAGDVVGCMVDMNEHTMMFTLNGEILLDDSGSELAFKDFDVGDGFIPVCSLGVAQVGRMNFGKDVSTLKYFTICGLQEGYEPFAVNTNRDITMWLSKRLPQFLQVPSNHEHIEVTRIDGTIDSSPCLKVTQKSFGSQNSNTDIMFYRLSMPIECAEVFSKTVAGGLPGAGLFGPKNDLEDYDADSDFEVLMKTAHGHLVPDRVDKDKEATKPEFNNHKDYAQEKPSRLKQRFLLRRTKPDYSTSHSARLTEDVLADDRDDYDFLMQTSTYYYSVRIFPGQEPANVWVGWITSDFHQYDTGFDLDRVRTVTVTLGDEKGKVHESIKRSNCYMVCAGESMSPGQGRNNNGLEIGCVVDAASGLLTFIANGKELSTYYQVEPSTKLFPAVFAQATSPNVFQFELGRIKNVMPLSAGLFKSEHKNPVPQCPPRLHVQFLSHVLWSRMPNQFLKVDVSRISERQGWLVQCLDPLQFMSLHIPEENRSVDILELTEQEELLKFHYHTLRLYSAVCALGNHRVAHALCSHVDEPQLLYAIENKYMPGLLRAGYYDLLIDIHLSSYATARLMMNNEYIVPMTEETKSITLFPDENKKHGLPGIGLSTSLRPRMQFSSPSFVSISNECYQYSPEFPLDILKSKTIQMLTEAVKEGSLHARDPVGGTTEFLFVPLIKLFYTLLIMGIFHNEDLKHILQLIEPSVFKEAATPEEESDTLEKELSVDDAKLQGAGEEEAKGGKRPKEGLLQMKLPEPVKLQMCLLLQYLCDCQVRHRIEAIVAFSDDFVAKLQDNQRFRYNEVMQALNMSAALTARKTKEFRSPPQEQYN

SEQ ID NO: 528 - protein, 1958 aa, Artificial Sequence
  Synthetic polypeptide
DDEVVLQCTATIHKEQQKLCLAAEGFGNRLCFLESTSNSKNVPPDLSICTFVLEQSLSVRALQEMLANTVEKSEGQVDVEKWKFMMKTAQGGGHRTLLYGHAILLRHSYSGMYLCCLSTSRSSTDKLAFDVGLQEDTTGEACWWTIHPASKQRSEGEKVRVGDDLILVSVSSERYLHLSYGNGSLHVDAAFQQTLWSVAPISSGSEAAQGYLIGGDVLRLLHGHMDECLTVPSGEHGEEQRRTVHYEGGAVSVHARSLWRLETLRVAWSGSHIRWGQPFRLRHVTTGKYLSLMEDKNLLLMDKEKADVKSTAFTFRSSKEKLDVGVRKEVDGMGTSEIKYGDSVCYIQHVDTGLWLTYQSVDVKSVRMGSIQRKAIMHHEGHMDDGISLSRSQHEESRTARVIRSTVFLFNRFIRGLDALSKKAKASTVDLPIESVSLSLQDLIGYFHPPDEHLEHEDKQNRLRALKNRQNLFQEEGMINLVLECIDRLHVYSSAAHFADVAGREAGESWKSILNSLYELLAALIRGNRKNCAQFSGSLDWLISRLERLEASSGILEVLHCVLVESPEALNIIKEGHIKSIISLLDKHGRNHKVLDVLCSLCVCHGVAVRSNQHLICDNLLPGRDLLLQTRLVNHVSSMRPNIFLGVSEGSAQYKKWYYELMVDHTEPFVTAEATHLRVGWASTEGYSPYPGGGEEWGGNGVGDDLFSYGFDGLHLWSGCIARTVSSPNQHLLRTDDVISCCLDLSAPSISFRINGQPVQGMFENFNIDGLFFPVVSFSAGIKVRFLLGGRHGEFKFLPPPGYAPCYEAVLPKEKLKVEHSREYKQERTYTRDLLGPTVSLTQAAFTPIPVDTSQIVLPPHLERIREKLAENIHELWVMNKIELGWQYGPVRDDNKRQHPCLVEFSKLPEQERNYNLQMSLETLKTLLALGCHVGISDEHAEDKVKKMKLPKNYQLTSGYKPAPMDLSFIKLTPSQEAMVDKLAENAHNVWARDRIRQGWTYGIQQDVKNRRNPRLVPYTLLDDRTKKSNKDSLREAVRTLLGYGYNLEAPDQDHAARAEVCSGTGERFRIFRAEKTYAVKAGRWYFEFETVTAGDMRVGWSRPGCQPDQELGSDERAFAFDGFKAQRWHQGNEHYGRSWQAGDVVGCMVDMNEHTMMFTLNGEILLDDSGSELAFKDFDVGDGFIPVCSLGVAQVGRMNFGKDVSTLKYFTICGLQEGYEPFAVNTNRDITMWLSKRLPQFLQVPSNHEHIEVTRIDGTIDSSPCLKVTQKSFGSQNSNTDIMFYRLSMPIECAEVFSKTVAGGLPGAGLFGPKNDLEDYDADSDFEVLMKTAHGHLVPDRVDKDKEATKPEFNNHKDYAQEKPSRLKQRFLLRRTKPDYSTSHSARLTEDVLADDRDDYDFLMQTSTYYYSVRIFPGQEPANVWVGWITSDFHQYDTGFDLDRVRTVTVTLGDEKGKVHESIKRSNCYMVCAGESMSPGQGRNNNGLEIGCVVDAASGLLTFIANGKELSTYYQVEPSTKLFPAVFAQATSPNVFQFELGRIKNVMPLSAGLFKSEHKNPVPQCPPRLHVQFLSHVLWSRMPNQFLKVDVSRISERQGWLVQCLDPLQFMSLHIPEENRSVDILELTEQEELLKFHYHTLRLYSAVCALGNHRVAHALCSHVDEPQLLYAIENKYMPGLLRAGYYDLLIDIHLSSYATARLMMNNEYIVPMTEETKSITLFPDENKKHGLPGIGLSTSLRPRMQFSSPSFVSISNECYQYSPEFPLDILKSKTIQMLTEAVKEGSLHARDPVGGTTEFLFVPLIKLFYTLLIMGIFHNEDLKHILQLIEPSVFKEAATPEEESDTLEKELSVDDAKLQGAGEEEAKGGKRPKEGLLQMKLPEPVKLQMCLLLQYLCDCQVRHRIEAIVAFSDDFVAKLQDNQRFRYNEVMQALNMSAALTARKTKEFRSPPQEQYN

SEQ ID NO: 529 - protein, 297 aa, Artificial Sequence
  Synthetic polypeptide
MLQGPRALASAAGQTPKVVPAMSPTELWPSGLSSPQLCPATATYYTPLYPQTAPPAAAPGTCLDATPHGPEGQVVRCLPAGRLPAKRKLDLEGIGRPVVPEFPTPKGKCIRVDGLPSPKTPKSPGEKTRYDTSLGLLTKKFIYLLSESEDGVLDLNWAAEVLDVQKRRIYDITNVLEGIQLIRKKAKNNIQWVGRGMFEDPTRPGKQQQLGQELKELMNTEQALDQLIQSCSLSFKHLTEDKANKRLAYVTYQDIRAVGNFKEQTVIAVKAPPQTRLEVPDRTEVSTQMSLPQGSLL

SEQ ID NO: 530 - protein, 59 aa, Artificial Sequence
  Synthetic polypeptide
MHGGRSCGPRTRREPSSGEEAAPVTAMAAESALQVVEKLQARLAANPDPKKAECSASHL

SEQ ID NO: 531 - protein, 33 aa, Artificial Sequence
  Synthetic polypeptide
MAAESALQVVEKLQARLAANPDPKKAECSASHL

SEQ ID NO: 532 - protein, 88 aa, Artificial Sequence
  Synthetic polypeptide
MAEKVLVTGGAGYIGSHTVLELLEAGYLPVVIDNFHNAFRGGGSLPESLRRVQELTGRSVEFEEMDILDQGALQRLFKKKNTKISWAW

SEQ ID NO: 533 - protein, 24 aa, Artificial Sequence
  Synthetic polypeptide
MDILDQGALQRLFKKKNTKISWAW

SEQ ID NO: 534 - protein, 24 aa, Artificial Sequence
  Synthetic polypeptide
MAAMRKALPRRLVGLASLRALFRL

SEQ ID NO: 535 - protein, 36 aa, Artificial Sequence
  Synthetic polypeptide
GRRFRGDWWAWRPSGLSFVCKTDNIPLGLFWKLEKM

SEQ ID NO: 536 - protein, 189 aa, Artificial Sequence
  Synthetic polypeptide
MYRALRLLARSRPLVRAPAAALASAPGLGGAAVPSFWPPNAARMASQNSFRIEYDTFGELKVPNDKYYGAQTVRSTMNFKIGGVTERMPTPVIKAFGILKRAAAEVNQDYGLDPKIANAIMKAADEVAEGKLNDHFPLVVWQTGSGTQTNMNVNEVISNRAIEMLGGELGSKIPVHPNDHVNKSQVTGT

SEQ ID NO: 537 - protein, 261 aa, Artificial Sequence
  Synthetic polypeptide
MRAPGMRSRPAGPALLLLLLFLGAAESVRRAQPPRRYTPDWPSLDSRPLPAWFDEAKFGVFIHWGVFSVPAWGSEWFWWHWQGEGRPQYQRFMRDNYPPGFSYADFGPQFTARFFHPEEWADLFQAAGAKYVVLTTKHHEGFTNWPSPVSWNWNSKDVGPHRDLVGELGTALRKRNIRYGLYHSLLEWFHPLYLLDKKNGFKTQHFVSAKTMPELYDLVNSYKPDLIWSDGEWECPDTYWNSTNFLSWLYNDSPVKSLLDR

SEQ ID NO: 538 - protein, 1132 aa, Artificial Sequence
  Synthetic polypeptide
MEEPGPPGGLSQDQVERCMGAMQEGMQMVKLRGGSKGLVRFYYLDEHRSCIRWRPSRKNEKAKISIDSIQEVSEGRQSEVFQRYPDGSFDPNCCFSIYHGSHRESLDLVSTSSEVARTWVTGLRYLMAGISDEDSLARRQRTRDQWLKQTFDEADKNGDGSLSIGEVLQLLHKLNVNLPRQRVKQMFREADTDDHQGTLGFEEFCAFYKMMSTRRDLYLLMLTYSNHKDHLDAASLQRFLQVEQKMAGVTLESCQDIIEQFEPCPENKSKGLLGIDGFTNYTRSPAGDIFNPEHHHVHQDMTQPLSHYFITSSHNTYLVGDQLMSQSRVDMYAWVLQAGCRCVEVDCWDGPDGEPIVHHGYTLTSKILFKDVIETINKYAFIKNEYPVILSIENHCSVIQQKKMAQYLTDILGDKLDLSSVSSEDATTLPSPQMLKGKILVKGKKLPANISEDAEEGEVSDEDSADEIDDDCKLLNGDASTNRKRVENTAKRKLDSLIKESKIRDCEDPNNFSVSTLSPSGKLGRKSKAEEDVESGEDAGASRRNGRLVVGSFSRRKKKGSKLKKAASVEEGDEGQDSPGGQSRGATRQKKTMKLSRALSDLVKYTKSVATHDIEMEAASSWQVSSFSETKAHQILQQKPAQYLRFNQQQLSRIYPSSYRVDSSNYNPQPFWNAGCQMVALNYQSEGRMLQLNRAKFSANGGCGYVLKPGCMCQGVFNPNSEDPLPGQLKKQLVLRIISGQQLPKPRDSMLGDRGEIIDPFVEVEIIGLPVDCSREQTRVVDDNGFNPTWEETLVFMVHMPEIALVRFLVWDHDPIGRDFIGQRTLAFSSMMPGYRHVYLEGMEEASIFVHVAVSDISGKVKQALGLKGLFLRGPKPGSLDSHAAGRPPARPSVSQRILRRTASAPTKSQKPGRRGFPELVLGTRDTGSKGVADDVVPPGPGPAPEAPAQEGPGSGSPRGKAPAAVAEKSPVRVRPPRVLDGPGPAGMAATCMKCVVGSCAGVNTGGLQRERPPSPGPASRQAAIRQQPRARADSLGAPCCGLDPHAIPGRSREAPKGPGAWRQGPGGSGSMSSDSSSPDSPGIPERSPRWPEGACRQPGALQGEMSALFAQKLEEIRSKSPMFSADTRPLS

SEQ ID NO: 539 - protein, 447 aa, Artificial Sequence
  Synthetic polypeptide
MGAMQEGMQMVKLRGGSKGLVRFYYLDEHRSCIRWRPSRKNEKAKISIDSIQEVSEGRQSEVFQRYPDGSFIIDPFVEVEIIGLPVDCSREQTRVVDDNGFNPTWEETLVFMVHMPEIALVRFLVWDHDPIGRDFIGQRTLAFSSMMPGYRHVYLEGMEEASIFVHVAVSDISGKVKQALGLKGLFLRGPKPGSLDSHAAGRPPARPSVSQRILRRTASAPTKSQKPGRRGFPELVLGTRDTGSKGVADDVVPPGPGPAPEAPAQEGPGSGSPRGKAPAAVAEKSPVRVRPPRVLDGPGPAGMAATCMKCVVGSCAGVNTGGLQRERPPSPGPASRQAAIRQQPRARADSLGAPCCGLDPHAIPGRSREAPKGPGAWRQGPGGSGSMSSDSSSPDSPGIPERSPRWPEGACRQPGALQGEMSALFAQKLEEIRSKSPMFSADTRPLS

SEQ ID NO: 540 - protein, 206 aa, Artificial Sequence
  Synthetic polypeptide
MAKSPENSTLEEILGQYQRSLREHASRSIHQLTCALKEGDVTIGEDAPNLSFSTSVGNEDARTAWPELQQSHAVNQLKDLLRQQADKESEVSPSRRRKMSPLRSLEHEETNMPTMHDLVHTINDQSQYIHHLEAEVKFCKEELSGMKNKIQVVVLENEGLQQQLKSQRQEETLREQTLLDASQFGRMITRTDGSLEPKSSRQAWAT

SEQ ID NO: 541 - protein, 61 aa, Artificial Sequence
  Synthetic polypeptide
MKNKIQVVVLENEGLQQQLKSQRQEETLREQTLLDASQFGRMITRTDGSLEPKSSRQAWAT

SEQ ID NO: 542 - protein, 5 aa, Artificial Sequence
  Synthetic polypeptide
DKRRH

SEQ ID NO: 543 - protein, 29 aa, Artificial Sequence
  Synthetic polypeptide
LLDASQFGRMITRTDGSLEPKSSRQAWAT

SEQ ID NO: 544 - protein, 452 aa, Artificial Sequence
  Synthetic polypeptide
MAKSPENSTLEEILGQYQRSLREHASRSIHQLTCALKEGDVTIGEDAPNLSFSTSVGNEDARTAWPELQQSHAVNQLKDLLRQQADKESEVSPSRRRKMSPLRSLEHEETNMPTMHDLVHTINDQSQYIHHLEAEVKFCKEELSGMKNKIQVVVLENEGLQQQLKSQRQEETLREQTLLDASEKLKLTYEEKCEIEESQLKFLRNDLAEYQRTCEDLKEQLKHKEFLLAANTCNRVGGLCLKCAQHEAVLSQTHTNVHMQTIERLVKERDDLMSALVSVRSSLADTQQREASAYEQVKQVLQISEEANFEKTKALIQCDQLRKELERQAERLEKELASQQEKRAIEKDMMKKEITKEREYMGSKMLILSQNIAQLEAQVEKVTKEKISAINQLEEIQSQLASREMDVTKVCGEMRYQLNKTNMEKDEAEKEHREFRAKTNRDLEIKDQCPSA

SEQ ID NO: 545 - protein, 495 aa, Artificial Sequence
  Synthetic polypeptide
MAKSPENSTLEEILGQYQRSLREHASRSIHQLTCALKEGDVTIGEDAPNLSFSTSVGNEDARTAWPELQQSHAVNQLKDLLRQQADKESEVSPSRRRKMSPLRSLEHEETNMPTMHDLVHTINDQSQYIHHLEAEVKFCKEELSGMKNKIQVVVLENEGLQQQLKSQRQEETLREQTLLDASGNMHNSWITTGEDSGVGETSKRPFSHDNADFGKAASAGEQLELEKLKLTYEEKCEIEESQLKFLRNDLAEYQRTCEDLKEQLKHKEFLLAANTCNRVGGLCLKCAQHEAVLSQTHTNVHMQTIERLVKERDDLMSALVSVRSSLADTQQREASAYEQVKQVLQISEEANFEKTKALIQCDQLRKELERQAERLEKELASQQEKRAIEKDMMKKEITKEREYMGSKMLILSQNIAQLEAQVEKVTKEKISAINQLEEIQSQLASREMDVTKVCGEMRYQLNKTNMEKDEAEKEHREFRAKTNRDLEIKDQCPSA

SEQ ID NO: 546 - protein, 350 aa, Artificial Sequence
  Synthetic polypeptide
MKNKIQVVVLENEGLQQQLKSQRQEETLREQTLLDASGNMHNSWITTGEDSGVGETSKRPFSHDNADFGKAASAGEQLELEKLKLTYEEKCEIEESQLKFLRNDLAEYQRTCEDLKEQLKHKEFLLAANTCNRVGGLCLKCAQHEAVLSQTHTNVHMQTIERLVKERDDLMSALVSVRSSLADTQQREASAYEQVKQVLQISEEANFEKTKALIQCDQLRKELERQAERLEKELASQQEKRAIEKDMMKKEITKEREYMGSKMLILSQNIAQLEAQVEKVTKEKISAINQLEEIQSQLASREMDVTKVCGEMRYQLNKTNMEKDEAEKEHREFRAKTNRDLEIKDQCPSA

SEQ ID NO: 547 - protein, 275 aa, Artificial Sequence
  Synthetic polypeptide
LLDASEKLKLTYEEKCEIEESQLKFLRNDLAEYQRTCEDLKEQLKHKEFLLAANTCNRVGGLCLKCAQHEAVLSQTHTNVHMQTIERLVKERDDLMSALVSVRSSLADTQQREASAYEQVKQVLQISEEANFEKTKALIQCDQLRKELERQAERLEKELASQQEKRAIEKDMMKKEITKEREYMGSKMLILSQNIAQLEAQVEKVTKEKISAINQLEEIQSQLASREMDVTKVCGEMRYQLNKTNMEKDEAEKEHREFRAKTNRDLEIKDQCPSA

SEQ ID NO: 548 - protein, 624 aa, Artificial Sequence
  Synthetic polypeptide
MAKSPENSTLEEILGQYQRSLREHASRSIHQLTCALKEGDVTIGEDAPNLSFSTSVGNEDARTAWPELQQSHAVNQLKDLLRQQADKESEVSPSRRRKMSPLRSLEHEETNMPTMHDLVHTINDQSQYIHHLEAEVKFCKEELSGMKNKIQVVVLENEGLQQQLKSQRQEETLREQTLLDASEKLKLTYEEKCEIEESQLKFLRNDLAEYQRTCEDLKEQLKHKEFLLAANTCNRVGGLCLKCAQHEAVLSQTHTNVHMQTIERLVKERDDLMSALVSVRSSLADTQQREASAYEQVKQVLQISEEANFEKTKALIQCDQLRKELERQAERLEKELASQQEKRAIEKDMMKKEITKEREYMGSKMLILSQNIAQLEAQVEKVTKEKISAINQLEEIQSQLASREMDVTKVCGEMRYQLNKTNMEKDEAEKEHREFRAKTNRDLEIKDQEIEKLRIELDESKQHLEQEQQKAALAREECLRLTELLGESEHQLHLTRQEKDSIQQSFSKEAKAQALQAQQREQELTQKIQQMEAQHDKTENEQYLLLTSQNTFLTKLKEECCTLAKKLEQISQKTRSEIAQLSQEKRYTYDKLGKLQRRNEELEEQCVQHGRVHETMKQSAIHKP

SEQ ID NO: 549 - protein, 667 aa, Artificial Sequence
  Synthetic polypeptide
MAKSPENSTLEEILGQYQRSLREHASRSIHQLTCALKEGDVTIGEDAPNLSFSTSVGNEDARTAWPELQQSHAVNQLKDLLRQQADKESEVSPSRRRKMSPLRSLEHEETNMPTMHDLVHTINDQSQYIHHLEAEVKFCKEELSGMKNKIQVVVLENEGLQQQLKSQRQEETLREQTLLDASGNMHNSWITTGEDSGVGETSKRPFSHDNADFGKAASAGEQLELEKLKLTYEEKCEIEESQLKFLRNDLAEYQRTCEDLKEQLKHKEFLLAANTCNRVGGLCLKCAQHEAVLSQTHTNVHMQTIERLVKERDDLMSALVSVRSSLADTQQREASAYEQVKQVLQISEEANFEKTKALIQCDQLRKELERQAERLEKELASQQEKRAIEKDMMKKEITKEREYMGSKMLILSQNIAQLEAQVEKVTKEKISAINQLEEIQSQLASREMDVTKVCGEMRYQLNKTNMEKDEAEKEHREFRAKTNRDLEIKDQEIEKLRIELDESKQHLEQEQQKAALAREECLRLTELLGESEHQLHLTRQEKDSIQQSFSKEAKAQALQAQQREQELTQKIQQMEAQHDKTENEQYLLLTSQNTFLTKLKEECCTLAKKLEQISQKTRSEIAQLSQEKRYTYDKLGKLQRRNEELEEQCVQHGRVHETMKQSAIHKP

SEQ ID NO: 550 - protein, 522 aa, Artificial Sequence
  Synthetic polypeptide
MKNKIQVVVLENEGLQQQLKSQRQEETLREQTLLDASGNMHNSWITTGEDSGVGETSKRPFSHDNADFGKAASAGEQLELEKLKLTYEEKCEIEESQLKFLRNDLAEYQRTCEDLKEQLKHKEFLLAANTCNRVGGLCLKCAQHEAVLSQTHTNVHMQTIERLVKERDDLMSALVSVRSSLADTQQREASAYEQVKQVLQISEEANFEKTKALIQCDQLRKELERQAERLEKELASQQEKRAIEKDMMKKEITKEREYMGSKMLILSQNIAQLEAQVEKVTKEKISAINQLEEIQSQLASREMDVTKVCGEMRYQLNKTNMEKDEAEKEHREFRAKTNRDLEIKDQEIEKLRIELDESKQHLEQEQQKAALAREECLRLTELLGESEHQLHLTRQEKDSIQQSFSKEAKAQALQAQQREQELTQKIQQMEAQHDKTENEQYLLLTSQNTFLTKLKEECCTLAKKLEQISQKTRSEIAQLSQEKRYTYDKLGKLQRRNEELEEQCVQHGRVHETMKQSAIHKP

SEQ ID NO: 551 - protein, 368 aa, Artificial Sequence
  Synthetic polypeptide
LLDASEKLKLTYEEKCEIEESQLKFLRNDLAEYQRTCEDLKEQLKHKEFLLAANTCNRVGGLCLKCAQHEAVLSQTHTNVHMQTIERLVKERDDLMSALVSVRSSLADTQQREASAYEQVKQVLQISEEANFEKTKALIQCDQLRKELERQAERLEKELASQQEKRAIEKDMMKKEITKEREYMGSKMLILSQNIAQLEAQVEKVTKEKISAINQLEEIQSQLASREMDVTKVCGEMRYQLNKTNMEKDEAEKEHREFRAKTNRDLEIKDQEIEKLRIELDESKQHLEQEQQKAALAREECLRLTELLGESEHQLHLTRSEIAQLSQEKRYTYDKLGKLQRRNEELEEQCVQHGRVHETMKQSAIHKP

SEQ ID NO: 552 - protein, 119 aa, Artificial Sequence
  Synthetic polypeptide
MAFAETYPAASSLPNGDCGRPRARPGGNRVTVVLGAQWGDEGKGKVVDLLAQDADIVCRCQGGNNAGHTVVVDSVEYDFHLLPSGIINPNVTAFIGNGVVIHLPGLFEEAEKNVQKGKD

SEQ ID NO: 553 - protein, 111 aa, Artificial Sequence
  Synthetic polypeptide
MSAREVAVLLLWLSCYGSALWRYSTNSPNYRIFSTRSTIKLEYEGTLFTEWSVPETCFVLNKSSPTTELRCSSPGVHAIKPIVTGPDEEERYLFVESSHTCFLWYYRVRIP

SEQ ID NO: 554 - protein, 101 aa, Artificial Sequence
  Synthetic polypeptide
RRRSRRHVSPGSGRAAAVAELLWLRPLEIKLEYEGTLFTEWSVPETCFVLNKSSPTTELRCSSPGVHAIKPIVTGPDEEERYLFVESSHTCFLWYYRVRIP

SEQ ID NO: 555 - protein, 60 aa, Artificial Sequence
  Synthetic polypeptide
MGANQLVVLNVYDMLPETLAKNRCWSHACTACRTVSKLNLLYKLPSLRYYFIATQKRTNT

SEQ ID NO: 556 - protein, 144 aa, Artificial Sequence
  Synthetic polypeptide
MAGPERWGPLLLCLLQAAPGRPRLAPPQNVTLLSQNFSVYLTWLPGLGNPQDVTYFVAYQSSPTRRRWREVEECAGTKELLCSMMCLKKQDLYNKFKGRVRTVSPSSKSPWVESEYLDYLFEAPEGQDTRRPHLRIPLSSLPEA

SEQ ID NO: 557 - protein, 61 aa, Artificial Sequence
  Synthetic polypeptide
MMCLKKQDLYNKFKGRVRTVSPSSKSPWVESEYLDYLFEAPEGQDTRRPHLRIPLSSLPEA

SEQ ID NO: 558 - protein, 1 aa, Artificial Sequence
  Synthetic polypeptide
R

SEQ ID NO: 559 - protein, 35 aa, Artificial Sequence
  Synthetic polypeptide
GRDTAAEVIVRHLPGDRLRSKMADEKDREGPGIQQ

SEQ ID NO: 560 - protein, 11 aa, Artificial Sequence
  Synthetic polypeptide
QKMSFFELLRF

SEQ ID NO: 561 - protein, 148 aa, Artificial Sequence
  Synthetic polypeptide
MADEKDREEIIVAEFHKKIKEAFEVFDHESNNTVDVREIGTIIRSLGCCPTEGELHDLIAEVEEEEPTGYIRFEKFLPVMTEILLERKYRPIPEDVLLRAFEVLDSAKRGFLTKDELIKYMTEEDVFQILNSSKTADTNQFEDPHRGM

SEQ ID NO: 562 - protein, 284 aa, Artificial Sequence
  Synthetic polypeptide
MLGPGQVRLRPRVWRDKAGGRVADGASGLPPARGSWRETGTGRALGASSPPRPAQGSSSPGIQSGPSSRPGSPRGAEQAGTPRPRLSLGISQATGSAARWRTRRTGKGLGYNSDEIRPRTLLIEHLMEGGRRDHHTMTVLWGTQEIIVAEFHKKIKEAFEVFDHESNNTVDVREIGTIIRSLGCCPTEGELHDLIAEVEEEEPTGYIRFEKFLPVMTEILLERKYRPIPEDVLLRAFEVLDSAKRGFLTKDELIKYMTEEDVFQILNSSKTADTNQFEDPHRGM

SEQ ID NO: 563 - protein, 2086 aa, Artificial Sequence
  Synthetic polypeptide
MNSVAGNKERLAVSTRGKKYGVNEVCSPTKPAAPFSPESWYRKAYEESRAGSRPTPEGAGSALGSSGTPSPGSGTSSPSSFTGSPGPASPGIGTSSPGSLGGSPGFGTGSPGSGSGGGSSPGSDRGVWCENCNARLVELKRQALRLLLPGPFPGKDPAFSAVIHDKLQVPNTIRKAWNDRDNRCDICATHLNQLKQEAIQMVLTLEQAAGSEHYDASPCSPPPLSNIPTLVGSRHVGGLQQPRDWAFVPAPCATSNYTGFANKHGSKPSSLGVSNGAEKKSGSPTHQAKVSLQMATSPSNGNILNSVAIQAHQYLDGTWSLSRTNGVTLYPYQISQLMTESSREGLTEAVLNRYNADKPSACSVPASQGSCVASETSTGTSVAASFFARAAQKLNLSSKKKKHRPSTSSAAEPPLFATSFSGILQTSPPPAPPCLLRAVNKVKDTPGLGKVKVMLRICSTLARDTSESSSFLKVDPRKKQITLYDPLTCGGQNAFQKRGNQVPPKMFAFDAVFPQDASQAEVCAGTVAEVIQSVVNGADGCVFCFGHAKLGKSYTMIGKDDSMQNLGIIPCAISWLFKLINERKEKTGARFSVRVSAVEVWGKEENLRDLLSEVATGSLQDGQSPGVYLCEDPICGTQLQNQSELRAPTAEKAAFFLDAAIASRRSHQQDCDEDDHRNSHVFFTLHIYQYRMEKSGKGGMSGGRSRLHLIDLGSCVKALSKNREGGSGLCLSLSALGNVILALVNGSKHIPYKESKLAMLLRESLGNMNCRTTMIAHISAAVGSYAETLSTIQIASRVLRMKKKKTKYTSSSSGGESSCEEGRMRRPTQLRPFHTRATVDPDFPIAHLSSDPDYSSSSEQSCDTVIYIGPNGTALSDKELTDNEGPPDFVPIVPALQKTRGDSRPAEAGEAAAGKSERDCLKCNTFAELQERLDCIDGSEEPSSFPFEELPAQFGPEQASRGPRLSQAAGASPLSESDKEDNGSEGQLTNREGPELPASKMQRSHSPVPAAAPAHSPSPASPRSVPGSSSQHSASPLVQSPSLQSSRESLNSCGFVEGKPRPMGSPRLGIASLSKTSEYKPPSSPSQRCKVYTQKGVLPSPAPLPPSSKDSGVASRESLLQPEVRTPPVGMSPQVLKKSMSAGSEGFPETPVDDEQQAATPSESKKEILSTTMVTVQQPLELNGEDELVFTLVEELTISGVLDSGRPTSIISFNSDCSARALASGSRPVSIISSISEDLECYSSTAPVSEVSITQFLPLPKMSLDEKAQDAGSRRSSISSWLSEMSAGSEGEQSCHSFIAQTCFGHGEAMAEPVASEFVSSLQNTAVVCREKPKASPDNLLILSEMGDDSFNKAAPIKGCKISTVSKAMVTISNTANLSSCEGYIPMKTNITVYPCIAMSPRNIQEPEAPTATPKAGPTLAQSRESKENSAKKEMKFEDPWLKREEEVKKETAHPNEEGMMRCETATGPSNAETRAEQEQDGKPSPGDRLSSSSGEVSASPVTDNFRRVVDGCEMALPGLATQSPVHPNKSVKSSSLPRAFQKASRQEEPDSLSYYCAAETNGVGAASGTPPSKATLEGKVASPKHCVLARPKGTPPLPPVRKSSLDQKNRASPQHSASGSGTSSPLNQPAAFPAGLPDEPSGKTKDASSSSKLFSAKLEQLASRSNSLGRATVSHYECLSLERAESLSSVSSRLHAGKDGTMPRAGRSLGRSAGTSPPSSGASPKAGQSKISAVSRLLLASPRARGPSASTTKTLSFSTKSLPQAVGQGSSSPPGGKHTPWSTQSLSRNRSSGLASKLPLRAVSGRISELLQGGAGARGLQLRAGPEAEARGGALAEDEPAAAHLLPSPYSKITPPRRPHRCSSGHGSDNSSVLSGELPPAMGKTALFYHSGGSSGYESVMRDSEATGSASSAQDSTSENSSSVGGRCRSLKTPKKRSNPGSQRRRLIPALSLDTSSPVRKPPNSTGVRWVDGPLRSSPRGLGEPFEIKVYEIDDVERLQRRRGGASKEAMCFNAKLKILEHRQQRIAEVRAKYEWLMKELEATKQYLMLDPNKWLSESLVLVNCVSLSESRHCPALRDLICRKK

SEQ ID NO: 564 - protein, 1705 aa, Artificial Sequence
  Synthetic polypeptide
MMMDWKAVAAQKLNLSSKKKKHRPSTSSAAEPPLFATSFSGILQTSPPPAPPCLLRAVNKVKDTPGLGKVKVMLRICSTLARDTSESSSFLKVDPRKKQITLYDPLTCGGQNAFQKRGNQVPPKMFAFDAVFPQDASQAEVCAGTVAEVIQSVVNGADGCVFCFGHAKLGKSYTMIGKDDSMQNLGIIPCAISWLFKLINERKEKTGARFSVRVSAVEVWGKEENLRDLLSEVATGSLQDGQSPGVYLCEDPICGTQLQNQSELRAPTAEKAAFFLDAAIASRRSHQQDCDEDDHRNSHVFFTLHIYQYRMEKSGKGGMSGGRSRLHLIDLGSCVKALSKNREGGSGLCLSLSALGNVILALVNGSKHIPYKESKLAMLLRESLGNMNCRTTMIAHISAAVGSYAETLSTIQIASRVLRMKKKKTKYTSSSSGGESSCEEGRMRRPTQLRPFHTRATVDPDFPIAHLSSDPDYSSSSEQSCDTVIYIGPNGTALSDKELTDNEGPPDFVPIVPALQKTRGDSRPAEAGEAAAGKSERDCLKCNTFAELQERLDCIDGSEEPSSFPFEELPAQFGPEQASRGPRLSQAAGASPLSESDKEDNGSEGQLTNREGPELPASKMQRSHSPVPAAAPAHSPSPASPRSVPGSSSQHSASPLVQSPSLQSSRESLNSCGFVEGKPRPMGSPRLGIASLSKTSEYKPPSSPSQRCKVYTQKGVLPSPAPLPPSSKDSGVASRESLLQPEVRTPPVGMSPQVLKKSMSAGSEGFPETPVDDEQQAATPSESKKEILSTTMVTVQQPLELNGEDELVFTLVEELTISGVLDSGRPTSIISFNSDCSARALASGSRPVSIISSISEDLECYSSTAPVSEVSITQFLPLPKMSLDEKAQDAGSRRSSISSWLSEMSAGSEGEQSCHSFIAQTCFGHGEAMAEPVASEFVSSLQNTAVVCREKPKASPDNLLILSEMGDDSFNKAAPIKGCKISTVSKAMVTISNTANLSSCEGYIPMKTNITVYPCIAMSPRNIQEPEAPTATPKAGPTLAQSRESKENSAKKEMKFEDPWLKREEEVKKETAHPNEEGMMRCETATGPSNAETRAEQEQDGKPSPGDRLSSSSGEVSASPVTDNFRRVVDGCEMALPGLATQSPVHPNKSVKSSSLPRAFQKASRQEEPDSLSYYCAAETNGVGAASGTPPSKATLEGKVASPKHCVLARPKGTPPLPPVRKSSLDQKNRASPQHSASGSGTSSPLNQPAAFPAGLPDEPSGKTKDASSSSKLFSAKLEQLASRSNSLGRATVSHYECLSLERAESLSSVSSRLHAGKDGTMPRAGRSLGRSAGTSPPSSGASPKAGQSKISAVSRLLLASPRARGPSASTTKTLSFSTKSLPQAVGQGSSSPPGGKHTPWSTQSLSRNRSSGLASKLPLRAVSGRISELLQGGAGARGLQLRAGPEAEARGGALAEDEPAAAHLLPSPYSKITPPRRPHRCSSGHGSDNSSVLSGELPPAMGKTALFYHSGGSSGYESVMRDSEATGSASSAQDSTSENSSSVGGRCRSLKTPKKRSNPGSQRRRLIPALSLDTSSPVRKPPNSTGVRWVDGPLRSSPRGLGEPFEIKVYEIDDVERLQRRRGGASKEAMCFNAKLKILEHRQQRIAEVRAKYEWLMKELEATKQYLMLDPNKWLSESLVLVNCVSLSESRHCPALRDLICRKK

SEQ ID NO: 565 - protein, 377 aa, Artificial Sequence
  Synthetic polypeptide
MGLLAFRDVALEFSPEEWECLDPAQRSLYRDVMLENYRNLISLGEDSFNMQFLFHSLAMSKPELIICLEARKEPWNVNTEKTARHSVLSSYLTEDILPEQGLQVSFQKVMLRRYERCCLEKLRLRNDWEIVGEWKGQKASYNGLDLCSATTHSKNFQCNKCVKGFSKFANLNKCKISHTGEKPFKCKECGNVSCMSLIMTQQQRIHIGENPYQCKKCGKAFNECSCFTDCKRIHVGEKHCKCEECNNIFKSCSSLAVVEKNHTEKKTYRCEECGKAFNLCSVLTKHKKIHTGEKPYKCEECGKSFKLFPYLTQHKRIHSREKPYKCEECGKVFKLLSYLTQHRRIHTGEKTFRCEECGKAFNQSSHLTEHRRIHTAM

SEQ ID NO: 566 - protein, 128 aa, Artificial Sequence
  Synthetic polypeptide
MGLLAFRDVALEFSPEEWECLDPAQRSLYRDVMLENYRNLISLGLAMSKPELIICLEARKEPWNVNTEKTARHSVLSSYLTEDILPEQGLQVSFQKVMLRRYERCCLEKLRLRNDWEIVDYPDSGSSL

SEQ ID NO: 567 - protein, 140 aa, Artificial Sequence
  Synthetic polypeptide
MGLLAFRDVALEFSPEEWECLDPAQRSLYRDVMLENYRNLISLGEDSFNMQFLFHSLAMSKPELIICLEARKEPWNVNTEKTARHSVLSSYLTEDILPEQGLQVSFQKVMLRRYERCCLEKLRLRNDWEIVDYPDSGSSL

SEQ ID NO: 568 - protein, 382 aa, Artificial Sequence
  Synthetic polypeptide
MPTALCPRVLAPKESEEPRKMRSPPGENPSPQGELPSPESSRRLFRRFRYQEAAGPREALQRLWDLCGGWLRPERHTKEQILELLVLEQFLAILPREIQSWVRAQEPESGEQAVAAVEALEREPGRPWQWLKHCEDPVVIDDGDSPLDQEQEQLPVEPHSDLAKNQDAQPITLAQCLGLPSRPPSQLSGDPVLQDAFLLQEENVRDTQQVTTLQLPPSRVSPFKDMILCFSEEDWSLLDPAQTGFYGEFIIGEDYGVSMPPNDLAAQPDLSQGEENEPRVPELQDLQGKEVPQVSYLDSPSLQPFQVEERRKREELQVPEFQACPQTVVPQNTYPESCYLYDNKHTLTCWGTRYHTEKNEGAPVDRQLTPRNSCNQHLPTHV

SEQ ID NO: 569 - protein, 307 aa, Artificial Sequence
  Synthetic polypeptide
QAVAAVEALEREPGRPWQWLKHCEDPVVIDDGDSPLDQEQEQLPVEPHSDLAKNQDAQPITLAQCLGLPSRPPSQLSGDPVLQDAFLLQEENVRDTQQVTTLQLPPRIFQFNNHRSNGYILEMLGSGGKKAQIISVLSQIYVSRVSPFKDMILCFSEEDWSLLDPAQTGFYGEFIIGEDYGVSMPPNDLAAQPDLSQGEENEPRVPELQDLQGKEVPQVSYLDSPSLQPFQVEERRKREELQVPEFQACPQTVVPQNTYPESCYLYDNKHTLTCWGTRYHTEKNEGAPVDRQLTPRNSCNQHLPTHV

SEQ ID NO: 570 - protein, 418 aa, Artificial Sequence
  Synthetic polypeptide
MPTALCPRVLAPKESEEPRKMRSPPGENPSPQGELPSPESSRRLFRRFRYQEAAGPREALQRLWDLCGGWLRPERHTKEQILELLVLEQFLAILPREIQSWVRAQEPESGEQAVAAVEALEREPGRPWQWLKHCEDPVVIDDGDSPLDQEQEQLPVEPHSDLAKNQDAQPITLAQCLGLPSRPPSQLSGDPVLQDAFLLQEENVRDTQQVTTLQLPPRIFQFNNHRSNGYILEMLGSGGKKAQIISVLSQIYVSRVSPFKDMILCFSEEDWSLLDPAQTGFYGEFIIGEDYGVSMPPNDLAAQPDLSQGEENEPRVPELQDLQGKEVPQVSYLDSPSLQPFQVEERRKREELQVPEFQACPQTVVPQNTYPESCYLYDNKHTLTCWGTRYHTEKNEGAPVDRQLTPRNSCNQHLPTHV

SEQ ID NO: 571 - protein, 65 aa, Artificial Sequence
  Synthetic polypeptide
MTTFERKLQDQDKKSQEVSSTSNQAKETSDEPERLNSGHDRKGGETHLVIPLPFWSLCTSDQDES

SEQ ID NO: 572 - protein, 77 aa, Artificial Sequence
  Synthetic polypeptide
MGNYLLRKLRQEMTTFERKLQDQDKKSQEVSSTSNQAKETSDEPERLNSGHDRKGGETHLVIPLPFWSLCTSDQDES

SEQ ID NO: 573 - protein, 97 aa, Artificial Sequence
  Synthetic polypeptide
MGNYLLRKLSCLGENQKKPKKGNPDEERKRQEMTTFERKLQDQDKKSQEVSSTSNQAKETSDEPERLNSGHDRKGGETHLVIPLPFWSLCTSDQDES

SEQ ID NO: 574 - protein, 83 aa, Artificial Sequence
  Synthetic polypeptide
MTTFERKLQDQDKKSQEVSSTSNQENENGSGSEEVCYTVINHIPHQRSSLSSNDDGYENIDSLTRKVRQFRERPKRPQMNLKD

SEQ ID NO: 575 - protein, 95 aa, Artificial Sequence
  Synthetic polypeptide
MGNYLLRKLRQEMTTFERKLQDQDKKSQEVSSTSNQENENGSGSEEVCYTVINHIPHQRSSLSSNDDGYENIDSLTRKVRQFRERPKRPQMNLKD

SEQ ID NO: 576 - protein, 115 aa, Artificial Sequence
  Synthetic polypeptide
MGNYLLRKLSCLGENQKKPKKGNPDEERKRQEMTTFERKLQDQDKKSQEVSSTSNQENENGSGSEEVCYTVINHIPHQRSSLSSNDDGYENIDSLTRKVRQFRERPKRPQMNLKD

SEQ ID NO: 577 - protein, 198 aa, Artificial Sequence
  Synthetic polypeptide
MEPPGDWGPPPWRSTPKTDVLRLVLYLTFLGAPCYAPALPSCKEDEYPVGSECCPKCSPGYRVKEACGELTGTVCEPCPPGTYIAHLNGLSKCLQCQMCDPAMGLRASRNCSRTENAVCGCSPGHFCIVQDGDHCAACRAYATSSPGQRVQKGGTESQDTLCQNCPPGTFSPNGTLEECQHQTNLSLFLFSSFLLSTS

SEQ ID NO: 578 - protein, 244 aa, Artificial Sequence
  Synthetic polypeptide
MEPPGDWGPPPWRSTPKTDVLRLVLYLTFLGAPCYAPALPSCKEDEYPVGSECCPKCSPGYRVKEACGELTGTVCEPCPPGTYIAHLNGLSKCLQCQMCDPAMGLRASRNCSRTENAVCGCSPGHFCIVQDGDHCAACRAYATSSPGQRVQKGGTESQDTLCQNCPPGTFSPNGTLEECQHQTKCSWLVTKAGAGTSSSHWVWWFLSGSLVIVIVCSTVGLIICVKRRKPRGDVVKVIVSVQGR

SEQ ID NO: 579 - protein, 115 aa, Artificial Sequence
  Synthetic polypeptide
MALSMPLNGLKEEDKEPLIELFVKAGSDGESIGNCPFSQRLFMILWLKGVVFSVTTVDLKRKPADLQNLAPGTHPPFITFNSEVKTDVNKIEEFLEEVLCPPKYMALVATVLDNE

SEQ ID NO: 580 - protein, 217 aa, Artificial Sequence
  Synthetic polypeptide
MASNSIFDSFPTYSPTFIRDPSTSRRFTPPSPAFPCGGGGGKMGENSGALSAQAAVGPGGRARPEVRSMVDVLADHAGELVRTDSPNFLCSVLPSHWRCNKTLPVAFKVVALGDVPDGTVVTVMAGNDENYSAELRNASAVMKNQVARFNDLRFVGRSGRGKSFTLTITVFTNPTQVATYHRAIKVTVDGPREPRRWWQTLLKGMLPGETRWCLSAA

SEQ ID NO: 581 - protein, 203 aa, Artificial Sequence
  Synthetic polypeptide
MRIPVDPSTSRRFTPPSPAFPCGGGGGKMGENSGALSAQAAVGPGGRARPEVRSMVDVLADHAGELVRTDSPNFLCSVLPSHWRCNKTLPVAFKVVALGDVPDGTVVTVMAGNDENYSAELRNASAVMKNQVARFNDLRFVGRSGRGKSFTLTITVFTNPTQVATYHRAIKVTVDGPREPRRWWQTLLKGMLPGETRWCLSAA

SEQ ID NO: 582 - protein, 110 aa, Artificial Sequence
  Synthetic polypeptide
MVVALGDVPDGTVVTVMAGNDENYSAELRNASAVMKNQVARFNDLRFVGRSGRGKSFTLTITVFTNPTQVATYHRAIKVTVDGPREPRRWWQTLLKGMLPGETRWCLSAA

SEQ ID NO: 583 - protein, 434 aa, Artificial Sequence
  Synthetic polypeptide
MSSKYPRSVRRCLPLWALTLEAALILLFYFFTHYDASLEDQKGLVASYQVGQDLTVMAAIGLGFLTSSFRRHSWSSVAFNLFMLALGVQWAILLDGFLSQFPSGKVVITLFSIRLATMSALSVLISVDAVLGKVNLAQLVVMVLVEVTALGNLRMVISNIFNTDYHMNMMHIYVFAAYFGLSVAWCLPKPLPEGTEDKDQTATIPSLSAMLGALFLWMFWPSFNSALLRSPIERKNAVFNTYYAVAVSVVTAISGSSLAHPQGKISKTYVHSAVLAGGVAVGTSCHLIPSPWLAMVLGLVAGLISVGGAKYLPGCCNRVLGIPHSSIMGYNFSLLGLLGEIIYIVLLVLDTVGAGNGMSLGWNLAVKMAEAGDEELMRLDVSQRNHGGAAVPTGSWMPSTETTIAPNYRDHISVGLQPEGISHRMNCTLSLTHI

SEQ ID NO: 584 - protein, 143 aa, Artificial Sequence
  Synthetic polypeptide
MSGFLEGLRCSECIDWGEKRNTIASIAAGVLFFTGWWIIIDAAVIYPTMKDFNHSYHACGVIATIAFLMINAVSNGQVRGDSYSEGCLGQTGARIWLFVGFMLAFGSLIASMWILFGGYVAKEKDIVYPGIAVFFQNAFIFFG

SEQ ID NO: 585 - protein, 168 aa, Artificial Sequence
  Synthetic polypeptide
MGRARPGQRGPPSPGPAAQPPAPPRRRARSLALLGALLAAAAAAAVRVCARHAEAQAAARQELALKTLGTDGLFLFSSLDTDGDMYISPEEFKPIAEKLTGSTPAASCEEEELPPDPSEETLTIEARFQPLLPETMTKSKDGFLGEHCLSVPSPHSPTQPFHLSQCHF

SEQ ID NO: 586 - protein, 126 aa, Artificial Sequence
  Synthetic polypeptide
MGRARPGQRGPPSPGPAAQPPAPPRRRARSLALLGALLAAAAAAAVRVCARHAEAQAAARQELALKTLGTDGLFLFSSLDTDGDMYISPEEFKPIAEKLTGSCSVTQTGVQWCSHSSLQPQLPWLN

SEQ ID NO: 587 - protein, 268 aa, Artificial Sequence
  Synthetic polypeptide
MQSWRRRKSLWLALSASWLLLVLLGGFSLLRLALPPRPRPGASQGWPRWLDAELLQSFSQPGELPEDAVSPPQAPHGGSCNWESCFDTSKCRGDGLKVFVYPAVGTISETHRRILASIEGSRFYTFSPAGACLLLLLSLDAQTGECSSMPLQWNRGRNHLVLRLHPAPCPRTFQLGQAMVAEASPTVDSFRPGFDVALPFLPEAHPLRGGAPGQLRQHSPQPGVALLALEEERGGWRTADTGSSACPWDGRCEQDPGPGQRDCEGQSA

SEQ ID NO: 588 - protein, 112 aa, Artificial Sequence
  Synthetic polypeptide
MSSPLASLSKTRKVPLPSEPMNPGRRGIRIYGDVPASHDSELMAFMTRKLWDLEQQVKAQTDEILSKDQKIAALEDLVQTLRPHPAEATLQRQEELETMCVQLQRQVREMEP

SEQ ID NO: 589 - protein, 145 aa, Artificial Sequence
  Synthetic polypeptide
MSSPLASLSKTRKVPLPSEPMNPGRRGIRIYGDEDEVDMLSDGCGSEEKISVPSCYGGIGAPVSRQVPASHDSELMAFMTRKLWDLEQQVKAQTDEILSKDQKIAALEDLVQTLRPHPAEATLQRQEELETMCVQLQRQVREMEP

SEQ ID NO: 590 - protein, 70 aa, Artificial Sequence
  Synthetic polypeptide
MAFMTRKLWDLEQQVKAQTDEILSKDQKIAALEDLVQTLRPHPAEATLQRQEELETMCVQLQRQVREMEP

SEQ ID NO: 591 - protein, 107 aa, Artificial Sequence
  Synthetic polypeptide
MLSDGCGSEEKISVPSCYGGIGAPVSRQVPASHDSELMAFMTRKLWDLEQQVKAQTDEILSKDQKIAALEDLVQTLRPHPAEATLQRQEELETMCVQLQRQVREMEP

SEQ ID NO: 592 - protein, 404 aa, Artificial Sequence
  Synthetic polypeptide
MWPQDPSRKEVLRFAVSCRILTLMLQALFNAIIPDHHAEAFSPPRLAPSGFVDQLVEGLLGGLSHWDAEHFLFIAEHGYLYEHNFAFFPGFPLALLVGTELLRPLRGLLSLRSCLLISVASLNFLFFMLAAVALHDLGCLVLHCPHQSFYAALLFCLSPANVFLAAGYSEALFALLTFSAMGQLERGRVWTSVLLFAFATGVRSNGLVSVGFLMHSQCQGFFSSLTMLNPLRQLFKLMASLFLSVFTLGLPFALFQYYAYTQFCLPGSARPIPEPLVQLAVDKGYRIAEGNEPPWCFWDVPLIYSYIQDVYWNVGFLKYYELKQVPNFLLAAPVAILVAWATWTYVTTHPWLCLTLGLQRSKNNKTLEKPDLGFLSPQVFVYVVHAAVLLLFGGLCMHVQPRSS

SEQ ID NO: 593 - protein, 176 aa, Artificial Sequence
  Synthetic polypeptide
MPSSQITMQKPSLLLAWPPQALWTNSWKYYAYTQFCLPGSARPIPEPLVQLAVDKGYRIAEGNEPPWCFWDVPLIYSYIQDVYWNVGFLKYYELKQVPNFLLAAPVAILVAWATWTYVTTHPWLCLTLGLQRSKNNKTLEKPDLGFLSPQVFVYVVHAAVLLLFGGLCMHVQPRSS

SEQ ID NO: 594 - protein, 303 aa, Artificial Sequence
  Synthetic polypeptide
MAVPGEAEEEATVYLVVSGIPSVLRSAHLRSYFSQFREERGGGFLCFHYRHRPERAPPQAAPNSALIPTDPAAEGQLLSQTSATDVRPLSTRDSTPIQTRTCCCVISVRGLAQAQRLIRMYSGRRWLDSHGTWLPGRCLIRRLRLPTEASGLGSFPFKTRKELQSWKAENEAFTLADLKQLPELNPPVLMPRGNVGTPLRVFLELIRACRLPPRIITQLQLQFPKTGSSRRYGNVPFEYEDSETVEQEELVYTAEGEEIPQGTYLADIPASPCGEPEEEVGKEEEEESHSDEGDGPELLPEDS

SEQ ID NO: 595 - protein, 529 aa, Artificial Sequence
  Synthetic polypeptide
MVLRSGICGLSPHRIFPSLLVVVALVGLLPVLRSHGLQLSPTASTIRSSEPPRERSIGDVTTAPPEVTPESRPVNHSVTDHGMKPRKAFPVLGIDYTHVRTPFEISLWILLACLMKIGFHVIPTISSIVPESCLLIVVGLLVGGLIKGVGETPPFLQSDVFFLFLLPPIILDAGYFLPLRQFTENLGTILIFAVVGTLWNAFFLGGLMYAVCLVGGEQINNIGLLDNLLFGSIISAVDPVAVLAVFEEIHINELLHILVFGESLLNDAVTVVLYHLFEEFANYEHVGIVDIFLGFLSFFVVALGGVLVGVVYGVIAAFTSRFTSHIRVIEPLFVFLYSYMAYLSAELFHLSGIMALIASGVVMRPYVEANISHKSHTTIKYFLKMWSSVSETLIFIFLGVSTVAGSHHWNWTFVISTLLFCLIARVLGVLGLTWFINKFRIVKLTPKDQFIIAYGGLRGAIAFSLGYLLDKKHFPMCDLFLTAIITVIFFTVFVQRQWKDLPLSVADIGELIDARTLPSTCVGHMAGVQ

SEQ ID NO: 596 - protein, 190 aa, Artificial Sequence
  Synthetic polypeptide
MAYLSAELFHLSGIMALIASGVVMRPYVEANISHKSHTTIKYFLKMWSSVSETLIFIFLGVSTVAGSHHWNWTFVISTLLFCLIARVLGVLGLTWFINKFRIVKLTPKDQFIIAYGGLRGAIAFSLGYLLDKKHFPMCDLFLTAIITVIFFTVFVQRQWKDLPLSVADIGELIDARTLPSTCVGHMAGVQ

SEQ ID NO: 597 - protein, 150 aa, Artificial Sequence
  Synthetic polypeptide
MVLRSGICGLSPHRIFPSLLVVVALVGLLPVLRSHGLQLSPTASTIRSSEPPRERSIGDVTTAPPEVTPESRPVNHSVTDHGMKPRKAFPVLGIDYTHVRTPFEISLWILLACLMKIAWSTAHRLPRAGALLQALDQTSSLQRGLPDCPV

SEQ ID NO: 598 - protein, 45 aa, Artificial Sequence
  Synthetic polypeptide
MAKVNITRDLIRRQIKERGALSFERRYHVTDPFIRRLGLEAELQN

SEQ ID NO: 599 - protein, 535 aa, Artificial Sequence
  Synthetic polypeptide
MAKVNITRDLIRRQIKERGALSFERRYHVTDPFIRRLGLEAELQGHSGCVNCLEWNEKGDLLASGSDDQHTIVWDPLHHKKLLSMHTGHTANIFSVKFLPHAGDRILITGAADSKVHVHDLTVKETIHMFGDHTNRVKRIATAPMWPNTFWSAAEDGLIRQYDLRENSKHSEVLIDLTEYCGQLVEAKCLTVNPQDNNCLAVGASGPFVRLYDIRMIHNHRKSMKQSPSAGVHTFCDRQKPLPDGAAQYYVAGHLPVKLPDYNNRLRVLVATYVTFSPNGTELLVNMGGEQVYLFDLTYKQRPYTFLLPRKCHSSGEVQNGKMSTNGVSNGVSNGLHLHSNGFRLPESRGHVSPQVELPPYLERVKQQANEAFACQQWTQAIQLYSKAVQRAPHNAMLYGNRAAAYMKRKWDGDHYDALRDCLKAISLNPCHLKAHFRLARCLFELKYVAEALECLDDFKGKFPEQAHSSACDALGRDITAALFSKNDGAPPPDCVALKKAQPLYLPAQRARSPAQLPSVCWRMNWAIGVWSVNV

SEQ ID NO: 600 - protein, 534 aa, Artificial Sequence
  Synthetic polypeptide
MAKVNITRDLIRRQIKERGALSFERRYHVTDPFIRRLGLEAELQGHSGCVNCLEWNEKGDLLASGSDDQHTIVWDPLHHKKLLSMHTGHTANIFSVKFLPHAGDRILITGAADSKVHVHDLTVKETIHMFGDHTNRVKRIATAPMWPNTFWSAAEDGLIRQYDLRENSKHSEVLIDLTEYCGQLVEAKCLTVNPQDNNCLAVGASGPFVRLYDIRMIHNHRKSMKQSPSAGVHTFCDRQKPLPDGAAQYYVAGHLPVKLPDYNNRLRVLVATYVTFSPNGTELLVNMGGEQVYLFDLTYKQRPYTFLLPRKCHSSGVQNGKMSTNGVSNGVSNGLHLHSNGFRLPESRGHVSPQVELPPYLERVKQQANEAFACQQWTQAIQLYSKAVQRAPHNAMLYGNRAAAYMKRKWDGDHYDALRDCLKAISLNPCHLKAHFRLARCLFELKYVAEALECLDDFKGKFPEQAHSSACDALGRDITAALFSKNDGAPPPDCVALKKAQPLYLPAQRARSPAQLPSVCWRMNWAIGVWSVNV

SEQ ID NO: 601 - protein, 634 aa, Artificial Sequence
  Synthetic polypeptide
MAKVNITRDLIRRQIKERGALSFERRYHVTDPFIRRLGLEAELQGHSGCVNCLEWNEKGDLLASGSDDQHTIVWDPLHHKKLLSMHTGHTANIFSVKFLPHAGDRILITGAADSKVHVHDLTVKETIHMFGDHTNRVKRIATAPMWPNTFWSAAEDGLIRQYDLRENSKHSEVLIDLTEYCGQLVEAKCLTVNPQDNNCLAVGASGPFVRLYDIRMIHNHRKSMKQSPSAGVHTFCDRQKPLPDGAAQYYVAGHLPVKLPDYNNRLRVLVATYVTFSPNGTELLVNMGGEQVYLFDLTYKQRPYTFLLPRKCHSSGEVQNGKMSTNGVSNGVSNGLHLHSNGFRLPESRGHVSPQVELPPYLERVKQQANEAFACQQWTQAIQLYSKAVQRAPHNAMLYGNRAAAYMKRKWDGDHYDALRDCLKAISLNPCHLKAHFRLARCLFELKYVAEALECLDDFKGKFPEQAHSSACDALGRDITAALFSKNDGEEKKGPGGGAPVRLRSTSRKDSISEDEMVLRERSYDYQFRYCGHCNTTTDIKEANFFGSNAQYIVSGSDDGSFFIWEKETTNLVRVLQGDESIVNCLQPHPSYCFLATSGIDPVVRLWNPRPEAFNHLYIGNGNDSTTLKGCGEK

SEQ ID NO: 602 - protein, 633 aa, Artificial Sequence
  Synthetic polypeptide
MAKVNITRDLIRRQIKERGALSFERRYHVTDPFIRRLGLEAELQGHSGCVNCLEWNEKGDLLASGSDDQHTIVWDPLHHKKLLSMHTGHTANIFSVKFLPHAGDRILITGAADSKVHVHDLTVKETIHMFGDHTNRVKRIATAPMWPNTFWSAAEDGLIRQYDLRENSKHSEVLIDLTEYCGQLVEAKCLTVNPQDNNCLAVGASGPFVRLYDIRMIHNHRKSMKQSPSAGVHTFCDRQKPLPDGAAQYYVAGHLPVKLPDYNNRLRVLVATYVTFSPNGTELLVNMGGEQVYLFDLTYKQRPYTFLLPRKCHSSGVQNGKMSTNGVSNGVSNGLHLHSNGFRLPESRGHVSPQVELPPYLERVKQQANEAFACQQWTQAIQLYSKAVQRAPHNAMLYGNRAAAYMKRKWDGDHYDALRDCLKAISLNPCHLKAHFRLARCLFELKYVAEALECLDDFKGKFPEQAHSSACDALGRDITAALFSKNDGEEKKGPGGGAPVRLRSTSRKDSISEDEMVLRERSYDYQFRYCGHCNTTTDIKEANFFGSNAQYIVSGSDDGSFFIWEKETTNLVRVLQGDESIVNCLQPHPSYCFLATSGIDPVVRLWNPRPEAFNHLYIGNGNDSTTLKGCGEK

SEQ ID NO: 603 - protein, 608 aa, Artificial Sequence
  Synthetic polypeptide
MAKVNITRDLIRRQIKERGALSFERRYHVTDPFIRRLGLEAELQGHSGCVNCLEWNEKGDLLASGSDDQHTIVWDPLHHKKLLSMHTGHTANIFSVKFLPHAGDRILITGAADSKVHVHDLTVKETIHMFGDHTNRVKRIATAPMWPNTFWSAAEDGLIRQYDLRENSKHSEVLIDLTEYCGQLVEAKCLTVNPQDNNCLAVGASGPFVRLYDIRMIHNHRKSMKQSPSAGVHTFCDRQKPLPDGAAQYYVAGHLPVKLPDYNNRLRVLVATYVTFSPNGTELLVNMGGEQVYLFDLTYKQRPYTFLLPRKCHSSGEVQNGKMSTNGVSNGVSNGLHLHSNGFRLPESRGHVSPQVELPPYLERVKQQANEAFACQQWTQAIQLYSKAVQRAPHNAMLYGNRAAAYMKRKWDGDHYDALRDCLKAISLNPCHLKAHFRLARCLFELKYVAEALECLDDFKGKFPEQAHSSACDALGRDITAALFSKNDGEEKKGPGGGAPVRLRSTSRKDSISEDEMVLRERSYDYQFRYCGHCNTTTDIKEANFFGRRPPTWSVCSKGMSPLSTACSHTPATASWPPVASILLCGSGTPDQRLLIICTLGMGMTAPP

SEQ ID NO: 604 - protein, 82 aa, Artificial Sequence
  Synthetic polypeptide
IVSGSDDGSFFIWEKETTNLVRVLQGDESIVNCLQPHPSYCFLATSGIDPVVRLWNPRPEAFNHLYIGNGNDSTTLKGCGEK

SEQ ID NO: 605 - protein, 225 aa, Artificial Sequence
  Synthetic polypeptide
MEPVPLQDFVRALDPASLPRVLRVCSGVYFEGSIYEISGNECCLSTGDLIKVTQVRLQKVVCENPKTSQTMELAPNFQGYFTPLNTPQSYETLEELVSATTQSSKQLPTCFMSTHRIVTEGRVVTEDQLLMLEAVVMHLGIRSARCVLGMEGQQVILHLPLSQKGPFWTWEPSAPRTLLQVLQDPALKDLVLTCPTLPWHSLILRPQYEIQAIMHTCATRALHLE

SEQ ID NO: 606 - protein, 16 aa, Artificial Sequence
  Synthetic polypeptide
PLASCRPTGLSQRAGW

SEQ ID NO: 607 - protein, 131 aa, Artificial Sequence
  Synthetic polypeptide
MWNSGFESYGSSSYGGAGGYTQSPGGFGSPAPSQAEKKSRARAQHIVPCTISQLLSATLVDEVFRIGNVEISQVTIVGIIRHAEKAPTNIVYKIDDMTAAPMDVRQWVDTDVRWLMPVIPGLWGGQDEWIT

SEQ ID NO: 608 - protein, 139 aa, Artificial Sequence
  Synthetic polypeptide
MGRGDRNKRSIRGFESYGSSSYGGAGGYTQSPGGFGSPAPSQAEKKSRARAQHIVPCTISQLLSATLVDEVFRIGNVEISQVTIVGIIRHAEKAPTNIVYKIDDMTAAPMDVRQWVDTDVRWLMPVIPGLWGGQDEWIT

SEQ ID NO: 609 - protein, 219 aa, Artificial Sequence
  Synthetic polypeptide
MWNSNDGGAGWRRKRIAGGFSKRASLGSERRVVAGEEGRERSWGVWGSPAGRRRGRLGRLGQCLKGRSLREPAGFSEAWDVAQALILLFKTGGFESYGSSSYGGAGGYTQSPGGFGSPAPSQAEKKSRARAQHIVPCTISQLLSATLVDEVFRIGNVEISQVTIVGIIRHAEKAPTNIVYKIDDMTAAPMDVRQWVDTDVRWLMPVIPGLWGGQDEWIT

SEQ ID NO: 610 - protein, 135 aa, Artificial Sequence
  Synthetic polypeptide
MWNSNDGGGFESYGSSSYGGAGGYTQSPGGFGSPAPSQAEKKSRARAQHIVPCTISQLLSATLVDEVFRIGNVEISQVTIVGIIRHAEKAPTNIVYKIDDMTAAPMDVRQWVDTDVRWLMPVIPGLWGGQDEWIT

SEQ ID NO: 611 - protein, 164 aa, Artificial Sequence
  Synthetic polypeptide
MPWSSRGALLRDLVLGVLGTAAFLLDLGTDLWAAVQYALGGRYLWAALVLALLGLASVALQLFSWLWLRADPAGLHGSQPPRRCLALLHLLQLGYLYRCVQELRQGLLVWQQEEPSEFDLAYADFLALDISMLRLFETFLETAPQLTLVLAIMLQSGRAEYYQC

SEQ ID NO: 612 - protein, 152 aa, Artificial Sequence
  Synthetic polypeptide
MEEEQDLPEQPVKKAKMQESGEQTISQVSNPDVSDQKPETSSLASNLPMSEEIMTCTDYIPRSSNDYTSQMYSAKPYAHILSVPVSETAYPGQTQYQTLQQTQPYAVYPQATQTYGLPPFVISLLGMYPMELIRDTHKNVLTNILIEALFII

SEQ ID NO: 613 - protein, 99 aa, Artificial Sequence
  Synthetic polypeptide
MTCTDYIPRSSNDYTSQMYSAKPYAHILSVPVSETAYPGQTQYQTLQQTQPYAVYPQATQTYGLPPFVISLLGMYPMELIRDTHKNVLTNILIEALFII

SEQ ID NO: 614 - protein, 13 aa, Artificial Sequence
  Synthetic polypeptide
MEDPFALLLPATL

SEQ ID NO: 615 - protein, 724 aa, Artificial Sequence
  Synthetic polypeptide
MEDPFEEADQPTTEPGMVLDSVEAGDTTPPTKRKSKFSGFGKIFKPWKWRKKKSSDKFKETSEVLERKISMRKPREELVKRGVLLEDPEQGGEDPGKPSDAMLKNGHTTPIGNARSSSPVQVEEEPVRLASLRKAIPEEDLKKRLGSTGSQPNSEAESVPENVPKPPLLPPKRPLSSSHEASEGQAKDATSSGGTARFIISTSITTAPAATTAATSLAKTVNLSVTPSPAPRTLPAAPASTNTTATPSLTHMVPAKQPPIPPPKPAHRNSNPVIAELSQAINSGTLLSKPSPPLPPKRGIPSTSVPTLESAAAITTKTPSDEREKSTCSMGSELLPMISPRSPSPPLPTHIPPEPPRTPPFPAKTFQVVPEIEFPPSLDLHQEIPQQEDQKKEVPKRILDQNFGEPHIPSRLPPLPLHIRIQQALTSPLPMTPILEGSHRAHSLLFENSDSFSEDSSTLGRTRSLPITIEMLKVPDDEEEEEQTCPSTFSEEMTPTSVIPKLPQCLREEEEKESDSDSEGPIQYRDEEDEDESYQSALANKVKRKDTLAMKLNHRPSEPELNLNSWPCKSKEEWNEIRHQIGNTLIRRLSQRPTPEELEQRNILQPKNEADRQAEKREIKRRLTRKLSQRPTVAELLARKILRFNEYVEVTDAQDYDRRADKPWTKLTPADKAAIRKELNEFKSSEMEVHEESKHFTRQGPGAVVHTCNPSTLGGRGGRITLRP

SEQ ID NO: 616 - protein, 734 aa, Artificial Sequence
  Synthetic polypeptide
MGQADVSRPVNPDAVEEADQPTTEPGMVLDSVEAGDTTPPTKRKSKFSGFGKIFKPWKWRKKKSSDKFKETSEVLERKISMRKPREELVKRGVLLEDPEQGGEDPGKPSDAMLKNGHTTPIGNARSSSPVQVEEEPVRLASLRKAIPEEDLKKRLGSTGSQPNSEAESVPENVPKPPLLPPKRPLSSSHEASEGQAKDATSSGGTARFIISTSITTAPAATTAATSLAKTVNLSVTPSPAPRTLPAAPASTNTTATPSLTHMVPAKQPPIPPPKPAHRNSNPVIAELSQAINSGTLLSKPSPPLPPKRGIPSTSVPTLESAAAITTKTPSDEREKSTCSMGSELLPMISPRSPSPPLPTHIPPEPPRTPPFPAKTFQVVPEIEFPPSLDLHQEIPQQEDQKKEVPKRILDQNFGEPHIPSRLPPLPLHIRIQQALTSPLPMTPILEGSHRAHSLLFENSDSFSEDSSTLGRTRSLPITIEMLKVPDDEEEEEQTCPSTFSEEMTPTSVIPKLPQCLREEEEKESDSDSEGPIQYRDEEDEDESYQSALANKVKRKDTLAMKLNHRPSEPELNLNSWPCKSKEEWNEIRHQIGNTLIRRLSQRPTPEELEQRNILQPKNEADRQAEKREIKRRLTRKLSQRPTVAELLARKILRFNEYVEVTDAQDYDRRADKPWTKLTPADKAAIRKELNEFKSSEMEVHEESKHFTRQGPGAVVHTCNPSTLGGRGGRITLRP

SEQ ID NO: 617 - protein, 226 aa, Artificial Sequence
  Synthetic polypeptide
MSPKRIAKRRSPPADAIPKSKKVKVSHRSHSTEPGLVLTLGQGDVGQLGLGENVMERKKPALVSIPEDVVQAEAGGMHTVCLSKSGQVYSFGCNDEGALGRDTSVEGSEMVPGKVELQEKVVQVSAGDSHTAALTDDGRVFLWGSFRDNNGVIGLLEPMKKSMVPVQVQLDVPVVKVASGNDHLVMLTADGDLYTLGCGEQGQLGRVPELFANRGGRQGLGCCEVK

SEQ ID NO: 618 - protein, 262 aa, Artificial Sequence
  Synthetic polypeptide
MMEAEDRKMSPKRIAKRRSPPADAIPKSKKVKVSHRSHSTEPGLVLTLGQGDVGQLGLGENVMERKKPALVSIPEDVVQAEAGGMHTVCLSKSGQVYSFGCNDEGALGRDTSVEGSEMVPGKVELQEKVVQVSAGDSHTAALTDDGRVFLWGSFRHCLFHTSQRLGWGKEVWRQGLSHLRVSKDNNGVIGLLEPMKKSMVPVQVQLDVPVVKVASGNDHLVMLTADGDLYTLGCGEQGQLGRVPELFANRGGRQGLGCCEVK

SEQ ID NO: 619 - protein, 257 aa, Artificial Sequence
  Synthetic polypeptide
MSPKRIAKRRSPPADAIPKSKKVKDTRAAASRRVPGARSCQGACGPSPPDQKTRPVSHRSHSTEPGLVLTLGQGDVGQLGLGENVMERKKPALVSIPEDVVQAEAGGMHTVCLSKSGQVYSFGCNDEGALGRDTSVEGSEMVPGKVELQEKVVQVSAGDSHTAALTDDGRVFLWGSFRDNNGVIGLLEPMKKSMVPVQVQLDVPVVKVASGNDHLVMLTADGDLYTLGCGEQGQLGRVPELFANRGGRQGLGCCEVK

SEQ ID NO: 620 - protein, 243 aa, Artificial Sequence
  Synthetic polypeptide
MSPKRIAKRRSPPADAIPKSKKVKDTRAAASRRVPGARSCQVSHRSHSTEPGLVLTLGQGDVGQLGLGENVMERKKPALVSIPEDVVQAEAGGMHTVCLSKSGQVYSFGCNDEGALGRDTSVEGSEMVPGKVELQEKVVQVSAGDSHTAALTDDGRVFLWGSFRDNNGVIGLLEPMKKSMVPVQVQLDVPVVKVASGNDHLVMLTADGDLYTLGCGEQGQLGRVPELFANRGGRQGLGCCEVK

SEQ ID NO: 621 - protein, 404 aa, Artificial Sequence
  Synthetic polypeptide
MTTEKSLVTEAENSQHQQKEEGEEAINSGQQEPQQEESCQTAAEGDNWCEQKLKASNGDTPTHEDLTKNKERTSESRGLSRLFSSFLKRPKSQVSEEEGKEVESDKEKGEGGQKEIEFGTSLDEEIILKAPIAAPEPELKTDPSLDLHSLSSAETQPAQEELREDPDFEIKEGEGLEECSKIEVKEESPQSKAETELKASQKPIRKHRNMHCKVSLLDDTVYECVVEKHAKGQDLLKRVCEHLNLLEEDYFGLAIWDNATSKTWLDSAKEIKKQVRGVPWNFTFNVKFYPPDPAQLTEDITRYYLCLQLRQDIVAGRLPCSFATLALLGSYTIQSELGDYDPELHGVDYVSDFKLAPNQTKELEEKVMELHKSYRSMTPAQADLEFLENAKKLSMYGVDLHKAK

SEQ ID NO: 622 - protein, 195 aa, Artificial Sequence
  Synthetic polypeptide
MHCKVSLLDDTVYECVVEKHAKGQDLLKRVCEHLNLLEEDYFGLAIWDNATSKTWLDSAKEIKKQVRGVPWNFTFNVKFYPPDPAQLTEDITRYYLCLQLRQDIVAGRLPCSFATLALLGSYTIQSELGDYDPELHGVDYVSDFKLAPNQTKELEEKVMELHKSYRSMTPAQADLEFLENAKKLSMYGVDLHKAK

SEQ ID NO: 623 - protein, 369 aa, Artificial Sequence
  Synthetic polypeptide
MTTEKSLVTEAENSQHQQKEEGEEAINSGQQEPQQEESCQTAAEGDNWCEQKLKASNGDTPTHEDLTKNKERTSESRGLSRLFSSFLKRPKSQVSEEEGKEVESDKEKGEGGQKEIEFGTSLDEEIILKAPIAAPEPELKTDPSLDLHSLSSAETQPAQEELREDPDFEIKEGEGLEECSKIEVKEESPQSKAETELKASQKPIRKHRNMHCKVSLLDDTVYECVVETWLDSAKEIKKQVRGVPWNFTFNVKFYPPDPAQLTEDITRYYLCLQLRQDIVAGRLPCSFATLALLGSYTIQSELGDYDPELHGVDYVSDFKLAPNQTKELEEKVMELHKSYRSMTPAQADLEFLENAKKLSMYGVDLHKAK

SEQ ID NO: 624 - protein, 80 aa, Artificial Sequence
  Synthetic polypeptide
MLAAPINPSDINMIQGNYGFLPELPAVGGNEGVAQVVAVGSNVTGLKPGDWVIPANAGLGPGMVAHACNPSMGGQGGQIA

SEQ ID NO: 625 - protein, 156 aa, Artificial Sequence
  Synthetic polypeptide
MWVCSTLWRVRTPARQWRGLLPASGCHGPAASSYSASAEPARVRALVYGHHGDPAKVVELKNLELAAVRGSDVRVKMLAAPINPSDINMIQGNYGFLPELPAVGGNEGVAQVVAVGSNVTGLKPGDWVIPANAGLGPGMVAHACNPSMGGQGGQIA

SEQ ID NO: 626 - protein, 29 aa, Artificial Sequence
  Synthetic polypeptide
VIPANAGLGPGMVAHACNPSMGGQGGQIA

SEQ ID NO: 627 - protein, 67 aa, Artificial Sequence
  Synthetic polypeptide
MDPRLSTVRQTCCCFNVRIATTALAIYHVIMSVLLFIEHSVEVAHGKASCKLSQMGYLRIGGESRWN

SEQ ID NO: 628 - protein, 41 aa, Artificial Sequence
  Synthetic polypeptide
MDPRLSTVRQTCCCFNVRIATTALAIYHVVPHRGLQIENTQ

SEQ ID NO: 629 - protein, 797 aa, Artificial Sequence
  Synthetic polypeptide
MSVACVLKRKAVLWQDSFSPHLKHHPQEPANPNMPVVLTSGTGSQAQPQPAANQALAAGTHSSPVPGSIGVAGRSQDDAMVDYFFQRQHGEQLGGGGSGGGGYNNSKHRWPTGDNIHAEHQVRSMDELNHDFQALALEGRAMGELFQRPNALAVQQLTAAQQQQYALAAAHQPHIGLAPAAFVPNPYIISAAPPGTDPYTAGLAAAATLGPAVVPHQYYGVTPWGVYPASLFQQQAAAAAAATNSANQQTTPQAQQGQQQVLRGGASQRPLTPNQNQQGQQTDPLVAAAAVNSALAFGQGLAAGMPGYPVLAPAAYYDQTGALVVNAGARNGLGAPVRLVAPAPVIISSSAAQAAVAAAAASANGAAGGLAGTTNGPFRPLGTQQPQPQPQQQPNNNLASSSFYGNNSLNSNSQSSSLFSQGSAQPANTSLGFGSSSSLGATLGSALGGFGTAVANSNTGSGSRRDSLTGSSDLYKRTSSSLTPIGHSFYNGLSFSSSPGPVGMPLPSQGPGHSQTPPPSLSSHGSSSSLNLGGLTNGSGRYISAAPGAEAKYRSASSASSLFSPSSTLFSSSRLRYGMSDVMPSGRSRLLEDFRNNRYPNLQLREIAGHIMEFSQDQHGSRFIQLKLERATPAERQLVFNEILQAAYQLMVDVFGNYVIQKFFEFGSLEQKLALAERIRGHVLSLALQMYGCRVIQKALEFIPSDQQNEMVRELDGHVLKCVKDQNGNHVVQKCIECVQPQSLQFIIDAFKGQVFALSTHPYGCRVIQRILEHCLPDQTLPILEELHQHTEQLVQL

SEQ ID NO: 630 - protein, 1039 aa, Artificial Sequence
  Synthetic polypeptide
MSVACVLKRKAVLWQDSFSPHLKHHPQEPANPNMPVVLTSGTGSQAQPQPAANQALAAGTHSSPVPGSIGVAGRSQDDAMVDYFFQRQHGEQLGGGGSGGGGYNNSKHRWPTGDNIHAEHQVRSMDELNHDFQALALEGRAMGEQLLPGKKFWETDESSKDGPKGIFLGDQWRDSAWGTSDHSVSQPIMVQRRPGQSFHVNSEVNSVLSPRSESGGLGVSMVEYVLSSSPGDSCLRKGGFGPRDADSDENDKGEKKNKGTFDGDKLGDLKEEGDVMDKTNGLPVQNGIDADVKDFSRTPGNCQNSANEVDLLGPNQNGSEGLAQLTSTNGAKPVEDFSNMESQSVPLDPMEHVGMEPLQFDYSGTQVPVDSAAATVGLFDYNSQQQLFQRPNALAVQQLTAAQQQQYALAAAHQPHIGLAPAAFVPNPYIISAAPPGTDPYTAGLAAAATLGPAVVPHQYYGVTPWGVYPASLFQQQAAAAAAATNSANQQTTPQAQQGQQQVLRGGASQRPLTPNQNQQGQQTDPLVAAAAVNSALAFGQGLAAGMPGYPVLAPAAYYDQTGALVVNAGARNGLGAPVRLVAPAPVIISSSAAQAAVAAAAASANGAAGGLAGTTNGPFRPLGTQQPQPQPQQQPNNNLASSSFYGNNSLNSNSQSSSLFSQGSAQPANTSLGFGSSSSLGATLGSALGGFGTAVANSNTGSGSRRDSLTGSSDLYKRTSSSLTPIGHSFYNGLSFSSSPGPVGMPLPSQGPGHSQTPPPSLSSHGSSSSLNLGGLTNGSGRYISAAPGAEAKYRSASSASSLFSPSSTLFSSSRLRYGMSDVMPSGRSRLLEDFRNNRYPNLQLREIAGHIMEFSQDQHGSRFIQLKLERATPAERQLVFNEILQAAYQLMVDVFGNYVIQKFFEFGSLEQKLALAERIRGHVLSLALQMYGCRVIQKALEFIPSDQQNEMVRELDGHVLKCVKDQNGNHVVQKCIECVQPQSLQFIIDAFKGQVFALSTHPYGCRVIQRILEHCLPDQTLPILEELHQHTEQLVQL

SEQ ID NO: 631 - protein, 1042 aa, Artificial Sequence
  Synthetic polypeptide
MSVACVLKRKAVLWQDSFSPHLKHHPQEPANPNMPVVLTSGTGSQAQPQPAANQALAAGTHSSPVPGSIGVAGRSQDDAMVDYFFQRQHGEQLGGGGSGGGGYNNSKHRWPTGDNIHAEHQVRSMDELNHDFQALALEGRAMGEQLLPGKKFWETDESSKDGPKGIFLGDQWRDSAWGTSDHSVSQPIMVQRRPGQSFHVNSEVNSVLSPRSESGGLGVSMVEYVLSSSPGDSCLRKGGFGPRDADSDENDKGEKKNKGTFDGDKLGDLKEEGDVMDKTNGLPVQNGIDADVKDFSRTPGNCQNSANEVDLLGPNQNGSEGLAQLTSTNGAKPVEDFSNMESQSVPLDPMEHVGMEPLQFDYSGTQVPVDSAAATVGLFDYNSQQQLFQRPNALAVQQLTAAQQQQYALAAAHQPHIAGLAPAAFVPNPYIISAAPPGTDPYTAGLAAAATLGPAVVPHQYYGVTPWGVYPASLFQQQAAAAAAATNSANQQTTPQAQQGQQQVLRGGASQRPLTPNQNQQGQQTDPLVAAAAVNSALAFGQGLAAGMPGYPVLAPAAYYDQTGALVVNAGARNGLGAPVRLVAPAPVIISSSAAQAAVAAAAASANGAAGGLAGTTNGPFRPLGTQQPQPQPQQQPNNNLASSSFYGNNSLNSNSQSSSLFSQGSAQPANTSLGFGSSSSLGATLGSALGGFGTAVANSNTGSGSRRDSLTGSSDLYKRTSSSLTPIGHSFYNGLSFSSSPGPVGMPLPSQGPGHSQTPPPSLSSHGSSSSLNLGGLTNGSGRYISAAPGAEAKYRSASSASSLFSPSSTLFSSSRLRYGMSDVMPSGRSRLLEDFRNNRYPNLQLREIAGHIMEFSQDQHGSRFIQLKLERATPAERQLVFNEILQAAYQLMVDVFGNYVIQKFFEFGSLEQKLALAERIRGHVLSLALQMYGCRVIQKALEFIPSDQQVINEMVRELDGHVLKCVKDQNGNHVVQKCIECVQPQSLQFIIDAFKGQVFALSTHPYGCRVIQRILEHCLPDQTLPILEELHQHTEQLVQL

SEQ ID NO: 632 - protein, 46 aa, Artificial Sequence
  Synthetic polypeptide
PVPSGPPCCRSERCWWNERCMCLEEKSSALAGLFQPPPETSPSRTS

SEQ ID NO: 633 - protein, 1041 aa, Artificial Sequence
  Synthetic polypeptide
MSVACVLKRKAVLWQDSFSPHLKHHPQEPANPNMPVVLTSGTGSQAQPQPAANQALAAGTHSSPVPGSIGVAGRSQDDAMVDYFFQRQHGEQLGGGGSGGGGYNNSKHRWPTGDNIHAEHQVRSMDELNHDFQALALEGRAMGEQLLPGKKFWETDESSKDGPKGIFLGDQWRDSAWGTSDHSVSQPIMVQRRPGQSFHVNSEVNSVLSPRSESGGLGVSMVEYVLSSSPGDSCLRKGGFGPRDADSDENDKGEKKNKGTFDGDKLGDLKEEGDVMDKTNGLPVQNGIDADVKDFSRTPGNCQNSANEVDLLGPNQNGSEGLAQLTSTNGAKPVEDFSNMESQSVPLDPMEHVGMEPLQFDYSGTQVPVDSAAATVGLFDYNSQQQLFQRPNALAVQQLTAAQQQQYALAAAHQPHIGLAPAAFVPNPYIISAAPPGTDPYTAGLAAAATLGPAVVPHQYYGVTPWGVYPASLFQQQAAAAAAATNSANQQTTPQAQQGQQQVLRGGASQRPLTPNQNQQGQQTDPLVAAAAVNSALAFGQGLAAGMPGYPVLAPAAYYDQTGALVVNAGARNGLGAPVRLVAPAPVIISSSAAQAAVAAAAASANGAAGGLAGTTNGPFRPLGTQQPQPQPQQQPNNNLASSSFYGNNSLNSNSQSSSLFSQGSAQPANTSLGFGSSSSLGATLGSALGGFGTAVANSNTGSGSRRDSLTGSSDLYKRTSSSLTPIGHSFYNGLSFSSSPGPVGMPLPSQGPGHSQTPPPSLSSHGSSSSLNLGGLTNGSGRYISAAPGAEAKYRSASSASSLFSPSSTLFSSSRLRYGMSDVMPSGRSRLLEDFRNNRYPNLQLREIAGHIMEFSQDQHGSRFIQLKLERATPAERQLVFNEILQAAYQLMVDVFGNYVIQKFFEFGSLEQKLALAERIRGHVLSLALQMYGCRVIQKALEFIPSDQQVINEMVRELDGHVLKCVKDQNGNHVVQKCIECVQPQSLQFIIDAFKGQVFALSTHPYGCRVIQRILEHCLPDQTLPILEELHQHTEQLVQL

SEQ ID NO: 634 - protein, 1 aa, Artificial Sequence
  Synthetic polypeptide
F

SEQ ID NO: 635 - protein, 1015 aa, Artificial Sequence
  Synthetic polypeptide
MSVACVLKRKAVLWQDSFSPHLKHHPQEPANPNMPVVLTSGTGSQAQPQPAANQALAAGTHSSPVPGSIGVAGRSQDDAMVDYFFQRQHGEQLGGGGSGGGGYNNSKHRWPTGDNIHAEHQVRSMDELNHDFQALALEGRAMGEQLLPGKKFWETDESSKDGPKGIFLGDQWRDSAWGTSDHSVSQPIMVQRRPGQSFHVNSEVNSVLSPRSESGGLGVSMVEYVLSSSPGDSCLRKGGFGPRDADSDENDKGEKKNKGTFDGDKLGDLKEEGDVMDKTNGLPVQNGIDADVKDFSRTPGNCQNSANEVDLLGPNQNGSEGLAQLTSTNGAKPVEDFSNMESQSVPLDPMEHVGMEPLQFDYSGTQVPVDSAAATVGLFDYNSQQQLFQRPNALAVQQLTAAQQQQYALAAAHQPHIAGLAPAAFVPNPYIISAAPPGTDPYTAGLAAAATLGPAVVPHQYYGVTPWGVYPASLFQQQAAAAAAATNSANQQTTPQAQQGQQQVLRGGASQRPLTPNQNQQGQQTDPLVAAAAVNSALAFGQGLAAGMPGYPVLAPAAYYDQTGALVVNAGARNGLGAPVRLVAPAPVIISSSAAQAGTQQPQPQPQQQPNNNLASSSFYGNNSLNSNSQSSSLFSQGSAQPANTSLGFGSSSSLGATLGSALGGFGTAVANSNTGSGSRRDSLTGSSDLYKRTSSSLTPIGHSFYNGLSFSSSPGPVGMPLPSQGPGHSQTPPPSLSSHGSSSSLNLGGLTNGSGRYISAAPGAEAKYRSASSASSLFSPSSTLFSSSRLRYGMSDVMPSGRSRLLEDFRNNRYPNLQLREIAGHIMEFSQDQHGSRFIQLKLERATPAERQLVFNEILQAAYQLMVDVFGNYVIQKFFEFGSLEQKLALAERIRGHVLSLALQMYGCRVIQKALEFIPSDQQVINEMVRELDGHVLKCVKDQNGNHVVQKCIECVQPQSLQFIIDAFKGQVFALSTHPYGCRVIQRILEHCLPDQTLPILEELHQHTEQLVQL

SEQ ID NO: 636 - protein, 1077 aa, Artificial Sequence
  Synthetic polypeptide
MPLPPPGPGPEPIPGCTAPTQSPVGRHVVGVKGVGGMSVACVLKRKAVLWQDSFSPHLKHHPQEPANPNMPVVLTSGTGSQAQPQPAANQALAAGTHSSPVPGSIGVAGRSQDDAMVDYFFQRQHGEQLGGGGSGGGGYNNSKHRWPTGDNIHAEHQVRSMDELNHDFQALALEGRAMGEQLLPGKKFWETDESSKDGPKGIFLGDQWRDSAWGTSDHSVSQPIMVQRRPGQSFHVNSEVNSVLSPRSESGGLGVSMVEYVLSSSPGDSCLRKGGFGPRDADSDENDKGEKKNKGTFDGDKLGDLKEEGDVMDKTNGLPVQNGIDADVKDFSRTPGNCQNSANEVDLLGPNQNGSEGLAQLTSTNGAKPVEDFSNMESQSVPLDPMEHVGMEPLQFDYSGTQVPVDSAAATVGLFDYNSQQQLFQRPNALAVQQLTAAQQQQYALAAAHQPHIGLAPAAFVPNPYIISAAPPGTDPYTAGLAAAATLGPAVVPHQYYGVTPWGVYPASLFQQQAAAAAAATNSANQQTTPQAQQGQQQVLRGGASQRPLTPNQNQQGQQTDPLVAAAAVNSALAFGQGLAAGMPGYPVLAPAAYYDQTGALVVNAGARNGLGAPVRLVAPAPVIISSSAAQAAVAAAAASANGAAGGLAGTTNGPFRPLGTQQPQPQPQQQPNNNLASSSFYGNNSLNSNSQSSSLFSQGSAQPANTSLGFGSSSSLGATLGSALGGFGTAVANSNTGSGSRRDSLTGSSDLYKRTSSSLTPIGHSFYNGLSFSSSPGPVGMPLPSQGPGHSQTPPPSLSSHGSSSSLNLGGLTNGSGRYISAAPGAEAKYRSASSASSLFSPSSTLFSSSRLRYGMSDVMPSGRSRLLEDFRNNRYPNLQLREIAGHIMEFSQDQHGSRFIQLKLERATPAERQLVFNEILQAAYQLMVDVFGNYVIQKFFEFGSLEQKLALAERIRGHVLSLALQMYGCRVIQKALEFIPSDQQVINEMVRELDGHVLKCVKDQNGNHVVQKCIECVQPQSLQFIIDAFKGQVFALSTHPYGCRVIQRILEHCLPDQTLPILEELHQHTEQLVQL

SEQ ID NO: 637 - protein, 897 aa, Artificial Sequence
  Synthetic polypeptide
MSVACVLKRKAVLWQDSFSPHLKHHPQEPANPNMPVVLTSGTGSQAQPQPAANQALAAGTHSSPVPGSIGVAGRSQDDAMVDYFFQRQHGEQLGGGGSGGGGYNNSKHRWPTGDNIHAEHQVRSMDELNHDFQALALEGRAMGEGPRDADSDENDKGEKKNKGTFDGDKLGDLKEEGDVMDKTNGLPVQNGIDADVKDFSRTPGNCQNSANEVDLLGPNQNGSEGLAQLTSTNGAKPVEDFSNMESQSVPLDPMEHVGMEPLQFDYSGTQVPVDSAAATVGLFDYNSQQQLFQRPNALAVQQLTAAQQQQYALAAAHQPHIGLAPAAFVPNPYIISAAPPGTDPYTAGLAAAATLGPAVVPHQYYGVTPWGVYPASLFQQQAAAAAAATNSANQQTTPQAQQGQQQVLRGGASQRPLTPNQNQQGQQTDPLVAAAAVNSALAFGQGLAAGMPAVAAAAASANGAAGGLAGTTNGPFRPLGTQQPQPQPQQQPNNNLASSSFYGNNSLNSNSQSSSLFSQGSAQPANTSLGFGSSSSLGATLGSALGGFGTAVANSNTGSGSRRDSLTGSSDLYKRTSSSLTPIGHSFYNGLSFSSSPGPVGMPLPSQGPGHSQTPPPSLSSHGSSSSLNLGGLTNGSGRYISAAPGAEAKYRSASSASSLFSPSSTLFSSSRLRYGMSDVMPSGRSRLLEDFRNNRYPNLQLREIAGHIMEFSQDQHGSRFIQLKLERATPAERQLVFNEILQAAYQLMVDVFGNYVIQKFFEFGSLEQKLALAERIRGHVLSLALQMYGCRVIQKALEFIPSDQQVINEMVRELDGHVLKCVKDQNGNHVVQKCIECVQPQSLQFIIDAFKGQVFALSTHPYGCRVIQRILEHCLPDQTLPILEELHQHTEQLVQL

SEQ ID NO: 638 - protein, 980 aa, Artificial Sequence
  Synthetic polypeptide
MPLPPPGPGPEPIPGCTAPTQSPVGRHVVGVKGVGGMSVACVLKRKAVLWQDSFSPHLKHHPQEPANPNMPVVLTSGTGSQAQPQPAANQALAAGTHSSPVPGSIGVAGRSQDDAMVDYFFQRQHGEQLGGGGSGGGGYNNSKHRWPTGDNIHAEHQVRSMDELNHDFQALALEGRAMGEGPRDADSDENDKGEKKNKGTFDGDKLGDLKEEGDVMDKTNGLPVQNGIDADVKDFSRTPGNCQNSANEVDLLGPNQNGSEGLAQLTSTNGAKPVEDFSNMESQSVPLDPMEHVGMEPLQFDYSGTQVPVDSAAATVGLFDYNSQQQLFQRPNALAVQQLTAAQQQQYALAAAHQPHIAGLAPAAFVPNPYIISAAPPGTDPYTAGLAAAATLGPAVVPHQYYGVTPWGVYPASLFQQQAAAAAAATNSANQQTTPQAQQGQQQVLRGGASQRPLTPNQNQQGQQTDPLVAAAAVNSALAFGQGLAAGMPGYPVLAPAAYYDQTGALVVNAGARNGLGAPVRLVAPAPVIISSSAAQAAVAAAAASANGAAGGLAGTTNGPFRPLGTQQPQPQPQQQPNNNLASSSFYGNNSLNSNSQSSSLFSQGSAQPANTSLGFGSSSSLGATLGSALGGFGTAVANSNTGSGSRRDSLTGSSDLYKRTSSSLTPIGHSFYNGLSFSSSPGPVGMPLPSQGPGHSQTPPPSLSSHGSSSSLNLGGLTNGSGRYISAAPGAEAKYRSASSASSLFSPSSTLFSSSRLRYGMSDVMPSGRSRLLEDFRNNRYPNLQLREIAGHIMEFSQDQHGSRFIQLKLERATPAERQLVFNEILQAAYQLMVDVFGNYVIQKFFEFGSLEQKLALAERIRGHVLSLALQMYGCRVIQKALEFIPSDQQNEMVRELDGHVLKCVKDQNGNHVVQKCIECVQPQSLQFIIDAFKGQVFALSTHPYGCRVIQRILEHCLPDQTLPILEELHQHTEQLVQL

SEQ ID NO: 639 - protein, 52 aa, Artificial Sequence
  Synthetic polypeptide
FIIDAFKGQVFALSTHPYGCRVIQRILEHCLPDQTLPILEELHQHTEQLVQL

SEQ ID NO: 640 - protein, 14 aa, Artificial Sequence
  Synthetic polypeptide
WNFPKTSMGPDSFS

SEQ ID NO: 641 - protein, 59 aa, Artificial Sequence
  Synthetic polypeptide
MNSGRPETMENLPALYTIFQGEILARCWHLALGLSNLQNYEPNKFHFFINYPVSGILLK

SEQ ID NO: 642 - protein, 610 aa, Artificial Sequence
  Synthetic polypeptide
MWVSWAPGLWLLGLWATFGHGANTGAQCPPSQQEGLKLEHSSSLPANVTGFNLIHRLSLMKTSAIKKIRNPKGPLILRLGAAPVTQPTRRVFPRGLPEEFALVLTLLLKKHTHQKTWYLFQVTDANGYPQISLEVNSQERSLELRAQGQDGDFVSCIFPVPQLFDLRWHKLMLSVAGRVASVHVDCSSASSQPLGPRRPMRPVGHVFLGLDAEQGKPVSFDLQQVHIYCDPELVLEEGCCEILPAGCPPETSKARRDTQSNELIEINPQSEGKVYTRCFCLEEPQNSEVDAQLTGRISQKAERGAKVHQETAADECPPCVHGARDSNVTLAPSGPKGGKGERGLPGPPGSKGEKGARGNDCVRISPDAPLQCAEGPKGEKGESGALGPSGLPGSTGEKGQKGEKGDGGIKGVPGKPGRDGRPGEICVIGPKGQKGDPGFVGPEGLAGEPGPPGLPGPPGIGLPGTPGDPGGPPGPKGDKGSSGIPGKEGPGGKPGKPGVKGEKGDPCEVCPTLPEGFQNFVGLPGKPGPKGEPGDPVPARGDPGIQGIKGEKGEPCLSCSSVVGAQHLVSSTGASGDVGSPGFGLPGLPGRAGVPGLKGEKYSPLFKMMI

SEQ ID NO: 643 - protein, 335 aa, Artificial Sequence
  Synthetic polypeptide
MKPILLQGHERSITQIKYNREGDLLFTVAKDPIVNVWYSVNGERLGTYMGHTGAVWCVDADWDTKHVLTGSADNSCRLWDCETGKQLALLKTNSAVRTCGFDFGGNIIMFSTDKQMGYQCFVSFFDLRDPSQIDNNEPYMKIPCNDSKITSAVWGPLGECIIAGHESGELNQYSAKSGEVLVNVKEHSRQINDIQLSRDMTMFVTASKDNTAKLFDSTTLEHQKTFRTERPVNSAALSPNYDHVVLGGGQEAMDVTTTSTRIGKFEARFFHLAFEEEFGRVKGHFGPINSVAFHPDGKRQADHLRSGVQDKPGQHGETLSLLKIQKLAGHGGGCL

SEQ ID NO: 644 - protein, 308 aa, Artificial Sequence
  Synthetic polypeptide
MKPILLQGHERSITQIKYNREGDLLFTVAKDPIVNVWYSVNGERLGTYMGHTGAVWCVDADWDTKHVLTGSADNSCRLWDCETGKQLALLKTNSAVRTCGFDFGGNIIMFSTDKQMGYQCFVSFFDLRDPSQIDNNEPYMKIPCNDSKITSAVWGPLGECIIAGHESGELNQYSAKSGEVLVNVKEHSRQINDIQLSRDMTMFVTASKDNTAKLFDSTTLEHQKTFRTERPVNSAALSPNYDHVVLGGGQEAMDVTTTSTRIGKFEARFFHLAFEEEFGRVKGHFGPINSVAFHPDGKRQADHLRSGA

SEQ ID NO: 645 - protein, 308 aa, Artificial Sequence
  Synthetic polypeptide
MKPILLQGHERSITQIKYNREGDLLFTVAKDPIVNVWYSVNGERLGTYMGHTGAVWCVDADWDTKHVLTGSADNSCRLWDCETGKQLALLKTNSAVRTCGFDFGGNIIMFSTDKQMGYQCFVSFFDLRDPSQIDNNEPYMKIPCNDSKITSAVWGPLGECIIAGHESGELNQYSAKSGEVLVNVKEHSRQINDIQLSRDMTMFVTASKDNTAKLFDSTTLEHQKTFRTERPVNSAALSPNYDHVVLGGGQEAMDVTTTSTRIGKFEARFFHLAFEEEFGRVKGHFGPINSVAFHPDGKRQADHLRSGV

SEQ ID NO: 646 - protein, 104 aa, Artificial Sequence
  Synthetic polypeptide
MADKEAFDDAVEERVINEEYKIWKKNTPFLYDLVMTHALEWPSLTAQWLPDVTRPEGKDFSIHRLVLGTHTSDEQNHLVIASVQLPNDDAQFDASHYDSEKGAA

SEQ ID NO: 647 - protein, 105 aa, Artificial Sequence
  Synthetic polypeptide
MADKEAAFDDAVEERVINEEYKIWKKNTPFLYDLVMTHALEWPSLTAQWLPDVTRPEGKDFSIHRLVLGTHTSDEQNHLVIASVQLPNDDAQFDASHYDSEKGAA

SEQ ID NO: 648 - protein, 70 aa, Artificial Sequence
  Synthetic polypeptide
MTHALEWPSLTAQWLPDVTRPEGKDFSIHRLVLGTHTSDEQNHLVIASVQLPNDDAQFDASHYDSEKGAA

SEQ ID NO: 649 - protein, 313 aa, Artificial Sequence
  Synthetic polypeptide
MMCSRVPSEQSSGTSLLPKDGAPFSWDSLDEDGLDDSLLELSEGEEDDGDVNYTEEEIDALLKEDDPSYEQSSGEDDGGHVEKGERGSQILLDTPREKNSSYSLGPVAETPDLFKLPQLSTSSGHGPAHTKPLNRRSVLEKNLIKVTVAPFNPTVCDALLDKDETDSSKDTEKLSSLGEEMREDGLSPNESKLCTESEGISPNNSAWNGPQLSSSNNNFQQTVSDKNMPDSENPTSVFSRISDHSETPNMELSCRNGGSHKSSCEMRSLVVSTSSNKQDVLNKDSGKMKGHERRLGKVIPVLQTKTRVILKAK

SEQ ID NO: 650 - protein, 312 aa, Artificial Sequence
  Synthetic polypeptide
MMCSRVPSEQSSGTSLLPKDGAPFSWDSLDEDGLDDSLLELSEGEEDDGDVNYTEEEIDALLKEDDPSYEQSSGEDDGGHVEKGERGSQILLDTPREKNSSYSLGPVAETPDLFKLPQLSTSSGHGPAHTKPLNRRSVLEKNLIKVTVAPFNPTVCDALLDKDETDSSKDTEKLSSLGEEMREDGLSPNESKLCTESEGISPNNSAWNGPQLSSSNNNFQQTVSDKNMPDSENPTSVFSRISDHSETPNMELSCRNGGSHKSSCEMRSLVVSTSSNKDVLNKDSGKMKGHERRLGKVIPVLQTKTRVILKAK

SEQ ID NO: 651 - protein, 355 aa, Artificial Sequence
  Synthetic polypeptide
MMCSRVPSEQSSGTSLLPKDGAPFSWDSLDEDGLDDSLLELSEGEEDDGDVNYTEEEIDALLKEDDPSYEQSSGEDDGGHVEKGERGSQILLDTPREKNSSYSLGPVAETPDLFKLPQLSTSSGHGPAHTKPLNRRSVLEKNLIKVTVAPFNPTVCDALLDKDETDSSKDTEKLSSLGEEMREDGLSPNESKLCTESEGISPNNSAWNGPQLSSSNNNFQQTVSDKNMPDSENPTSVFSRISDHSETPNMELSCRNGGSHKSSCEMRSLVVSTSSNKQDVLNKDSGKMKGHERRLGKVIPVLQTKTRTNVPTFSQSNLEQQKQLYLRSVIAHIEDPEDTNQGAVAHACNPSTLGG

SEQ ID NO: 652 - protein, 354 aa, Artificial Sequence
  Synthetic polypeptide
MMCSRVPSEQSSGTSLLPKDGAPFSWDSLDEDGLDDSLLELSEGEEDDGDVNYTEEEIDALLKEDDPSYEQSSGEDDGGHVEKGERGSQILLDTPREKNSSYSLGPVAETPDLFKLPQLSTSSGHGPAHTKPLNRRSVLEKNLIKVTVAPFNPTVCDALLDKDETDSSKDTEKLSSLGEEMREDGLSPNESKLCTESEGISPNNSAWNGPQLSSSNNNFQQTVSDKNMPDSENPTSVFSRISDHSETPNMELSCRNGGSHKSSCEMRSLVVSTSSNKDVLNKDSGKMKGHERRLGKVIPVLQTKTRTNVPTFSQSNLEQQKQLYLRSVIAHIEDPEDTNQGAVAHACNPSTLGG

SEQ ID NO: 653 - protein, 42 aa, Artificial Sequence
  Synthetic polypeptide
MAGYLSESDFVMVEEGFSTRDLLKELTLGASQATTKLPSNIC

SEQ ID NO: 654 - protein, 789 aa, Artificial Sequence
  Synthetic polypeptide
MAQRHSDSSLEEKLLGHRFHSELRLDAGGNPASGLPMVRGSPRVRDDAAFQPQVPAPPQPRPPGHEEPWPIVLSTESPAALKLGTQQLIPKSLAVASKAKTPARHQSFGAAVLSREAARRDPKLLPAPSFSLDDMDVDKDPGGMLRRNLRNQSYRAAMKGLGKPGGQGDAIQLSPKLQALAEEPSQPHTRSPAKNKKTLGRKRGHKGSFKDDPQLYQEIQERGLNTSQESDDDILDESSSPEGTQKVDATIVVKSYRPAQVTWSQLPEVVELGILDQLSTEERKRQEAMFEILTSEFSYQHSLSILVEEFLQSKELRATVTQMEHHHLFSNILDVLGASQRFFEDLEQRHKAQVLVEDISDILEEHAEKHFHPYIAYCSNEVYQQRTLQKLISSNAAFREALREIERRPACGGLPMLSFLILPMQRVTRLPLLMDTLCLKTQGHSERYKAASRALKAISKLVRQCNEGAHRMERMEQMYTLHTQLDFSKVKSLPLISASRWLLKRGELFLVEETGLFRKIASRPTCYLFLFNDVLVVTKKKSEESYMVQDYAQMNHIQVEKIEPSELPLPGGGNRSSSVPHPFQVTLLRNSEGRQEQLLLSSDSASDRARWIVALTHSERQWQGLSSKGDLPQVEITKAFFAKQADEVTLQQADVVLVLQQEDVRTCSIACTHTMDDYSAIKKNEIMTVPATWMELKTTILGEITQKQSQILHALPYMWELNNVYRQTERGITDIGDWKGGRVAGRDEKLLHGQNVHYSVMVTLKPRLFHHMLCPCNKTACVPCNFINV

SEQ ID NO: 655 - protein, 501 aa, Artificial Sequence
  Synthetic polypeptide
MFEILTSEFSYQHSLSILVEEFLQSKELRATVTQMEHHHLFSNILDVLGASQRFFEDLEQRHKAQVLVEDISDILEEHAEKHFHPYIAYCSNEVYQQRTLQKLISSNAAFREALREIERRPACGGLPMLSFLILPMQRVTRLPLLMDTLCLKTQGHSERYKAASRALKAISKLVRQCNEGAHRMERMEQMYTLHTQLDFSKVKSLPLISASRWLLKRGELFLVEETGLFRKIASRPTCYLFLFNDVLVVTKKKSEESYMVQDYAQMNHIQVEKIEPSELPLPGGGNRSSSVPHPFQVTLLRNSEGRQEQLLLSSDSASDRARWIVALTHSERQWQGLSSKGDLPQVEITKAFFAKQADEVTLQQADVVLVLQQEDVRTCSIACTHTMDDYSAIKKNEIMTVPATWMELKTTILGEITQKQSQILHALPYMWELNNVYRQTERGITDIGDWKGGRVAGRDEKLLHGQNVHYSVMVTLKPRLFHHMLCPCNKTACVPCNFINV

SEQ ID NO: 656 - protein, 493 aa, Artificial Sequence
  Synthetic polypeptide
MFASDLLRALDCCPGAGSSGLLPQLGPRQLLAFTVNCLGNHRYLGFFEDLEQRHKAQVLVEDISDILEEHAEKHFHPYIAYCSNEVYQQRTLQKLISSNAAFREALREIERRPACGGLPMLSFLILPMQRVTRLPLLMDTLCLKTQGHSERYKAASRALKAISKLVRQCNEGAHRMERMEQMYTLHTQLDFSKVKSLPLISASRWLLKRGELFLVEETGLFRKIASRPTCYLFLFNDVLVVTKKKSEESYMVQDYAQMNHIQVEKIEPSELPLPGGGNRSSSVPHPFQVTLLRNSEGRQEQLLLSSDSASDRARWIVALTHSERQWQGLSSKGDLPQVEITKAFFAKQADEVTLQQADVVLVLQQEDVRTCSIACTHTMDDYSAIKKNEIMTVPATWMELKTTILGEITQKQSQILHALPYMWELNNVYRQTERGITDIGDWKGGRVAGRDEKLLHGQNVHYSVMVTLKPRLFHHMLCPCNKTACVPCNFINV

SEQ ID NO: 657 - protein, 349 aa, Artificial Sequence
  Synthetic polypeptide
MRLISIAPGPRWQVQSHHPRSAGQNCTFQLHGPNGTVESPGFPYGYPNYANCTWTITAEEQHRIQLVFQSFALEEDFDVLSVFDGPPQPENLRTRLTGFQLPATIVSAATTLSLRLISDYAVSAQGFHATYEVLPSHTCGNPGRLPNGIQQGSTFNLGDKVRYSCNLGFFLEGHAVLTCHAGSENSATWDFPLPSCRADDACGGTLRGQSGIISSPHFPSEYHNNADCTWTILAELGDTIALVFIDFQLEDGYDFLEVTGTEGSSLWFTGASLPAPVISSKNWLRLHFTSDGNHRQRGFSAQYQVKKQIELKSRGVKLMPSKDNSQKTSVCFHLTPRACLSLSSLLPCV

SEQ ID NO: 658 - protein, 389 aa, Artificial Sequence
  Synthetic polypeptide
MPRSRGRELGRCGCPAGRARGETGISALVPGAGSRWGRPPPPTPPPLLLLLGCGLLSVSAAAGQNCTFQLHGPNGTVESPGFPYGYPNYANCTWTITAEEQHRIQLVFQSFALEEDFDVLSVFDGPPQPENLRTRLTGFQLPATIVSAATTLSLRLISDYAVSAQGFHATYEVLPSHTCGNPGRLPNGIQQGSTFNLGDKVRYSCNLGFFLEGHAVLTCHAGSENSATWDFPLPSCRADDACGGTLRGQSGIISSPHFPSEYHNNADCTWTILAELGDTIALVFIDFQLEDGYDFLEVTGTEGSSLWFTGASLPAPVISSKNWLRLHFTSDGNHRQRGFSAQYQVKKQIELKSRGVKLMPSKDNSQKTSVCFHLTPRACLSLSSLLPCV

SEQ ID NO: 659 - protein, 194 aa, Artificial Sequence
  Synthetic polypeptide
MGASRDRGLAALWCLGLLGGLARVAGTHYRYLWRGCYPCHLGQAGYPVSAGDQRPDVDECRTHNGGCQHRCVNTPGSYLCECKPGFRLHTDSRTCLAINSCALGNGGCQHHCVQLTITRHRCQCRPGFQLQEDGRHCVRRSPCANRNGSCMHRCQVVRGLARCECHVGYQLAADGKACEARCGGAVWSPSYSGI

SEQ ID NO: 660 - protein, 299 aa, Artificial Sequence
  Synthetic polypeptide
MSFLEEARAAGRAVVLALVLLLLPAVPVGASVPPRPLLPLQPGMPHVCAEQELTLVGRRQPCVQALSHTVPVWKAGCGWQAWCVGHERRTVYYMGYRQVYTTEARTVLRCCRGWMQQPDEEGCLSAECSASLCFHGGRCVPGSAQPCHCPPGFQGPRCQYDVDECRTHNGGCQHRCVNTPGSYLCECKPGFRLHTDSRTCLAINSCALGNGGCQHHCVQLTITRHRCQCRPGFQLQEDGRHCVRRSPCANRNGSCMHRCQVVRGLARCECHVGYQLAADGKACEARCGGAVWSPSYSGI

SEQ ID NO: 661 - protein, 306 aa, Artificial Sequence
  Synthetic polypeptide
MSFLEEARAAGRAVVLALVLLLLPAVPVGASVPPRPLLPLQPGMPHVCAEQELTLVGRRQPCVQALSHTVPVWKAGCGWQAWCVGHERRTVYYMGYRQVYTTEARTVLRCCRGWMQQPDEEGCLSDVGECANANGGCAGRCRDTVGGFYCRWPPPSHQLQGDGETCQDVDECRTHNGGCQHRCVNTPGSYLCECKPGFRLHTDSRTCLAINSCALGNGGCQHHCVQLTITRHRCQCRPGFQLQEDGRHCVRRSPCANRNGSCMHRCQVVRGLARCECHVGYQLAADGKACEARCGGAVWSPSYSGI

SEQ ID NO: 662 - protein, 140 aa, Artificial Sequence
  Synthetic polypeptide
MSFLEEARAAGRAVVLALVLLLLPAVPVGASVPPRPLLPLQPGMPHVCAEQELTLVGRRQPCVQALSHTVPVWKAGCGWQAWCVGHERRTVYYMGYRQVYTTEARTVLRCCRGWMQQPDEEGCLSGIFRAFNMRMCPVDS

SEQ ID NO: 663 - protein, 30 aa, Artificial Sequence
  Synthetic polypeptide
MAEREVESGPRKRFEQKSGAVFDEIVENSL

SEQ ID NO: 664 - protein, 75 aa, Artificial Sequence
  Synthetic polypeptide
MEKRLGVKPNPASWILSGYYWQTSAKWLRSLYLFYTCFCFSVLWLSTEVPRTHIGERISCSTNGPGKTGYSYTEE

SEQ ID NO: 665 - protein, 1329 aa, Artificial Sequence
  Synthetic polypeptide
MTGEVGSEVHLEINDPNVISQEEADSPSDSGQGSYETIGPLSEGDSDEEIFVSKKLKNRKVLQDSDSETEDTNASPEKTTYDSAEEENKENLYAGKNTKIKRIYKTVADSDESYMEKSLYQENLEAQVKPCLELSLQSGNSTDFTTDRKSSKKHIHDKEGTAGKAKVKSKRRLEKEERKMEKIRQLKKKETKNQEDDVEQPFNDSGCLLVDKDLFETGLEDENNSPLEDEESLESIRAAVKNKVKKHKKKEPSLESGVHSFEEGSELSKGTTRKERKAARLSKEALKQLHSETQRLIRESALNLPYHMPENKTIHDFFKRKPRPTCHGNAMALLKSSKYQSSHHKEIIDTANTTEMNSDHHSKGSEQTTGAENEVETNALPVVSKETQIITGSDESCRKDLVKNEELEIQEKQKQSDIRPSPGDSSVLQQESNFLGNNHSEECQVGGLVAFEPHALEGEGPQNPEETDEKVEEPEQQNKSSAVGPPEKVRRFTLDRLKQLGVDVSIKPRLGADEDSFVILEPETNRELEALKQRFWKHANPAAKPRAGQTVNVNVIVKDMGTDGKEELKADVVPVTLAPKKLDGASHTKPGEKLQVLKAKLQEAMKLRRFEERQKRQALFKLDNEDGFEEEEEEEEEMTDESEEDGEEKVEKEEKEEELEEEEEKEEEEEEEGNQETAEFLLSSEEIETKDEKEMDKENNDGSSEIGKAVGFLSVPKSLSSDSTLLLFKDSSSKMGYFPTEEKSETDENSGKQPSKLDEDDSCSLLTKESSHNSSFELIGSTIPSYQPCNRQTGRGTSFFPTAGGFRSPSPGLFRASLVSSASKSSGKLSEPSLPIEDSQDLYNASPEPKTLFLGAGDFQFCLEDDTQSQLLDADGFLNVRNHRNQYQALKPRLPLASMDENAMDANMDELLDLCTGKFTSQAEKHLPRKSDKKENMEELLNLCSGKFTSQDASTPASSELNKQEKESSMGDPMEEALALCSGSFPTDKEEEDEEEEFGDFRLVSNDNEFDSDEDEHSDSGNDLALEDHEDDDEEELLKRSEKLKRQMRLRKYLEDEAEVSGSDVGSEDEYDGEEIDEYEEDVIDEVLPSDEELQSQIKKIHMKTMLDDDKRQLRLYQERYLADGDLHSDGPGRMRKFRWKNIDDASQMDLFHRDSDDDQTEEQLDESEARWRKERIEREQWLRDMAQQGKITAEEEEEIGEDSQFMILAKKVTAKALQKNASRPMVIQESKSLLRNPFEAIRPGSAQQVKTGSLLNQPKAVLQKLAALSDHNPSAPRNSRNFVFHTLSPVKAEAAKESSKSQELPKTTTSSDSALNSQHSTWHKVSTL

SEQ ID NO: 666 - protein, 1265 aa, Artificial Sequence
  Synthetic polypeptide
MTGEVGSEVHLEINDPNVISQEEADSPSDSGQGSYETIGPLSEGDSDEEIFVSKKLKNRKVLQDSDSETEDTNASPEKTTYDSAEEENKENLYAGKNTKIKRIYKTVADSDESYMEKSLYQENLEAQVKPCLELSLQSGNSTDFTTDRKSSKKHIHDKEGTAGKAKVKSKRRLEKEERKMEKIRQLKKKETKNQEDDVEQPFNDSGCLLVDKDLFETGLEDENNSPLEDEESLESIRAAVKNKVKKHKKKEPSLESGVHSFEEGSELSKGTTRKERKAARLSKEALKQLHSETQRLIRESALNLPYHMPENKTIHDFFKRKPRPTCHGNAMALLKSSKYQSSHHKEIIDTANTTEMNSDHHSKGSEQTTGAENEVETNALPVVSKETQIITGSDESCRKDLVKNEELEIQEKQKQSDIRPSPGDSSVLQQESNFLGNNHSEECQVGGLVAFEPHALEGEGPQNPEETDEKVEEPEQQNKSSAVGPPEKVRRFTLDRLKQLGVDVSIKPRLGADEDSFVILEPETNRGEKLQVLKAKLQEAMKLRRFEERQKRQALFKLDNEDGFEEEEEEEEEMTDESEEDGEEKVEKEEKEEELEEEEEKEEEEEEEGNQETAEFLLSSEEIETKDEKEMDKENNDGSSEIGKAVGFLSVPKSLSSDSTLLLFKDSSSKMGYFPTEEKSETDENSGKQPSKLDEDDSCSLLTKESSHNSSFELIGSTIPSYQPCNRQTGRGTSFFPTAGGFRSPSPGLFRASLVSSASKSSGKLSEPSLPIEDSQDLYNASPEPKTLFLGAGDFQFCLEDDTQSQLLDADGFLNVRNHRNQYQALKPRLPLASMDENAMDANMDELLDLCTGKFTSQAEKHLPRKSDKKENMEELLNLCSGKFTSQDASTPASSELNKQEKESSMGDPMEEALALCSGSFPTDKEEEDEEEEFGDFRLVSNDNEFDSDEDEHSDSGNDLALEDHEDDDEEELLKRSEKLKRQMRLRKYLEDEAEVSGSDVGSEDEYDGEEIDEYEEDVIDEVLPSDEELQSQIKKIHMKTMLDDDKRQLRLYQERYLADGDLHSDGPGRMRKFRWKNIDDASQMDLFHRDSDDDQTEEQLDESEARWRKERIEREQWLRDMAQQGKITAEEEEEIGEDSQFMILAKKVTAKALQKNASRPMVIQESKSLLRNPFEAIRPGSAQQVKTGSLLNQPKAVLQKLAALSDHNPSAPRNSRNFVFHTLSPVKAEAAKESSKSQELPKTTTSSDSALNSQHSTWHKVSTL

SEQ ID NO: 667 - protein, 1276 aa, Artificial Sequence
  Synthetic polypeptide
MTGEVGSEVHLEINDPNVISQEEADSPSDSGQGSYETIGPLSEGDSDEEIFVSKKLKNRKVLQDSDSETEDTNASPEKTTYDSAEEENKENLYAGKNTKIKRIYKTVADSDESYMEKSLYQENLEAQVKPCLELSLQSGNSTDFTTDRKSSKKHIHDKEGTAGKAKVKSKRRLEKEERKMEKIRQLKKKETKNQEDDVEQPFNDSGCLLVDKDLFETGLEDENNSPLEDEESLESIRAAVKNKVKKHKKKEPSLESGVHSFEEGSELSKGTTRKERKAARLSKEALKQLHSETQRLIRESALNLPYHMPENKTIHDFFKRKPRPTCHGNAMALLKSSKYQSSHHKEIIDTANTTEMNSDHHSKGSEQTTGAENEVETNALPVVSKETQIITGSDESCRKDLVKNEELEIQEKQKQSDIRPSPGDSSVLQQESNFLGNNHSEECQVGGLVAFEPHALEGEGPQNPEETDEKVEEPEQQNKSSAVGPPEKVRRFTLDRLKQLGVDVSIKPRLGADEDSFVILEPETNRELEALKQRFWKHANPAAKPRAGQTVNVNVIVKDMGTDGKEELKADVVPVTLAPKKLDGASHTKPGEKLQVLKAKLQEAMKLRRFEERQKRQALFKLDNEDGFEEEEEEEEEMTDESEEDGEEKVEKEEKEEELEEEEEKEEEEEEEGNQEDSSSKMGYFPTEEKSETDENSGKQPSKLDEDDSCSLLTKESSHNSSFELIGSTIPSYQPCNRQTGRGTSFFPTAGGFRSPSPGLFRASLVSSASKSSGKLSEPSLPIEDSQDLYNASPEPKTLFLGAGDFQFCLEDDTQSQLLDADGFLNVRNHRNQYQALKPRLPLASMDENAMDANMDELLDLCTGKFTSQAEKHLPRKSDKKENMEELLNLCSGKFTSQDASTPASSELNKQEKESSMGDPMEEALALCSGSFPTDKEEEDEEEEFGDFRLVSNDNEFDSDEDEHSDSGNDLALEDHEDDDEEELLKRSEKLKRQMRLRKYLEDEAEVSGSDVGSEDEYDGEEIDEYEEDVIDEVLPSDEELQSQIKKIHMKTMLDDDKRQLRLYQERYLADGDLHSDGPGRMRKFRWKNIDDASQMDLFHRDSDDDQTEEQLDESEARWRKERIEREQWLRDMAQQGKITAEEEEEIGEDSQFMILAKKVTAKALQKNASRPMVIQESKSLLRNPFEAIRPGSAQQVKTGSLLNQPKAVLQKLAALSDHNPSAPRNSRNFVFHTLSPVKAEAAKESSKSQELPKTTTSSDSALNSQHSTWHKVSTL

SEQ ID NO: 668 - protein, 752 aa, Artificial Sequence
  Synthetic polypeptide
MPHKIGFVVVSSSGHEDGFSARELMIHAPTVSGWRSPRFCQFPQEIVLQMVERCRIRKLQLLAHQYMISSKIEFYISESLPEYFAPYQAERFRRLGYVSLCDNEKTGCKARELKSVYVDAVGQFLKLIFHQNHVNKYNIYNQVALVAINIIGDPADFSDESNTASREKLIDHYLGHNSEDPALEGTYARKSDYISPLDDLAFDMYQDPEVAQIIRKLDERKREAVQKERYDYAKKLKQAIADLQKVGERLGRYEVEKRCAVEKEDYDLAKEKKQQMEQYRAEVYEQLELHSLLDAELMRRPFDLPLQPLARSGSPCHQKPMPSLPQLEERGTENQFAEPFLQEKPSSYSLTISPQHSAVDPLLPATDPHPKINAESLPYDERPLPAIRKHYGEAVVEPEMSNADISDARRGGMLGEPEPLTEKALREASSAIDVLGETLVAEAYCKTWSYREDALLALSKKLMEMPVGTPKEDLKNTLRASVFLVRRAIKDIVTSVFQASLKLLKMIITQYIPKHKLSKLETAHCVERTIPVLLTRTGDSSARLRVTAANFIQEMALFKEVKSLQIIPSYLVQPLKANSSVHLAMSQMGLLARLLKDLGTGSSGFTIDNVMKFSVSALEHRVYEVRETAVRIILDMYRQHQASILEYLPPDDSNTRRNILYKTIFEGFAKIDGRATDAEMRARRKAATEEAEKQKKEEIKALQGQLAALKEIQAEVQHFGRPRQEDHLISEVQDQPGQHSETSSLLKLKKKT

SEQ ID NO: 669 - protein, 5 aa, Artificial Sequence
  Synthetic polypeptide
GSWQH

SEQ ID NO: 670 - protein, 71 aa, Artificial Sequence
  Synthetic polypeptide
ARRKAATEEAEKQKKEEIKALQGQLAALKEIQAEVQHFGRPRQEDHLISEVQDQPGQHSETSSLLKLKKKT

SEQ ID NO: 671 - protein, 43 aa, Artificial Sequence
  Synthetic polypeptide
MTAPWRRLRSLVWEYWAGLLVCAFWIPDSRGMPHVIRIGSSSR

SEQ ID NO: 672 - protein, 66 aa, Artificial Sequence
  Synthetic polypeptide
MPHKIGFVVVSSSGHEDGFSARELMIHAPTVSGWRSPSGSRLQSQLLRMLRQEDPLSPEVQGCHEL

SEQ ID NO: 673 - protein, 249 aa, Artificial Sequence
  Synthetic polypeptide
MARRRRRACIALFLVLLFAFGTLMGLRTLKAPDGLPALGPGLELAPFERRPEGAPAPAARAPAAPAAPPPPPPPPRTADPGGSPGPAPAEAEPAPVQSLRVYSDLHAFYYSWYGSPRREGHYIHWDHVMVPHWDPKISASYPRGRHSPPDDLGSSFYPELGPYSSRDPEVLREHMTQLKEAAIGVLVLSWYPPGMADDNGEPSDDLVPAILDTAHQYSIQVAFHIQPYKGRDDITVHDNIKYIIDTWAW

SEQ ID NO: 674 - protein, 55 aa, Artificial Sequence
  Synthetic polypeptide
MADDNGEPSDDLVPAILDTAHQYSIQVAFHIQPYKGRDDITVHDNIKYIIDTWAW

SEQ ID NO: 675 - protein, 184 aa, Artificial Sequence
  Synthetic polypeptide
MATTKRVLYVGGLAEEVDDKVLHAAFIPFGDITDIQIPLDYETEKHRGFAFVEFELAEDAAAAIDNMNESELFGRTIRVNLAKPMRIKEGSSRPVWSDDDWLKKFSGKTLEENKEEEGSEPPKAETQEGEPIAKKARSNPQVYMDIKIGNKPAGRIQMLLRSDVVPMTAARCMVHACSPSYSRG

SEQ ID NO: 676 - protein, 118 aa, Artificial Sequence
  Synthetic polypeptide
MNESELFGRTIRVNLAKPMRIKEGSSRPVWSDDDWLKKFSGKTLEENKEEEGSEPPKAETQEGEPIAKKARSNPQVYMDIKIGNKPAGRIQMLLRSDVVPMTAARCMVHACSPSYSRG

SEQ ID NO: 677 - protein, 133 aa, Artificial Sequence
  Synthetic polypeptide
MATTKRVLYVGGLAEEVDDKVLHAAFIPFGDITDIQIPLDYETVWSDDDWLKKFSGKTLEENKEEEGSEPPKAETQEGEPIAKKARSNPQVYMDIKIGNKPAGRIQMLLRSDVVPMTAARCMVHACSPSYSRG

SEQ ID NO: 678 - protein, 187 aa, Artificial Sequence
  Synthetic polypeptide
MATTKRVLYVGGLAEEVDDKVLHAAFIPFGDITDIQIPLDYETEKHRGFAFVEFELAEDAAAAIDNMNESELFGRTIRVNLAKPMRIKEGSSRPVWSDDDWLKKFSGKTLEENKEEEGSEPPKAETQEGEPIAKKARSNPQVYMDIKIGNKPAGRIQMLLRSDVVPMTAGVWYMPVVPATQEAEAGE

SEQ ID NO: 679 - protein, 121 aa, Artificial Sequence
  Synthetic polypeptide
MNESELFGRTIRVNLAKPMRIKEGSSRPVWSDDDWLKKFSGKTLEENKEEEGSEPPKAETQEGEPIAKKARSNPQVYMDIKIGNKPAGRIQMLLRSDVVPMTAGVWYMPVVPATQEAEAGE

SEQ ID NO: 680 - protein, 136 aa, Artificial Sequence
  Synthetic polypeptide
MATTKRVLYVGGLAEEVDDKVLHAAFIPFGDITDIQIPLDYETVWSDDDWLKKFSGKTLEENKEEEGSEPPKAETQEGEPIAKKARSNPQVYMDIKIGNKPAGRIQMLLRSDVVPMTAGVWYMPVVPATQEAEAGE

SEQ ID NO: 681 - protein, 183 aa, Artificial Sequence
  Synthetic polypeptide
MATTKRVLYVGGLAEEVDDKVLHAAFIPFGDITDIQIPLDYETEKHRGFAFVEFELAEDAAAAIDNMNESELFGRTIRVNLAKPMRIKEGSSRPVWSDDDWLKKFSGKTLEENKEEEGSEPPKAETQEGEPIAKKARSNPQVYMDIKIGNKPAGRIQMLLRSDVVPMTAAWATRVKLRLKEKE

SEQ ID NO: 682 - protein, 117 aa, Artificial Sequence
  Synthetic polypeptide
MNESELFGRTIRVNLAKPMRIKEGSSRPVWSDDDWLKKFSGKTLEENKEEEGSEPPKAETQEGEPIAKKARSNPQVYMDIKIGNKPAGRIQMLLRSDVVPMTAAWATRVKLRLKEKE

SEQ ID NO: 683 - protein, 132 aa, Artificial Sequence
  Synthetic polypeptide
MATTKRVLYVGGLAEEVDDKVLHAAFIPFGDITDIQIPLDYETVWSDDDWLKKFSGKTLEENKEEEGSEPPKAETQEGEPIAKKARSNPQVYMDIKIGNKPAGRIQMLLRSDVVPMTAAWATRVKLRLKEKE

SEQ ID NO: 684 - protein, 213 aa, Artificial Sequence
  Synthetic polypeptide
MASPGCLWLLAVALLPWTCASRALQHLDPPAPLPLVIWHGMGDSCCNPLSMGAIKKMVEKKIPGIYVLSLEIGKTLMEDVENSFFLNVNSQVTTVCQALAKDPKLQQGYNAMGFSQGGQFLRAVAQRCPSPPMINLISVGGQHQGVFGLPRCPGESSHICDFIRKTLNAGAYSKVVQERLVQAEYWHDPIKEDVYRNHSIFLADINQERKKRK

SEQ ID NO: 685 - protein, 110 aa, Artificial Sequence
  Synthetic polypeptide
MASPGCLWLLAVALLPWTCASRALQHLDPPAPLPLVIWHGMGVFGLPRCPGESSHICDFIRKTLNAGAYSKVVQERLVQAEYWHDPIKEDVYRNHSIFLADINQERKKRK

SEQ ID NO: 686 - protein, 108 aa, Artificial Sequence
  Synthetic polypeptide
QQGYNAMGFSQGGQFLRAVAQRCPSPPMINLISVGGQHQGVFGLPRCPGESSHICDFIRKTLNAGAYSKVVQERLVQAEYWHDPIKEDVYRNHSIFLADINQERKKRK

SEQ ID NO: 687 - protein, 138 aa, Artificial Sequence
  Synthetic polypeptide
MASPGCLWLLAVALLPWTCASRALQHLDPPAPLPLVIWHGMGGQFLRAVAQRCPSPPMINLISVGGQHQGVFGLPRCPGESSHICDFIRKTLNAGAYSKVVQERLVQAEYWHDPIKEDVYRNHSIFLADINQERKKRK

SEQ ID NO: 688 - protein, 242 aa, Artificial Sequence
  Synthetic polypeptide
MASPGCLWLLAVALLPWTCASRALQHLDPPAPLPLVIWHGMGSRYVAQTGLELLASSNPPASSYQSAGMIGDSCCNPLSMGAIKKMVEKKIPGIYVLSLEIGKTLMEDVENSFFLNVNSQVTTVCQALAKDPKLQQGYNAMGFSQGGQFLRAVAQRCPSPPMINLISVGGQHQGVFGLPRCPGESSHICDFIRKTLNAGAYSKVVQERLVQAEYWHDPIKEDVYRNHSIFLADINQERKKRK

SEQ ID NO: 689 - protein, 147 aa, Artificial Sequence
  Synthetic polypeptide
MASPGCLWLLAVALLPWTCASRALQHLDPPAPLPLVIWHGMGDSCCNPLSMGAIKKMVEKKIPGIYVLSLEIGKTLMEDVENSFFLNVNSQVTTVCQALAKDPKLQQGYNAMGFSQGGQFLRAVAQRCPSPPMINLISVGGQHQGVD

SEQ ID NO: 690 - protein, 42 aa, Artificial Sequence
  Synthetic polypeptide
QQGYNAMGFSQGGQFLRAVAQRCPSPPMINLISVGGQHQGVD

SEQ ID NO: 691 - protein, 72 aa, Artificial Sequence
  Synthetic polypeptide
MASPGCLWLLAVALLPWTCASRALQHLDPPAPLPLVIWHGMGGQFLRAVAQRCPSPPMINLISVGGQHQGVD

SEQ ID NO: 692 - protein, 176 aa, Artificial Sequence
  Synthetic polypeptide
MASPGCLWLLAVALLPWTCASRALQHLDPPAPLPLVIWHGMGSRYVAQTGLELLASSNPPASSYQSAGMIGDSCCNPLSMGAIKKMVEKKIPGIYVLSLEIGKTLMEDVENSFFLNVNSQVTTVCQALAKDPKLQQGYNAMGFSQGGQFLRAVAQRCPSPPMINLISVGGQHQGVD

SEQ ID NO: 693 - protein, 97 aa, Artificial Sequence
  Synthetic polypeptide
MGAIKKMVEKKIPGIYVLSLEIGKTLMEDVENSFFLNVNSQVTTVCQALAKDPKLQQGYNAMGFSQGGQFLRAVAQRCPSPPMINLISVGGQHQGVD

SEQ ID NO: 694 - protein, 7 aa, Artificial Sequence
  Synthetic polypeptide
MISFQPG

SEQ ID NO: 695 - protein, 356 aa, Artificial Sequence
  Synthetic polypeptide
MAEAPPRRLGLGPPPGDAPRAELVALTAVQSEQGEAGGGGSPRRLGLLGSPLPPGAPLPGPGSGSGSACGQRSSAAHKRYRRLQNWVYNVLERPRGWAFVYHVFIFLLVFSCLVLSVLSTIQEHQELANECLLILEFVMIVVFGLEYIVRVWSAGCCCRYRGWQGRFRFARKPFCVIDFIVFVASVAVIAAGTQGNIFATSALRSMRFLQILRMVRMDRRGGTWKLLGSVVYAHSKELITAWYIGFLVLIFASFLVYLAEKDANSDFSSYADSLWWGTITLTTIGYGDKTPHTWLGRVLAAGFALLGISFFALPAGILGSGFALKVQEQHRQKHFEKRRMPAANLIQSFLPRPYFL

SEQ ID NO: 696 - protein, 129 aa, Artificial Sequence
  Synthetic polypeptide
IFAGLQLPGAVCAVHYPGAPGTCQRVSPHLGIRDDRGFRLGVHRPGLVRRMLLPLPRMAGSLPLCQKALLCHRLHRVRGLGGRHRRGYPGQHLRHVRAAQHALPADPAHGAHGPPRRHLEAAGLSGLRA

SEQ ID NO: 697 - protein, 401 aa, Artificial Sequence
  Synthetic polypeptide
MQSYTPPSNEFKISMKLEAQDPRNTTSTCIATVVGLTGARLRLRLDGSDNKNDFWRLVDSAEIQPIGNCEKNGGMLQPPLVVIPKNPYPASDVNTEKPSIHSSTKTVLEHQPGQRGRKPGKKRGRTPKTLISHPISAPSKTAEPLKFPKKRGPKPGSKRKPRTLLNPPPASPTTSTPEPDTSTVPQDAATIPSSAMQAPTVCIYLNKNGSTGPHLDKKKVQQLPDHFGPARASVVLQQAVQACIDCAYHQKTVFSFLKQGHGGEVISAVFDREQHTLNLPAVNSITYVLRFLEKLCHNLRSDNLFGNQPFTQTHLSLTAIEYSHSHDRYLPGETFVLGNSLARSLEPHSDSMDSASNPTNLVSTSQRHRPLLSSCGLPPSTASAVRRLCSRECSSCANWRW

SEQ ID NO: 698 - protein, 539 aa, Artificial Sequence
  Synthetic polypeptide
MGSPLGHFTWDKYLKETCSVPAPVHCFKQSYTPPSNEFKISMKLEAQDPRNTTSTCIATVVGLTGARLRLRLDGSDNKNDFWRLVDSAEIQPIGNCEKNGGMLQPPLGFRLNASSWPMFLLKTLNGAEMAPIRIFHKEPPSPSHNFFKMGMKLEAVDRKNPHFICPATIGEVRGSEVLVTFDGWRGAFDYWCRFDSRDIFPVGWCSLTGDNLQPPGTKVVIPKNPYPASDVNTEKPSIHSSTKTVLEHQPGQRGRKPGKKRGRTPKTLISHPISAPSKTAEPLKFPKKRGPKPGSKRKPRTLLNPPPASPTTSTPEPDTSTVPQDAATIPSSAMQAPTVCIYLNKNGSTGPHLDKKKVQQLPDHFGPARASVVLQQAVQACIDCAYHQKTVFSFLKQGHGGEVISAVFDREQHTLNLPAVNSITYVLRFLEKLCHNLRSDNLFGNQPFTQTHLSLTAIEYSHSHDRYLPGETFVLGNSLARSLEPHSDSMDSASNPTNLVSTSQRHRPLLSSCGLPPSTASAVRRLCSRECSSCANWRW

SEQ ID NO: 699 - protein, 559 aa, Artificial Sequence
  Synthetic polypeptide
MLVCYSVLACEILWDLPCSIMGSPLGHFTWDKYLKETCSVPAPVHCFKQSYTPPSNEFKISMKLEAQDPRNTTSTCIATVVGLTGARLRLRLDGSDNKNDFWRLVDSAEIQPIGNCEKNGGMLQPPLGFRLNASSWPMFLLKTLNGAEMAPIRIFHKEPPSPSHNFFKMGMKLEAVDRKNPHFICPATIGEVRGSEVLVTFDGWRGAFDYWCRFDSRDIFPVGWCSLTGDNLQPPGTKVVIPKNPYPASDVNTEKPSIHSSTKTVLEHQPGQRGRKPGKKRGRTPKTLISHPISAPSKTAEPLKFPKKRGPKPGSKRKPRTLLNPPPASPTTSTPEPDTSTVPQDAATIPSSAMQAPTVCIYLNKNGSTGPHLDKKKVQQLPDHFGPARASVVLQQAVQACIDCAYHQKTVFSFLKQGHGGEVISAVFDREQHTLNLPAVNSITYVLRFLEKLCHNLRSDNLFGNQPFTQTHLSLTAIEYSHSHDRYLPGETFVLGNSLARSLEPHSDSMDSASNPTNLVSTSQRHRPLLSSCGLPPSTASAVRRLCSRECSSCANWRW

SEQ ID NO: 700 - protein, 498 aa, Artificial Sequence
  Synthetic polypeptide
MKLEAQDPRNTTSTCIATVVGLTGARLRLRLDGSDNKNDFWRLVDSAEIQPIGNCEKNGGMLQPPLGFRLNASSWPMFLLKTLNGAEMAPIRIFHKEPPSPSHNFFKMGMKLEAVDRKNPHFICPATIGEVRGSEVLVTFDGWRGAFDYWCRFDSRDIFPVGWCSLTGDNLQPPGTKVVIPKNPYPASDVNTEKPSIHSSTKTVLEHQPGQRGRKPGKKRGRTPKTLISHPISAPSKTAEPLKFPKKRGPKPGSKRKPRTLLNPPPASPTTSTPEPDTSTVPQDAATIPSSAMQAPTVCIYLNKNGSTGPHLDKKKVQQLPDHFGPARASVVLQQAVQACIDCAYHQKTVFSFLKQGHGGEVISAVFDREQHTLNLPAVNSITYVLRFLEKLCHNLRSDNLFGNQPFTQTHLSLTAIEYSHSHDRYLPGETFVLGNSLARSLEPHSDSMDSASNPTNLVSTSQRHRPLLSSCGLPPSTASAVRRLCSRECSSCANWRW

SEQ ID NO: 701 - protein, 512 aa, Artificial Sequence
  Synthetic polypeptide
MQSYTPPSNEFKISMKLEAQDPRNTTSTCIATVVGLTGARLRLRLDGSDNKNDFWRLVDSAEIQPIGNCEKNGGMLQPPLGFRLNASSWPMFLLKTLNGAEMAPIRIFHKEPPSPSHNFFKMGMKLEAVDRKNPHFICPATIGEVRGSEVLVTFDGWRGAFDYWCRFDSRDIFPVGWCSLTGDNLQPPGTKVVIPKNPYPASDVNTEKPSIHSSTKTVLEHQPGQRGRKPGKKRGRTPKTLISHPISAPSKTAEPLKFPKKRGPKPGSKRKPRTLLNPPPASPTTSTPEPDTSTVPQDAATIPSSAMQAPTVCIYLNKNGSTGPHLDKKKVQQLPDHFGPARASVVLQQAVQACIDCAYHQKTVFSFLKQGHGGEVISAVFDREQHTLNLPAVNSITYVLRFLEKLCHNLRSDNLFGNQPFTQTHLSLTAIEYSHSHDRYLPGETFVLGNSLARSLEPHSDSMDSASNPTNLVSTSQRHRPLLSSCGLPPSTASAVRRLCSRECSSCANWRW

SEQ ID NO: 702 - protein, 569 aa, Artificial Sequence
  Synthetic polypeptide
MQPNVIDWSDVRKHKYGHLSESASQYQEAADILDLGHFTWDKYLKETCSVPAPVHCFKQSYTPPSNEFKISMKLEAQDPRNTTSTCIATVVGLTGARLRLRLDGSDNKNDFWRLVDSAEIQPIGNCEKNGGMLQPPLGFRLNASSWPMFLLKTLNGAEMAPIRIFHKEPPSPSHNFFKMGMKLEAVDRKNPHFICPATIGEVRGSEVLVTFDGWRGAFDYWCRFDSRDIFPVGWCSLTGDNLQPPGTKVVIPKNPYPASDVNTEKPSIHSSTKTVLEHQPGQRGRKPGKKRGRTPKTLISHPISAPSKTAEPLKFPKKRGPKPGSKRKPRTLLNPPPASPTTSTPEPDTSTVPQDAATIPSSAMQAPTVCIYLNKNGSTGPHLDKKKVQQLPDHFGPARASVVLQQAVQACIDCAYHQKTVFSFLKQGHGGEVISAVFDREQHTLNLPAVNSITYVLRFLEKLCHNLRSDNLFGNQPFTQTHLSLTAIEYSHSHDRYLPGETFVLGNSLARSLEPHSDSMDSASNPTNLVSTSQRHRPLLSSCGLPPSTASAVRRLCSRECSSCANWRW

SEQ ID NO: 703 - protein, 417 aa, Artificial Sequence
  Synthetic polypeptide
MQSYTPPSNEFKISMKLEAQDPRNTTSTCIATVVGLTGARLRLRLDGSDNKNDFWRLVDSAEIQPIGNCEKNGGMLQPPLVVIPKNPYPASDVNTEKPSIHSSTKTVLEHQPGQRGRKPGKKRGRTPKTLISHPISAPSKTAEPLKFPKKRGPKPGSKRKPRTLLNPPPASPTTSTPEPDTSTVPQDAATIPSSAMQAPTVCIYLNKNGSTGPHLDKKKVQQLPDHFGPARASVVLQQAVQACIDCAYHQKTVFSFLKQGHGGEVISAVFDREQHTLNLPAVNSITYVLRFLEKLCHNLRSDNLFGNQPFTQTHLSLTAIEYSHSHDRYLPGETFVLGNSLARSLEPHSDSMDSASNPTNLVSTSQRHRPLLSSCGLPPSTASAVRRLCSRGLPHMQNVPHVQTGDGDTNLVFPQEC

SEQ ID NO: 704 - protein, 555 aa, Artificial Sequence
  Synthetic polypeptide
MGSPLGHFTWDKYLKETCSVPAPVHCFKQSYTPPSNEFKISMKLEAQDPRNTTSTCIATVVGLTGARLRLRLDGSDNKNDFWRLVDSAEIQPIGNCEKNGGMLQPPLGFRLNASSWPMFLLKTLNGAEMAPIRIFHKEPPSPSHNFFKMGMKLEAVDRKNPHFICPATIGEVRGSEVLVTFDGWRGAFDYWCRFDSRDIFPVGWCSLTGDNLQPPGTKVVIPKNPYPASDVNTEKPSIHSSTKTVLEHQPGQRGRKPGKKRGRTPKTLISHPISAPSKTAEPLKFPKKRGPKPGSKRKPRTLLNPPPASPTTSTPEPDTSTVPQDAATIPSSAMQAPTVCIYLNKNGSTGPHLDKKKVQQLPDHFGPARASVVLQQAVQACIDCAYHQKTVFSFLKQGHGGEVISAVFDREQHTLNLPAVNSITYVLRFLEKLCHNLRSDNLFGNQPFTQTHLSLTAIEYSHSHDRYLPGETFVLGNSLARSLEPHSDSMDSASNPTNLVSTSQRHRPLLSSCGLPPSTASAVRRLCSRGLPHMQNVPHVQTGDGDTNLVFPQEC

SEQ ID NO: 705 - protein, 575 aa, Artificial Sequence
  Synthetic polypeptide
MLVCYSVLACEILWDLPCSIMGSPLGHFTWDKYLKETCSVPAPVHCFKQSYTPPSNEFKISMKLEAQDPRNTTSTCIATVVGLTGARLRLRLDGSDNKNDFWRLVDSAEIQPIGNCEKNGGMLQPPLGFRLNASSWPMFLLKTLNGAEMAPIRIFHKEPPSPSHNFFKMGMKLEAVDRKNPHFICPATIGEVRGSEVLVTFDGWRGAFDYWCRFDSRDIFPVGWCSLTGDNLQPPGTKVVIPKNPYPASDVNTEKPSIHSSTKTVLEHQPGQRGRKPGKKRGRTPKTLISHPISAPSKTAEPLKFPKKRGPKPGSKRKPRTLLNPPPASPTTSTPEPDTSTVPQDAATIPSSAMQAPTVCIYLNKNGSTGPHLDKKKVQQLPDHFGPARASVVLQQAVQACIDCAYHQKTVFSFLKQGHGGEVISAVFDREQHTLNLPAVNSITYVLRFLEKLCHNLRSDNLFGNQPFTQTHLSLTAIEYSHSHDRYLPGETFVLGNSLARSLEPHSDSMDSASNPTNLVSTSQRHRPLLSSCGLPPSTASAVRRLCSRGLPHMQNVPHVQTGDGDTNLVFPQEC

SEQ ID NO: 706 - protein, 514 aa, Artificial Sequence
  Synthetic polypeptide
MKLEAQDPRNTTSTCIATVVGLTGARLRLRLDGSDNKNDFWRLVDSAEIQPIGNCEKNGGMLQPPLGFRLNASSWPMFLLKTLNGAEMAPIRIFHKEPPSPSHNFFKMGMKLEAVDRKNPHFICPATIGEVRGSEVLVTFDGWRGAFDYWCRFDSRDIFPVGWCSLTGDNLQPPGTKVVIPKNPYPASDVNTEKPSIHSSTKTVLEHQPGQRGRKPGKKRGRTPKTLISHPISAPSKTAEPLKFPKKRGPKPGSKRKPRTLLNPPPASPTTSTPEPDTSTVPQDAATIPSSAMQAPTVCIYLNKNGSTGPHLDKKKVQQLPDHFGPARASVVLQQAVQACIDCAYHQKTVFSFLKQGHGGEVISAVFDREQHTLNLPAVNSITYVLRFLEKLCHNLRSDNLFGNQPFTQTHLSLTAIEYSHSHDRYLPGETFVLGNSLARSLEPHSDSMDSASNPTNLVSTSQRHRPLLSSCGLPPSTASAVRRLCSRGLPHMQNVPHVQTGDGDTNLVFPQEC

SEQ ID NO: 707 - protein, 528 aa, Artificial Sequence
  Synthetic polypeptide
MQSYTPPSNEFKISMKLEAQDPRNTTSTCIATVVGLTGARLRLRLDGSDNKNDFWRLVDSAEIQPIGNCEKNGGMLQPPLGFRLNASSWPMFLLKTLNGAEMAPIRIFHKEPPSPSHNFFKMGMKLEAVDRKNPHFICPATIGEVRGSEVLVTFDGWRGAFDYWCRFDSRDIFPVGWCSLTGDNLQPPGTKVVIPKNPYPASDVNTEKPSIHSSTKTVLEHQPGQRGRKPGKKRGRTPKTLISHPISAPSKTAEPLKFPKKRGPKPGSKRKPRTLLNPPPASPTTSTPEPDTSTVPQDAATIPSSAMQAPTVCIYLNKNGSTGPHLDKKKVQQLPDHFGPARASVVLQQAVQACIDCAYHQKTVFSFLKQGHGGEVISAVFDREQHTLNLPAVNSITYVLRFLEKLCHNLRSDNLFGNQPFTQTHLSLTAIEYSHSHDRYLPGETFVLGNSLARSLEPHSDSMDSASNPTNLVSTSQRHRPLLSSCGLPPSTASAVRRLCSRGLPHMQNVPHVQTGDGDTNLVFPQEC

SEQ ID NO: 708 - protein, 585 aa, Artificial Sequence
  Synthetic polypeptide
MQPNVIDWSDVRKHKYGHLSESASQYQEAADILDLGHFTWDKYLKETCSVPAPVHCFKQSYTPPSNEFKISMKLEAQDPRNTTSTCIATVVGLTGARLRLRLDGSDNKNDFWRLVDSAEIQPIGNCEKNGGMLQPPLGFRLNASSWPMFLLKTLNGAEMAPIRIFHKEPPSPSHNFFKMGMKLEAVDRKNPHFICPATIGEVRGSEVLVTFDGWRGAFDYWCRFDSRDIFPVGWCSLTGDNLQPPGTKVVIPKNPYPASDVNTEKPSIHSSTKTVLEHQPGQRGRKPGKKRGRTPKTLISHPISAPSKTAEPLKFPKKRGPKPGSKRKPRTLLNPPPASPTTSTPEPDTSTVPQDAATIPSSAMQAPTVCIYLNKNGSTGPHLDKKKVQQLPDHFGPARASVVLQQAVQACIDCAYHQKTVFSFLKQGHGGEVISAVFDREQHTLNLPAVNSITYVLRFLEKLCHNLRSDNLFGNQPFTQTHLSLTAIEYSHSHDRYLPGETFVLGNSLARSLEPHSDSMDSASNPTNLVSTSQRHRPLLSSCGLPPSTASAVRRLCSRGLPHMQNVPHVQTGDGDTNLVFPQEC

SEQ ID NO: 709 - protein, 473 aa, Artificial Sequence
  Synthetic polypeptide
MSQEKNEMFESEWSKEREREKQLASGLDTAEKALKVESEELQKSKSELICLYNEVHNLPGESESKDHFLIACDLLQRENSELETKVLKLSQEFAQLNHFTLGGKTAPSNLITSENTCKDPESNEPILETEIQSRKEETEELCPKLGERKQKEIPEESVKEGSFPREGQKEEGSQQNRDMKDEEKEQQLTMKPEEIVRLREELSHINQSLLQSQSSGDSSDDSGAQHPSSGEKLKYNQQGEVQQLHQNLHRLQILCNSAENELRYERGQNLDLKQHNSLLQEENIKIKIELKHAQQKLLDSTKMCSSLTAEYKHCQQKIKELELEVLKHTQSIKSQNNLQEKLVQEKSKVADAEEKILDLQRKLEHAHKVCLTDTCISEKQQLEEKIKEATQNEAKVKQQYQEEQQKRKLLYQNVDELHRQVRTLQDKENLLEMTCSQQQSRIQQQEALLKQLENEKRKYDESRVFLYSSARTA

SEQ ID NO: 710 - protein, 171 aa, Artificial Sequence
  Synthetic polypeptide
MCSSLTAEYKHCQQKIKELELEVLKHTQSIKSQNNLQEKLVQEKSKVADAEEKILDLQRKLEHAHKVCLTDTCISEKQQLEEKIKEATQNEAKVKQQYQEEQQKRKLLYQNVDELHRQVRTLQDKENLLEMTCSQQQSRIQQQEALLKQLENEKRKYDESRVFLYSSARTA

SEQ ID NO: 711 - protein, 262 aa, Artificial Sequence
  Synthetic polypeptide
MIHPPRPPKVLGLQHPSSGEKLKYNQQGEVQQLHQNLHRLQILCNSAENELRYERGQNLDLKQHNSLLQEENIKIKIELKHAQQKLLDSTKMCSSLTAEYKHCQQKIKELELEVLKHTQSIKSQNNLQEKLVQEKSKVADAEEKILDLQRKLEHAHKVCLTDTCISEKQQLEEKIKEATQNEAKVKQQYQEEQQKRKLLYQNVDELHRQVRTLQDKENLLEMTCSQQQSRIQQQEALLKQLENEKRKYDESRVFLYSSARTA

SEQ ID NO: 712 - protein, 478 aa, Artificial Sequence
  Synthetic polypeptide
MSQEKNEMFESEWSKEREREKQLASGLDTAEKALKVESEELQKSKSELICLYNEVHNLPGESESKDHFLIACDLLQRENSELETKVLKLSQEFAQLNHFTLGGKTAPSNLITSENTCKDPESNEPILETEIQSRKEETEELCPKLGERKQKEIPEESVKEGSFPREGQKEEGSQQNRDMKDEEKEQQLTMKPEEIVRLREELSHINQSLLQSQSSGDSSDDSGAQHPSSGEKLKYNQQGEVQQLHQNLHRLQILCNSAENELRYERGQNLDLKQHNSLLQEENIKIKIELKHAQQKLLDSTKMCSSLTAEYKHCQQKIKELELEVLKHTQSIKSQNNLQEKLVQEKSKVADAEEKILDLQRKLEHAHKVCLTDTCISEKQQLEEKIKEATQNEAKVKQQYQEEQQKRKLLYQNVDELHRQVRTLQDKENLLEMTCSQQQSRIQQQEALLKQLENEKRKYDEAHKWKEISLRRDLGLWT

SEQ ID NO: 713 - protein, 176 aa, Artificial Sequence
  Synthetic polypeptide
MCSSLTAEYKHCQQKIKELELEVLKHTQSIKSQNNLQEKLVQEKSKVADAEEKILDLQRKLEHAHKVCLTDTCISEKQQLEEKIKEATQNEAKVKQQYQEEQQKRKLLYQNVDELHRQVRTLQDKENLLEMTCSQQQSRIQQQEALLKQLENEKRKYDEAHKWKEISLRRDLGLWT

SEQ ID NO: 714 - protein, 267 aa, Artificial Sequence
  Synthetic polypeptide
MIHPPRPPKVLGLQHPSSGEKLKYNQQGEVQQLHQNLHRLQILCNSAENELRYERGQNLDLKQHNSLLQEENIKIKIELKHAQQKLLDSTKMCSSLTAEYKHCQQKIKELELEVLKHTQSIKSQNNLQEKLVQEKSKVADAEEKILDLQRKLEHAHKVCLTDTCISEKQQLEEKIKEATQNEAKVKQQYQEEQQKRKLLYQNVDELHRQVRTLQDKENLLEMTCSQQQSRIQQQEALLKQLENEKRKYDEAHKWKEISLRRDLGLWT

SEQ ID NO: 715 - protein, 46 aa, Artificial Sequence
  Synthetic polypeptide
MEDAAAPGRTEGVLERQGAPPAAGQGGAVAHTCNPSTLGGQGGWII

SEQ ID NO: 716 - protein, 97 aa, Artificial Sequence
  Synthetic polypeptide
MEDAAAPGRTEGVLERQGAPPAAGQGGALVELTPTPGGLALVSPYHTHRAGDPLDLVALAEQVQKVPWLTLVIPALWEAKVGGSFEVRSSRPVWPTW

SEQ ID NO: 717 - protein, 124 aa, Artificial Sequence
  Synthetic polypeptide
MEDAAAPGRTEGVLERQGAPPAAGQGGMRGGSQQGEVSSREAAGLGAPREADGGSSRLVFLGVCRRSPGGAHPDPRRPGPGEPLPHPPGRGPLRPRGARRAGAEGAVAHTCNPSTLGGQGGWII

SEQ ID NO: 718 - protein, 40 aa, Artificial Sequence
  Synthetic polypeptide
MDPPARKEKTKVKESVSRVEKAKQKSAQQELKQRQRAETP

SEQ ID NO: 719 - protein, 59 aa, Artificial Sequence
  Synthetic polypeptide
MDPPARKEKTKVKESVSRVEKAKQKSAQQELKQRQRAEADPLRAVVLYLPIPTWIRVLR

SEQ ID NO: 720 - protein, 588 aa, Artificial Sequence
  Synthetic polypeptide
MSAVVAQTLHVFGLRSHVANNIFYFDEQIIIFPSGNHCVKYNVDQKWQKFIPGSEKSQGMLALSISPNRRYLAISETVQEKPAITIYELSSIPCRKRKVLNNFDFQVQKFISMAFSPDSKYLLAQTSPPESNLVYWLWEKQKVMAIVRIDTQNNPVYQVSFSPQDNTQVCVTGNGMFKLLRFAEGTLKQTSFQRGEPQNYLAHTWVADDKIVVGTDTGKLFLFESGDQRWETSIMVKEPTNGSKSLDVIQESESLIEFPPVSSPLPSYEQMVAASSHSQMSMPQVFAIAAYSKGFACSAGPGRVLLFEKMEEKDFYRESREIRIPVDPQSNDPSQSDKQDVLCLCFSPSEETLVASTSKNQLYSITMSLTEISKGEPAHFEYLMYPLHSAPITGLATCIRKPLIATCSLDRSIRLWNYETNTLELFKEYQEEAYSISLHPSGHFIVVGFADKLRLMNLLIDDIRSFKEYSVRGCGECSFSNGGHLFAAVNGNVIHVYTTTSLENISSLKGHTGKIRSIVWNADDSKLISGGTDGAVYEWNLSTGKRETECVLKSCSYNCVTVSPDAKIIFAVGSDHTLKEIADSLGRG

SEQ ID NO: 721 - protein, 1717 aa, Artificial Sequence
  Synthetic polypeptide
MASERPEPEVEEAGQVFLLMKKDYRISRNVRLAWFLSHLHQTVQATPQEMLLQSEQELEVLSVLPPGWQPDEPVVPRPFLLVPSTRVTFLAWQYRFVIELDLSPSTGIVDDSTGEILFDEVFHALSRCLGGLLRPFRVPGSCIDFQPEIYVTIQAYSSIIGLQSHQVLVQGCLLDPSQREVFLQQIYEQLCLFEDKVATMLQQQYDPQSQAEDQSPDSGDLLGRKVGVSMVTADLGLVSMIRQGILALQLLPSNSSAGIIVITDGVTSVPDVAVCETLLNQLRSGTVACSFVQVGGVYSYDCSFGHVPNVELMKFIAMATFGSYLSTCPEPEPGNLGLTVYHRAFLLYSFLRSGEALNPEYYCGSQHRLFNEHLVSASSNPALALRRKKHTEKEVPADLVSTVSVRLREGYSVREVTLAKGGSQLEVKLVLLWKHNMRIEYVAMAPWPLEPEGPRVTRVEVTMEGGYDILHDVSCALRQPIRSLYRTHVIRRFWNTLQSINQTDQMLAHLQSFSSVPEHFTLPDSTKSGVPLFYIPPGSTTPVLSLQPSGSDSSHAQFAAYWKPVLSMDANSWQRWLHMHRLVLILEHDTPIPKHLHTPGSNGRYSTIQCRISHSSLTSLLRDWSSFVLVEGYSYVKLLSSAPDQPPNSFYMVRIISKAPCMVLRLGFPIGTPAPARHKIVSGLREEILRLRFPHRVQSKEPTPKVKRKGLGGAGGGSSPSKSPPVLGPQQALSDRPCLVVLHKPLDKLLIRYEKLPLDYRAPFLLTLEPPGPLPLVSGRSASSSLASLSRYLYHQRWLWSVPSGLAPALPLSAIAQLLSILTEVRLSEGFHFACSGEGIINMVLELPIQNEPPGQAAAEEKHTCVVQYILFPPHSTSTKDSFSTDDDNDVEVEALEGDSELNLVTEVWVEPQYGRVGPGPGIWKHLQDLTYSEIPQALHPRDAACIGSMLSFEYLIQLCQSKEWGPLPPEPRVSDGLDQGGDTCVHEIPFHFDLMGLLPQCQQLQMFFLLLARGAEGPLLGVHGIPKEQAVGSTQATGDSAFTSLSVGLPETLKPLISAQPPQWRCYARLVNPQHVFLTFLPATFSDVQRLAACGLEGPPQEETKPKFGDWSGAPSLKDLGGTGIKATKSHVPVLSVTLASDNAQNQGELSPPFRRDLQAYAGRQASQTESADGPRTRCPVYIYSCSLEALREQMVGMQPPQAPRDLIFRTQFLDHPSPSSAWMEPRYKEAANHCALLQEHAQRCYVRGLFRSLQQAQSVTSQDLLTAVDACEELLQEIDITPFLLALCGHTWGLPHAPPSPGPLSPGPFSSSMEEGAEPRERAILASESSIETEDLSEPEFQSTRVPGIPDPGPEISLTDVCQLRGEAHGALHSVIQEKFLEISRLHFRTVPSNPHYFFYCPPSSRREDEGPRDTVDRKISDLEFSEAELMGEEGDTSACCVVTESDPELEVEYRESRESDLGPAGLDSASLSDVDTVNPDEDSFSILGGDSPTGPESFLHDLPPLFLHLTCSVRLRGQHSSVPVCSLPTCLGQVLSSLEGPPVGGRVPLRDLSVTLDVFMLTLPLEVELPTASDPQHHRSTSESSASFPRSPGQPSSLRSDDGLGPPLPPPEEERHPGLSNLATPHRLAIETTMNEIRWLLEDEMVGALRRGGIPQSPALHRAAAHIHSSPGRSTCLRQTLPLSFVFGPERSLTQFKEQWGCQHLLYQVVRSVS

SEQ ID NO: 722 - protein, 875 aa, Artificial Sequence
  Synthetic polypeptide
MVLELPIQNEPPGQAAAEEKHTCVVQYILFPPHSTSTKDSFSTDDDNDVEVEALEGDSELNLVTEVWVEPQYGRVGPGPGIWKHLQDLTYSEIPQALHPRDAACIGSMLSFEYLIQLCQSKEWGPLPPEPRVSDGLDQGGDTCVHEIPFHFDLMGLLPQCQQLQMFFLLLARGAEGPLLGVHGIPKEQAVGSTQATGDSAFTSLSVGLPETLKPLISAQPPQWRCYARLVNPQHVFLTFLPATFSDVQRLAACGLEGPPQEETKPKFGDWSGAPSLKDLGGTGIKATKSHVPVLSVTLASDNAQNQGELSPPFRRDLQAYAGRQASQTESADGPRTRCPVYIYSCSLEALREQMVGMQPPQAPRDLIFRTQFLDHPSPSSAWMEPRYKEAANHCALLQEHAQRCYVRGLFRSLQQAQSVTSQDLLTAVDACEELLQEIDITPFLLALCGHTWGLPHAPPSPGPLSPGPFSSSMEEGAEPRERAILASESSIETEDLSEPEFQSTRVPGIPDPGPEISLTDVCQLRGEAHGALHSVIQEKFLEISRLHFRTVPSNPHYFFYCPPSSRREDEGPRDTVDRKISDLEFSEAELMGEEGDTSACCVVTESDPELEVEYRESRESDLGPAGLDSASLSDVDTVNPDEDSFSILGGDSPTGPESFLHDLPPLFLHLTCSVRLRGQHSSVPVCSLPTCLGQVLSSLEGPPVGGRVPLRDLSVTLDVFMLTLPLEVELPTASDPQHHRSTSESSASFPRSPGQPSSLRSDDGLGPPLPPPEEERHPGLSNLATPHRLAIETTMNEIRWLLEDEMVGALRRGGIPQSPALHRAAAHIHSSPGRSTCLRQTLPLSFVFGPERSLTQFKEQWGCQHLLYQVVRSVS

SEQ ID NO: 723 - protein, 136 aa, Artificial Sequence
  Synthetic polypeptide
MATGADVRDILELGGPEGDAASGTISKKDIINPDKKKSKKSSETLTFKRPEGMHREVYALLYSDKKDAPPLLPSDTGQGYRTVKAKLGSKKVRPWKWMPFTNPARKDGAMFFHWRRAAEEGKDYPFARFNKVPYIR

SEQ ID NO: 724 - protein, 162 aa, Artificial Sequence
  Synthetic polypeptide
MATGADVRDILELGGPEGDAASGTISKKDIINPDKKKSKKSSETLTFKRPEGMHREVYALLYSDKNKGSCLLSRMQEDLKSFAPGHDFLAIGDAPPLLPSDTGQGYRTVKAKLGSKKVRPWKWMPFTNPARKDGAMFFHWRRAAEEGKDYPFARFNKVPYIR

SEQ ID NO: 725 - protein, 107 aa, Artificial Sequence
  Synthetic polypeptide
IINPDKKKSKKSSETLTFKRPEGMHREVYALLYSDKKDAPPLLPSDTGQGYRTVKAKLGSKKVRPWKWMPFTNPARKDGAMFFHWRRAAEEGKDYPFARFNKVPYIR

SEQ ID NO: 726 - protein, 77 aa, Artificial Sequence
  Synthetic polypeptide
MATASPAADGGRGRPWEGGLVSWPPAPPLTLPWTWMGPSWGQHPGHWGFPALTEPSASPAAGLGIFEVRRGTKKKEV

SEQ ID NO: 727 - protein, 73 aa, Artificial Sequence
  Synthetic polypeptide
MTSIKEQAAISRLLSFLQEWDNAGKVARSHILDKFIETNQGKTAPELEQEFSQGASLFLVRLTTSLRITDLHL

SEQ ID NO: 728 - protein, 153 aa, Artificial Sequence
  Synthetic polypeptide
MEPLGLVVHGKAEPFSAALRSLVNNPRYSDVCFVVGQERQEVFAHRCLLACRCNFFQRLLGTEPGPGVPSPVVLSTVPTEAFLAVLEFLYTNSVKLYRHSVLEVLTAAVEYGLEELRELCLQFVVKVLDVDLVCEALQKISLVWWHAPSYSGG

SEQ ID NO: 729 - protein, 84 aa, Artificial Sequence
  Synthetic polypeptide
WSLRDPSYRTLFTIAKVWKQPKRPSTDEWIKKMWYIYTIKYYSDIKKNEILSFTTTWMELEVIMLSEISQAQKDKLHVFTYLFV

SEQ ID NO: 730 - protein, 200 aa, Artificial Sequence
  Synthetic polypeptide
MEFQAVVMAVGGGSRMTDLTSSIPKPLLPVGNKPLIWYPLNLLERVGFEEVIVVTTRDVQKALCAEFKMKMKPDIVCIPDDADMGTADSLRYIYPKLKTDVLVLSCDLITDVALHEVVDLFRAYDASLAMLMRKGQDSIEPVPGQKGKKKAVEQRDFIGVDSTGKRLLFMANEADLDEELVIKGSILQNTVHNSQGLEAT

SEQ ID NO: 731 - protein, 836 aa, Artificial Sequence
  Synthetic polypeptide
MADGGEREELLSPSPVSPAKRQCSWPSPQAHHPRGSPGAAGGGAGGVGSSCLVLGARPHLQPDSLLDCAAKTVAEKWAYERVEERFERIPEPVQRRIVYWSFPRNEREICMYSSFQYRGGPGAGAAGGAAGASPAEEGPQPPPGAAAPAGSAPGGVAAGASPGLGAGAGAAGCGGEGLPFRRGIRLLDSGSVENVLQVGFHLSGTVTELATASEPAVTYKVAISFDRCKITSVTCGCGNKDIFYCAHVVALSLYRIRKPDQVKLRLPISETLFQMNRDQLQKFIQYLITAHHTEVLPTAQKLADEILSSNSEINQVNGAPDPTAGASIDDENCWHLDEEQVKEQVKLFLSQGGYCGSGKQLNSMFAKVREMLRMRDSNGARMLTLITEQFVADPRLTLWRQQGTNMTDKCRQLWDELGALWVCIILNPHCKLEEKSCWLQQLQKWSDLDVCPLEDGNYGHELPNITNALPQSAIHSPDSLSRPRRTVFTRAIEGRELHWQDSHLQRIISSDVYTAPACQRESERLLFNSQGQPLWLEHVPTACARVDALRSHGYPKEALRLTVAIINTLRLQQQRQLEIYKHQKKELLQRGTTTITNLEGWVGHPLDPIDCLFLTLTEACRLNDDGYLEMSDMNESRPPVYQHVPVAAGSPNSSESYLSLALEVALMGLGQQRLMPEGLYAQDKVCRNEEQLLSQLQELQLDDELVQTLQKQCILLLEGGPFSGLGEVIHRESVPMHTFAKYLFSALLPHDPDLSYKLALRAMRLPVLENSASAGDTSHPHHMVSVVPSRYPRWFTLGHLESQQCELASTMLTAAKGKEEKSFISKCRKSITDTHS

SEQ ID NO: 732 - protein, 231 aa, Artificial Sequence
  Synthetic polypeptide
MKRSRCRDRPQPPPPDRREDGVQRAAELSQSLPPRRRAPPGRQRLEERTGPAGPEGKEQDVVTGVSPLLFRKLSNPDIFSSTGKVKLQRQLSQDDCKLWRGNLASSLSGKQLLPLSSSVHSSVGQVTWQSSGEASNLVRMRNQSLGQSAPSLTAGLKELSLPRRGSFCRTSNRKSLIVTSSTSPTLPRPHSPLHGHTVPATWEAEVGASPDHLSPWRLRSYHCTPAWAATE

SEQ ID NO: 733 - protein, 116 aa, Artificial Sequence
  Synthetic polypeptide
MFSPTSAPALFLTKVPFSADCALATSPLAIFLNPRAHSSPGTPCSSRPLPWSCRTSNRKSLIVTSSTSPTLPRPHSPLHGHTVPATWEAEVGASPDHLSPWRLRSYHCTPAWAATE

SEQ ID NO: 734 - protein, 401 aa, Artificial Sequence
  Synthetic polypeptide
MKRSRCRDRPQPPPPDRREDGVQRAAELSQSLPPRRRAPPGRQRLEERTGPAGPEGKEQDVVTGVSPLLFRKLSNPDIFSSTGKVKLQRQLSQDDCKLWRGNLASSLSGKQLLPLSSSVHSSVGQVTWQSSGEASNLVRMRNQSLGQSAPSLTAGLKELSLPRRGSFCRTSNRKSLIVTSSTSPTLPRPHSPLHGHTGNSPLDSPRNFSPNAPAHFSFVPARRTDGRRWSLASLPSSGYGTNTPSSTVSSSCSSQEKLHQLPFQPTADELHFLTKHFSTESVPDEEGRQSPAMRPRSRSLSPGRSPVSFDSEIIMMNHVYKERFPKATAQMEERLAEFISSNTPDSVLPLADGALSFIHHQVIEMARDCLDKSRSGLITSQYFYELQDNLEKLLQDEHPVS

SEQ ID NO: 735 - protein, 286 aa, Artificial Sequence
  Synthetic polypeptide
MFSPTSAPALFLTKVPFSADCALATSPLAIFLNPRAHSSPGTPCSSRPLPWSCRTSNRKSLIVTSSTSPTLPRPHSPLHGHTGNSPLDSPRNFSPNAPAHFSFVPARRTDGRRWSLASLPSSGYGTNTPSSTVSSSCSSQEKLHQLPFQPTADELHFLTKHFSTESVPDEEGRQSPAMRPRSRSLSPGRSPVSFDSEIIMMNHVYKERFPKATAQMEERLAEFISSNTPDSVLPLADGALSFIHHQVIEMARDCLDKSRSGLITSQYFYELQDNLEKLLQDEHPVS

SEQ ID NO: 736 - protein, 80 aa, Artificial Sequence
  Synthetic polypeptide
MEGTVESQTPDLRDVEGKVGRKTPEGLLRGLRGECELGTSGALLLPGASSTGHDLGDKIMALKMELDATRGKEPFTQMKE

SEQ ID NO: 737 - protein, 305 aa, Artificial Sequence
  Synthetic polypeptide
MRRSLAPSQLAKRKPEGRSCDDEDWQPGLVTPRKRKSSSETQIQECFLSPFRKPLSQLTNQPPCLDSSQHEAFIRSILSKPFKVPIPNYQGPLGSRALGLKRAGVRRALHDPLEKDALVLYEPPPLSAHDQLKLDKEKLPVHVVVDPILSKVLRPHQREGVKFLWECVTSRRIPGSHGCIMADEMGLGKTLQCITLMWTLLRQSPECKPEIDKAVVVSPSSLVKNWYNEVGKWLGGRIQPLAIDGGSKDEIDQKLEGFMNQRGARVSSPILIISYETFRLHVGVLQKGSVGLVICDEAKCGGLHL

SEQ ID NO: 738 - protein, 160 aa, Artificial Sequence
  Synthetic polypeptide
MAAPEAWRARSCWFCEVAAATTMEATSREAAPAKSSASGPNAPPALFELCGRAVSAHMGVLESGVWALPGPILQSILPLLNIYYLERIEETALKKGLSTQAIWRRLWDELMKTRPSSLEAEGQGGQQSCLALQWSGYPWRLEKVKATLCESHWDNWRCFS

SEQ ID NO: 739 - protein, 131 aa, Artificial Sequence
  Synthetic polypeptide
MAAPEAWRARSCWFCEVAAATTMEATSREAAPAKSSASGPNAPPALFELCGRAVSAHMGVLESGVWALPGPILQSILPLLNIYYLERIEETALKKGLSTQAIWRRLWDELMKTRPSSLEYRLKDKVDNSPA

SEQ ID NO: 740 - protein, 146 aa, Artificial Sequence
  Synthetic polypeptide
MGLEDEQKMLTESGDPEEEEEEEEELVDPLTTVREQCEQLEKCVKARERLELCDERVSSRSHTEEDCTEELFDFLHARDHCMLEGSMLLKSHHHSLISSTQANTAEGFRDLCLGKPGIVQGFSPCDSLKYGLVGRERPDHPPARHP

SEQ ID NO: 741 - protein, 343 aa, Artificial Sequence
  Synthetic polypeptide
MAALTLRGVRELLKRVDLATVPRRHRYKKKWAATEPKFPAVRLALQNFDMTYSVQFGDLWPSIRVSLLSEQKYGALVNNFAAWDHVSAKLEQLSAKDFVNEAISHWELQSEGGQSAAPSPASWACSPNLRCFTFDRGDISRFPPARPGSLGVMEYYLMDAASLLPVLALGLQPGDIVLDLCAAPGGKTLALLQTGCCRNLAANDLSPSRIARLQKILHSYVPEEIRDGNQVRVTSWDGRKWGELEGDTYDRVLVDVPCTTDRHSLHEEENNIFKRSRKKERQILPVLQVQLLAAGLLATKPGGHVVYSTCSLSHLQNEYVVQGAIELLANQYSIQAGHGGSCL

SEQ ID NO: 742 - protein, 294 aa, Artificial Sequence
  Synthetic polypeptide
MTYSVQFGDLWPSIRVSLLSEQKYGALVNNFAAWDHVSAKLEQLSAKDFVNEAISHWELQSEGGQSAAPSPASWACSPNLRCFTFDRGDISRFPPARPGSLGVMEYYLMDAASLLPVLALGLQPGDIVLDLCAAPGGKTLALLQTGCCRNLAANDLSPSRIARLQKILHSYVPEEIRDGNQVRVTSWDGRKWGELEGDTYDRVLVDVPCTTDRHSLHEEENNIFKRSRKKERQILPVLQVQLLAAGLLATKPGGHVVYSTCSLSHLQNEYVVQGAIELLANQYSIQAGHGGSCL

SEQ ID NO: 743 - protein, 384 aa, Artificial Sequence
  Synthetic polypeptide
MPKVKALQCALALEISSVTCPGVVLKDKEDIYLSICVFGQYKKTQCVPATFPLVFNARMVFEKVFPDAVDPGDVVTQLEYDTAVFELIQLVPPVGETLSTYDENTRDFMFPGPNQMSGHHDSNRQVTMRRISGLRGNAPRLEFSTTSVITECLISSRKCHTQDKFIYHLAPVEKSHGRLQNRTSRSQKKKSKSPERSKYCINAKNYEQPTISSKSHSPSPYTKRRMCELSEDTRRRLAHLNLGPYEFKKETDKPPFVIRHVDPPSPRADTLLGSSGRDCERDGWSRVHNDHSHLGCCRPKDYKTGFRCVGRAGLQLLATSDPPASASRGAGIADGVSFTQCSMVPRLECSGVISARCNHLPAACLGLPESRDCSLCPAATPSGK

SEQ ID NO: 744 - protein, 312 aa, Artificial Sequence
  Synthetic polypeptide
MVFEKVFPDAVDPGDVVTQLELGETLSTYDENTRDFMFPGPNQMSGHHDSNRQVTMRRISGLRGNAPRLEFSTTSVITECLISSRKCHTQDKFIYHLAPVEKSHGRLQNRTSRSQKKKSKSPERSKYCINAKNYEQPTISSKSHSPSPYTKRRMCELSEDTRRRLAHLNLGPYEFKKETDKPPFVIRHVDPPSPRADTLLGSSGRDCERDGWSRVHNDHSHLGCCRPKDYKTGFRCVGRAGLQLLATSDPPASASRGAGIADGVSFTQCSMVPRLECSGVISARCNHLPAACLGLPESRDCSLCPAATPSGK

SEQ ID NO: 745 - protein, 225 aa, Artificial Sequence
  Synthetic polypeptide
MQLDKFIYHLAPVEKSHGRLQNRTSRSQKKKSKSPERSKYCINAKNYEQPTISSKSHSPSPYTKRRMCELSEDTRRRLAHLNLGPYEFKKETDKPPFVIRHVDPPSPRADTLLGSSGRDCERDGWSRVHNDHSHLGCCRPKDYKTGFRCVGRAGLQLLATSDPPASASRGAGIADGVSFTQCSMVPRLECSGVISARCNHLPAACLGLPESRDCSLCPAATPSGK

SEQ ID NO: 746 - protein, 343 aa, Artificial Sequence
  Synthetic polypeptide
MPKVKALQCALALEISSVTCPGVVLKDKEDIYLSICVFGQYKKTQCVPATFPLVFNARMVFEKVFPDAVDPGDVVTQLEYDTAVFELIQLVPPVGETLSTYDENTRDFMFPGPNQMSGHHDSNRQVTMRRISGLRGNAPRLEFSTTSVITECLISSRKCHTQDKFIYHLAPVEKSHGRLQNRTSRSQKKKSKSPERSKYCINAKNYEQPTISSKSHSPSPYTKRRMCELSEDTRRRLAHLNLGPYEFKKETDKPPFVIRHVDPPSPRADTLLGSSGRDCERDGWSRVHNDHSHLGCCRPKDYKPAECLRLQARTATPDWFSFFFGGDGVSLCWPGWSPAPSHE

SEQ ID NO: 747 - protein, 271 aa, Artificial Sequence
  Synthetic polypeptide
MVFEKVFPDAVDPGDVVTQLELGETLSTYDENTRDFMFPGPNQMSGHHDSNRQVTMRRISGLRGNAPRLEFSTTSVITECLISSRKCHTQDKFIYHLAPVEKSHGRLQNRTSRSQKKKSKSPERSKYCINAKNYEQPTISSKSHSPSPYTKRRMCELSEDTRRRLAHLNLGPYEFKKETDKPPFVIRHVDPPSPRADTLLGSSGRDCERDGWSRVHNDHSHLGCCRPKDYKPAECLRLQARTATPDWFSFFFGGDGVSLCWPGWSPAPSHE

SEQ ID NO: 748 - protein, 184 aa, Artificial Sequence
  Synthetic polypeptide
MQLDKFIYHLAPVEKSHGRLQNRTSRSQKKKSKSPERSKYCINAKNYEQPTISSKSHSPSPYTKRRMCELSEDTRRRLAHLNLGPYEFKKETDKPPFVIRHVDPPSPRADTLLGSSGRDCERDGWSRVHNDHSHLGCCRPKDYKPAECLRLQARTATPDWFSFFFGGDGVSLCWPGWSPAPSHE

SEQ ID NO: 749 - protein, 81 aa, Artificial Sequence
  Synthetic polypeptide
MAEGSQSAPEAGNDMGNDDAIGGNVSKYIVLPTGYCGQPKKGHLIFDACFESVLVPKQICRPMGQNRGLRNNTTHLQPSDL

SEQ ID NO: 750 - protein, 286 aa, Artificial Sequence
  Synthetic polypeptide
MASNMDREMILADFQACTGIENIDEAITLLEQNNWDLVAAINGVIPQENGILQSEYGGETIPGPAFNPASHPASAPTSSSSSAFRPVMPSRQIVERQPRMLDFRVEYRDRNVDVVLEDTCTVGEIKQILENELQIPVSKMLLKGWKTGDVEDSTVLKSLHLPKNNSLYVLTPDLPPPSSSSHAGALQESLNQNFMLIITHREVQREYNLNFSGSSTIQEVKRNVYDLTSIPVRHQLWEGWPTSATDDSMCLAESGLSYPCHRLTVGRRSSPAQTREQSEEVKVSPY

SEQ ID NO: 751 - protein, 44 aa, Artificial Sequence
  Synthetic polypeptide
MRNLLEMCLAESGLSYPCHRLTVGRRSSPAQTREQSEEVKVSPY

SEQ ID NO: 752 - protein, 92 aa, Artificial Sequence
  Synthetic polypeptide
MLIITHREVQREYNLNFSGSSTIQEVKRNVYDLTSIPVRHQLWEGWPTSATDDSMCLAESGLSYPCHRLTVGRRSSPAQTREQSEEVKVSPY

SEQ ID NO: 753 - protein, 123 aa, Artificial Sequence [sequence omitted]

SEQ ID NO: 754 - protein, 50 aa, Artificial Sequence
  Synthetic polypeptide
MGNCLKSPTSDDISLLHESQSDRASFGEGTEPDQEPPPPYQALAGDKSDQ

SEQ ID NO: 755 - protein, 74 aa, Artificial Sequence
  Synthetic polypeptide
MNQEKLAKLQAQVRIGGKGTARRKKKVVHRTATADDKKLQSSLKKLAVNNIAGIEEHYLQEPRFGRNLFPSTDE

SEQ ID NO: 756 - protein, 412 aa, Artificial Sequence
  Synthetic polypeptide
MEGARARGAQLRLGERVRPVGRRSAPGRSRFRQPWRPGASDSAPPAGTMAQSRVLLLLLLLPPQLHLGPVLAVRAPGFGRSGGHSLSPEENEFAEEEPVLVLSPEEPGPGPAAVSCPRDCACSQEGVVDCGGIDLREFPGDLPEHTNHLSLQNNKLEKIPPGAFSELSSLRELYLQNNYLTDEGLDNETFWKLSSLEYLDLSSNNLSRVPAGLPRSLVLLHLEKNAIRSVDANVLTPIRSLEYLLLHSNQLREQGIHPLAFQGLKRLHTVHLYNNALERVPSGLPRRVRTLMILHNQITGIGREDFATTYFLEELNLSYNRITSPQVHRDAFRKLRLLRSLDLSGNRLHTLPPGLPRNVHVLKVKRNELAALARGALVGMAQLRELYLTSNRLRSRALGPRAWVDLAHLQVG

SEQ ID NO: 757 - protein, 535 aa, Artificial Sequence
  Synthetic polypeptide
MEGEEAEQPAWFRQPWRPGASDSAPPAGTMAQSRVLLLLLLLPPQLHLGPVLAVRAPGFGRSGGHSLSPEENEFAEEEPVLVLSPEEPGPGPAAVSCPRDCACSQEGVVDCGGIDLREFPGDLPEHTNHLSLQNNQLEKIYPEELSRLHRLETLNLQNNRLTSRGLPEKAFEHLTNLNYLYLANNKLTLAPRFLPNALISVDFAANYLTKIYGLTFGQKPNLRSVYLHNNKLADAGLPDNMFNGSSNVEVLILSSNFLRHVPKHLPPALYKLHLKNNKLEKIPPGAFSELSSLRELYLQNNYLTDEGLDNETFWKLSSLEYLDLSSNNLSRVPAGLPRSLVLLHLEKNAIRSVDANVLTPIRSLEYLLLHSNQLREQGIHPLAFQGLKRLHTVHLYNNALERVPSGLPRRVRTLMILHNQITGIGREDFATTYFLEELNLSYNRITSPQVHRDAFRKLRLLRSLDLSGNRLHTLPPGLPRNVHVLKVKRNELAALARGALVGMAQLRELYLTSNRLRSRALGPRAWVDLAHLQVG

SEQ ID NO: 758 - protein, 554 aa, Artificial Sequence
  Synthetic polypeptide
MEGARARGAQLRLGERVRPVGRRSAPGRSRFRQPWRPGASDSAPPAGTMAQSRVLLLLLLLPPQLHLGPVLAVRAPGFGRSGGHSLSPEENEFAEEEPVLVLSPEEPGPGPAAVSCPRDCACSQEGVVDCGGIDLREFPGDLPEHTNHLSLQNNQLEKIYPEELSRLHRLETLNLQNNRLTSRGLPEKAFEHLTNLNYLYLANNKLTLAPRFLPNALISVDFAANYLTKIYGLTFGQKPNLRSVYLHNNKLADAGLPDNMFNGSSNVEVLILSSNFLRHVPKHLPPALYKLHLKNNKLEKIPPGAFSELSSLRELYLQNNYLTDEGLDNETFWKLSSLEYLDLSSNNLSRVPAGLPRSLVLLHLEKNAIRSVDANVLTPIRSLEYLLLHSNQLREQGIHPLAFQGLKRLHTVHLYNNALERVPSGLPRRVRTLMILHNQITGIGREDFATTYFLEELNLSYNRITSPQVHRDAFRKLRLLRSLDLSGNRLHTLPPGLPRNVHVLKVKRNELAALARGALVGMAQLRELYLTSNRLRSRALGPRAWVDLAHLQVG

SEQ ID NO: 759 - protein, 893 aa, Artificial Sequence
  Synthetic polypeptide
MGLPEPGPLRLLALLLLLLLLLLLQLQHLAAAAADPLLGGQGPAKDCEKDQFQCRNERCIPSVWRCDEDDDCLDHSDEDDCPKKTCADSDFTCDNGHCIHERWKCDGEEECPDGSDESEATCTKQVCPAEKLSCGPTSHKCVPASWRCDGEKDCEGGADEAGCATLCAPHEFQCGNRSCLAAVFVCDGDDDCGDGSDERGCADPACGPREFRCGGDGGGACIPERWVCDRQFDCEDRSDEAAELCGRPGPGATSAPAACATASQFACRSGECVHLGWRCDGDRDCKDKSDEADCPLGTCRGDEFQCGDGTCVLAIKHCNQEQDCPDGSDEAGCLQGLNECLHNNGGCSHICTDLKIGFECTCPAGFQLLDQKTCGDIDECKDPDACSQICVNYKGYFKCECYPGYEMDLLTKNCKAAAGKSPSLIFTNRHEVRRIDLVKRNYSRLIPMLKNVVALDVEVATNRIYWCDLSYRKIYSAYMDKASDPKEQEVLIDEQLHSPEGLAVDWVHKHIYWTDSGNKTISVATVDGGRRRTLFSRNLSEPRAIAVDPLRGFMYWSDWGDQAKIEKSGLNGVDRQTLVSDNIEWPNGITLDLLSQRLYWVDSKLHQLSSIDFSGGNRKTLISSTDFLSHPFGIAVFEDKVFWTDLENEAIFSANRLNGLEISILAENLNNPHDIVIFHELKQPRAPDACELSVQPNGGCEYLCLPAPQISSHSPKYTCACPDTMWLGPDMKRCYRAPQSTSTTTLASTMTRTVPATTRAPGTTVHRSTYQNHSTETPSLTAAVPSSVSVPRAPSISPSTLSPATSNHSQHYANEDSKMGSTVTAAVIGIIVPIVVIALLCMSGYLIWRNWKRKNTKSMNFDNPVYRKTTEEEDEDELHIGRTAQIGHVYPAM

SEQ ID NO: 760 - protein, 17 aa, Artificial Sequence
  Synthetic polypeptide
SQAQLVSPGLPASARLP

SEQ ID NO: 761 - protein, 446 aa, Artificial Sequence
  Synthetic polypeptide
MLKNVVALDVEVATNRIYWCDLSYRKIYSAYMDKASDPKEQEVLIDEQLHSPEGLAVDWVHKHIYWTDSGNKTISVATVDGGRRRTLFSRNLSEPRAIAVDPLRGFMYWSDWGDQAKIEKSGLNGVDRQTLVSDNIEWPNGITLDLLSQRLYWVDSKLHQLSSIDFSGGNRKTLISSTDFLSHPFGIAVFEDKVFWTDLENEAIFSANRLNGLEISILAENLNNPHDIVIFHELKQPRAPDACELSVQPNGGCEYLCLPAPQISSHSPKYTCACPDTMWLGPDMKRCYRAPQSTSTTTLASTMTRTVPATTRAPGTTVHRSTYQNHSTETPSLTAAVPSSVSVPRAPSISPSTLSPATSNHSQHYANEDSKMGSTVTAAVIGIIVPIVVIALLCMSGYLIWRNWKRKNTKSMNFDNPVYRKTTEEEDEDELHIGRTAQIGHVYPAM

SEQ ID NO: 762 - protein, 689 aa, Artificial Sequence
  Synthetic polypeptide
MGLPEPGPLRLLALLLLLLLLLLLQLQHLAAAAADPLLGGQGPAKDCEKDQFQCRNERCIPSVWRCDEDDDCLDHSDEDDCPKKTCADSDFTCDNGHCIHERWKCDGEEECPDGSDESEATCTKQVCPAEKLSCGPTSHKCVPASWRCDGEKDCEGGADEAGCATSLGTCRGDEFQCGDGTCVLAIKHCNQEQDCPDGSDEAGCLQGLNECLHNNGGCSHICTDLKIGFECTCPAGFQLLDQKTCGDIDECKDPDACSQICVNYKGYFKCECYPGYEMDLLTKNCKAAAGKSPSLIFTNRHEVRRIDLVKRNYSRLIPMLKNVVALDVEVATNRIYWCDLSYRKIYSAYMDKASDPKEQEVLIDEQLHSPEGLAVDWVHKHIYWTDSGNKTISVATVDGGRRRTLFSRNLSEPRAIAVDPLRGFMYWSDWGDQAKIEKSGLNGVDRQTLVSDNIEWPNGITLDLLSQRLYWVDSKLHQLSSIDFSGGNRKTLISSTDFLSHPFGIAVFEDKVFWTDLENEAIFSANRLNGLEISILAENLNNPHDIVIFHELKQPRAPDACELSVQPNGGCEYLCLPAPQISSHSPKYTCACPDTMWLGPDMKRCYRDANEDSKMGSTVTAAVIGIIVPIVVIALLCMSGYLIWRNWKRKNTKSMNFDNPVYRKTTEEEDEDELHIGRTAQIGHVYPAM

SEQ ID NO: 763 - protein, 723 aa, Artificial Sequence
  Synthetic polypeptide
MGLPEPGPLRLLALLLLLLLLLLLQLQHLAAAAADPLLGGQGPAKDCEKDQFQCRNERCIPSVWRCDEDDDCLDHSDEDDCPKKTCADSDFTCDNGHCIHERWKCDGEEECPDGSDESEATCTKQVCPAEKLSCGPTSHKCVPASWRCDGEKDCEGGADEAGCATWLNECLHNNGGCSHICTDLKIGFECTCPAGFQLLDQKTCGDIDECKDPDACSQICVNYKGYFKCECYPGYEMDLLTKNCKAAAGKSPSLIFTNRHEVRRIDLVKRNYSRLIPMLKNVVALDVEVATNRIYWCDLSYRKIYSAYMDKASDPKEQEVLIDEQLHSPEGLAVDWVHKHIYWTDSGNKTISVATVDGGRRRTLFSRNLSEPRAIAVDPLRGFMYWSDWGDQAKIEKSGLNGVDRQTLVSDNIEWPNGITLDLLSQRLYWVDSKLHQLSSIDFSGGNRKTLISSTDFLSHPFGIAVFEDKVFWTDLENEAIFSANRLNGLEISILAENLNNPHDIVIFHELKQPRAPDACELSVQPNGGCEYLCLPAPQISSHSPKYTCACPDTMWLGPDMKRCYRAPQSTSTTTLASTMTRTVPATTRAPGTTVHRSTYQNHSTETPSLTAAVPSSVSVPRAPSISPSTLSPATSNHSQHYANEDSKMGSTVTAAVIGIIVPIVVIALLCMSGYLIWRNWKRKNTKSMNFDNPVYRKTTEEEDEDELHIGRTAQIGHVYPAM

SEQ ID NO: 764 - protein, 165 aa, Artificial Sequence
  Synthetic polypeptide
MGLPEPGPLRLLALLLLLLLLLLLQLQHLAAAAADPLLGGQGPAKDCEKDQFQCRNERCIPSVWRCDEDDDCLDHSDEDDCPKKTCADSDFTCDNGHCIHERWKCDGEEECPDGSDESEATCTKQVCPAEKLSCGPTSHKCVPASWRCDGEKDCEGGADEAGCAT

SEQ ID NO: 765 - protein, 84 aa, Artificial Sequence
  Synthetic polypeptide
MGLPEPGPLRLLALLLLLLLLLLLQLQHLAAAAADPLLGGQGPAKDCEKDQFQCRNERCIPSVWRCDEDDDCLDHSDEDDCRFF

SEQ ID NO: 766 - protein, 102 aa, Artificial Sequence
  Synthetic polypeptide
MGLPEPGPLRLLALLLLLLLLLLLQLQHLAAAAADPLLGGQGPAKDCEKDQFQCRNERCIPSVWRCDEDDDCLDHSDEDDCLSSPDHLGSHNSCPSNIIGLF

SEQ ID NO: 767 - protein, 309 aa, Artificial Sequence
  Synthetic polypeptide
MIQNVGNHLRRGLASVFSNRTSRKSALRAGNDSAMADGEGYRNPTEVQMSQLVLPCHTNQRGELSVGQLLKWIDTTACLSAERHAGCPCVTASMDDIYFEHTISVGQVVNIKAKVNRAFNSSMEVGIQVASEDLCSEKQWNVCKALATFVARREITKVKLKQITPRTEEEKMEHSVAAERRRMRLVYADTIKDLLANCAIQGDLESRDCSRMVPAEKTRVESVELVLPPHANHQGNTFGGQIMAWMENVATIAASRLCRAHPTLKAIEMFHFRGPSQVGDRLVLKAIVNNAFKHRAGHTQEVLCKQWWR

SEQ ID NO: 768 - protein, 460 aa, Artificial Sequence
  Synthetic polypeptide
MIQNVGNHLRRGLASVFSNRTSRKSALRAGNDSAMADGEGYRNPTEVQMSQLVLPCHTNQRGELSVGQLLKWIDTTACLSAERHAGCPCVTASMDDIYFEHTISVGQVVNIKAKVNRAFNSSMEVGIQVASEDLCSEKQWNVCKALATFVARREITKVKLKQITPRTEEEKMEHSVAAERRRMRLVYADTIKDLLANCAIQGDLESRDCSRMVPAEKTRVESVELVLPPHANHQGNTFGGQIMAWMENVATIAASRLCRAHPTLKAIEMFHFRGPSQVGDRLVLKAIVNNAFKHSMEVGVCVEAYRQEAETHRRHINSAFMTFVVLDADDQPQLLPWIRPQPGDGERRYREASARKKIRLDRKYIVSCKQTEVPLSVPWDPSNQVYLSYNNVSSLKMLVAKDNWVLSSEISQVRLYTLEDDKFLSFHMEMVVHVDAAQAFLLLSDLRQRPEWDKHYRAGL

SEQ ID NO: 769 - protein, 201 aa, Artificial Sequence
  Synthetic polypeptide
MEQPGQDPTSDDVMDSFLEKFQSQPYRGGFHEDQWEKEFEKVPLFMSRAPSEIDPRENPDLACLQSIIFDEERSPEEQAKTYKDEGNDYFKEKDYKKAVISYTEGLKKKCADPDLNAVLYTNRAAAQYYLGNFRSALNDVTAARKLKPCHLKAIIRGALCHLELKHFAEAVNWCDEGLQIDAKEKKLLEMRAKADKLKACK

SEQ ID NO: 770 - protein, 72 aa, Artificial Sequence
  Synthetic polypeptide
MAEKQKHDGRVKIGHYVLGDTLGVGTFGKVKSSAPICLSGGRSKALLCSLDLSVLLCKIGRTGLVLRGAFQL

SEQ ID NO: 771 - protein, 383 aa, Artificial Sequence [sequence omitted]

SEQ ID NO: 772 - protein, 19 aa, Artificial Sequence
  Synthetic polypeptide
VICNHCRQGHKEMVAGTSS

SEQ ID NO: 773 - protein, 468 aa, Artificial Sequence
  Synthetic polypeptide
MSFICGLQSAARNHVFFRFNSLSNWRKCNTLASTSRGCHQVQVNHIVNKYQGLGVNQCDRWSFLPGNFHFYSTFNNKRTGGLSSTKSKEIWRITSKCTVWNDAFSRQLLIKEVTAVPSLSVLHPLSPASIRAIRNFHTSPRFQAAPVPLLLMILKPVQKLFAIIVGRGIRKWWQALPPNKKEVVKENIRKNKWKLFLGLSSFGLLFVVFYFTHLEVSPITGRSKLLLLGKEQFRLLSELEYEAWMEEFKNDMLTEKDARYLAVKEVLCHLIECNKDVPGISQINWVIHVVDSPIINAFVLPNGQMFVFTGFLNSVTDIHQLSFLLGHEIAHAVLGHAAEKAGMVHLLDFLGMIFLTMIWAICPRDSLALLCQWIQSKLQEYMFNRPYSRKLEAEADKIGLLLAAKACADIRASSVFWQQMEFVDSLHGQPKMPEWLSTHPSHGNRVEYLDRLIPQWSETKLQHLQGIP

SEQ ID NO: 774 - protein, 19 aa, Artificial Sequence
  Synthetic polypeptide
VICNHCRQGHKEMVAGTSS

SEQ ID NO: 775 - protein, 433 aa, Artificial Sequence
  Synthetic polypeptide
MSFICGLQSAARNHVFFRFNSLSNWRKCNTLASTSRGCHQVQVNHIVNKYQGLGVNQCDRWSFLPGNFHFYSTFNNKRTGGLSSTKSKEIWRITSKCTVWNDAFSRQLLIKEVTAVPSLSVLHPLSPASIRAIRNFHTSPRFQAAPVPLLLMILKPVQKLFAIIVGRGIRKWWQALPPNKKEVVKENIRKNKWKLFLGLSSFGLLFVVFYFTHLEVSPITGRSKLLLLGKEQFRLLSELEYEAWMEEFKNDMLTEKDARYLAVKEVLCHLIECNKDVPGISQINWVIHVVDSPIINAFVLPNGQMFVFTGFLNSVTDIHQLSFLLGHEIAHAVLGHAAEKAGMVHLLDFLGMIFLTMIWAICPRDSLALLCQWIQSKLQEYMFNRPYSRKLEAEADKIGLLLAAKTNSPLPSQSTQCEDKDGDIYDDPLPLNE

SEQ ID NO: 776 - protein, 19 aa, Artificial Sequence
  Synthetic polypeptide
VICNHCRQGHKEMVAGTSS

SEQ ID NO: 777 - protein, 415 aa, Artificial Sequence
  Synthetic polypeptide
MSFICGLQSAARNHVFFRFNSLSNWRKCNTLASTSRGCHQVQVNHIVNKYQGLGVNQCDRWSFLPGNFHFYSTFNNKRTGGLSSTKSKEIWRITSKCTVWNDAFSRQLLIKEVTAVPSLSVLHPLSPASIRAIRNFHTSPRFQAAPVPLLLMILKPVQKLFAIIVGRGIRKWWQALPPNKKEVVKENIRKNKWKLFLGLSSFGLLFVVFYFTHLEVSPITGRSKLLLLGKEQFRLLSELEYEAWMEEFKNDMLTEKDARYLAVKEVLCHLIECNKDVPGISQINWVIHVVDSPIINAFVLPNGQMFVFTGFLNSVTDIHQLSFLLGHEIAHAVLGHAAEKAGMVHLLDFLGMIFLTMIWAICPRDSLALLCQWIQSKLQEYMFNRPYSRKLEAEADKIGLLLAAKKLQSISIKLH

SEQ ID NO: 778 - protein, 308 aa, Artificial Sequence
  Synthetic polypeptide
MSGGEQKPERYYVGVDVGTGSVRAALVDQSGVLLAFADQPIKNWEPQFNHHEQSSEDIWAACCVVTKKVVQGIDLNQIRGLGFDATCSLVVLDKQFHPLPVNQEGDSHRNVIMWLDHRAVSQVNRINETKHSVLQYVGGVMSVEMQAPKLLWLKENLREICWDKAGHFFDLPDFLSWKATGVTARSLCSLVCKWTYSAEKGWDDSFWKMIGLEDFVADNYSKIGNQVLPPGASLGNGLTPEAARDLGLLPGIAVAASLIDAHAGGLGVIGADVRGHGLICEGQPVTSRLAVICGTSSCHMGVFSRSSH

SEQ ID NO: 779 - protein, 220 aa, Artificial Sequence
  Synthetic polypeptide
MSGGEQKPERYYVGVDVGTGSVRAALVDQSGVLLAFADQPIKNWEPQFNHHEQSSEDIWAACCVVTKNLREICWDKAGHFFDLPDFLSWKATGVTARSLCSLVCKWTYSAEKGWDDSFWKMIGLEDFVADNYSKIGNQVLPPGASLGNGLTPEAARDLGLLPGIAVAASLIDAHAGGLGVIGADVRGHGLICEGQPVTSRLAVICGTSSCHMGVFSRSSH

SEQ ID NO: 780 - protein, 9 aa, Artificial Sequence
  Synthetic polypeptide
MGVFSRSSH

SEQ ID NO: 781 - protein, 201 aa, Artificial Sequence
  Synthetic polypeptide
MYPESTTGSPARLSLRQTGSPGMIYSTRYGSPKRQLQFYRNLGKSGLRVSCLGLGTWVTFGGQITDEMAEQLMTLAYDNGINLFDTAEVYAAGKAEVVLGNIIKKKGWRRSSLVITTKIFWGGKAETERGLSRKHIIEGLKASLERLQLEYVDVVFANRPDPNTPMEETVRAMTHVINQGMAMYWGTSRWSSMEIMNTSAR

SEQ ID NO: 782 - protein, 187 aa, Artificial Sequence
  Synthetic polypeptide
MYPESTTGSPARLSLRQTGSPGMIYRNLGKSGLRVSCLGLGTWVTFGGQITDEMAEQLMTLAYDNGINLFDTAEVYAAGKAEVVLGNIIKKKGWRRSSLVITTKIFWGGKAETERGLSRKHIIEGLKASLERLQLEYVDVVFANRPDPNTPMEETVRAMTHVINQGMAMYWGTSRWSSMEIMNTSAR

SEQ ID NO: 783 - protein, 249 aa, Artificial Sequence
  Synthetic polypeptide
MLSMTYSESLRSVSSRCHSEWALHPVRQTDTLELQRLREVRAAAQARNMESFLRMHGLSLDGCTAQRTGMKYRNLGKSGLRVSCLGLGTWVTFGGQITDEMAEQLMTLAYDNGINLFDTAEVYAAGKAEVVLGNIIKKKGWRRSSLVITTKIFWGGKAETERGLSRKHIIEGLKASLERLQLEYVDVVFANRPDPNTPMEGDPFSSSKSRTFIIEETVRAMTHVINQGMAMYWGTSRWSSMEIMNTSAR

SEQ ID NO: 784 - protein, 134 aa, Artificial Sequence
  Synthetic polypeptide
MAEQLMTLAYDNGINLFDTAEVYAAGKAEVVLGNIIKKKGWRRSSLVITTKIFWGGKAETERGLSRKHIIEGLKASLERLQLEYVDVVFANRPDPNTPMEETVRAMTHVINQGMAMYWGTSRWSSMEIMNTSAR

SEQ ID NO: 785 - protein, 1674 aa, Artificial Sequence
  Synthetic polypeptide
MRGPVGTEEELPRLFAEEMENEDEMSEEEDGGLEAFDDFFPVEPVSLPKKKKPKKLKENKCKGKRKKKEGSNDELSENEEDLEEKSESEGSDYSPNKKKKKKLKDKKEKKAKRKKKDEDEDDNDDGCLKEPKSSGQLMAEWGLDDVDYLFSEEDYHTLTNYKAFSQFLRPLIAKKNPKIPMSKMMTVLGAKWREFSANNPFKGSSAAAAAAAVAAAVETVTISPPLAVSPPQVPQPVPIRKAKTKEGKGPGVRKKIKGSKDGKKKGKGKKTAGLKFRFGGISNKRKKGSSSEEDEREESDFDSASIHSASVRSECSAALGKKSKRRRKKKRIDDGDGYETDHQDYCEVCQQGGEIILCDTCPRAYHLVCLDPELEKAPEGKWSCPHCEKEGIQWEPKDDDDEEEEGGCEEEEDDHMEFCRVCKDGGELLCCDACPSSYHLHCLNPPLPEIPNGEWLCPRCTCPPLKGKVQRILHWRWTEPPAPFMVGLPGPDVEPSLPPPKPLEGIPEREFFVKWAGLSYWHCSWVKELQLELYHTVMYRNYQRKNDMDEPPPFDYGSGDEDGKSEKRKNKDPLYAKMEERFYRYGIKPEWMMIHRILNHSFDKKGDVHYLIKWKDLPYDQCTWEIDDIDIPYYDNLKQAYWGHRELMLGEDTRLPKRLLKKGKKLRDDKQEKPPDTPIVDPTVKFDKQPWYIDSTGGTLHPYQLEGLNWLRFSWAQGTDTILADEMGLGKTVQTIVFLYSLYKEGHSKGPYLVSAPLSTIINWEREFEMWAPDFYVVTYTGDKESRSVIRENEFSFEDNAIRSGKKVFRMKKEVQIKFHVLLTSYELITIDQAILGSIEWACLVVDEAHRLKNNQSKFFRVLNSYKIDYKLLLTGTPLQNNLEELFHLLNFLTPERFNNLEGFLEEFADISKEDQIKKLHDLLGPHMLRRLKADVFKNMPAKTELIVRVELSQMQKKYYKFILTRNFEALNSKGGGNQVSLLNIMMDLKKCCNHPYLFPVAAVEAPVLPNGSYDGSSLVKSSGKLMLLQKMLKKLRDEGHRVLIFSQMTKMLDLLEDFLEYEGYKYERIDGGITGGLRQEAIDRFNAPGAQQFCFLLSTRAGGLGINLATADTVIIYDSDWNPHNDIQAFSRAHRIGQNKKVMIYRFVTRASVEERITQVAKRKMMLTHLVVRPGLGSKSGSMTKQELDDILKFGTEELFKDDVEGMMSQGQRPVTPIPDVQSSKGGNLAASAKKKHGSTPPGDNKDVEDSSVIHYDDAAISKLLDRNQDATDDTELQNMNEYLSSFKVAQYVVREEDGVEEVEREIIKQEENVDPDYWEKLLRHHYEQQQEDLARNLGKGKRIRKQVNYNDASQEDQEWQDELSDNQSEYSIGSEDEDEDFEERPEGQSGRRQSRRQLKSDRDKPLPPLLARVGGNIEVLGFNARQRKAFLNAIMRWGMPPQDAFNSHWLVRDLRGKSEKEFRAYVSLFMRHLCEPGADGAETFADGVPREGLSRQHVLTRIGVMSLVRKKVQEFEHVNGKYSTPDLIPEGPEGKKSGEVISSDPNTPVPASPAHLLPAPLGLPDKMEAQLGYMDEKDPGAQKPRQPLEVQALPAALDRVESEDKHESPASKERAREERPEETEKAPPSPEQLPRGAVAHASNPSTLGGRGGQITRSGVQDYPVEHGETRLY

SEQ ID NO: 786 - protein, 531 aa, Artificial Sequence
  Synthetic polypeptide
MIYRFVTRASVEERITQVAKRKMMLTHLVVRPGLGSKSGSMTKQELDDILKFGTEELFKDDVEGMMSQGQRPVTPIPDVQSSKGGNLAASAKKKHGSTPPGDNKDVEDSSVIHYDDAAISKLLDRNQDATDDTELQNMNEYLSSFKVAQYVVREEDGVEEVEREIIKQEENVDPDYWEKLLRHHYEQQQEDLARNLGKGKRIRKQVNYNDASQEDQEWQDELSDNQSEYSIGSEDEDEDFEERPEGQSGRRQSRRQLKSDRDKPLPPLLARVGGNIEVLGFNARQRKAFLNAIMRWGMPPQDAFNSHWLVRDLRGKSEKEFRAYVSLFMRHLCEPGADGAETFADGVPREGLSRQHVLTRIGVMSLVRKKVQEFEHVNGKYSTPDLIPEGPEGKKSGEVISSDPNTPVPASPAHLLPAPLGLPDKMEAQLGYMDEKDPGAQKPRQPLEVQALPAALDRVESEDKHESPASKERAREERPEETEKAPPSPEQLPRGAVAHASNPSTLGGRGGQITRSGVQDYPVEHGETRLY

SEQ ID NO: 787 - protein, 9 aa, Artificial Sequence
  Synthetic polypeptide
LRPVHLGDR

SEQ ID NO: 788 - protein, 1261 aa, Artificial Sequence
  Synthetic polypeptide
MRGPVGTEEELPRLFAEEMENEDEMSEEEDGGLEAFDDFFPVEPVSLPKKKKPKKLKENKCKGKRKKKEGSNDELSENEEDLEEKSESEGSDYSPNKKKKKKLKDKKEKKAKRKKKDEDEDDNDDGCLKEPKSSGQLMAEWGLDDVDYLFSEEDYHTLTNYKAFSQFLRPLIAKKNPKIPMSKMMTVLGAKWREFSANNPFKGSSAAAAAAAVAAAVETVTISPPLAVSPPQVPQPVPIRKAKTKEGKGPGVRKKIKGSKDGKKKGKGKKTAGLKFRFGGISNKRKKGSSSEEDEREESDFDSASIHSASVRSECSAALGKKSKRRRKKKRIDDGDGYETDHQDYCEVCQQGGEIILCDTCPRAYHLVCLDPELEKAPEGKWSCPHCEKEGIQWEPKDDDDEEEEGGCEEEEDDHMEFCRVCKDGGELLCCDACPSSYHLHCLNPPLPEIPNGEWLCPRCTCPPLKGKVQRILHWRWTEPPAPFMVGLPGPDVEPSLPPPKPLEGIPEREFFVKWAGLSYWHCSWVKELQLELYHTVMYRNYQRKNDMDEPPPFDYGSGDEDGKSEKRKNKDPLYAKMEERFYRYGIKPEWMMIHRILNHSFDKKGDVHYLIKWKDLPYDQCTWEIDDIDIPYYDNLKQAYWGHRELMLGEDTRLPKRLLKKGKKLRDDKQEKPPDTPIVDPTVKFDKQPWYIDSTGGTLHPYQLEGLNWLRFSWAQGTDTILADEMGLGKTVQTIVFLYSLYKEGHSKGPYLVSAPLSTIINWEREFEMWAPDFYVVTYTGDKESRSVIRENEFSFEDNAIRSGKKVFRMKKEVQIKFHVLLTSYELITIDQAILGSIEWACLVVDEAHRLKNNQSKFFRVLNSYKIDYKLLLTGTPLQNNLEELFHLLNFLTPERFNNLEGFLEEFADISKEDQIKKLHDLLGPHMLRRLKADVFKNMPAKTELIVRVELSQMQKKYYKFILTRNFEALNSKGGGNQVSLLNIMMDLKKCCNHPYLFPVAAVEAPVLPNGSYDGSSLVKSSGKLMLLQKMLKKLRDEGHRVLIFSQMTKMLDLLEDFLEYEGYKYERIDGGITGGLRQEAIDRFNAPGAQQFCFLLSTRAGGLGINLATADTVIIYDSDWNPHNDIQAFSRAHRIGQTKWKPSWATWMRKTPGHRSQGSPWKSRPFQPPWIEWRVRTSTRAQPARREPERSGQRRRRRPRPPRSSCREVRWLMPVIPALWEAEVGRSQGQEFKTILSNMVKPVSTKNTKKLAGHGGERQ

SEQ ID NO: 789 - protein, 636 aa, Artificial Sequence
  Synthetic polypeptide
MSGAIFGPLEGPSSLDAPSIHPLVCPLCHVQYERPCLLDCFHDFCAGCLRGRATDGRLTCPLCQHQTVLKGPSGLPPVDRLLQFLVDSSGDGVEAVRCANCDLECSEQDVETTYFCNTCGQPLCARCRDETHRARMFARHDIVALGQRSRDVPQKCTLHAEPYLLFSTDKKLLLCIRCFRDMQKESRAHCVDLESAYVQGCERLEQAVLAVKALQTATREAIALLQAMVEEVRHSAAEEEDAIHALFGSMQDRLAERKALLLQAVQSQYEEKDKAFKEQLSHLATLLPTLQVHLVICSSFLSLANKAEFLDLGYELMERLQGIVTRPHHLRPIQSSKIASDHRAEFARCLEPLLLLGPRRVAAAASGANTLAGGLGPKALTGPHCPSPVGKMSGSPVQKPTLHRSISTKVLLAEGENTPFAEHCRHYEDSYRHLQAEMQSLKDQVQELHRDLTKHHSLIKAEIMGDVLHKSLQLDVQIASEHASLEGMRVVFQEIWEEAYQRVANEQEIYEAQLHDLLQLRQENAYLTTITKQITPYVRSIAKVKERLEPSPTWMSTGTASSAVARMLDVLPQTCYSHLPISVNSTTFTQVKSLGESLDSFHPLHFQPTPKSCWLYCSCLNPPALVSIAPLNPDHH

SEQ ID NO: 790 - protein, 1882 aa, Artificial Sequence
  Synthetic polypeptide
MAERRAFAQKISRTVAAEVRKQISGQYSGSPQLLKNLNIVGNISHHTTVPLTEAVDPVDLEDYLITHPLAVDSGPLRDLIEFPPDDIEVVYSPRDCRTLVSAVPEESEMDPHVRDCIRSYTEDWAIVIRKYHKLGTGFNPNTLDKQKERQKGLPKQVFESDEAPDGNSYQDDQDDLKRRSMSIDDTPRGSWACSIFDLKNSLPDALLPNLLDRTPNEEIDRQNDDQRKSNRHKELFALHPSPDEEEPIERLSVPDIPKEHFGQRLLVKCLSLKFEIEIEPIFASLALYDVKEKKKISENFYFDLNSEQMKGLLRPHVPPAAITTLARSAIFSITYPSQDVFLVIKLEKVLQQGDIGECAEPYMIFKEADATKNKEKLEKLKSQADQFCQRLGKYRMPFAWTAIHLMNIVSSAGSLERDSTEVEISTGERKGSWSERRNSSIVGRRSLERTTSGDDACNLTSFRPATLTVTNFFKQEGDRLSDEDLYKFLADMRRPSSVLRRLRPITAQLKIDISPAPENPHYCLTPELLQVKLYPDSRVRPTREILEFPARDVYVPNTTYRNLLYIYPQSLNFANRQGSARNITVKVQFMYGEDPSNAMPVIFGKSSCSEFSKEAYTAVVYHNRSPDFHEEIKVKLPATLTDHHHLLFTFYHVSCQQKQNTPLETPVGYTWIPMLQNGRLKTGQFCLPVSLEKPPQAYSVLSPEVPLPGMKWVDNHKGVFNVEVVAVSSIHTQDPYLDKFFALVNALDEHLFPVRIGDMRIMENNLENELKSSISALNSSQLEPVVRFLHLLLDKLILLVIRPPVIAGQIVNLGQASFEAMASIINRLHKNLEGNHDQHGRNSLLASYIHYVFRLPNTYPNSSSPGPGGLGGSVHYATMARSAVRPASLNLNRSRSLSNSNPDISGTPTSPDDEVRSIIGSKGLDRSNSWVNTGGPKAAPWGSNPSPSAESTQAMDRSCNRMSSHTETSSFLQTLTGRLPTKKLFHEELALQWVVCSGSVRESALQQAWFFFELMVKSMVHHLYFNDKLEAPRKSRFPERFMDDIAALVSTIASDIVSRFQKDTEMVERLNTSLAFFLNDLLSVMDRGFVFSLIKSCYKQVSSKLYSLPNPSVLVSLRLDFLRIICSHEHYVTLNLPCSLLTPPASPSPSVSSATSQSSGFSTNVQDQKIANMFELSVPFRQQHYLAGLVLTELAVILDPDAEGLFGLHKKVINMVHNLLSSHDSDPRYSDPQIKARVAMLYLPLIGIIMETVPQLYDFTETHNQRGRPICIATDDYESESGSMISQTVAMAIAGTSVPQLTRPGSFLLTSTSGRQHTTFSAESSRSLLICLLWVLKNADETVLQKWFTDLSVLQLNRLLDLLYLCVSCFEYKGKKVFERMNSLTFKKSKDMRAKLEEAILGSIGARQEMVRRSRGQLERSPSGSAFGSQENLRWRKDMTHWRQNTEKLDKSRAEIEHEALIDGNLATEANLIILDTLEIVVQTVSVTESKESILGGVLKVLLHSMACNQSAVYLQHCFATQRALVSKFPELLFEEETEQCADLCLRLLRHCSSSIGTIRSHASASLYLLMRQNFEIGNNFARVKMQVTMSLSSLVGTSQNFNEEFLRRSLKTILTYAEEDLELRETTFPDQVQDLVFNLHMILSDTVKMKEHQEDPEMLIDLMYRIAKGYQTSPDLRLTWLQNMAGKHSERSNHAEAAQCLVHSAALVAEYLSMLEDRKYLPVGCVTFQNISSNVLEESAVSDDVVSPDEEGICSGKYFTESGLVGLLEQAAASFSMAGMYEAVNEVYKVLIPIHEANRDAKKLSTIHGKLQEAFSKIVHQDGKRMFGTYFRVGFYGTKFGDLDEQEFVYKEPAITKLAEISHRLECSGWTGSIGFTWEIV

SEQ ID NO: 791 - protein, 7 aa, Artificial Sequence
  Synthetic polypeptide
QKLGRKS

SEQ ID NO: 792 - protein, 1862 aa, Artificial Sequence
  Synthetic polypeptide
MAERRAFAQKISRTVAAEVRKQISGQYSGSPQLLKNLNIVGNISHHTTVPLTEAVDPVDLEDYLITHPLAVDSGPLRDLIEFPPDDIEVVYSPRDCRTLVSAVPEESEMDPHVRDCIRSYTEDWAIVIRKYHKLGTGFNPNTLDKQKERQKGLPKQVFESDEAPDGNSYQDDQDDLKRRSMSIDDTPRGSWACSIFDLKNSLPDALLPNLLDRTPNEEIDRQNDDQRKSNRHKELFALHPSPDEEEPIERLSVPDIPKEHFGQRLLVKCLSLKFEIEIEPIFASLALYDVKEKKKISENFYFDLNSEQMKGLLRPHVPPAAITTLARSAIFSITYPSQDVFLVIKLEKVLQQGDIGECAEPYMIFKEADATKNKEKLEKLKSQADQFCQRLGKYRMPFAWTAIHLMNIVSSAGSLERDSTEVEISTGERKGSWSERRNSSIVGRRSLERTTSGDDACNLTSFRPATLTVTNFFKQEGDRLSDEDLYKFLADMRRPSSVLRRLRPITAQLKIDISPAPENPHYCLTPELLQVKLYPDSRVRPTREILEFPARDVYVPNTTYRNLLYIYPQSLNFANRQGSARNITVKVQFMYGEDPSNAMPVIFGKSSCSEFSKEAYTAVVYHNRSPDFHEEIKVKLPATLTDHHHLLFTFYHVSCQQKQNTPLETPVGYTWIPMLQNGRLKTGQFCLPVSLEKPPQAYSVLSPEVPLPGMKWVDNHKGVFNVEVVAVSSIHTQDPYLDKFFALVNALDEHLFPVRIGDMRIMENNLENELKSSISALNSSQLEPVVRFLHLLLDKLILLVIRPPVIAGQIVNLGQASFEAMASIINRLHKNLEGNHDQHGRNSLLASYIHYVFRLPNTYPNSSSPGPGGLGGSVHYATMARSAVRPASLNLNRSRSLSNSNPDISGTPTSPDDEVRSIIGSKAMDRSCNRMSSHTETSSFLQTLTGRLPTKKLFHEELALQWVVCSGSVRESALQQAWFFFELMVKSMVHHLYFNDKLEAPRKSRFPERFMDDIAALVSTIASDIVSRFQKDTEMVERLNTSLAFFLNDLLSVMDRGFVFSLIKSCYKQVSSKLYSLPNPSVLVSLRLDFLRIICSHEHYVTLNLPCSLLTPPASPSPSVSSATSQSSGFSTNVQDQKIANMFELSVPFRQQHYLAGLVLTELAVILDPDAEGLFGLHKKVINMVHNLLSSHDSDPRYSDPQIKARVAMLYLPLIGIIMETVPQLYDFTETHNQRGRPICIATDDYESESGSMISQTVAMAIAGTSVPQLTRPGSFLLTSTSGRQHTTFSAESSRSLLICLLWVLKNADETVLQKWFTDLSVLQLNRLLDLLYLCVSCFEYKGKKVFERMNSLTFKKSKDMRAKLEEAILGSIGARQEMVRRSRGQLGTYTIASPPERSPSGSAFGSQENLRWRKDMTHWRQNTEKLDKSRAEIEHEALIDGNLATEANLIILDTLEIVVQTVSVTESKESILGGVLKVLLHSMACNQSAVYLQHCFATQRALVSKFPELLFEEETEQCADLCLRLLRHCSSSIGTIRSHASASLYLLMRQNFEIGNNFARVKMQVTMSLSSLVGTSQNFNEEFLRRSLKTILTYAEEDLELRETTFPDQVQDLVFNLHMILSDTVKMKEHQEDPEMLIDLMYRIAKGYQTSPDLRLTWLQNMAGKHSERSNHAEAAQCLVHSAALVAEYLSMLEDRKYLPVGCVTFQNISSNVLEESAVSDDVVSPDEEGICSGKYFTESGLVGLLEQAAASFSMAGMYEAVNEVYKVLIPIHEANRDAKKLSTIHGKLQEAFSKIVHQSTGWERMFGTYFRVGFYGTKFGDLDEQEFVYKEPAITKLAEISHRLECSGWTGSIGFTWEIV

SEQ ID NO: 793 - protein, 178 aa, Artificial Sequence
  Synthetic polypeptide
MSGPDVETPSAIQICRIMRPDDANVAGNVHGGTILKMIEEAGAIISTRHCNSQNGERCVAALARVERTDFLSPMCIGEVAHVSAEITYTSKHSVEVQVNVMSENILTGAKKLTNKATLWYVPLSLKNVDKVLEVPPVVYSRQEQEEEGRKRYEAQKLERMETKWRNGDIVQPVLNPGT

SEQ ID NO: 794 - protein, 169 aa, Artificial Sequence
  Synthetic polypeptide
MAFQLSRIMRPDDANVAGNVHGGTILKMIEEAGAIISTRHCNSQNGERCVAALARVERTDFLSPMCIGEVAHVSAEITYTSKHSVEVQVNVMSENILTGAKKLTNKATLWYVPLSLKNVDKVLEVPPVVYSRQEQEEEGRKRYEAQKLERMETKWRNGDIVQPVLNPGT

SEQ ID NO: 795 - protein, 190 aa, Artificial Sequence
  Synthetic polypeptide
MLLLRRSLSLNVLRKEVDRACFGEKAKQIMRPDDANVAGNVHGGTILKMIEEAGAIISTRHCNSQNGERCVAALARVERTDFLSPMCIGEVAHVSAEITYTSKHSVEVQVNVMSENILTGAKKLTNKATLWYVPLSLKNVDKVLEVPPVVYSRQEQEEEGRKRYEAQKLERMETKWRNGDIVQPVLNPGT

SEQ ID NO: 796 - protein, 220 aa, Artificial Sequence
  Synthetic polypeptide
MKLLARALRLCEFGRQASSRRLVAGQGCVGPRRGCCAPVQVVGPRADLPPCGACITGRIMRPDDANVAGNVHGGTILKMIEEAGAIISTRHCNSQNGERCVAALARVERTDFLSPMCIGEVAHVSAEITYTSKHSVEVQVNVMSENILTGAKKLTNKATLWYVPLSLKNVDKVLEVPPVVYSRQEQEEEGRKRYEAQKLERMETKWRNGDIVQPVLNPGT

SEQ ID NO: 797 - protein, 105 aa, Artificial Sequence
  Synthetic polypeptide
MCIGEVAHVSAEITYTSKHSVEVQVNVMSENILTGAKKLTNKATLWYVPLSLKNVDKVLEVPPVVYSRQEQEEEGRKRYEAQKLERMETKWRNGDIVQPVLNPGT

SEQ ID NO: 798 - protein, 210 aa, Artificial Sequence
  Synthetic polypeptide
MARPGLIHSAPGLPDTCALLQPPAASAAAAPSMSGPDVETPSAIQICRIMRPDDANVAGNVHGGTILKMIEEAGAIISTRHCNSQNGERCVAALARVERTDFLSPMCIGEVAHVSAEITYTSKHSVEVQVNVMSENILTGAKKLTNKATLWYVPLSLKNVDKVLEVPPVVYSRQEQEEEGRKRYEAQKLERMETKWRNGDIVQPVLNPGT

SEQ ID NO: 799 - protein, 161 aa, Artificial Sequence
  Synthetic polypeptide
MRPDDANVAGNVHGGTILKMIEEAGAIISTRHCNSQNGERCVAALARVERTDFLSPMCIGEVAHVSAEITYTSKHSVEVQVNVMSENILTGAKKLTNKATLWYVPLSLKNVDKVLEVPPVVYSRQEQEEEGRKRYEAQKLERMETKWRNGDIVQPVLNPGT

SEQ ID NO: 800 - protein, 197 aa, Artificial Sequence
  Synthetic polypeptide
MSGPDVETPSAIQICRIMRPDDANVAGNVHGGTILKMIEEAGAIISTRHCNSQNGERCVAALARVERTDFLSPMCIGEVAHVSAEITYTSKHSVEVQVNVMSENILTGAKKLTNKATLWYVPLSLKNVDKVLEVPPVVYSRQEQEEEGRKRYEAQKLERMETKWRNGDIVQPVLNPVHWLQEHEELRVNTMEKTACM

SEQ ID NO: 801 - protein, 188 aa, Artificial Sequence
  Synthetic polypeptide
MAFQLSRIMRPDDANVAGNVHGGTILKMIEEAGAIISTRHCNSQNGERCVAALARVERTDFLSPMCIGEVAHVSAEITYTSKHSVEVQVNVMSENILTGAKKLTNKATLWYVPLSLKNVDKVLEVPPVVYSRQEQEEEGRKRYEAQKLERMETKWRNGDIVQPVLNPVHWLQEHEELRVNTMEKTACM

SEQ ID NO: 802 - protein, 209 aa, Artificial Sequence
  Synthetic polypeptide
MLLLRRSLSLNVLRKEVDRACFGEKAKQIMRPDDANVAGNVHGGTILKMIEEAGAIISTRHCNSQNGERCVAALARVERTDFLSPMCIGEVAHVSAEITYTSKHSVEVQVNVMSENILTGAKKLTNKATLWYVPLSLKNVDKVLEVPPVVYSRQEQEEEGRKRYEAQKLERMETKWRNGDIVQPVLNPVHWLQEHEELRVNTMEKTACM

SEQ ID NO: 803 - protein, 239 aa, Artificial Sequence
  Synthetic polypeptide
MKLLARALRLCEFGRQASSRRLVAGQGCVGPRRGCCAPVQVVGPRADLPPCGACITGRIMRPDDANVAGNVHGGTILKMIEEAGAIISTRHCNSQNGERCVAALARVERTDFLSPMCIGEVAHVSAEITYTSKHSVEVQVNVMSENILTGAKKLTNKATLWYVPLSLKNVDKVLEVPPVVYSRQEQEEEGRKRYEAQKLERMETKWRNGDIVQPVLNPVHWLQEHEELRVNTMEKTACM

SEQ ID NO: 804 - protein, 124 aa, Artificial Sequence
  Synthetic polypeptide
MCIGEVAHVSAEITYTSKHSVEVQVNVMSENILTGAKKLTNKATLWYVPLSLKNVDKVLEVPPVVYSRQEQEEEGRKRYEAQKLERMETKWRNGDIVQPVLNPVHWLQEHEELRVNTMEKTACM

SEQ ID NO: 805 - protein, 229 aa, Artificial Sequence
  Synthetic polypeptide
MARPGLIHSAPGLPDTCALLQPPAASAAAAPSMSGPDVETPSAIQICRIMRPDDANVAGNVHGGTILKMIEEAGAIISTRHCNSQNGERCVAALARVERTDFLSPMCIGEVAHVSAEITYTSKHSVEVQVNVMSENILTGAKKLTNKATLWYVPLSLKNVDKVLEVPPVVYSRQEQEEEGRKRYEAQKLERMETKWRNGDIVQPVLNPVHWLQEHEELRVNTMEKTACM

SEQ ID NO: 806 - protein, 180 aa, Artificial Sequence
  Synthetic polypeptide
MRPDDANVAGNVHGGTILKMIEEAGAIISTRHCNSQNGERCVAALARVERTDFLSPMCIGEVAHVSAEITYTSKHSVEVQVNVMSENILTGAKKLTNKATLWYVPLSLKNVDKVLEVPPVVYSRQEQEEEGRKRYEAQKLERMETKWRNGDIVQPVLNPVHWLQEHEELRVNTMEKTACM

SEQ ID NO: 807 - protein, 58 aa, Artificial Sequence
  Synthetic polypeptide
MPFAPVAQARVQWHDFRSLQHLLPAFKRFSCLSLGSSWDYSVKRSLKLDGLLEENGHG

SEQ ID NO: 808 - protein, 19 aa, Artificial Sequence
  Synthetic polypeptide
MPVKRSLKLDGLLEENGHG

SEQ ID NO: 809 - protein, 60 aa, Artificial Sequence
  Synthetic polypeptide
MPFAPVAQARVQWHDFRSLQHLLPAFKRFSCLSLGSSWDYSVKRSLKLDGLLEENEHPHS

SEQ ID NO: 810 - protein, 21 aa, Artificial Sequence
  Synthetic polypeptide
MPVKRSLKLDGLLEENEHPHS

SEQ ID NO: 811 - protein, 606 aa, Artificial Sequence
  Synthetic polypeptide
MAISPRSDATFSSQKSTPSESPRTKKFPLTEEEIFYMNCRAAYLTVFKSSLENIISKDQLYLALQHAGRNPSQKTINKYWTPQTAKLNFDDFCIILRKEKPTSKAELLKSFKQLDVNDDGCILHTDLYKFLTKRGEKMTREEVNAIINLADVNADGKFDYIKFCKLYMTTNEQCLKTTLEKLEVDSKLMRHQFGNHIEGSPERDPSPVPKPSPKITRKTDPETFLNKGDTRSSLLSATRKFKTSVSFTVTMGANGNRNSKLMEPNLIKDWQHMQSKGCFFLEEDGEIISHQYRMQIAQRSMVYLTIKPLNLSQVEGKPSPWLSVDTALYILKENESQANLQLVCFTELRNREVFGWTGELGPGIYWLIPSTTGCRLRKKIKPVTDEAQLVYRDETGELFLTKEFKSTLSDIFEVIDLDGNGLLSLEEYNFFELRTSGEKCDEDAWAVCRENFDTKRNELTRQGFMDLNLMEANDREGDPCDLWVTLHSMGYNKALELTEACPFVIDIYAEKCKPKIKAVHMEACSGQLEKAICKSVLSNGDAKVMDGYENIIVHTYSCDTWITSVIENKSDEKVIIHISNELSKNCINNRGLNIFAVEVGPKSTMP

SEQ ID NO: 812 - protein, 646 aa, Artificial Sequence
  Synthetic polypeptide
MAAAAGDGGGEGGAGLGSAAGLGPGPGLRGQGPSAEAHEGAPDPMPAALHPEEVAARLQRMQRELSNRRKILVKNLPQDSNCQEVHDLLKDYDLKYCYVDRNKRTAFVTLLNGEQAQNAIQMFHQYSFRGKDLIVQLQPTDALLCITNVPISFTSEEFEELVRAYGNIERCFLVYSEVTGHSKGYGFVEYMKKDFAAKARLELLGRQLGASALFAQWMDVNLLASELIHSKCLCIDKLPSDYRDSEELLQIFSSVHKPVFCQLAQDEGSYVGGFAVVEYSTAEQAEEVQQAADGMTIKGSKVQVSFCAPGAPGRSTLAALIAAQRVMHSNQKGLLPEPNPVQIMKSLNNPAMLQVLLQPQLCGRAVKPAVLGTPHSLPHLMNPSISPAFLHLNKAHQSSVMGNTSNLFLQNLSHIPLAQQQLMKFENIHTNNKPGLLGEPPAVVLQTALGIGSVLPLKKELGHHHGEAHKTSSLIPTQTTITAGMGMLPFFPNQHIAGQAGPGHSNTQEKQPATVGMAEGNFSGSQPYLQSFPNLAAGSLLVGHHKQQQSQPKGTEISSGAASKNQTSLLGEPPKEIRLSKNPYLNLASVLPSVCLSSPASKTTLHKTGIASSILDAISQGSESQHALEKCIAYSPPFGDYAQKQE

SEQ ID NO: 813 - protein, 633 aa, Artificial Sequence
  Synthetic polypeptide
MAAAAGDGGGEGGAGLGSAAGLGPGPGLRGQGPSAEAHEGAPDPMPAALHPEEVAARLQRMQRELSNRRKILVKNLPQDSNCQEVHDLLKDYDLKYCYVDRNKRTAFVTLLNGEQAQNAIQMFHQYSFRGKDLIVQLQPTDALLCITNVPISFTSEEFEELVRAYGNIERCFLVYSEVTGHSKGYGFVEYMKKDFAAKARLELLGRQLGASALFAQWMDVNLLASELIHSKCLCIDKLPSDYRDSEELLQIFSSVHKPVFCQLAQDEGSYVGGFAVVEYSTAEQAEEVQQAADGMTIKGSKVQVSFCAPGAPGRSTLAALIAAQRVMHSNQKGLLPEPNPVQIMKSLNNPAMLQVLLQPQLCGRAVKPAVLGTPHSLPHLMNPSISPAFLHLNKAHQNLSHIPLAQQQLMKFENIHTNNKPGLLGEPPAVVLQTALGIGSVLPLKKELGHHHGEAHKTSSLIPTQTTITAGMGMLPFFPNQHIAGQAGPGHSNTQEKQPATVGMAEGNFSGSQPYLQSFPNLAAGSLLVGHHKQQQSQPKGTEISSGAASKNQTSLLGEPPKEIRLSKNPYLNLASVLPSVCLSSPASKTTLHKTGIASSILDAISQGSESQHALEKCIAYSPPFGDYAQKQE

SEQ ID NO: 814 - protein, 185 aa, Artificial Sequence
  Synthetic polypeptide
MTIKGSKVQVSFCAPGAPGRSTLAALIAAQRVMHSNQKGLLPEPNPVQIMKSLNNPAMLQVLLQPQLCGRAVKPAVLGTPHSLPHLMNPSISPAFLHLNKAHQNQTSLLGEPPKEIRLSKNPYLNLASVLPSVCLSSPASKTTLHKTGIASSILDAISQGSESQHALEKCIAYSPPFGDYAQKQE

SEQ ID NO: 815 - protein, 69 aa, Artificial Sequence
  Synthetic polypeptide
MQYLNIKEDCNAMAFCAKMRSSKKTEVNLEAPEPGVEVIFYLSDREPLRLGSGEYTAEELCIRAAQACQ

SEQ ID NO: 816 - protein, 9 aa, Artificial Sequence
  Synthetic polypeptide
MKDSENKEE

SEQ ID NO: 817 - protein, 66 aa, Artificial Sequence
  Synthetic polypeptide
MSLLGSYRKKTSNDGYESLQLVDSNGDLSAGSGGVGGKQRVNAGAAARSPARQPPDRASTMDSSEE

SEQ ID NO: 818 - protein, 202 aa, Artificial Sequence
  Synthetic polypeptide
MGATEKGGQKSRKLFSLRRPWKATRRLWRPRSARQAAQGASSPDMEPSYGGGLFDMVKGGAGRLFSNLKDNLKDTLKDTSSRVIQSVTSYTKGDLDFTYVTSRIIVMSFPLDNVDIGFRNQVDDIRSFLDSRHLDHYTVYNLSPKSYRTAKFHSRVSECSWPIRQAPSLHNLFAVCRNMYNWLLQNPKNVCVVHCLREQMSN

SEQ ID NO: 819 - protein, 158 aa, Artificial Sequence
  Synthetic polypeptide
MEPSYGGGLFDMVKGGAGRLFSNLKDNLKDTLKDTSSRVIQSVTSYTKGDLDFTYVTSRIIVMSFPLDNVDIGFRNQVDDIRSFLDSRHLDHYTVYNLSPKSYRTAKFHSRVSECSWPIRQAPSLHNLFAVCRNMYNWLLQNPKNVCVVHCLREQMSN

SEQ ID NO: 820 - protein, 171 aa, Artificial Sequence
  Synthetic polypeptide
MKDSENKGASSPDMEPSYGGGLFDMVKGGAGRLFSNLKDNLKDTLKDTSSRVIQSVTSYTKGDLDFTYVTSRIIVMSFPLDNVDIGFRNQVDDIRSFLDSRHLDHYTVYNLSPKSYRTAKFHSRVSECSWPIRQAPSLHNLFAVCRNMYNWLLQNPKNVCVVHCLREQMSN

SEQ ID NO: 821 - protein, 228 aa, Artificial Sequence
  Synthetic polypeptide
MSLLGSYRKKTSNDGYESLQLVDSNGDLSAGSGGVGGKQRVNAGAAARSPARQPPDRASTMDSSGASSPDMEPSYGGGLFDMVKGGAGRLFSNLKDNLKDTLKDTSSRVIQSVTSYTKGDLDFTYVTSRIIVMSFPLDNVDIGFRNQVDDIRSFLDSRHLDHYTVYNLSPKSYRTAKFHSRVSECSWPIRQAPSLHNLFAVCRNMYNWLLQNPKNVCVVHCLREQMSN

SEQ ID NO: 822 - protein, 39 aa, Artificial Sequence
  Synthetic polypeptide
MAGVKALVALSFSGAIGLTFLMLGCALEDYGARYGGTCL

SEQ ID NO: 823 - protein, 428 aa, Artificial Sequence
  Synthetic polypeptide
MNQVTIQWDAVIALYILFSWCHGGITNINCSGHIWVEPATIFKMGMNISIYCQAAIKNCQPRKLHFYKNGIKERFQITRINKTTARLWYKNFLEPHASMYCTAECPKHFQETLICGKDISSGYPPDIPDEVTCVIYEYSGNMTCTWNAGKLTYIDTKYVVHVKSLETEEEQQYLTSSYINISTDSLQGGKKYLVWVQAANALGMEESKQLQIHLDDIVIPSAAVISRAETINATVPKTIIYWDSQTTIEKVSCEMRYKATTNQTWNVKEFDTNFTYVQQSEFYLEPNIKYVFQVRCQETGKRYWQPWSSLFFHKTPETVPQVTSKAFQHDTWNSGLTVASISTGHLTSDNRGDIGLLLGMIVFAVMLSILSLIGIFNRSFRTGIKRRILLLIPKWLYEDIPNMKNSNVVKMLQPGVVVCSCDPSYLGS

SEQ ID NO: 824 - protein, 7 aa, Artificial Sequence
  Synthetic polypeptide
LIFSCHH

SEQ ID NO: 825 - protein, 173 aa, Artificial Sequence
  Synthetic polypeptide
MILRPYQPCGTVKEFDTNFTYVQQSEFYLEPNIKYVFQVRCQETGKRYWQPWSSLFFHKTPETVPQVTSKAFQHDTWNSGLTVASISTGHLTSDNRGDIGLLLGMIVFAVMLSILSLIGIFNRSFRTGIKRRILLLIPKWLYEDIPNMKNSNVVKMLQPGVVVCSCDPSYLGS

SEQ ID NO: 826 - protein, 428 aa, Artificial Sequence
  Synthetic polypeptide
MNQVTIQWDAVIALYILFSWCHGGITNINCSGHIWVEPATIFKMGMNISIYCQAAIKNCQPRKLHFYKNGIKERFQITRINKTTARLWYKNFLEPHASMYCTAECPKHFQETLICGKDISSGYPPDIPDEVTCVIYEYSGNMTCTWNAGKLTYIDTKYVVHVKSLETEEEQQYLTSSYINISTDSLQGGKKYLVWVQAANALGMEESKQLQIHLDDIVIPSAAVISRAETINATVPKTIIYWDSQTTIEKVSCEMRYKATTNQTWNVKEFDTNFTYVQQSEFYLEPNIKYVFQVRCQETGKRYWQPWSSLFFHKTPETVPQVTSKAFQHDTWNSGLTVASISTGHLTSDNRGDIGLLLGMIVFAVMLSILSLIGIFNRSFRTGIKRRILLLIPKWLYEDIPNMKNSNVVKMLQPGVVVCAYSPSYSGG

SEQ ID NO: 827 - protein, 7 aa, Artificial Sequence
  Synthetic polypeptide
LIFSCHH

SEQ ID NO: 828 - protein, 173 aa, Artificial Sequence
  Synthetic polypeptide
MILRPYQPCGTVKEFDTNFTYVQQSEFYLEPNIKYVFQVRCQETGKRYWQPWSSLFFHKTPETVPQVTSKAFQHDTWNSGLTVASISTGHLTSDNRGDIGLLLGMIVFAVMLSILSLIGIFNRSFRTGIKRRILLLIPKWLYEDIPNMKNSNVVKMLQPGVVVCAYSPSYSGG

SEQ ID NO: 829 - protein, 35 aa, Artificial Sequence
  Synthetic polypeptide
MMENLIRGRNPPQYQRSPCKEVRAALRKRPEEECS

SEQ ID NO: 830 - protein, 33 aa, Artificial Sequence
  Synthetic polypeptide
MMENLIRGRNPPQYQRSPCKEVRAALRKRPEEE

SEQ ID NO: 831 - protein, 12 aa, Artificial Sequence
  Synthetic polypeptide
RESLEPSRRRLQ

SEQ ID NO: 832 - protein, 294 aa, Artificial Sequence
  Synthetic polypeptide
MQCLEMTTKRKIIGRLVPCRCFRGEEEIISVLDYSHCSLQQVPKEVFNFERTLEELYLDANQIEELPKQLFNCQALRKLSIPDNDLSNLPTTIASLVNLKELDISKNGVQEFPENIKCCKCLTIIEASVNPISKLPDGFTQLLNLTQLYLNDAFLEFLPANFGRLVKLRILELRENHLKTLPKSMHKLAQLERLDLGNNEFGELPEVLDQIQNLRELWMDNNALQVLPGLLEMLLAALQPSSEIASRKENIFIHGHNPIPRDLHPMISQCRYIKAQPFILYSEQLQGNPNFSDL

SEQ ID NO: 833 - protein, 289 aa, Artificial Sequence
  Synthetic polypeptide
MTTKRKIIGRLVPCRCFRGEEEIISVLDYSHCSLQQVPKEVFNFERTLEELYLDANQIEELPKQLFNCQALRKLSIPDNDLSNLPTTIASLVNLKELDISKNGVQEFPENIKCCKCLTIIEASVNPISKLPDGFTQLLNLTQLYLNDAFLEFLPANFGRLVKLRILELRENHLKTLPKSMHKLAQLERLDLGNNEFGELPEVLDQIQNLRELWMDNNALQVLPGLLEMLLAALQPSSEIASRKENIFIHGHNPIPRDLHPMISQCRYIKAQPFILYSEQLQGNPNFSDL

SEQ ID NO: 834 - protein, 92 aa, Artificial Sequence
  Synthetic polypeptide
MFGACYKQPLKPSGSEPPAEECRMTPRHAGCDVTEMQRILSQPTFTEHLLRAVCTKLANMYSTSTDCREHCRRGMKAKQLKAEAGRLTLFAD

SEQ ID NO: 835 - protein, 222 aa, Artificial Sequence
  Synthetic polypeptide
MDMMLLVQGACCSNQWLAAVLLSLCCLLPSCLPAGQSVDFPWAAVDNMMVRKGDTAVLRCYLEDGASKGAWLNRSSIIFAGGDKWSVDPRVSISTLNKRDYSLQIQNVDVTDDGPYTCSVQTQHTPRTMQVHLTVQVPPKIYDISNDMTVNEGTNVTLTCLATGKPEPSISWRHISPSAKPFENGQYLDIYGITRDQAGEYECSAENDVSFPDVRKVKVVVN

SEQ ID NO: 836 - protein, 94 aa, Artificial Sequence
  Synthetic polypeptide
MQVHLTVQVPPKIYDISNDMTVNEGTNVTLTCLATGKPEPSISWRHISPSAKPFENGQYLDIYGITRDQAGEYECSAENDVSFPDVRKVKVVVN

SEQ ID NO: 837 - protein, 132 aa, Artificial Sequence
  Synthetic polypeptide
MDRSAEFRKWKAQCLSKADLSRKGSVDEDVVELVQFLNMRDQFFTTSSCAGRILLLDRGINGFEVQKQNCCWLLVTHKLCVKDDVIVALKKANGDATLKFEPFVLHVQCRQLQDAQILVAVSRDCTIALQPG

SEQ ID NO: 838 - protein, 111 aa, Artificial Sequence
  Synthetic polypeptide
MDRSAEFRKWKAQCLSKADLSRKGSVDEDVVELVQFLNMRDQFFTTSSCAGRILLLDRGINGFEVQKQNCCWLLVTHKLCVKDDVHSMAIDSGFRNSGITVGKRGKTMLGA

SEQ ID NO: 839 - protein, 144 aa, Artificial Sequence
  Synthetic polypeptide
MDRSAEFRKWKAQCLSKADLSRKGSVDEDVVELVQFLNMRDQFFTTSSCAGRILLLDRGINGFEVQKQNCCWLLVTHKLCVKDDVIVALKKANGDATLKFEPFVLHVQCRQLQDAQILHSMAIDSGFRNSGITVGKRGKTMLGA

SEQ ID NO: 840 - protein, 24 aa, Artificial Sequence
  Synthetic polypeptide
MAIDSGFRNSGITVGKRGKTMLGA

SEQ ID NO: 841 - protein, 39 aa, Artificial Sequence
  Synthetic polypeptide
MNDTEKPADTPSEEEDFGDPRTYDPDFKGPVANSKKAFI

SEQ ID NO: 842 - protein, 273 aa, Artificial Sequence
  Synthetic polypeptide
MACILKRKSVIAVSFIAAFLFLLVVRLVNEVNFPLLLNCFGQPGTKWIPFSYTYRRPLRTHYGYINVKTQEPLQLDCDLCAIVSNSGQMVGQKVGNEIDRSSCIWRMNNAPTKGYEEDVGRMTMIRVVSHTSVPLLLKNPDYFFKEANTTIYVIWGPFRNMRKDGNGIVYNMLKKTVGIYPNAQIYVTTEKRMSYCDGVFKKETGKDRWSFPAQALSLTAAIHVRCDLLLLAFCHDCEASPVMQNCKFIKFFFQYKLPSLRYVFISSVKTNKY

SEQ ID NO: 843 - protein, 334 aa, Artificial Sequence
  Synthetic polypeptide
MAVTDSLSRAATVLATVLLLSFGSVAASHIEDQAEQFFRSGHTNNWAVLVCTSRFWFNYRHVANTLSVYRSVKRLGIPDSHIVLMLADDMACNPRNPKPATVFSHKNMELNVYGDDVEVDYRSYEVTVENFLRVLTGRIPPSTPRSKRLLSDDRSNILIYMTGHGGNGFLKFQDSEEITNIELADAFEQMWQKRRYNELLFIIDTCQGASMYERFYSPNIMALASSQVGEDSLSHQPDPAIGVHLMDRYTFYVLEFLEEINPASQTNMNDLFQVCPKSLCVSTPGHRTDLFQRDPKNVLITDFFGSVRKVEITTETIKLQQDSEIMESRILHGT

SEQ ID NO: 844 - protein, 240 aa, Artificial Sequence
  Synthetic polypeptide
MAVTDSLSRAATVLATVLLLSFGSVAASHIEVTVENFLRVLTGRIPPSTPRSKRLLSDDRSNILIYMTGHGGNGFLKFQDSEEITNIELADAFEQMWQKRRYNELLFIIDTCQGASMYERFYSPNIMALASSQVGEDSLSHQPDPAIGVHLMDRYTFYVLEFLEEINPASQTNMNDLFQVCPKSLCVSTPGHRTDLFQRDPKNVLITDFFGSVRKVEITTETIKLQQDSEIMESRILHGT

SEQ ID NO: 845 - protein, 258 aa, Artificial Sequence
  Synthetic polypeptide
MAVTDSLSRAATVLATVLLLSFGSVAASHIEDQAEQFFRSGHTNNWAVLVTVENFLRVLTGRIPPSTPRSKRLLSDDRSNILIYMTGHGGNGFLKFQDSEEITNIELADAFEQMWQKRRYNELLFIIDTCQGASMYERFYSPNIMALASSQVGEDSLSHQPDPAIGVHLMDRYTFYVLEFLEEINPASQTNMNDLFQVCPKSLCVSTPGHRTDLFQRDPKNVLITDFFGSVRKVEITTETIKLQQDSEIMESRILHGT

SEQ ID NO: 846 - protein, 87 aa, Artificial Sequence
  Synthetic polypeptide
MAVTDSLSRAATVLATVLLLSFGSVAASHIEDQAEQFFRSGHTNNWAVLVCTSRFWFNYRHVANTLSVYRSVKRLGIPDRKEERNYA

SEQ ID NO: 847 - protein, 92 aa, Artificial Sequence
  Synthetic polypeptide
MAVTDSLSRAATVLATVLLLSFGSVAASHIEASILPEFGARFVYTKCKPDQVILLMKSFKYLLIAYRIKSKRYDLVLAYFSSVPYWNLFSPP

SEQ ID NO: 848 - protein, 368 aa, Artificial Sequence
  Synthetic polypeptide
MNTNDAKEYLARREIPQLFESLLNGLMCSKPEDPVEYLESCLQKVKELGGCDKVKWDTFVSQEKKTLPPLNGGQSRRSFLRNVMPENSNFPYRRYDRLPPIHQFSIESDTDLSETAELIEEYEVFDPTRPRPKIILVIGGPGSGKGTQSLKIAERYGFQYISVGELLRKKIHSTSSNRKWSLIAKIITTGELAPQETTITEIKQKLMQIPDEEGIVIDGFPRDVAQALSFEDQICTPDLVVFLACANQRLKERLLKRAEQQGRPDDNVKATQRRLMNFKQNAAPLVKYFQEKGLIMTFDADRDEDEVFYDISMAVDNKLFPNKEAAAGSSDLDPSMILDTGEIIDTGSDYEDQKLCMQEENGVKYLKC

SEQ ID NO: 849 - protein, 342 aa, Artificial Sequence
  Synthetic polypeptide
MCSKPEDPVEYLESCLQKVKELGGCDKVKWDTFVSQEKKTLPPLNGGQSRRSFLRNVMPENSNFPYRRYDRLPPIHQFSIESDTDLSETAELIEEYEVFDPTRPRPKIILVIGGPGSGKGTQSLKIAERYGFQYISVGELLRKKIHSTSSNRKWSLIAKIITTGELAPQETTITEIKQKLMQIPDEEGIVIDGFPRDVAQALSFEDQICTPDLVVFLACANQRLKERLLKRAEQQGRPDDNVKATQRRLMNFKQNAAPLVKYFQEKGLIMTFDADRDEDEVFYDISMAVDNKLFPNKEAAAGSSDLDPSMILDTGEIIDTGSDYEDQKLCMQEENGVKYLKC

SEQ ID NO: 850 - protein, 17 aa, Artificial Sequence
  Synthetic polypeptide
QDLIMKIRNFACRKKME

SEQ ID NO: 851 - protein, 415 aa, Artificial Sequence
  Synthetic polypeptide
MNTNDAKEYLARREIPQLFESLLNGLMCSKPEDPVEYLESCLQKVKELGGCDKVKWDTFVSQEKKTLPPLNGGQSRRSFLRNVMPENSNFPYRRYDRLPPIHQFSIESDTDLSETAELIEEYEVFDPTRPRPKIILVIGGPGSGKGTQSLKIAERYGFQYISVGELLRKKIHSTSSNRKWSLIAKIITTGELAPQETTITEIKQKLMQIPDEEGIVIDGFPRDVAQALSFEDQICTPDLVVFLACANQRLKERLLKRAEQQGRPDDNVKATQRRLMNFKQNAAPLVKYFQEKGLIMTFDADRDEDEVFYDISMAVDNKLFPNKEAAAGSSDLDPSMILDTGEIIDTGSDYEDQGDDQLNVFGEDTMGGFMEDLRKCKIIFIIGSKTTNPLGGTNNSGRATLKSCNAHCEGLRLHS

SEQ ID NO: 852 - protein, 389 aa, Artificial Sequence
  Synthetic polypeptide
MCSKPEDPVEYLESCLQKVKELGGCDKVKWDTFVSQEKKTLPPLNGGQSRRSFLRNVMPENSNFPYRRYDRLPPIHQFSIESDTDLSETAELIEEYEVFDPTRPRPKIILVIGGPGSGKGTQSLKIAERYGFQYISVGELLRKKIHSTSSNRKWSLIAKIITTGELAPQETTITEIKQKLMQIPDEEGIVIDGFPRDVAQALSFEDQICTPDLVVFLACANQRLKERLLKRAEQQGRPDDNVKATQRRLMNFKQNAAPLVKYFQEKGLIMTFDADRDEDEVFYDISMAVDNKLFPNKEAAAGSSDLDPSMILDTGEIIDTGSDYEDQGDDQLNVFGEDTMGGFMEDLRKCKIIFIIGSKTTNPLGGTNNSGRATLKSCNAHCEGLRLHS

SEQ ID NO: 853 - protein, 12 aa, Artificial Sequence
  Synthetic polypeptide
QDLIMKIRVMTS

SEQ ID NO: 854 - protein, 751 aa, Artificial Sequence
  Synthetic polypeptide
MAASRSTRVTRSTVGLNGLDESFCGRTLRNRSIAHPEEISSNSQVRSRSPKKRPEPVPIQKGNNNGRTTDLKQQSTRESWVSPRKRGLSSSEKDNIERQAIENCERRQTEPVSPVLKRIKRCLRSEAPNSSEEDSPIKSDKESVEQRSTVVDNDADFQGTKRACRCLILDDCEKREIKKVNVSEEGPLNSAVVEEITGYLAVNGVDDSDSAVINCDDCQPDGNTKQNSIGSYVLQEKSVAENGDTDTQTSMFLDSRKEDSYIDHKVPCTDSQVQVKLEDHKIVTACLPVEHVNQLTTEPATGPFSETQSSLRDSEEEVDVVGDSSASKEQCKENTNNELDTSLESMPASGEPEPSPVLDCVSAQMMSLSEPQEHRYTLRTSPRRAAPTRGSPTKNSSPYRENGQFEENNLSPNETNATVSDNVSQSPTNPGEISQNEKGICCDSQNNGSEGVSKPPSEARLNIGHLPSAKESASQHITEEEDDDPDVYYFESDHVALKHNKDYQRLLQTIAVLEAQRSQAVQDLESLGRHQREALKNPIGFVEKLQKKADIGLPYPQRVVQLPEIVWDQYTHSLGNFEREFKNRKRHTRRVKLVFDKVGLPARPKSPLDPKKDGESLSYSMLPLSDGPEGSSSRPQMIRGRLCDDTKPETFNQLWTVEEQKKLEQLLIKYPPEEVESRRWQKIADELGNRTAKQVASRVQKYFIKLTKAGIPVPGRTPNLYIYSKKCECILCVAQDNSSNVARGSQRLDNP

SEQ ID NO: 855 - protein, 257 aa, Artificial Sequence
  Synthetic polypeptide
MIDLWLYSYQRLLQTIAVLEAQRSQAVQDLESLGRHQREALKNPIGFVEKLQKKADIGLPYPQRVVQLPEIVWDQYTHSLGNFEREFKNRKRHTRRVKLVFDKVGLPARPKSPLDPKKDGESLSYSMLPLSDGPEGSSSRPQMIRGRLCDDTKPETFNQLWTVEEQKKLEQLLIKYPPEEVESRRWQKIADELGNRTAKQVASRVQKYFIKLTKAGIPVPGRTPNLYIYSKKCECILCVAQDNSSNVARGSQRLDNP

SEQ ID NO: 856 - protein, 502 aa, Artificial Sequence
  Synthetic polypeptide
MAASRSTRVTRSTVGLNGLDESFCGRTLRNRSIAHPEEISSNSQVRSRSPKKRPEPVPIQKGNNNGRTTDLKQQSTRESWVSPRKRGLSSSEKDNIERQAIENCERRQTEPVSPVLKRIKRCLRSEAPNSSEEDSPIKSDKESVEQRSTVVDNDADFQGTKRACRCLILDDCEKREIKKVNVSEEGPLNSAVVEEITGYLAVNGVDDSDSAVINCDDCQPDGNTKQNSIGSYVLQEKSVAENGDTDTQTSMFLDSRKEDSYIDHKVPCTDSQVQVKLEDHKIVTACLPVEHVNQLTTEPATGPFSETQSSLRDSEEEVDVVGDSSASKEQCKENTNNELDTSLESMPASGEPEPSPVLDCVSAQMMSLSEPQEHRYTLRTSPRRAAPTRGSPTKNSSPYRENGQFEENNLSPNETNATVSDNVSQSPTNPGEISQNEKGICCDSQNNGSEGVSKPPSEARLNIGHLPSAKESASQHITEEEDDDPDVYYFESDHVALKHNKE

SEQ ID NO: 857 - protein, 158 aa, Artificial Sequence
  Synthetic polypeptide
MAASRSTRVTRSTVGLNGLDESFCGRTLRNRSIAHPEEISSNSQVRSRSPKKRPEPVPIQKGNNNGRTTDLKQQSTRESWMRSSSCRKTSLGLPLILHYGELYNYFIRYYNGIIRIIEIKYTVNVMCLNHPETTPSPSLWKKLSFMKPVPSAKKVGDC

SEQ ID NO: 858 - protein, 809 aa, Artificial Sequence
  Synthetic polypeptide
MSAFRNHCPHLDSVGEITKEDLIQKSLGTCQDCKVQGPNLWACLENRCSYVGCGESQVDHSTIHSQETKHYLTVNLTTLRVWCYACSKEVFLDRKLGTQPSLPHVRQPHQIQENSVQDFKIPSNTTLKTPLVAVFDDLDIEADEEDELRARGLTGLKNIGNTCYMNAALQALSNCPPLTQFFLDCGGLARTDKKPAICKSYLKLMTELWHKSRPGSVVPTTLFQGIKTVNPTFRGYSQQDAQEFLRCLMDLLHEELKEQVMEVEEDPQTITTEETMEEDKSQSDVDFQSCESCSNSDRAENENGSRCFSEDNNETTMLIQDDENNSEMSKDWQKEKMCNKINKVNSEGEFDKDRDSISETVDLNNQETVKVQIHSRASEYITDVHSNDLSTPQILPSNEGVNPRLSASPPKSGNLWPGLAPPHKKAQSASPKRKKQHKKYRSVISDIFDGTIISSVQCLTCDRVSVTLETFQDLSLPIPGKEDLAKLHSSSHPTSIVKAGSCGEAYAPQGWIAFFMEYVKRFVVSCVPSWFWGPVVTLQDCLAAFFARDELKGDNMYSCEKCKKLRNGVKFCKVQNFPEILCIHLKRFRHELMFSTKISTHVSFPLEGLDLQPFLAKDSPAQIVTYDLLSVICHHGTASSGHYIAYCRNNLNNLWYEFDDQSVTEVSESTVQNAEAYVLFYRKSSEEAQKERRRISNLLNIMEPSLLQFYISRQWLNKFKTFAEPGPISNNDFLCIHGGVPPRKAGYIEDLVLMLPQNIWDNLYSRYGGGPAVNHLYICHTCQIEAEKIEKRRKTELEIFIRVDNLNLK

SEQ ID NO: 859 - protein, 94 aa, Artificial Sequence
  Synthetic polypeptide
TRKLSKCKYTAELQNISLMSIRMTCLHHRSFHQMKVLIHVYRQALLNQAICGQDWHHHTKKLSLHLQREKNSTRNTEVLFQTYLMEQSLVQCSV

SEQ ID NO: 860 - protein, 840 aa, Artificial Sequence
  Synthetic polypeptide
MTGSNSHITILTLKVLPHFESLGKQEKIPNKMSAFRNHCPHLDSVGEITKEDLIQKSLGTCQDCKVQGPNLWACLENRCSYVGCGESQVDHSTIHSQETKHYLTVNLTTLRVWCYACSKEVFLDRKLGTQPSLPHVRQPHQIQENSVQDFKIPSNTTLKTPLVAVFDDLDIEADEEDELRARGLTGLKNIGNTCYMNAALQALSNCPPLTQFFLDCGGLARTDKKPAICKSYLKLMTELWHKSRPGSVVPTTLFQGIKTVNPTFRGYSQQDAQEFLRCLMDLLHEELKEQVMEVEEDPQTITTEETMEEDKSQSDVDFQSCESCSNSDRAENENGSRCFSEDNNETTMLIQDDENNSEMSKDWQKEKMCNKINKVNSEGEFDKDRDSISETVDLNNQETVKVQIHSRASEYITDVHSNDLSTPQILPSNEGVNPRLSASPPKSGNLWPGLAPPHKKAQSASPKRKKQHKKYRSVISDIFDGTIISSVQCLTCDRVSVTLETFQDLSLPIPGKEDLAKLHSSSHPTSIVKAGSCGEAYAPQGWIAFFMEYVKRFVVSCVPSWFWGPVVTLQDCLAAFFARDELKGDNMYSCEKCKKLRNGVKFCKVQNFPEILCIHLKRFRHELMFSTKISTHVSFPLEGLDLQPFLAKDSPAQIVTYDLLSVICHHGTASSGHYIAYCRNNLNNLWYEFDDQSVTEVSESTVQNAEAYVLFYRKSSEEAQKERRRISNLLNIMEPSLLQFYISRQWLNKFKTFAEPGPISNNDFLCIHGGVPPRKAGYIEDLVLMLPQNIWDNLYSRYGGGPAVNHLYICHTCQIEAEKIEKRRKTELEIFIRVDNLNLK

SEQ ID NO: 861 - protein, 832 aa, Artificial Sequence
  Synthetic polypeptide
MTGSNSHITILTLKVLPHFESLGKQEKIPNKMSAFRNHCPHLDSVGEITKEDLIQKSLGTCQDCKVQGPNLWACLENRCSYVGCGESQVDHSTIHSQETKHYLTVNLTTLRVWCYACSKEVFLDRKLGTQPSLPHVRQPHQIQENSVQDFKIPSNTTLKTPLVAVFDDLDIEADEEDELRARGLTGLKNIGNTCYMNAALQALSNCPPLTQFFLDCGGLARTDKKPAICKSYLKLMTELWHKSRPGSVVPTTLFQGIKTVNPTFRGYSQQDAQEFLRCLMDLLHEELKEQVMEVEEDPQTITTEETMEEDKSQSDVDFQSCESCSNSDRAENENGSRCFSEDNNETTMLIQDDENNSEMSKDWQKEKMCNKINKVNSEGEFDKDRDSISETVDLNNQETVKVQIHSRASEYITDVHSNDLSTPQILPSNEGVNPRLSASPPKSGNLWPGLAPPHKKAQSASPKRKKQHKKYRSVISDIFDGTIISSVQCLTCDRVSVTLETFQDLSLPIPGKEDLAKLHSSSHPTSIVKAGSCGEAYAPQGWIAFFMEYVKSWFWGPVVTLQDCLAAFFARDELKGDNMYSCEKCKKLRNGVKFCKVQNFPEILCIHLKRFRHELMFSTKISTHVSFPLEGLDLQPFLAKDSPAQIVTYDLLSVICHHGTASSGHYIAYCRNNLNNLWYEFDDQSVTEVSESTVQNAEAYVLFYRKSSEEAQKERRRISNLLNIMEPSLLQFYISRQWLNKFKTFAEPGPISNNDFLCIHGGVPPRKAGYIEDLVLMLPQNIWDNLYSRYGGGPAVNHLYICHTCQIEAEKIEKRRKTELEIFIRVDNLNLK

SEQ ID NO: 862 - protein, 123 aa, Artificial Sequence
  Synthetic polypeptide
MASKRALVILAKGAEEMETVIPVDVMRRAGIKVTVAGLAGKDPVQCSRDVVICPDASLEDAKKEGPYDVVVLPGGNLGAQNLSESAAVKEILKEQENRKGLIAAICAGPGAVAHACNPSTLGG

SEQ ID NO: 863 - protein, 103 aa, Artificial Sequence
  Synthetic polypeptide
MASKRALVILAKGAEEMETVIPVDVMRRAGIKVTVAGLAGKDPVQCSRDVVICPDASLEDAKKESAAVKEILKEQENRKGLIAAICAGPGAVAHACNPSTLGG

SEQ ID NO: 864 - protein, 84 aa, Artificial Sequence
  Synthetic polypeptide
GKDPVQCSRDVVICPDASLEDAKKEGPYDVVVLPGGNLGAQNLSESAAVKEILKEQENRKGLIAAICAGPGAVAHACNPSTLGG

SEQ ID NO: 865 - protein, 17 aa, Artificial Sequence
  Synthetic polypeptide
MGNAATAKKGSEVESGL

SEQ ID NO: 866 - protein, 329 aa, Artificial Sequence
  Synthetic polypeptide
MSRPQLRRWRLVSSPPSGVPGLALLALLALLALRLAAGTDCPCPEPELCRPIRHHPDFEVFVFDVGQKTWKSYDWSQITTVATFGKYDSELMCYAHSKGARVVLKGDVSLKDIIDPAFRASWIAQKLNLAKTQYMDGINIDIEQEVNCLSPEYDALTALVKETTDSFHREIEGSQVTFDVAWSPKNIDRRCYNYTGIADACDFLFVMSYDEQSQIWSECIAAANAPYNQTLTGYNDYIKMSINPKKLVMGVPWYGYDYTCLNLSEDHVCTIAKVPFRGAPCSDAAGRQVPYKTIMKQINSSISGNLWDKDQRAPYYNYKPCSPFAFHRD

SEQ ID NO: 867 - protein, 142 aa, Artificial Sequence
  Synthetic polypeptide
MARQPYRFPQARIPERGSGVFRLTVSDLLTTDVVEIPRKLEEKPEDVTELLQSHDQTRMDEELFVMDEQRKWFLEMESTLGEDAMNIVEMTTHNLAYSVNIVDKTAARFERTDSNFERSSTVGKMQSNSVACNREIFCDRKS

SEQ ID NO: 868 - protein, 826 aa, Artificial Sequence
  Synthetic polypeptide
MAPKQKKKTSRGKKRLKPVLAASEDMEPVNMESMGHPEIYPLVLTTKTQEIFNCRIDEDVTDEQPYKLINKEDIFEDLRNRAAVSDFHPVKKIVQEYPGNELLLVYDKDFKYGLNFYLIATEEGKENYLNPPEVPEEQEEYKEHIPEDVYIYKPPVSKPWVSLGSEKEIEEESVTESTKQITYMISRKRSEFGAPIKFSDQNASSVKDAYIECTAYPDKNFTLKQLEKDVGMQVIPQIKDISTQTKCVEIALQQNEIMNTFIDDWKYLAEEEGTFGDKTDTHLKEYQSFTDLHSPTEKMITCVSWHPTIYGLIAVSVAVRLSFEDRVHFSGKLLLQPSLILFWSFSDPIHPQLMLESPDDIFCFKFCPSDPNIIAGGCINGQIVMWDITAHADRIENIKAGGSRSKRATLKPMFLLEPESNKEAMYIRHCAVSSIENGHKKVITDIHWLSDTFEINRMGSVFENRSGICCQLVTCSADCTICFWDIRPQKPLTPQTTEKKKEESIEIPFDVPSTFLHLDLSWKPLTKVRLSKGETSLDHCPTKISLNEDHLLCKTQDKMLAQSKTEKAEEMNPYHNLESGMANLLKPIDDFCTKFFVGTEEGEVIYTDWKMEKDPETGRLMSKKPVSHHTIHDGTVHTIQRSPFYNDIILTVGGWNVAIWKEGVMTGPLLQSCCAPKRYTSGHWSLTRPGVFYIGREDGYIDIWDLLEKTHEPAQSQNICITMITYIKPWIFSSKQQFIATADYYGTLHILEIPWTLSRPSTNEMASVNHYFEREVKHLEYVEQRKKIREQEKKEMELEMAKKKVTGNNECWQRCRERRTTLLVGM

SEQ ID NO: 869 - protein, 865 aa, Artificial Sequence
  Synthetic polypeptide
MAPKQKKKTSRGKKRLKPVLAASEDMEPVNMESMGHPEIYPLVLTTKTQEIFNCRIDEDVTDEQPYKLINKEDIFEDLRNRAAVSDFHPVKKIVQEYPGNELLLVYDKDFKYGLNFYLIATEEGKENYLNPPEVPEEQEEYKEHIPEDVYIYKPPVSKPWVSLGSEKEIEEESVTESTKQITYMISRKRSEFGAPIKFSDQNASSVKDAYIECTAYPDKNFTLKQLEKDVGMQVIPQIKDISTQTKWTYPKNATTQYYPREFSEEEKETLKQSKPLVDFLNNASISVEIALQQNEIMNTFIDDWKYLAEEEGTFGDKTDTHLKEYQSFTDLHSPTEKMITCVSWHPTIYGLIAVSVAVRLSFEDRVHFSGKLLLQPSLILFWSFSDPIHPQLMLESPDDIFCFKFCPSDPNIIAGGCINGQIVMWDITAHADRIENIKAGGSRSKRATLKPMFLLEPESNKEAMYIRHCAVSSIENGHKKVITDIHWLSDTFEINRMGSVFENRSGICCQLVTCSADCTICFWDIRPQKPLTPQTTEKKKEESIEIPFDVPSTFLHLDLSWKPLTKVRLSKGETSLDHCPTKISLNEDHLLCKTQDKMLAQSKTEKAEEMNPYHNLESGMANLLKPIDDFCTKFFVGTEEGEVIYTDWKMEKDPETGRLMSKKPVSHHTIHDGTVHTIQRSPFYNDIILTVGGWNVAIWKEGVMTGPLLQSCCAPKRYTSGHWSLTRPGVFYIGREDGYIDIWDLLEKTHEPAQSQNICITMITYIKPWIFSSKQQFIATADYYGTLHILEIPWTLSRPSTNEMASVNHYFEREVKHLEYVEQRKKIREQEKKEMELEMAKKKVTGNNECWQRCRERRTTLLVGM

SEQ ID NO: 870 - protein, 147 aa, Artificial Sequence
  Synthetic polypeptide
TSGHWSLTRPGVFYIGREDGYIDIWDLLEKTHEPAQSQNICITMITYIKPWIFSSKQQFIATADYYGTLHILEIPWTLSRPSTNEMASVNHYFEREVKHLEYVEQRKKIREQEKKEMELEMAKKKVTGNNECWQRCRERRTTLLVGM

SEQ ID NO: 871 - protein, 172 aa, Artificial Sequence
  Synthetic polypeptide
MAAEEKDPLSYFAAYGSSSSGSSDEEDNIEPEETSRRTPDPAKSAGGCRNKAEKRLPGPDELFRSVTRPAFLYNPLNKQIDWERHVVKAPEEPPKEFKIWKSNYVPPPETYTTEKKPPPPELDMAIKWSNIYEDNGDDAPQNAKKARLLPEGEETLESETETKNHGFRLLKA

SEQ ID NO: 872 - protein, 248 aa, Artificial Sequence
  Synthetic polypeptide
MTADKDKDKDKEKDRDRDRDREREKRDKARESENSRPRRSCTLEGGAKNYAESDHSEDEDNDNNSATAEESTKKNKKKPPKKKSRYERTDTGEITSYITEDDVVYRPGDCVYIESRRPNTPYFICSIQDFKLVHNSQACCRSPTPALCDPPACSLPVASQPPQHLSEAGRGPVGSKRDHLLMNVKWYYRQSEVPDSVYQHLVQDRHNENDSGRELVITDPVIKNRELFISDYVDTYHAAALRHGGPHL

SEQ ID NO: 873 - protein, 773 aa, Artificial Sequence
  Synthetic polypeptide
MHLRAHRTRRGKVSPTAKTKSLLHFIVLCVAGVVVHAQEQGIDILHQLGLGGKDVRHSSPATAVPSASTPLPQGVHLTESGVIFKNDAYIETPFVKILPVNLGQPFTILTGLQSHRVNNAFLFSIRNKNRLQLGVQLLPKKLVVHIRGKQPAVFNYSVHDEQWHSFAITIRNQSVSMFVECGKKYFSTETIPEVQTFDSNSVFTLGSMNNNSIHFEGIVCQLDIIPSAEASADYCRYVKQQCRQADKYQPETSIPCTTLIPTKIPEHSPPPKLFAEKVLSEDTFTEGKSIPNIIKNDSETVYKRQEHQISRSQLSSLQSGNVSAVDLTNHGIQAKEMITEEDTQTNFSLSVTTHRISEAKMNTKEKFSSLLNMSDNITQHDDRVTGLSLFKKMPSILPQIKQDTITNLKKAITANLHTNELMEMQPILNTSLHRVTNEPSVDNHLDLRKEGEFYPDATYPIENSYETELYDYYYYEDLNTMLEMEYLRGPKGDTGPPGPPGPAGIPGPSGKRGPRGIPGPHGNPGLPGLPGPKGPKGDPGFSPGQPVPGEKGDQGLSGLMGPPGMQGDKGLKGHPGLPGLPGEQGIPGFAGNIGSPGYPGRQGLAGPEGNPGPKGAQGFIGSPGEAGQLGPEGERGIPGIRGKKGFKGRQGFPGDFGDRGPAGLDGSPGLVGGTGPPGFPGLRGSVGPVGPIGPAGIPGPMGLSGNKGLPGIKGDKGEQGTAGELGEPGYPGDKGAVGLPGPPGMRGKSGPSGQTGDPGLQGPSGPPGPEGHG

SEQ ID NO: 874 - protein, 544 aa, Artificial Sequence
  Synthetic polypeptide
MEKAVNDGSHSEELFCHLKTISEKEDLPRCTSESHLSCLKQDILNEKTELEATLKEAELVTHSVELLLPLFKDTIEKINFENANLSALNLKISEQKEILIKELDTFKSVKLALEHLLRKRDYKQTGDNLSSMLLENLTDNESENTNLKKKVFEKEAHIQELSCLFQSEKANTLKANRFSQSVKVVHERLQIQIHKREAENDKLKEYVKSLETKIAKWNLQSRMNKNEAIVMKEASRQKTVALKKASKVYKQRLDHFTGAIEKLTSQIRDQEAKLSETISASNAWKSHYEKIVIEKTELEVQIETMKKQIINLLEDLKKMEDHGKNSCEEILRKVHSIEYENETLNLENTKLKLRFPCRITESKNMNILIVLDMLCYISSEKTTLAALKDEVVSVENELSELQEVEKKQKTLIEMYKTQVQKLQEAAEIVKSRCENLLHKNNQITKTKNKNVEKMRGQMESHLKELERVCDSLTAAERRLHECQESLQCCKGKCADQEHTIRELQGQELNDENTWTHGEEQHTVGPFRGWRVGRGRGSEKITNRY

SEQ ID NO: 875 - protein, 391 aa, Artificial Sequence
  Synthetic polypeptide
TGDNLSSMLLENLTDNESENTNLKKKVFEKEAHIQELSCLFQSEKANTLKANRFSQSVKVVHERLQIQIHKREAENDKLKEYVKSLETKIAKWNLQSRMNKNEAIVMKEASRQKTVALKKASKVYKQRLDHFTGAIEKLTSQIRDQEAKLSETISASNAWKSHYEKIVIEKTELEVQIETMKKQIINLLEDLKKMEDHGKNSCEEILRKVHSIEYENETLNLENTKLKTTLAALKDEVVSVENELSELQEVEKKQKTLIEMYKTQVQKLQEAAEIVKSRCENLLHKNNQITKTKNKNVEKMRGQMESHLKELERVCDSLTAAERRLHECQESLQCCKGKCADQEHTIRELQGQELNDENTWTHGEEQHTVGPFRGWRVGRGRGSEKITNRY

SEQ ID NO: 876 - protein, 515 aa, Artificial Sequence
  Synthetic polypeptide
MEKAVNDGSHSEELFCHLKTISEKEDLPRCTSESHLSCLKQDILNEKTELEATLKEAELVTHSVELLLPLFKDTIEKINFENANLSALNLKISEQKEILIKELDTFKSVKLALEHLLRKRDYKQTGDNLSSMLLENLTDNESENTNLKKKVFEKEAHIQELSCLFQSEKANTLKANRFSQSVKVVHERLQIQIHKREAENDKLKEYVKSLETKIAKWNLQSRMNKNEAIVMKEASRQKTVALKKASKVYKQRLDHFTGAIEKLTSQIRDQEAKLSETISASNAWKSHYEKIVIEKTELEVQIETMKKQIINLLEDLKKMEDHGKNSCEEILRKVHSIEYENETLNLENTKLKTTLAALKDEVVSVENELSELQEVEKKQKTLIEMYKTQVQKLQEAAEIVKSRCENLLHKNNQITKTKNKNVEKMRGQMESHLKELERVCDSLTAAERRLHECQESLQCCKGKCADQEHTIRELQGQELNDENTWTHGEEQHTVGPFRGWRVGRGRGSEKITNRY

SEQ ID NO: 877 - protein, 384 aa, Artificial Sequence
  Synthetic polypeptide
MLLENLTDNESENTNLKKKVFEKEAHIQELSCLFQSEKANTLKANRFSQSVKVVHERLQIQIHKREAENDKLKEYVKSLETKIAKWNLQSRMNKNEAIVMKEASRQKTVALKKASKVYKQRLDHFTGAIEKLTSQIRDQEAKLSETISASNAWKSHYEKIVIEKTELEVQIETMKKQIINLLEDLKKMEDHGKNSCEEILRKVHSIEYENETLNLENTKLKTTLAALKDEVVSVENELSELQEVEKKQKTLIEMYKTQVQKLQEAAEIVKSRCENLLHKNNQITKTKNKNVEKMRGQMESHLKELERVCDSLTAAERRLHECQESLQCCKGKCADQEHTIRELQGQELNDENTWTHGEEQHTVGPFRGWRVGRGRGSEKITNRY

SEQ ID NO: 878 - protein, 35 aa, Artificial Sequence
  Synthetic polypeptide
RRRNGGFTSVRRVCSAARGSVQTRNTPLGSFRARS

SEQ ID NO: 879 - protein, 283 aa, Artificial Sequence
  Synthetic polypeptide
MEKAVNDGSHSEELFCHLKTISEKEDLPRCTSESHLSCLKQDILNEKTELEATLKEAELVTHSVELLLPLFKDTIEKINFENANLSALNLKISEQKEILIKELDTFKSVKLALEHLLRKRDYKQTGDNLSSMLLENLTDNESENTNLKKKVFEKEAHIQELSCLFQSEKANTLKANRFSQSVKVVHERLQIQIHKREAENDKLKEYVKSLETKIAKWNLQSRMNKNEAIVMKEASRQKTVALKKASKVYKQRLDHFTGAIEKLTSQIRDQVSFQLTSLQRGLS

SEQ ID NO: 880 - protein, 159 aa, Artificial Sequence
  Synthetic polypeptide
TGDNLSSMLLENLTDNESENTNLKKKVFEKEAHIQELSCLFQSEKANTLKANRFSQSVKVVHERLQIQIHKREAENDKLKEYVKSLETKIAKWNLQSRMNKNEAIVMKEASRQKTVALKKASKVYKQRLDHFTGAIEKLTSQIRDQVSFQLTSLQRGLS

SEQ ID NO: 881 - protein, 152 aa, Artificial Sequence
  Synthetic polypeptide
MLLENLTDNESENTNLKKKVFEKEAHIQELSCLFQSEKANTLKANRFSQSVKVVHERLQIQIHKREAENDKLKEYVKSLETKIAKWNLQSRMNKNEAIVMKEASRQKTVALKKASKVYKQRLDHFTGAIEKLTSQIRDQVSFQLTSLQRGLS

SEQ ID NO: 882 - protein, 113 aa, Artificial Sequence
  Synthetic polypeptide
MLLENLTDNESENTNLKKKVFEKEAHIQELSCLFQSEKSLETKIAKWNLQSRMNKNEAIVMKEASRQKTVALKKASKVYKQRLDHFTGAIEKLTSQIRDQVSFQLTSLQRGLS

SEQ ID NO: 883 - protein, 16 aa, Artificial Sequence
  Synthetic polypeptide
MASNPERGEILLTELQ

SEQ ID NO: 884 - protein, 330 aa, Artificial Sequence
  Synthetic polypeptide
MASNPERGEILLTELQGDSRSLPFSENVSAVQKLDFSDTMVQQKLDDIKDRIKREIRKELKIKEGAENLRKVTTDKKSLAYVDNILKKSNKKLEELHHKLQELNAHIVVSDPEDITDCPRTPDTPNNDPRCSTSNNRLKALQKQLDIELKVKQGAENMIQMYSNGSSKDRKLHGTAQQLLQDSKTKIEVIRMQILQAVQTNELAFDNAKPVISPLELRMEELRHHFRIEFAVAEGAKNVMKLLGSGKVTDRKALSEAQARFNESSQKLDLLKYSLEQRLNEVPKNHPKSRIIIEELSLVAASPTLSPRQSMISTQNQYSTLSKPAALTGL

SEQ ID NO: 885 - protein, 173 aa, Artificial Sequence
  Synthetic polypeptide
MIQMYSNGSSKDRKLHGTAQQLLQDSKTKIEVIRMQILQAVQTNELAFDNAKPVISPLELRMEELRHHFRIEFAVAEGAKNVMKLLGSGKVTDRKALSEAQARFNESSQKLDLLKYSLEQRLNEVPKNHPKSRIIIEELSLVAASPTLSPRQSMISTQNQYSTLSKPAALTGL

SEQ ID NO: 886 - protein, 7 aa, Artificial Sequence
  Synthetic polypeptide
GRIKASF

SEQ ID NO: 887 - protein, 104 aa, Artificial Sequence
  Synthetic polypeptide
MSILKIHAREIFDSRGNPTVEVDLFTSKGLFRAAVPSGASTGIYEALELRDNDKTRYMGKGVSKAVEHINKTIAPALVSKKSCLPSEDEDLPSLQLAKSEQQSL

SEQ ID NO: 888 - protein, 413 aa, Artificial Sequence
  Synthetic polypeptide
MSLKFTNAKRIEGLDSNVWIEFTKLAADPSVVNLGQGFPDISPPTYVKEELSKIAAIDSLNQYTRGFGHPSLVKALSYLYEKLYQKQIDSNKEILVTVGAYGSLFNTIQALIDEGDEVILIVPFYDCYEPMVRMAGATPVFIPLRSKPVYGKRWSSSDWTLDPQELESKFNSKTKAIILNTPHNPLGKVYNREELQVIADLCIKYDTLCISDEVYEWLVYSGNKHLKIATFPGMWERTITIGSAGKTFSVTGWKLGWSIGPNHLIKHLQTVQQNTIYTCATPLQEALAQAFWIDIKRMDDPECYFNSLPKELEVKRDRMVRLLESVGLKPIVPDGGYFIIADVSLLDPDLSDMKNNEPYDYKFVKWMTKHKKLSAIPVSAFCNSETKSQFEKFVRFCFIKEHGWSWSLLSLAN

SEQ ID NO: 889 - protein, 447 aa, Artificial Sequence
  Synthetic polypeptide
MFLAQRSLCSLSGRAKFLKTISSSKILGFSTSAKMSLKFTNAKRIEGLDSNVWIEFTKLAADPSVVNLGQGFPDISPPTYVKEELSKIAAIDSLNQYTRGFGHPSLVKALSYLYEKLYQKQIDSNKEILVTVGAYGSLFNTIQALIDEGDEVILIVPFYDCYEPMVRMAGATPVFIPLRSKPVYGKRWSSSDWTLDPQELESKFNSKTKAIILNTPHNPLGKVYNREELQVIADLCIKYDTLCISDEVYEWLVYSGNKHLKIATFPGMWERTITIGSAGKTFSVTGWKLGWSIGPNHLIKHLQTVQQNTIYTCATPLQEALAQAFWIDIKRMDDPECYFNSLPKELEVKRDRMVRLLESVGLKPIVPDGGYFIIADVSLLDPDLSDMKNNEPYDYKFVKWMTKHKKLSAIPVSAFCNSETKSQFEKFVRFCFIKEHGWSWSLLSLAN

SEQ ID NO: 890 - protein, 740 aa, Artificial Sequence
  Synthetic polypeptide
MITLTELKCLADAQSSYHILKPWWDVFWYYITLIMLLVAVLAGALQLTQSRVLCCLPCKVEFDNHCAVPWDILKASMNTSSNPGTPLPLPLRIQNDLHRQQYSYIDAVCYEKQLHWFAKFFPYLVLLHTLIFAACSNFWLHYPSTSSRLEHFVAILHKCFDSPWTTRALSETVAEQSVRPLKLSKSKILLSSSGCSADIDSGKQSLPYPQPGLESAGIESPTSSVLDKKEGEQAKAIFEKVKRFRMHVEQKDIIYRVYLKQIIVKVILFVLIITYVPYFLTHITLEIDCSVDVQAFTGYKRYQCVYSLAEIFKVLASFYVILVILYGLTSSYSLWWMLRSSLKQYSFEALREKSNYSDIPDVKNDFAFILHLADQYDPLYSKRFSIFLSEVSENKLKQINLNNEWTVEKLKSKLVKNAQDKIELHLFMLNGLPDNVFELTEMEVLSLELIPEVKLPSAVSQLVNLKELRVYHSSLVVDHPALAFLEENLKILRLKFTEMGKIPRWVFHLKNLKELYLSGCVLPEQLSTMQLEGFQDLKNLRTLYLKSSLSRIPQVVTDLLPSLQKLSLDNEGSKLVVLNNLKKMVNLKSLELISCDLERIPHSIFSLNNLHELDLRENNLKTVEEIISFQHLQNLSCLKLWHNNIAYIPAQIGALSNLEQLSLDHNNIENLPLQLFLCTKLHYLDLSYNHLTFIPEEIQYLSNLQYFAVTNNNDSSEPLTYEYALCFSKERWYAIFIKCV

SEQ ID NO: 891 - protein, 483 aa, Artificial Sequence
  Synthetic polypeptide
MDFEDDYTHSACRNTYQGFNGMDRDYGPGSYGGMDRDYGHGSYGGQRSMDSYLNQSYGMDNHSGGGGGSRFGPYESYDSRSSLGGRDLYRSGYGFNEPEQSRFGGSYGGRFESSYRNSLDSFGGRNQGGSSWEAPYSRSKLRPGFMEDRGRENYSSYSSFSSPHMKPAPVGSRGRGTPAYPESTFGSRNYDAFGGPSTGRGRGRGHMGDFGSIHRPGIVVDYQNKSTNVTVAAARGIKRKMMQPFNKPSGTFIKKPKLAKPMEKISLSKSPTKTDPKNEEEEKRRIEARREKQRRRREKNSEKYGDGYRMAFTCSFCKFRTFEEKDIELHLESSSHQETLDHIQKQTKFDKVVMEFLHECMVNKFKKTSIRKQQTNNQTEVVKIIEKDVMEGVTVDDHMMKVETVHCSACSVYIPALHSSVQQHLKSPDHIKGKQAYKEQIKRESVLTATSILNNPIVKARYERFVKVVFLLSWVSSCTKCSF

SEQ ID NO: 892 - protein, 394 aa, Artificial Sequence
  Synthetic polypeptide
MDFEDDYTHSACRNTYQGFNGMDRDYGPGSYGGMDRDYGHGSYGGQRSMDSYLNQSYGMDNHSGGGGGSSFSSPHMKPAPVGSRGRGTPAYPESTFGSRNYDAFGGPSTGRGRGRGHMGDFGSIHRPGIVVDYQNKSTNVTVAAARGIKRKMMQPFNKPSGTFIKKPKLAKPMEKISLSKSPTKTDPKNEEEEKRRIEARREKQRRRREKNSEKYGDGYRMAFTCSFCKFRTFEEKDIELHLESSSHQETLDHIQKQTKFDKVVMEFLHECMVNKFKKTSIRKQQTNNQTEVVKIIEKDVMEGVTVDDHMMKVETVHCSACSVYIPALHSSVQQHLKSPDHIKGKQAYKEQIKRESVLTATSILNNPIVKARYERFVKVVFLLSWVSSCTKCSF

SEQ ID NO: 893 - protein, 277 aa, Artificial Sequence
  Synthetic polypeptide
MGDFGSIHRPGIVVDYQNKSTNVTVAAARGIKRKMMQPFNKPSGTFIKKPKLAKPMEKISLSKSPTKTDPKNEEEEKRRIEARREKQRRRREKNSEKYGDGYRMAFTCSFCKFRTFEEKDIELHLESSSHQETLDHIQKQTKFDKVVMEFLHECMVNKFKKTSIRKQQTNNQTEVVKIIEKDVMEGVTVDDHMMKVETVHCSACSVYIPALHSSVQQHLKSPDHIKGKQAYKEQIKRESVLTATSILNNPIVKARYERFVKVVFLLSWVSSCTKCSF

SEQ ID NO: 894 - protein, 245 aa, Artificial Sequence
  Synthetic polypeptide
MARCGEGSAAPMVLLGSAGVCSKGLQRKGPCERRRLKATVSEQLSQDLLRLLREEFHTDVTFSVGCTLFKAHKAVLLARVPDFYFHTIGQTSNSLTNQEPIAVENVEALEFRTFLQIIYSSNRNIKNYEEEILRKKIMEIGISQKQLDISFPKCENSSDCSLQKHEIPEDISDRDDDFISNDNYDLEPASELGEDLLKLYVKPCCPDIDIFVDGKRFKAHRCSDSHLLSQHSGRLRREDHLNQGV

SEQ ID NO: 895 - protein, 169 aa, Artificial Sequence
  Synthetic polypeptide
MADFAGPSSAGRKAGAPRCSRKAAGTKQTSTLKQEDASKRKAELEAAVRKKIEFERKALHIVEQLLEENITEEFLMECGRFITPAHYSDVVDERSIVKLCGYPLCQKKLGIVPKQKYKISTKTNKVYDITERKSFCSNFCYQASKFFEAQIPKTPVWVREEERCGDSRP

SEQ ID NO: 896 - protein, 569 aa, Artificial Sequence
  Synthetic polypeptide
MADFAGPSSAGRKAGAPRCSRKAAGTKQTSTLKQEDASKRKAELEAAVRKKIEFERKALHIVEQLLEENITEEFLMECGRFITPAHYSDVVDERSIVKLCGYPLCQKKLGIVPKQKYKISTKTNKVYDITERKSFCSNFCYQASKFFEAQIPKTPVWVREEERHPDFQLLKEEQSGHSGEEVQLCSKAIKTSDIDNPSHFEKQYESSSSSTHSDSSSDNEQDFVSSILPGNRPNSTNIRPQLHQKSIMKKKAGHKANSKHKDKEQTVVDVTEQLGDCKLDSQEKDATCELPLQKVNTQSSSNSTLPERLKASENSESEYSRSEITLVGISKKSAEHFKRKFAKSNQVSRSVSSSVQVCPEVGKRNLLKVLKETLIEWKTEETLRFLYGQNYASVCLKPEASLVKEELDEDDIISDPDSHFPAWRESQNSLDESLPFRGSGTAIKPLPSYENLKKETEKLNLRIREFYRGRYVLGEETTKSQDSEEHDSTFPLIDSSSQNQIRKRIVLEKLSKVLPGLLVPLQITLGDIYTQLKNLVRTFRLTNRNIIHKPAEWTLIAMVLLSLCSGSCL

SEQ ID NO: 897 - protein, 591 aa, Artificial Sequence
  Synthetic polypeptide
MADFAGPSSAGRKAGAPRCSRKAAGTKQTSTLKQEDASKRKAELEAAVRKKIEFERKALHIVEQLLEENITEEFLMECGRFITPAHYSDVVDERSIVKLCGYPLCQKKLGIVPKQKYKISTKTNKVYDITERKSFCSNFCYQASKFFEAQIPKTPVWVREEERHPDFQLLKEEQSGHSGEEVQLCSKAIKTSDIDNPSHFEKQYESSSSSTHSDSSSDNEQDFVSSILPGNRPNSTNIRPQLHQKSIMKKKAGHKANSKHKDKEQTVVDVTEQLGDCKLDSQEKDATCELPLQKVNTQSSSNSTLPERLKASENSESEYSRSEITLVGISKKSAEHFKRKFAKSNQVSRSVSSSVQVCPEVGKRNLLKVLKETLIEWKTEETLRFLYGQNYASVCLKPEASLVKEELDEDDIISDPDSHFPAWRESQNSLDESLPFRGSGTAIKPLPSYENLKKETEKLNLRIREFYRGRYVLGEETTKSQDSEEHDSTFPLIDSSSQNQIRKRIVLEKLSKVLPGLLVPLQITLGDIYTQLKNLVRTFRLTNRNIIHKPAEWTLIAMVLLSFLLNVKTRIKTFMMIYFHLMNSKYIFSSL

SEQ ID NO: 898 - protein, 11 aa, Artificial Sequence
  Synthetic polypeptide
MRHGGPSYSGG

SEQ ID NO: 899 - protein, 31 aa, Artificial Sequence
  Synthetic polypeptide
GSNSVLPGFAGSPSCVRGFHAQGPGKGSEAS

SEQ ID NO: 900 - protein, 247 aa, Artificial Sequence
  Synthetic polypeptide
MESSSSDYYNKDNEEESLLANVASLRHELKITEWSLQSLGEELSSVSPSENSDYAPNPSRSEKLILDVQPSHPGLLNYSPYENVCKISGSSTDFQKKPRDKMFSSSAPVDQEIKSLREKLNKLRQQNACLVTQNHSLMTKFESIHFELTQSRAKVSMLESAQQQAASVPILEEQIINLEAEVSAQDKVLREAENKLEQSQKMVIEKEQSLQESKEECIKLKVDLLEQTKQGKRKRRTSEERMNIKRK

SEQ ID NO: 901 - protein, 46 aa, Artificial Sequence
  Synthetic polypeptide
MVIEKEQSLQESKEECIKLKVDLLEQTKQGKRKRRTSEERMNIKRK

SEQ ID NO: 902 - protein, 365 aa, Artificial Sequence
  Synthetic polypeptide
MASPTNGHHGGNCGKCSPGRAPLVGSGALADHDPRQAPRLRRRLTQSAPGRGSDRVGASQRLPRRFEFCAAGVRWFSELCPRLPRAGARERVRGFLTQTRVRSAQSPGGSLPSDDLGEMESSSSDYYNKDNEEESLLANVASLRHELKITEWSLQSLGEELSSVSPSENSDYAPNPSRSEKLILDVQPSHPGLLNYSPYENVCKISGSSTDFQKKPRDKMFSSSAPVDQEIKSLREKLNKLRQQNACLVTQNHSLMTKFESIHFELTQSRAKVSMLESAQQQAASVPILEEQIINLEAEVSAQDKVLREAENKLEQSQKMVIEKEQSLQESKEECIKLKVDLLEQTKQGKRKRRTSEERMNIKRK

SEQ ID NO: 903 - protein, 16 aa, Artificial Sequence
  Synthetic polypeptide
VRGFHAQGPGKGSEAS

SEQ ID NO: 904 - protein, 871 aa, Artificial Sequence
  Synthetic polypeptide
MESSSSDYYNKDNEEESLLANVASLRHELKITEWSLQSLGEELSSVSPSENSDYAPNPSRSEKLILDVQPSHPGLLNYSPYENVCKISGSSTDFQKKPRDKMFSSSAPVDQEIKSLREKLNKLRQQNACLVTQNHSLMTKFESIHFELTQSRAKVSMLESAQQQAASVPILEEQIINLEAEVSAQDKVLREAENKLEQSQKMVIEKEQSLQESKEECIKLKVDLLEQTKQGKRAERQRNEALYNAEELSKAFQQYKKKVAEKLEKVQAEEEILERNLTNCEKENKRLQERCGLYKSELEILKEKLRQLKEENNNGKEKLRIMAVKNSEVMAQLTESRQSILKLESELENKDEILRDKFSLMNENRELKVRVAAQNERLDLCQQEIESSRVELRSLEKIISQLPLKRELFGFKSYLSKYQMSSFSNKEDRCIGCCEANKLVISELRIKLAIKEAEIQKLHANLTANQLSQSLITCNDSQESSKLSSLETEPVKLGGHQVESVKDQNQHTMNKQYEKERQRLVTGIEELRTKLIQIEAENSDLKVNMAHRTSQFQLIQEELLEKASNSSKLESEMTKKCSQLLTLEKQLEEKIVAYSSIAAKNAELEQELMEKNEKIRSLETNINTEHEKICLAFEKAKKIHLEQHKEMEKQIERLEAQLEKKDQQFKEQEKTMSMLQQDIICKQHHLESLDRLLTESKGEMKKENMKKDEALKALQNQVSEETIKVRQLDSALEICKEELVLHLNQLEGNKEKFEKQLKKKSEEVYCLQKELKIKNHSLQETSEQNVILQHTLQQQQQMLQQETIRNGELEDTQTKLEKQVSKLEQELQKQRESSAEKLRKMEEKCESAAHEADLKRQKVIELTGTARCSTH

SEQ ID NO: 905 - protein, 872 aa, Artificial Sequence
  Synthetic polypeptide
MESSSSDYYNKDNEEESLLANVASLRHELKITEWSLQSLGEELSSVSPSENSDYAPNPSRSEKLILDVQPSHPGLLNYSPYENVCKISGSSTDFQKKPRDKMFSSSAPVDQEIKSLREKLNKLRQQNACLVTQNHSLMTKFESIHFELTQSRAKVSMLESAQQQAASVPILEEQIINLEAEVSAQDKVLREAENKLEQSQKMVIEKEQSLQESKEECIKLKVDLLEQTKQGKRAERQRNEALYNAEELSKAFQQYKKKVAEKLEKVQAEEEILERNLTNCEKENKRLQERCGLYKSELEILKEKLRQLKEENNNGKEKLRIMAVKNSEVMAQLTESRQSILKLESELENKDEILRDKFSLMNENRELKVRVAAQNERLDLCQQEIESSRVELRSLEKIISQLPLKRELFGFKSYLSKYQMSSFSNKEDRCIGCCEANKLVISELRIKLAIKEAEIQKLHANLTANQLSQSLITCNDSQESSKLSSLETEPVKLGGHQVAESVKDQNQHTMNKQYEKERQRLVTGIEELRTKLIQIEAENSDLKVNMAHRTSQFQLIQEELLEKASNSSKLESEMTKKCSQLLTLEKQLEEKIVAYSSIAAKNAELEQELMEKNEKIRSLETNINTEHEKICLAFEKAKKIHLEQHKEMEKQIERLEAQLEKKDQQFKEQEKTMSMLQQDIICKQHHLESLDRLLTESKGEMKKENMKKDEALKALQNQVSEETIKVRQLDSALEICKEELVLHLNQLEGNKEKFEKQLKKKSEEVYCLQKELKIKNHSLQETSEQNVILQHTLQQQQQMLQQETIRNGELEDTQTKLEKQVSKLEQELQKQRESSAEKLRKMEEKCESAAHEADLKRQKVIELTGTARCSTH

SEQ ID NO: 906 - protein, 167 aa, Artificial Sequence
  Synthetic polypeptide
MKKDEALKALQNQVSEETIKVRQLDSALEICKEELVLHLNQLEGNKEKFEKQLKKKSEEVYCLQKELKIKNHSLQETSEQNVILQHTLQQQQQMLQQETIRNGELEDTQTKLEKQVSKLEQELQKQRESSAEKLRKMEEKCESAAHEADLKRQKVIELTGTARCSTH

SEQ ID NO: 907 - protein, 627 aa, Artificial Sequence
  Synthetic polypeptide
MVIEKEQSLQESKEECIKLKVDLLEQTKQGKRAERQRNEALYNAEELSKAFQQYKKKVAEKLEKVQAEEEILERNLTNCEKENKRLQERCGLYKSELEILKEKLRQLKEENNNGKEKLRIMAVKNSEVMAQLTESRQSILKLESELENKDEILRDKFSLMNENRELKVRVAAQNERLDLCQQEIESSRVELRSLEKIISQLPLKRELFGFKSYLSKYQMSSFSNKEDRCIGCCEANKLVISELRIKLAIKEAEIQKLHANLTANQLSQSLITCNDSQESSKLSSLETEPVKLGGHQVAESVKDQNQHTMNKQYEKERQRLVTGIEELRTKLIQIEAENSDLKVNMAHRTSQFQLIQEELLEKASNSSKLESEMTKKCSQLLTLEKQLEEKIVAYSSIAAKNAELEQELMLEAQLEKKDQQFKEQEKTMSMLQQDIICKQHHLESLDRLLTESKGEMKKENMKKDEALKALQNQVSEETIKVRQLDSALEICKEELVLHLNQLEGNKEKFEKQLKKKSEEVYCLQKELKIKNHSLQETSEQNVILQHTLQQQQQMLQQETIRNGELEDTQTKLEKQVSKLEQELQKQRESSAEKLRKMEEKCESAAHEADLKRQKVIELTGTARCSTH

SEQ ID NO: 908 - protein, 990 aa, Artificial Sequence
  Synthetic polypeptide
MASPTNGHHGGNCGKCSPGRAPLVGSGALADHDPRQAPRLRRRLTQSAPGRGSDRVGASQRLPRRFEFCAAGVRWFSELCPRLPRAGARERVRGFLTQTRVRSAQSPGGSLPSDDLGEMESSSSDYYNKDNEEESLLANVASLRHELKITEWSLQSLGEELSSVSPSENSDYAPNPSRSEKLILDVQPSHPGLLNYSPYENVCKISGSSTDFQKKPRDKMFSSSAPVDQEIKSLREKLNKLRQQNACLVTQNHSLMTKFESIHFELTQSRAKVSMLESAQQQAASVPILEEQIINLEAEVSAQDKVLREAENKLEQSQKMVIEKEQSLQESKEECIKLKVDLLEQTKQGKRAERQRNEALYNAEELSKAFQQYKKKVAEKLEKVQAEEEILERNLTNCEKENKRLQERCGLYKSELEILKEKLRQLKEENNNGKEKLRIMAVKNSEVMAQLTESRQSILKLESELENKDEILRDKFSLMNENRELKVRVAAQNERLDLCQQEIESSRVELRSLEKIISQLPLKRELFGFKSYLSKYQMSSFSNKEDRCIGCCEANKLVISELRIKLAIKEAEIQKLHANLTANQLSQSLITCNDSQESSKLSSLETEPVKLGGHQVAESVKDQNQHTMNKQYEKERQRLVTGIEELRTKLIQIEAENSDLKVNMAHRTSQFQLIQEELLEKASNSSKLESEMTKKCSQLLTLEKQLEEKIVAYSSIAAKNAELEQELMEKNEKIRSLETNINTEHEKICLAFEKAKKIHLEQHKEMEKQIERLEAQLEKKDQQFKEQEKTMSMLQQDIICKQHHLESLDRLLTESKGEMKKENMKKDEALKALQNQVSEETIKVRQLDSALEICKEELVLHLNQLEGNKEKFEKQLKKKSEEVYCLQKELKIKNHSLQETSEQNVILQHTLQQQQQMLQQETIRNGELEDTQTKLEKQVSKLEQELQKQRESSAEKLRKMEEKCESAAHEADLKRQKVIELTGTARCSTH

SEQ ID NO: 909 - protein, 31 aa, Artificial Sequence; identical to SEQ ID NO: 899
  Synthetic polypeptide

SEQ ID NO: 910 - protein, 547 aa, Artificial Sequence
  Synthetic polypeptide
EKENKRLQERCGLYKSELEILKEKLRQLKEENNNGKEKLRIMAVKNSEVMAQLTESRQSILKLESELENKDEILRDKFSLMNENRELKVRVAAQNERLDLCQQEIESSRVELRSLEKIISQLPLKRELFGFKSYLSKYQMSSFSNKEDRCIGCCEANKLVISELRIKLAIKEAEIQKLHANLTANQLSQSLITCNDSQESSKLSSLETEPVKLGGHQVESVKDQNQHTMNKQYEKERQRLVTGIEELRTKLIQIEAENSDLKVNMAHRTSQFQLIQEELLEKASNSSKLESEMTKKCSQLLTLEKQLEEKIVAYSSIAAKNAELEQELMLEAQLEKKDQQFKEQEKTMSMLQQDIICKQHHLESLDRLLTESKGEMKKENMKKDEALKALQNQVSEETIKVRQLDSALEICKEELVLHLNQLEGNKEKFEKQLKKKSEEVYCLQKELKIKNHSLQETSEQNVILQHTLQQQQQMLQQETIRNGELEDTQTKLEKQVSKLEQELQKQRESSAEKLRKMEEKCESAAHEADLKRQKVIELTGTARCSTH

SEQ ID NO: 911 - protein, 31 aa, Artificial Sequence; identical to SEQ ID NO: 899
  Synthetic polypeptide

SEQ ID NO: 912 - protein, 1299 aa, Artificial Sequence
  Synthetic polypeptide
MESSSSDYYNKDNEEESLLANVASLRHELKITEWSLQSLGEELSSVSPSENSDYAPNPSRSEKLILDVQPSHPGLLNYSPYENVCKISGSSTDFQKKPRDKMFSSSAPVDQEIKSLREKLNKLRQQNACLVTQNHSLMTKFESIHFELTQSRAKVSMLESAQQQAASVPILEEQIINLEAEVSAQDKVLREAENKLEQSQKMVIEKEQSLQESKEECIKLKVDLLEQTKQGKRAERQRNEALYNAEELSKAFQQYKKKVAEKLEKVQAEEEILERNLTNCEKENKRLQERCGLYKSELEILKEKLRQLKEENNNGKEKLRIMAVKNSEVMAQLTESRQSILKLESELENKDEILRDKFSLMNENRELKVRVAAQNERLDLCQQEIESSRVELRSLEKIISQLPLKRELFGFKSYLSKYQMSSFSNKEDRCIGCCEANKLVISELRIKLAIKEAEIQKLHANLTANQLSQSLITCNDSQESSKLSSLETEPVKLGGHQVESVKDQNQHTMNKQYEKERQRLVTGIEELRTKLIQIEAENSDLKVNMAHRTSQFQLIQEELLEKASNSSKLESEMTKKCSQLLTLEKQLEEKIVAYSSIAAKNAELEQELMEKNEKIRSLETNINTEHEKICLAFEKAKKIHLEQHKEMEKQIERLEAQLEKKDQQFKEQEKTMSMLQQDIICKQHHLESLDRLLTESKGEMKKENMKKDEALKALQNQVSEETIKVRQLDSALEICKEELVLHLNQLEGNKEKFEKQLKKKSEEVYCLQKELKIKNHSLQETSEQNVILQHTLQQQQQMLQQETIRNGELEDTQTKLEKQVSKLEQELQKQRESSAEKLRKMEEKCESAAHEADLKRQKVIELTGTARQVKIEMDQYKEELSKMEKEIMHLKRDGENKAMHLSQLDMILDQTKTELEKKTNAVKELEKLQHSTETELTEALQKREVLETELQNAHGELKSTLRQLQELRDVLQKAQLSLEEKYTTIKDLTAELRECKMEIEDKKQELLEMDQALKERNWELKQRAAQVTHLDMTIREHRGEMEQKIIKLEGTLEKSELELKECNKQIESLNDKLQNAKEQLREKEFIMLQNEQEISQLKKEIERTQQRMKEMESVMKEQEQYIATQYKEAIDLGQELRLTREQVQNSHTELAEARHQQVQAQREIERLSSELEDMKQLSKEKDAHGNHLAEELGASKVREAHLEARMQAEIKKLSAEVESLKEAYHMEMISHQENHAKWKISADSQKSSVQQLNEQLEKAKLELEEAQDTVSNLHQQVQDRNEVIEAANEALLTKEHPDS

SEQ ID NO: 913 - protein, 1300 aa, Artificial Sequence
  Synthetic polypeptide
MESSSSDYYNKDNEEESLLANVASLRHELKITEWSLQSLGEELSSVSPSENSDYAPNPSRSEKLILDVQPSHPGLLNYSPYENVCKISGSSTDFQKKPRDKMFSSSAPVDQEIKSLREKLNKLRQQNACLVTQNHSLMTKFESIHFELTQSRAKVSMLESAQQQAASVPILEEQIINLEAEVSAQDKVLREAENKLEQSQKMVIEKEQSLQESKEECIKLKVDLLEQTKQGKRAERQRNEALYNAEELSKAFQQYKKKVAEKLEKVQAEEEILERNLTNCEKENKRLQERCGLYKSELEILKEKLRQLKEENNNGKEKLRIMAVKNSEVMAQLTESRQSILKLESELENKDEILRDKFSLMNENRELKVRVAAQNERLDLCQQEIESSRVELRSLEKIISQLPLKRELFGFKSYLSKYQMSSFSNKEDRCIGCCEANKLVISELRIKLAIKEAEIQKLHANLTANQLSQSLITCNDSQESSKLSSLETEPVKLGGHQVAESVKDQNQHTMNKQYEKERQRLVTGIEELRTKLIQIEAENSDLKVNMAHRTSQFQLIQEELLEKASNSSKLESEMTKKCSQLLTLEKQLEEKIVAYSSIAAKNAELEQELMEKNEKIRSLETNINTEHEKICLAFEKAKKIHLEQHKEMEKQIERLEAQLEKKDQQFKEQEKTMSMLQQDIICKQHHLESLDRLLTESKGEMKKENMKKDEALKALQNQVSEETIKVRQLDSALEICKEELVLHLNQLEGNKEKFEKQLKKKSEEVYCLQKELKIKNHSLQETSEQNVILQHTLQQQQQMLQQETIRNGELEDTQTKLEKQVSKLEQELQKQRESSAEKLRKMEEKCESAAHEADLKRQKVIELTGTARQVKIEMDQYKEELSKMEKEIMHLKRDGENKAMHLSQLDMILDQTKTELEKKTNAVKELEKLQHSTETELTEALQKREVLETELQNAHGELKSTLRQLQELRDVLQKAQLSLEEKYTTIKDLTAELRECKMEIEDKKQELLEMDQALKERNWELKQRAAQVTHLDMTIREHRGEMEQKIIKLEGTLEKSELELKECNKQIESLNDKLQNAKEQLREKEFIMLQNEQEISQLKKEIERTQQRMKEMESVMKEQEQYIATQYKEAIDLGQELRLTREQVQNSHTELAEARHQQVQAQREIERLSSELEDMKQLSKEKDAHGNHLAEELGASKVREAHLEARMQAEIKKLSAEVESLKEAYHMEMISHQENHAKWKISADSQKSSVQQLNEQLEKAKLELEEAQDTVSNLHQQVQDRNEVIEAANEALLTKEHPDS

SEQ ID NO: 914 - protein, 1418 aa, Artificial Sequence
  Synthetic polypeptide
MASPTNGHHGGNCGKCSPGRAPLVGSGALADHDPRQAPRLRRRLTQSAPGRGSDRVGASQRLPRRFEFCAAGVRWFSELCPRLPRAGARERVRGFLTQTRVRSAQSPGGSLPSDDLGEMESSSSDYYNKDNEEESLLANVASLRHELKITEWSLQSLGEELSSVSPSENSDYAPNPSRSEKLILDVQPSHPGLLNYSPYENVCKISGSSTDFQKKPRDKMFSSSAPVDQEIKSLREKLNKLRQQNACLVTQNHSLMTKFESIHFELTQSRAKVSMLESAQQQAASVPILEEQIINLEAEVSAQDKVLREAENKLEQSQKMVIEKEQSLQESKEECIKLKVDLLEQTKQGKRAERQRNEALYNAEELSKAFQQYKKKVAEKLEKVQAEEEILERNLTNCEKENKRLQERCGLYKSELEILKEKLRQLKEENNNGKEKLRIMAVKNSEVMAQLTESRQSILKLESELENKDEILRDKFSLMNENRELKVRVAAQNERLDLCQQEIESSRVELRSLEKIISQLPLKRELFGFKSYLSKYQMSSFSNKEDRCIGCCEANKLVISELRIKLAIKEAEIQKLHANLTANQLSQSLITCNDSQESSKLSSLETEPVKLGGHQVAESVKDQNQHTMNKQYEKERQRLVTGIEELRTKLIQIEAENSDLKVNMAHRTSQFQLIQEELLEKASNSSKLESEMTKKCSQLLTLEKQLEEKIVAYSSIAAKNAELEQELMEKNEKIRSLETNINTEHEKICLAFEKAKKIHLEQHKEMEKQIERLEAQLEKKDQQFKEQEKTMSMLQQDIICKQHHLESLDRLLTESKGEMKKENMKKDEALKALQNQVSEETIKVRQLDSALEICKEELVLHLNQLEGNKEKFEKQLKKKSEEVYCLQKELKIKNHSLQETSEQNVILQHTLQQQQQMLQQETIRNGELEDTQTKLEKQVSKLEQELQKQRESSAEKLRKMEEKCESAAHEADLKRQKVIELTGTARQVKIEMDQYKEELSKMEKEIMHLKRDGENKAMHLSQLDMILDQTKTELEKKTNAVKELEKLQHSTETELTEALQKREVLETELQNAHGELKSTLRQLQELRDVLQKAQLSLEEKYTTIKDLTAELRECKMEIEDKKQELLEMDQALKERNWELKQRAAQVTHLDMTIREHRGEMEQKIIKLEGTLEKSELELKECNKQIESLNDKLQNAKEQLREKEFIMLQNEQEISQLKKEIERTQQRMKEMESVMKEQEQYIATQYKEAIDLGQELRLTREQVQNSHTELAEARHQQVQAQREIERLSSELEDMKQLSKEKDAHGNHLAEELGASKVREAHLEARMQAEIKKLSAEVESLKEAYHMEMISHQENHAKWKISADSQKSSVQQLNEQLEKAKLELEEAQDTVSNLHQQVQDRNEVIEAANEALLTKEHPDS

SEQ ID NO: 915 - protein, 130 aa, Artificial Sequence
  Synthetic polypeptide
MASSSGNDDDLTIPRAAINKMIKETLPNVRVANDARELVVNCCTEFIHLISSEANEICNKSEKKTISPEHVIQALESLGFGSYISEVKEVLQECKTVALKRRKASSRLENLGIPEEELLRQQQELFAKFL

SEQ ID NO: 916 - protein, 144 aa, Artificial Sequence
  Synthetic polypeptide
MASSSGNDDDLTIPRAAINKMIKETLPNVRVANDARELVVNCCTEFIHLISSEANEICNKSEKKTISPEHVIQALESLGFGSYISEVKEVLQECKTVALKRRKASSRLENLGIPEEELLRQQQELFAKKYMIEGIEELPRQQRD

SEQ ID NO: 917 - protein, 102 aa, Artificial Sequence
  Synthetic polypeptide
MGTDSRAAKALLARARTLHLQTGNLLNWGRLRKKCPSTHSEELHDCIQKTLNEWSSQINPDLVREFPDVLECTVSHAVEKINPDEREEMKVSEALSTVFASK

SEQ ID NO: 918 - protein, 2282 aa, Artificial Sequence
  Synthetic polypeptide
MGFVRQIQLLLWKNWTLRKRQKIRFVVELVWPLSLFLVLIWLRNANPLYSHHECHFPNKAMPSAGMLPWLQGIFCNVNNPCFQSPTPGESPGIVSNYNNSILARVYRDFQELLMNAPESQHLGRIWTELHILSQFMDTLRTHPERIAGRGIRIRDILKDEETLTLFLIKNIGLSDSVVYLLINSQVRPEQFAHGVPDLALKDIACSEALLERFIIFSQRRGAKTVRYALCSLSQGTLQWIEDTLYANVDFFKLFRVLPTLLDSRSQGINLRSWGGILSDMSPRIQEFIHRPSMQDLLWVTRPLMQNGGPETFTKLMGILSDLLCGYPEGGGSRVLSFNWYEDNNYKAFLGIDSTRKDPIYSYDRRTTSFCNALIQSLESNPLTKIAWRAAKPLLMGKILYTPDSPAARRILKNANSTFEELEHVRKLVKAWEEVGPQIWYFFDNSTQMNMIRDTLGNPTVKDFLNRQLGEEGITAEAILNFLYKGPRESQADDMANFDWRDIFNITDRTLRLVNQYLECLVLDKFESYNDETQLTQRALSLLEENMFWAGVVFPDMYPWTSSLPPHVKYKIRMDIDVVEKTNKIKDRYWDSGPRADPVEDFRYIWGGFAYLQDMVEQGITRSQVQAEAPVGIYLQQMPYPCFVDDSFMIILNRCFPIFMVLAWIYSVSMTVKSIVLEKELRLKETLKNQGVSNAVIWCTWFLDSFSIMSMSIFLLTIFIMHGRILHYSDPFILFLFLLAFSTATIMLCFLLSTFFSKASLAAACSGVIYFTLYLPHILCFAWQDRMTAELKKAVSLLSPVAFGFGTEYLVRFEEQGLGLQWSNIGNSPTEGDEFSFLLSMQMMLLDAAVYGLLAWYLDQVFPGDYGTPLPWYFLLQESYWLGGEGCSTREERALEKTEPLTEETEDPEHPEGIHDSFFEREHPGWVPGVCVKNLVKIFEPCGRPAVDRLNITFYENQITAFLGHNGAGKTTTLSILTGLLPPTSGTVLVGGRDIETSLDAVRQSLGMCPQHNILFHHLTVAEHMLFYAQLKGKSQEEAQLEMEAMLEDTGLHHKRNEEAQDLSGGMQRKLSVAIAFVGDAKVVILDEPTSGVDPYSRRSIWDLLLKYRSGRTIIMSTHHMDEADLLGDRIAIIAQGRLYCSGTPLFLKNCFGTGLYLTLVRKMKNIQSQRKGSEGTCSCSSKGFSTTCPAHVDDLTPEQVLDGDVNELMDVVLHHVPEAKLVECIGQELIFLLPNKNFKHRAYASLFRELEETLADLGLSSFGISDTPLEEIFLKVTEDSDSGPLFAGGAQQKRENVNPRHPCLGPREKAGQTPQDSNVCSPGAPAAHPEGQPPPEPECPGPQLNTGTQLVLQHVQALLVKRFQHTIRSHKDFLAQIVLPATFVFLALMLSIVIPPFGEYPALTLHPWIYGQQYTFFSMDEPGSEQFTVLADVLLNKPGFGNRCLKEGWLPEYPCGNSTPWKTPSVSPNITQLFQKQKWTQVNPSPSCRCSTREKLTMLPECPEGAGGLPPPQRTQRSTEILQDLTDRNISDFLVKTYPALIRSSLKSKFWVNEQRYGGISIGGKLPVVPITGEALVGFLSDLGRIMNVSGGPITREASKEIPDFLKHLETEDNIKVWFNNKGWHALVSFLNVAHNAILRASLPKDRSPEEYGITVISQPLNLTKEQLSEITVLTTSVDAVVAICVIFSMSFVPASFVLYLIQERVNKSKHLQFISGVSPTTYWVTNFLWDIMNYSVSAGLVVGIFIGFQKKAYTSPENLPALVALLLLYGWAVIPMMYPASFLFDVPSTAYVALSCANLFIGINSSAITFILELFENNRTLLRFNAVLRKLLIVFPHFCLGRGLIDLALSQAVTDVYARFGEEHSANPFHWDLIGKNLFAMVVEGVVYFLLTLLVQRHFFLSQWIAEPTKEPIVDEDDDVAEERQRIITGGNKTDILRLHELTKIYPGTSSPAVDRLCVGVRPGECFGLLGVNGAGKTTTFKMLTGDTTVTSGDATVAGKSILTNISEVHQNMGYCPQFDAIDELLTGREHLYLYARLRGVPAEEIEKVANWSIKSLGLTVYADCLAGTYSGGNKRKLSTAIALIGCPPLVLLDEPTTGMDPQARRMLWNVIVSIIREGRAVVLTSHSMEECEALCTRLAIMVKGAFRCMGTIQHLKSKFGDGYIVTMKIKSPKDDLLPDLNPVEQFFQGNFPGSVQRERHYNMLQFQVSSSSLARIFQLLLSHKDSLLIEEYSVTQTTLDQVFVNFAKQQTESHDLPLHPRAAGASRQAQLLAHRKCSTN

SEQ ID NO: 919 - protein, 401 aa, Artificial Sequence
  Synthetic polypeptide
MVVEGVVYFLLTLLVQRHFFLSQWIAEPTKEPIVDEDDDVAEERQRIITGGNKTDILRLHELTKIYPGTSSPAVDRLCVGVRPGECFGLLGVNGAGKTTTFKMLTGDTTVTSGDATVAGKSILTNISEVHQNMGYCPQFDAIDELLTGREHLYLYARLRGVPAEEIEKVANWSIKSLGLTVYADCLAGTYSGGNKRKLSTAIALIGCPPLVLLDEPTTGMDPQARRMLWNVIVSIIREGRAVVLTSHSMEECEALCTRLAIMVKGAFRCMGTIQHLKSKFGDGYIVTMKIKSPKDDLLPDLNPVEQFFQGNFPGSVQRERHYNMLQFQVSSSSLARIFQLLLSHKDSLLIEEYSVTQTTLDQVFVNFAKQQTESHDLPLHPRAAGASRQAQLLAHRKCSTN

SEQ ID NO: 920 - protein, 552 aa, Artificial Sequence
  Synthetic polypeptide
MMMNYSVSAGLVVGIFIGFQKKAYTSPENLPALVALLLLYGWAVIPMMYPASFLFDVPSTAYVALSCANLFIGINSSAITFILELFENNRTLLRFNAVLRKLLIVFPHFCLGRGLIDLALSQAVTDVYARFGEEHSANPFHWDLIGKNLFAMVVEGVVYFLLTLLVQRHFFLSQWIAEPTKEPIVDEDDDVAEERQRIITGGNKTDILRLHELTKIYPGTSSPAVDRLCVGVRPGECFGLLGVNGAGKTTTFKMLTGDTTVTSGDATVAGKSILTNISEVHQNMGYCPQFDAIDELLTGREHLYLYARLRGVPAEEIEKVANWSIKSLGLTVYADCLAGTYSGGNKRKLSTAIALIGCPPLVLLDEPTTGMDPQARRMLWNVIVSIIREGRAVVLTSHSMEECEALCTRLAIMVKGAFRCMGTIQHLKSKFGDGYIVTMKIKSPKDDLLPDLNPVEQFFQGNFPGSVQRERHYNMLQFQVSSSSLARIFQLLLSHKDSLLIEEYSVTQTTLDQVFVNFAKQQTESHDLPLHPRAAGASRQAQLLAHRKCSTN

SEQ ID NO: 921 - protein, 982 aa, Artificial Sequence
  Synthetic polypeptide
MIAHKQKKTKKKRAWASGQLSTDITTSEMGLKSLSSNSIFDPDYIKELVNDIRKFSHMLLYLKEAIFSDCFKEVIHIRLEELLRVLKSIMNKHQNLNSVDLQNAAEMLTAKVKAVNFTEVNEENKNDLFQEVFSSIETLAFTFGNILTNFLMGDVGNDSLLRLPVSRETKSFENVSVESVDSSSEKGNFSPLELDNVLLKNTDSIELALSYAKTWSKYTKNIVSWVEKKLNLELESTRNMVKLAEATRTNIGIQEFMPLQSLFTNALLNDIESSHLLQQTIAALQANKFVQPLLGRKNEMEKQRKEIKELWKQEQNKMLEAENALKKAKLLCMQRQDEYEKAKSSMFRAEEEHLSSSGGLAKNLNKQLEKKRRLEEEALQKVEEANELYKVCVTNVEERRNDLENTKREILAQLRTLVFQCDLTLKAVTVNLFHMQHLQAASLADSLQSLCDSAKLYDPGQEYSEFVKATNSTEEEKVDGNVNKHLNSSQPSGFGPANSLEDVVRLPDSSNKIEEDRCSNSADITGPSFIRSWTFGMFSDSESTGGSSESRSLDSESISPGDFHRKLPRTPSSGTMSSADDLDEREPPSPSETGPNSLGTFKKTLMSKAALTHKFRKLRSPTKCRDCEGIVVFQGVECEECLLVCHRKCLENLVIICGHQKLPGKIHLFGAEFTQVAKKEPDGIPFILKICASEIENRALCLQGIYRVCGNKIKTEKLCQALENGMHLVDISEFSSHDICDVLKLYLRQLPEPFILFRLYKEFIDLAKEIQHVNEEQETKKNSLEDKKWPNMCIEINRILLKSKDLLRQLPASNFNSLHFLIVHLKRVVDHAEENKMNSKNLGVIFGPSLIRPRPTTAPITISSLAEYSNQARLVEFLITYSQKIFDGSLQPQDVMCSIGVVDQGCFPKPLLSPEERDIERSMKSLFFSSKEDIHTSESESKIFERATSFEESERKQNALGKCDACLSARVTRETPSQRKKK

SEQ ID NO: 922 - protein, 976 aa, Artificial Sequence
  Synthetic polypeptide
MIAHKQKKTKKKRAWASGQLSTDITTSEMGLKSLSSNSIFDPDYIKELVNDIRKFSHMLLYLKEAIFSDCFKEVIHIRLEELLRVLKSIMNKHQNLNSVDLQNAAEMLTAKVKAVNFTEVNEENKNDLFQEVFSSIETLAFTFGNILTNFLMGDVGNDSLLRLPVSRETKSFENVSVESVDSSSEKGNFSPLELDNVLLKNTDSIELALSYAKTWSKYTKNIVSWVEKKLNLELESTRNMVKLAEATRTNIGIQEFMPLQSLFTNALLNDIESSHLLQQTIAALQANKFVQPLLGRKNEMEKQRKEIKELWKQEQNKMLEAENALKKAKLLCMQRQDEYEKAKSSMFRAEEEHLSSSGGLAKNLNKQLEKKRRLEEEALQKVEEANELYKVCVTNVEERRNDLENTKREILAQLRTLVFQCDLTLKAVTVNLFHMQHLQAASLADSLQSLCDSAKLYDPGQEYSEFVKATNSTEEEKVDGNVNKHLNSSQPSGFGPANSLEDVVRLPDSSNKIEEDRCSNSADITGPSFIRSWTFGMFSDSESTGGSSESRSLDSESISPGDFHRKLPRTPSSGTMSSADDLDEREPPSPSETGPNSLGTFKKTLMSKAALTHKFRKLRSPTKCRDCEGIVVFQGVECEECLLVCHRKCLENLVIICGHQKLPGKIHLFGAEFTQVAKKEPDGIPFILKICASEIENRALCLQGIYRVCGNKIKTEKLCQALENGMHLVDISEFSSHDICDVLKLYLRQLPEPFILFRLYKEFIDLAKEIQHVNEEQETKKNSLEDKKWPNMCIEINRILLKSKDLLRQLPASNFNSLHFLIVHLKRVVDHAEENKMNSKNLGVIFGPSLIRPRPTTAPITISSLAEYSNQARLVEFLITYSQKIFDGSLQPQDVMCSIGVVDQGCFPKPLLSPEERDIERSMKSLFFSSKEDIHTSESESKIFERATSFEESERKQNALGKCDACLSARCGGGRL

SEQ ID NO: 923 - protein, 54 aa, Artificial Sequence
  Synthetic polypeptide
MAAFSKYLTARNSSLAGAAFLLLCLLHKRRRALGLHGTESTADLDTIKTPETLL

SEQ ID NO: 924 - protein, 61 aa, Artificial Sequence
  Synthetic polypeptide
MAAFSKYLTARNSSLAGAAFLLLCLLHKRRRALGLHGKKSGKPPLQNNENVSCISERTLSV

SEQ ID NO: 925 - protein, 85 aa, Artificial Sequence
  Synthetic polypeptide
MAAFSKYLTARNSSLAGAAFLLLCLLHKRRRALGLHGYFMETWREKSDEVMGELTDHVTHCKKSGKPPLQNNENVSCISERTLSV

SEQ ID NO: 926 - protein, 188 aa, Artificial Sequence
  Synthetic polypeptide
MVCVLVLAAAAGAVAVFLILRIWVVLRSMDVTPRESLSILVVAGSGGHTTEILRLLGSLSNAYSPRHYVIADTDEMSANKINSFELDRADRDPSNMYTKYYIHRIPRSREVQQSWPSTVFTTLHSMWLSFPLIHRVKPDLAGPSGGIPEEGIVLIGDDSSMRVSGPEDLSVGQDVEVEDSDIDDSDAV

SEQ ID NO: 927 - protein, 102 aa, Artificial Sequence
  Synthetic polypeptide
MVCVLVLAAAAGAVAVFLILRIWVVLRSMDVTPRESLSILVVAGSGGHTTEILRLLGSLSNAYSPRHYVIADTDEMSANKINSFELDRADRDPSNMNYKKLF

SEQ ID NO: 928 - protein, 85 aa, Artificial Sequence
  Synthetic polypeptide
MDGIVTEVAVGVKRGSDELLSGSVLSSPNSNMSSMVVTEWPNFRTLITPNAGKDVEQQELSLTAQWNAEWYSHFGRQFGNFLENY

SEQ ID NO: 929 - protein, 96 aa, Artificial Sequence
  Synthetic polypeptide
MWSNLTFSFFGLRTKAKKYVTVNNRGSDELLSGSVLSSPNSNMSSMVVTEWPNFRTLITPNAGKDVEQQELSLTAQWNAEWYSHFGRQFGNFLENY

SEQ ID NO: 930 - protein, 54 aa, Artificial Sequence
  Synthetic polypeptide
MSSMVVTEWPNFRTLITPNAGKDVEQQELSLTAQWNAEWYSHFGRQFGNFLENY

SEQ ID NO: 931 - protein, 820 aa, Artificial Sequence
  Synthetic polypeptide
MAPVLSKDSADIESILALNPRTQTHATLRSTSAKKLDKKHWKRNPDKNCFNCEKLENNFDDIKHTTLGERGALREAMRCLKCADAPCQKSCPTNLDIKSFITSIANKNYYGAAKMIFSDNPLGLTCGMVCPTSDLCVGGCNLYATEEGPINIGGLQQFATEVFKAMSIPQIRNPSLPPPEKMSEAYSAKIALFGAGPASISCASFLARLGYSDITIFEKQEYVGGLSTSEIPQFRLPYDVVNFEIELMKDLGVKIICGKSLSVNEMTLSTLKEKGYKAAFIGIGLPEPNKDAIFQGLTQDQGFYTSKDFLPLVAKGSKAGMCACHSPLPSIRGVVIVLGAGDTAFDCATSALRCGARRVFIVFRKGFVNIRAVPEEMELAKEEKCEFLPFLSPRKVIVKGGRIVAMQFVRTEQDETGKWNEDEDQMVHLKADVVISAFGSVLSDPKVKEALSPIKFNRWGLPEVDPETMQTSEAWVFAGGDVVGLANTTVESVNDGKQASWYIHKYVQSQYGASVSAKPELPLFYTPIDLVDISVEMAGLKFINPFGLASATPATSTSMIRRAFEAGWGFALTKTFSLDKDIVTNVSPRIIRGTTSGPMYGPGQSSFLNIELISEKTAAYWCQSVTELKADFPDNIVIASIMCSYNKNDWTELAKKSEDSGADALELNLSCPHGMGERGMGLACGQDPELVRNICRWVRQAVQIPFFAKLTPNVTDIVSIARAAKEGGANGVTATNTVSGLMGLKSDGTPWPAVGIAKRTTYGGVSGTAIRPIALRAVTSIARALPGFPILATGGIDSAESGLQFLHSGASVLQNCCTMI

SEQ ID NO: 932 - protein, 153 aa, Artificial Sequence
  Synthetic polypeptide
MLRRPAPALAPAARLLLAGLLCGGGVWAARVNKHKPWLEPTYHGIVTENDNTVLLDPPLIALDKDAPLRFAESFEVTVTKEGEICGFKIHGQNVPFDAVVVDKSTGEGVIRSKEKLDCELQKDYSFTIQAYDCGKGPDGTNVKKSHKCSGSHL

SEQ ID NO: 933 - protein, 143 aa, Artificial Sequence
  Synthetic polypeptide
MLRRPAPALAPAARLLLAGLLCGGGVWAARVNKHKPWLEPTYHGIVTENDNTVLLDPPLIALDKDAPLRFAGEICGFKIHGQNVPFDAVVVDKSTGEGVIRSKEKLDCELQKDYSFTIQAYDCGKGPDGTNVKKSHKCSGSHL

SEQ ID NO: 934 - protein, 36 aa, Artificial Sequence
  Synthetic polypeptide
MSLQFLKLLLREDLSSDHNAVFITKKPVHFNVTWRY

SEQ ID NO: 935 - protein, 371 aa, Artificial Sequence
  Synthetic polypeptide
MDMNSFSPMMPTSPLSMINQIKFEDEPDLKDLFITVDEPESHVTTIETFITYRIITKTSRGEFDSSEFEVRRRYQDFLWLKGKLEEAHPTLIIPPLPEKFIVKGMVERFNDDFIETRRKALHKFLNRIADHPTLTFNEDFKIFLTAQAWELSSHKKQGPGLLSRMGQTVRAVASSMRGVKNRPEEFMEMNNFIELFSQKINLIDKISQRIYKEEREYFDEMKEYGPIHILWSASEEDLVDTLKDVASCIDRCCKATEKRMSGLSEALLPVVHEYVLYSEMLMGVMKRRDQIQAELDSKVEVLTYKKADTDLAWIGQKTDLTWARGNSASRLPWTFICNIASFLGLKPAGPPCRFFFFFGSLHNLESLQINL

SEQ ID NO: 936 - protein, 380 aa, Artificial Sequence
  Synthetic polypeptide
MEGERRASQAPSSGLPAGGANGESPGGGAPFPGSSGSSALLQAEVLDLDEDEDDLEVFSKDASLMDMNSFSPMMPTSPLSMINQIKFEDEPDLKDLFITVDEPESHVTTIETFITYRIITKTSRGEFDSSEFEVRRRYQDFLWLKGKLEEAHPTLIIPELSSHKKQGPGLLSRMGQTVRAVASSMRGVKNRPEEFMEMNNFIELFSQKINLIDKISQRIYKEEREYFDEMKEYGPIHILWSASEEDLVDTLKDVASCIDRCCKATEKRMSGLSEALLPVVHEYVLYSEMLMGVMKRRDQIQAELDSKVEVLTYKKADTDLAWIGQKTDLTWARGNSASRLPWTFICNIASFLGLKPAGPPCRFFFFFGSLHNLESLQINL

SEQ ID NO: 937 - protein, 435 aa, Artificial Sequence
  Synthetic polypeptide
MEGERRASQAPSSGLPAGGANGESPGGGAPFPGSSGSSALLQAEVLDLDEDEDDLEVFSKDASLMDMNSFSPMMPTSPLSMINQIKFEDEPDLKDLFITVDEPESHVTTIETFITYRIITKTSRGEFDSSEFEVRRRYQDFLWLKGKLEEAHPTLIIPPLPEKFIVKGMVERFNDDFIETRRKALHKFLNRIADHPTLTFNEDFKIFLTAQAWELSSHKKQGPGLLSRMGQTVRAVASSMRGVKNRPEEFMEMNNFIELFSQKINLIDKISQRIYKEEREYFDEMKEYGPIHILWSASEEDLVDTLKDVASCIDRCCKATEKRMSGLSEALLPVVHEYVLYSEMLMGVMKRRDQIQAELDSKVEVLTYKKADTDLAWIGQKTDLTWARGNSASRLPWTFICNIASFLGLKPAGPPCRFFFFFGSLHNLESLQINL

SEQ ID NO: 938 - protein, 535 aa, Artificial Sequence
  Synthetic polypeptide
MAASGRGLCKAVAASPFPAWRRDNTEARGGLKPEYDAVVIGAGHNGLVAAAYLQRLGVNTAVFERRHVIGGAAVTEEIIPGFKFSRASYLLSLLRPQIYTDLELKKHGLRLHLRNPYSFTPMLEEGAGSKVPRCLLLGTDMAENQKQIAQFSQKDAQVFPKYEEFMHRLALAIDPLLDAAPVDMAAFQHGSLLQRMRSLSTLKPLLKAGRILGAQLPRYYEVLTAPITKVLDQWFESEPLKATLATDAVIGAMTSPHTPGSGYVLLHHVMGGLEGMQGAWGYVQGGMGALSDAIASSATTHGASIFTEKTVAKVQVNSEGCVQGVVLEDGTEVRSKMVLSNTSPQITFLKLTPQEWLPEEFLERISQLDTRSPVTKINVAVDRLPSFLAAPNAPRGQPLPHHQCSIHLNCEDTLLLHQAFEDAMDGLPSHRPVIELCIPSSLDPTLAPPGCHVVSLFTQYMPYTLAGGKAWDEQERDAYADRVFDCIEVYAPGFKDSVVGRDILTPPDLERIFGLPGGVWWCVPVVPATQEAETG

SEQ ID NO: 939 - protein, 84 aa, Artificial Sequence
  Synthetic polypeptide
MAASGRGLCKAVAASPFPAWRRDNTEARGGLKPEYDAVVIGAGTWDSGAGSAVWPGANACLLWAWIFPWRMTGRLGELRGFPIS

SEQ ID NO: 940 - protein, 215 aa, Artificial Sequence
  Synthetic polypeptide
MRVLCAFPEAMPSSNSRPPACLAPGALYLALLLHLSLSSQAGDRRPLPVDRAAGLKEKTLILLDVSTKNPVRTVNENFLSLQLDPSIIHDGWLDFLSSKRLVTLARGLSPAFLRFGGKRTDFLQFQNLRNPAKSRGGPGPDYYLKNYEDDIVRSDVALDKQKGCKIAQHPDVMLELQREKAAQMHLVLLKEQFSNTYSNLILTEYPSIPSSHLTS

SEQ ID NO: 941 - protein, 240 aa, Artificial Sequence
  Synthetic polypeptide
MLEKFCNSTFWNSSFLDSPEADLPLCFEQTVLVWIPLGYLWLLAPWQLLHVYKSRTKRSSTTKLYLAKQVFVGFLLILAAIELALVLTEDSGQATVPAVRYTNPSLYLGTWLLVLLIQYSRQWCVQKNSWFLSLFWILSILCGTFQFQTLIRTLLQGDNSNLAYSCLFFISYGFQILILIFSAFSENNESSNNPSSIASFLSSITYSWYDSQAWWCVPVIPATWEAEAGESLEPGRQILQ

SEQ ID NO: 942 - protein, 215 aa, Artificial Sequence
  Synthetic polypeptide
MLEKFCNSTFWNSSFLDSPEADLPLCFEQTVLVWIPLGYLWLLAPWQLLHVYKSRTKRSSTTKLYLAKQVFVGFLLILAAIELALVLTEDSGQATVPAVRYTNPSLYLGTWLLVLLIQYSRQWCVQKNSWFLSLFWILSILCGTFQFQTLIRTLLQGDNSNLAYSCLFFISYGFQILILIFSAFSENNESSNNPSSIASFLSSITYSWYDSYLGG

SEQ ID NO: 943 - protein, 218 aa, Artificial Sequence
  Synthetic polypeptide
MLEKFCNSTFWNSSFLDSPEADLPLCFEQTVLVWIPLGYLWLLAPWQLLHVYKSRTKRSSTTKLYLAKQVFVGFLLILAAIELALVLTEDSGQATVPAVRYTNPSLYLGTWLLVLLIQYSRQWCVQKNSWFLSLFWILSILCGTFQFQTLIRTLLQGDNSNLAYSCLFFISYGFQILILIFSAFSENNESSNNPSSIASFLSSITYSWYDRNKKRRRR

SEQ ID NO: 944 - protein, 215 aa, Artificial Sequence; identical to SEQ ID NO: 942
  Synthetic polypeptide

SEQ ID NO: 945 - protein, 133 aa, Artificial Sequence
  Synthetic polypeptide
MEAGSVVRAIFDFCPSVSEELPLFVGDIIEVLAVVDEFWLLGKKEDVTGQFPSSFVEIVTIPSLKEGERLFVCICEFTSQELDNLPLHRATWEAEAGELLEPGRWRLQRAKIAPLQSSLGNKSETPSQKKKKK

SEQ ID NO: 946 - protein, 323 aa, Artificial Sequence
  Synthetic polypeptide
MPAHLLQDDISSSYTTTTTITAPPSRVLQNGGDKLETMPLYLEDDIRPDIKDDIYDPTYKDKEGPSPKVEYVWRNIILMSLLHLGALYGITLIPTCKFYTWLWGVFYYFVSALGITAGAHRLWSHRSYKARLPLRLFLIIANTMAFQNDVYEWARDHRAHHKFSETHADPHNSRRGFFFSHVGWLLVRKHPAVKEKGSTLDLSDLEAEKLVMFQRRYYKPGLLMMCFILPTLVPWYFWGETFQNSVFVATFLRYAVVLNATWLVNSAAHLFGYRPYDKNISPRENILVSLGAVDSARLHPGEIYSLVAHTKPVWWFLHTDACD

SEQ ID NO: 947 - protein, 36 aa, Artificial Sequence
  Synthetic polypeptide
GVRGAGGDRLRPTESRGRNICKLASVLRAQSSGRIP

SEQ ID NO: 948 - protein, 198 aa, Artificial Sequence
  Synthetic polypeptide
MTARGTPSRFLASVLHNGLGRYVQQLQRLSFSVSRDGASSRGAREFVEREVIDFARRNPGVVIYVNSRPCCVPRVVAEYLNGAVREESIHCKSVEEISTLVQKLADQSGLDVIRIRKPFHTDNPSIQGQWHPFTNKPTTFRGLRPREVQDPAPAQDTGLRLSAVAPQILLPGWPDPHFERPRRADHEVKRSRPSWATQ

SEQ ID NO: 949 - protein, 220 aa, Artificial Sequence
  Synthetic polypeptide
MTARGTPSRFLASVLHNGLGRYVQQLQRLSFSVSRDGASSRGAREFVEREVIDFARRNPGVVIYVNSRPCCVPRVVAEYLNGAVREESIHCKSVEEISTLVQKLADQSGLDVIRIRKPFHTDNPSIQGQWHPFTNKPTTFRGLRPREVQDPAPAQDAAEFLGEGAGPCWYSIVALPQKHIAIAIHPPQPAGQCHQAIGHWPETVCSCTADPPARLARPTL

SEQ ID NO: 950 - protein, 168 aa, Artificial Sequence
  Synthetic polypeptide
MAVTGWLESLRTAQKTALLQDGRRKVHYLFPDGKEMAEEYDEKTSELLVRKWRVKSALGAMGQWQLEVGDPAPLGAGNLGPELIKESNANPIFMRKDTKMSFQWRIRNLPYPKDVYSVSVDQKERCIIVRTTNKKRTGWRLLWTPLAMRCAGVHGTPSELTAQGLGHS

SEQ ID NO: 951 - protein, 176 aa, Artificial Sequence
  Synthetic polypeptide
MAVTGWLESLRTAQKTALLQDGRRKVHYLFPDGKEMAEEYDEKTSELLVRKWRVKSALGAMGQWQLEVGDPAPLGAGNLGPELIKESNANPIFMRKDTKMSFQWRIRNLPYPKDVYSVSVDQKERCIIVRTTNKKYYKKFSIPDLDRHQLPLDDALLSFAHANCTLIISASIFSCK

SEQ ID NO: 952 - protein, 18 aa, Artificial Sequence
  Synthetic polypeptide
MAHYNFKKITVVPSAKKN

SEQ ID NO: 953 - protein, 496 aa, Artificial Sequence
  Synthetic polypeptide
MESCYNPGLDGIIEYDDFKLNSSIVEPKEPAPETADGPYLVIVEQPKQRGFRFRYGCEGPSHGGLPGASSEKGRKTYPTVKICNYEGPAKIEVDLVTHSDPPRAHAHSLVGKQCSELGICAVSVGPKDMTAQFNNLGVLHVTKKNMMGTMIQKLQRQRLRSRPQGLTEAEQRELEQEAKELKKVMDLSIVRLRFSAFLRASDGSFSLPLKPVISQPIHDSKSPGASNLKISRMDKTAGSVRGGDEVYLLCDKVQKDDIEVRFYEDDENGWQAFGDFSPTDVHKQYAIVFRTPPYHKMKIERPVTVFLQLKRKRGGDVSDSKQFTYYPLVEDKEEVQRKRRKALPTFSQPFGGGSHMGGGSGGAAGGYGGAGGGGSLGFFPSSLAYSPYQSGAGPMGCYPGGGGGAQMAATVPSRDSGEEAAEPSAPSRTPQCEPQAPEMLQRAREYNARLFGLAQRSARALLDYGVTADARALLAGQRHLLTAQDENGDTCCETLS

SEQ ID NO: 954 - protein, 21 aa, Artificial Sequence
  Synthetic polypeptide
MDLVQVSGSLGSPVLSCKVRI

SEQ ID NO: 955 - protein, 292 aa, Artificial Sequence
  Synthetic polypeptide
MGLGQPQAWLLGLPTAVVYGSLALFTTILHNVFLLYYVDTFVSVYKINKMAFWVGETVFLLWNSLNDPLFGWLSDRQFLSSQPRSGAGLSSRAVVLARVQALGWHGPLLALSFLAFWVPWAPAGLQFLLCLCLYDGFLTLVDLHHHALLADLALSAHDRTHLNFYCSLFSAAGSLSVFASYAFWNKEDFSSFRAFCVTLAVSSGLGFLGATQLLRRRVEAARKDPGCSGLVVDSGLCGEELLVGSEEADSITLGRYLRQLARHRNFLWFVSMDLVQVSGSLGSPVLSCKVRI

SEQ ID NO: 956 - protein, 141 aa, Artificial Sequence
  Synthetic polypeptide
MGLGQPQAWLLGLPTAVVYGSLALFTTILHNVFLLYYVDTFVSVYKINKMAFWVGETVFLLWNSLNDPLFGWLSDRQFLSSQPRLCGEELLVGSEEADSITLGRYLRQLARHRNFLWFVSMDLVQVSGSLGSPVLSCKVRI

SEQ ID NO: 957 - protein, 107 aa, Artificial Sequence
  Synthetic polypeptide
MAELRPSGAPGPTAPPAPGPTAPPAFASLFPPGLHAIYGECRRLYPDQPNPLQVTAIVKYWLGGPDPLDYVSMYRNVGSPSANIPEHWHYISFGLSDLYGDNRVHET

SEQ ID NO: 958 - protein, 96 aa, Artificial Sequence
  Synthetic polypeptide
MGLLSILRKLKSAPDQEVRILLLGLDNAGKTTLLKQLASEDISHITPTQGFNIKSVQSQGFKLNVWDIGGQRKIRPYWKNYFENTDILAWCDGSFL

SEQ ID NO: 959 - protein, 51 aa, Artificial Sequence
  Synthetic polypeptide
MERRRLLGGMALLLLQALPSPLSARAEPPQTSSIFIWEAGIAISCYQLYSS

SEQ ID NO: 960 - protein, 55 aa, Artificial Sequence
  Synthetic polypeptide
MSTSWSDRLQNAADMPANMDKHALKKYRREAYHRLGMVVHACSPHTLGGRARRSP

SEQ ID NO: 961 - protein, 226 aa, Artificial Sequence
  Synthetic polypeptide
MEGVAVVTAGSVGAAKTEGAAALPPPPPVSPPALTPAPAAGEEGPAPLSETGAPGCSGSRPPELEPERSLGRFRGRFEDEDEELEEEEELEEEEEEEEEDMSHFSLRLEGGRQDSEDEEERLINLSELTPYILCSICKGYLIDATTITECLHTFCKSCIVRHFYYSNRCPKCNIVVHQTQPLYNISANEGTGHFKNKKIHRSRKQISGCQRLGEEAEWGVTTKRYR

SEQ ID NO: 962 - protein, 301 aa, Artificial Sequence
  Synthetic polypeptide
MEGVAVVTAGSVGAAKTEGAAALPPPPPVSPPALTPAPAAGEEGPAPLSETGAPGCSGSRPPELEPERSLGRFRGRFEDEDEELEEEEELEEEEEEEEEDMSHFSLRLEGGRQDSEDEEERLINLSELTPYILCSICKGYLIDATTITECLHTFCKSCIVRHFYYSNRCPKCNIVVHQTQPLYNIRLDRQLQDIVYKLVINLEEREKKQMHDFYKERGLEVPKPAVPQPVPSSKGRSKKVLESVFRIPPELDMSLLLEFIGANEGTGHFKNKKIHRSRKQISGCQRLGEEAEWGVTTKRYR

SEQ ID NO: 963 - protein, 401 aa, Artificial Sequence
  Synthetic polypeptide
MAHYNFKKITVVPSAKDFIDLTLSKTQRKTPTVIHKHYQIHRIRHFYMRKVKFTQQNYHDRLSQILTDFPKLDDIHPFYADLMNILYDKDHYKLALGQINIAKNLVDNVAKDYVRLMKYGDSLYRCKQLKRAALGRMCTVIKRQKQSLEYLEQVRQHLSRLPTIDPNTRTLLLCGYPNVGKSSFINKVTRADVDVQPYAFTTKSLFVGHMDYKYLRWQVVDTPGILDHPLEDRNTIEMQAITALAHLRAAVLYVMDLSEQCGHGLREQLELFQNIRPLFINKPLIVVANKCDVKRIAELSEDDQKIFTDLQSEGFPVIETSTLTEEGVIKVKTEACDRLLAHRVETKMKGNKVNEVLNRLHLAIPTRRDDKWLTSVIPALWEAEAGGSPEVKSLRPAWQSW

SEQ ID NO: 964 - protein, 285 aa, Artificial Sequence
  Synthetic polypeptide
MKYGDSLYRCKQLKRAALGRMCTVIKRQKQSLEYLEQVRQHLSRLPTIDPNTRTLLLCGYPNVGKSSFINKVTRADVDVQPYAFTTKSLFVGHMDYKYLRWQVVDTPGILDHPLEDRNTIEMQAITALAHLRAAVLYVMDLSEQCGHGLREQLELFQNIRPLFINKPLIVVANKCDVKRIAELSEDDQKIFTDLQSEGFPVIETSTLTEEGVIKVKTEACDRLLAHRVETKMKGNKVNEVLNRLHLAIPTRRDDKWLTSVIPALWEAEAGGSPEVKSLRPAWQSW

SEQ ID NO: 965 - protein, 354 aa, Artificial Sequence
  Synthetic polypeptide
MRKVKFTQQNYHDRLSQILTDFPKLDDIHPFYADLMNILYDKDHYKLALGQINIAKNLVDNVAKDYVRLMKYGDSLYRCKQLKRAALGRMCTVIKRQKQSLEYLEQVRQHLSRLPTIDPNTRTLLLCGYPNVGKSSFINKVTRADVDVQPYAFTTKSLFVGHMDYKYLRWQVVDTPGILDHPLEDRNTIEMQAITALAHLRAAVLYVMDLSEQCGHGLREQLELFQNIRPLFINKPLIVVANKCDVKRIAELSEDDQKIFTDLQSEGFPVIETSTLTEEGVIKVKTEACDRLLAHRVETKMKGNKVNEVLNRLHLAIPTRRDDKWLTSVIPALWEAEAGGSPEVKSLRPAWQSW

SEQ ID NO: 966 - protein, 2 aa, Artificial Sequence
  Synthetic polypeptide
VL

SEQ ID NO: 967 - protein, 154 aa, Artificial Sequence
  Synthetic polypeptide
MLAYCVQDATVVDVEKRRNPSKHYVYIINVTWSDSTSQTIYRRYSKFFDLQMQLLDKFPIEGGQKDPKQRIIPFLPGKILFRRSHIRDVAVKRLKPIDEYCRALVRLPPHISQCDEVFRFFEARPEDVNPPKDCIPSTQNSACPRAGSQRVSVG

SEQ ID NO: 968 - protein, 152 aa, Artificial Sequence
  Synthetic polypeptide
MLAYCVQDATVVDVEKRRNPSKHYVYIINVTWSDSTSQTIYRRYSKFFDLQMQLLDKFPIEGGQKDPKQRIIPFLPGKILFRRSHIRDVAVKRLKPIDEYCRALVRLPPHISQCDEVFRFFEARPEDVNPPKETQLECAICGEPAFTRHQIC

SEQ ID NO: 969 - protein, 2 aa, Artificial Sequence
  Synthetic polypeptide
VL

SEQ ID NO: 970 - protein, 139 aa, Artificial Sequence
  Synthetic polypeptide
MLAYCVQDATVVDVEKRRNPSKHYVYIINVTWSDSTSQTIYRRYSKFFDLQMQLLDKFPIEGGQKDPKQRIIPFLPGKILFRRSHIRDVAVKRLKPIDEYCRALVRLPPHISQCDEVFRFFEARPEDVNPPKEVVTRSR

SEQ ID NO: 971 - protein, 2 aa, Artificial Sequence
  Synthetic polypeptide
VL

SEQ ID NO: 972 - protein, 54 aa, Artificial Sequence
  Synthetic polypeptide
MLAYCVQDATVVDVEKRRNPSKHYAVPHPPWAHVIRTSRSCVAGVSFTLAKYTF

SEQ ID NO: 973 - protein, 743 aa, Artificial Sequence
  Synthetic polypeptide
MDVTKKNKRDGTEVTERIVTETVTTRLTSLPPKGGTSNGYAKTASLGGGSRLEKQSLTHGSSGYINSTGSTRGHASTSSYRRAHSPASTLPNSPGSTFERKTHVTRHAYEGSSSGNSSPEYPRKEFASSSTRGRSQTRESEIRVRLQSASPSTRWTELDDVKRLLKGSRSASVSPTRNSSNTLPIPKKGTVETKIVTASSQSVSGTYDATILDANLPSHVWSSTLPAGSSMGTYHNNMTTQSSSLLNTNAYSAGSVFGVPNNMASCSPTLHPGLSTSSSVFGMQNNLAPSLTTLSHGTTTTSTAYGVKKNMPQSPAAVNTGVSTSAACTTSVQSDDLLHKDCKFLILEKDNTPAKKEMELLIMTKDSGKVFTASPASIAATSFSEDTLKKEKQAAYNADSGLKAEANGDLKTVSTKGKTTTADIHSYGSSGGGGSGGGGGVGGAGGGPWGPAPAWCPCGSCCSWWKWLLGLLLTWLLLLGLLFGLIALAEEVRKLKARVDELERIRRSILPYGDSMDRIEKDRLQGMAPAAGADLDKIGLHSDSQEELWMFVRKKLMMEQENGNLRGSPGPKGDMGSPGPKGDRGFPGTPGIPGPLGHPGPQGPKGQKGSVGDPGMEGPMGQRGREGPMGPRGEAGPPGSGEKGERGAAGEPGPHGPPGVPGSVGPKGSSGSPGPQGPPGPVGLQGLRGEVGLPGVKGDKGPMGPPGPKGDQGEKGPRGLTGEPGMRGLPGAVGEPGAKGAMG

SEQ ID NO: 974 - protein, 436 aa, Artificial Sequence
  Synthetic polypeptide
MAQGRERDEGPHSAGGASLSVRWVQGFPKQNVHFVNDNTICYPCGNYVIFINIETKKKTVLQCSNGIVGVMATNIPCEVVAFSDRKLKPLIYVYSFPGLTRRTKLKGNILLDYTLLSFSYCGTYLASYSSLPEFELALWNWESSIILCKKSQPGMDVNQMSFNPMNWRQLCLSSPSTVSVWTIERSNQEHCFRARSVKLPLEDGSFFNETDVVFPQSLPKDLIYGPVLPLSAIAGLVGKEAETFRPKDDLYPLLHPTMHCWTPTSDLYIGCEEGHLLMINGDTLQVTVLNKIEEESPLDRRNFISPVTLVYQKEGVLASGIDGFVYSFIIKDRSYMIEDFLEIERPVEHMTFSPNYTVLLIQTDKGSVYIYTFGKEPTLNKVLDACDGKFQAIDFITPGTQYFMTLTYSGEICVWWLEDCACVSKIYLNTLPGVVV

SEQ ID NO: 975 - protein, 437 aa, Artificial Sequence
  Synthetic polypeptide
MAQGRERDEGPHSAGGASLSVRWVQGFPKQNVHFVNDNTICYPCGNYVIFINIETKKKTVLQCSNGIVGVMATNIPCEVVAFSDRKLKPLIYVYSFPGLTRRTKLKGNILLDYTLLSFSYCGTYLASYSSLPEFELALWNWESSIILCKKSQPGMDVNQMSFNPMNWRQLCLSSPSTVSVWTIERSNQEHCFRARSVKLPLEDGSFFNETDVVFPQSLPKDLIYGPVLPLSAIAGLVGKEAETFRPKDDLYPLLHPTMHCWTPTSDLYIGCEEGHLLMINGDTLQVTVLNKIEEESPLEDRRNFISPVTLVYQKEGVLASGIDGFVYSFIIKDRSYMIEDFLEIERPVEHMTFSPNYTVLLIQTDKGSVYIYTFGKEPTLNKVLDACDGKFQAIDFITPGTQYFMTLTYSGEICVWWLEDCACVSKIYLNTLPGVVV

SEQ ID NO: 976 - protein, 367 aa, Artificial Sequence
  Synthetic polypeptide
MATNIPCEVVAFSDRKLKPLIYVYSFPGLTRRTKLKGNILLDYTLLSFSYCGTYLASYSSLPEFELALWNWESSIILCKKSQPGMDVNQMSFNPMNWRQLCLSSPSTVSVWTIERSNQEHCFRARSVKLPLEDGSFFNETDVVFPQSLPKDLIYGPVLPLSAIAGLVGKEAETFRPKDDLYPLLHPTMHCWTPTSDLYIGCEEGHLLMINGDTLQVTVLNKIEEESPLEDRRNFISPVTLVYQKEGVLASGIDGFVYSFIIKDRSYMIEDFLEIERPVEHMTFSPNYTVLLIQTDKGSVYIYTFGKEPTLNKVLDACDGKFQAIDFITPGTQYFMTLTYSGEICVWWLEDCACVSKIYLNTLPGVVV

SEQ ID NO: 977 - protein, 669 aa, Artificial Sequence
  Synthetic polypeptide
MAHYNFKKITVVPSAKDFIDLTLSKTQRKTPTVIHKHYQIHRIRHFYMRKVKFTQQNYHDRLSQILTDFPKLDDIHPFYADLMNILYDKDHYKLALGQINIAKNLVDNVAKDYVRLMKYGDSLYRCKQLKRAALGRMCTVIKRQKQSLEYLEQVRQHLSRLPTIDPNTRTLLLCGYPNVGKSSFINKVTRADVDVQPYAFTTKSLFVGHMDYKYLRWQVVDTPGILDHPLEDRNTIEMQAITALAHLRAAVLYVMDLSEQCGHGLREQLELFQNIRPLFINKPLIVVANKCDVKRIAELSEDDQKIFTDLQSEGFPVIETSTLTEEGVIKVKTEACDRLLAHRVETKMKGNKVNEVLNRLHLAIPTRRDDKERPPFIPEGVVARRKRMETEESRKKRERDLELEMGDDYILDLQKYWDLMNLSEKHDKIPEIWEGHNIADYIDPAIMKKLEELEKEEELRTAAGEYDSVSESEDEEMLEIRQLAKQIREKKKLKILESKEKNTQGPRMPRTAKKVQRTVLEKEMRSLGVDMDDKDDAHYAVQARRSRSITRKRKREDSAPPSSVARSGSCSRTPRDVSGLRDVKMVKKAKTMMKNAQKKMNRLGKKGEADRHVFDMKPKHLLSGKRKAGVEPQPTQGVSSWLFLANLIPRCSGQKYLHFHSCQGEMPLA

SEQ ID NO: 978 - protein, 553 aa, Artificial Sequence
  Synthetic polypeptide
MKYGDSLYRCKQLKRAALGRMCTVIKRQKQSLEYLEQVRQHLSRLPTIDPNTRTLLLCGYPNVGKSSFINKVTRADVDVQPYAFTTKSLFVGHMDYKYLRWQVVDTPGILDHPLEDRNTIEMQAITALAHLRAAVLYVMDLSEQCGHGLREQLELFQNIRPLFINKPLIVVANKCDVKRIAELSEDDQKIFTDLQSEGFPVIETSTLTEEGVIKVKTEACDRLLAHRVETKMKGNKVNEVLNRLHLAIPTRRDDKERPPFIPEGVVARRKRMETEESRKKRERDLELEMGDDYILDLQKYWDLMNLSEKHDKIPEIWEGHNIADYIDPAIMKKLEELEKEEELRTAAGEYDSVSESEDEEMLEIRQLAKQIREKKKLKILESKEKNTQGPRMPRTAKKVQRTVLEKEMRSLGVDMDDKDDAHYAVQARRSRSITRKRKREDSAPPSSVARSGSCSRTPRDVSGLRDVKMVKKAKTMMKNAQKKMNRLGKKGEADRHVFDMKPKHLLSGKRKAGVEPQPTQGVSSWLFLANLIPRCSGQKYLHFHSCQGEMPLA

SEQ ID NO: 979 - protein, 622 aa, Artificial Sequence
  Synthetic polypeptide
MRKVKFTQQNYHDRLSQILTDFPKLDDIHPFYADLMNILYDKDHYKLALGQINIAKNLVDNVAKDYVRLMKYGDSLYRCKQLKRAALGRMCTVIKRQKQSLEYLEQVRQHLSRLPTIDPNTRTLLLCGYPNVGKSSFINKVTRADVDVQPYAFTTKSLFVGHMDYKYLRWQVVDTPGILDHPLEDRNTIEMQAITALAHLRAAVLYVMDLSEQCGHGLREQLELFQNIRPLFINKPLIVVANKCDVKRIAELSEDDQKIFTDLQSEGFPVIETSTLTEEGVIKVKTEACDRLLAHRVETKMKGNKVNEVLNRLHLAIPTRRDDKERPPFIPEGVVARRKRMETEESRKKRERDLELEMGDDYILDLQKYWDLMNLSEKHDKIPEIWEGHNIADYIDPAIMKKLEELEKEEELRTAAGEYDSVSESEDEEMLEIRQLAKQIREKKKLKILESKEKNTQGPRMPRTAKKVQRTVLEKEMRSLGVDMDDKDDAHYAVQARRSRSITRKRKREDSAPPSSVARSGSCSRTPRDVSGLRDVKMVKKAKTMMKNAQKKMNRLGKKGEADRHVFDMKPKHLLSGKRKAGVEPQPTQGVSSWLFLANLIPRCSGQKYLHFHSCQGEMPLA

SEQ ID NO: 980 - protein, 246 aa, Artificial Sequence
  Synthetic polypeptide
MGKVGAGGGSQARLSALLAGAGLLILCAPGVCGGGSCCPSPHPSSAPRSASTPRGFSHQGRPGRAPATPLPLVVRPLFSVAPGDRALSLERARGTGASMAVAARSGRRRRSGADQEKAERGEGASRSPRGVLRDGGQQEPGTRERDPDKATRFRMEELRLTSTTFALTGDSAHNQAMVHWSGHNSSVILILTKLYDYNLGSITESSLWSFTPEANETTNPPGGRNNSRRAALKAVTLICEGPQLHS

SEQ ID NO: 981 - protein, 234 aa, Artificial Sequence
  Synthetic polypeptide
MGKVGAGGGSQARLSALLAGAGLLILCAPGVCGGGSCCPSPHPSSAPRSASTPRGFSHQGRPGRAPATPLPLVVRPLFSVAPGDRALSLERARGTGASMAVAARSGRRRRSGADQEKAERGEGASRSPRGVLRDGGQQEPGTRERDPDKATRFRMEELRLTSTTFALTGDSAHNQAMVHWSGHNSSVILILTKLYDYNLGSITESSLWRSAASLLKPTRPRTHREEGTTPDAPP

SEQ ID NO: 982 - protein, 11 aa, Artificial Sequence
  Synthetic polypeptide
MAASRKPPRVR

SEQ ID NO: 983 - protein, 213 aa, Artificial Sequence
  Synthetic polypeptide
MGKRGRPRKEARCEGAGLAPAAPPAVPPAVAAPQPPALPEDPAGAKPRCPFSDIFNTSENSMEKHINTFLQNVQILLEAASYLEQIEKENKKCEHGYASSFPSMPSPRLQHSKPPRRLSRAQKHSSGSSNTSTANRSTHNELEKNRDMDEAGNHHSQQTIARTKTQTLRVLTHRWELNNDNTWTQEGEHHTPGPVVGWWKWGGIALGDIPNAK

SEQ ID NO: 984 - protein, 146 aa, Artificial Sequence
  Synthetic polypeptide
MERVKMINVQRLLEAAEFLERRERECEHGYASSFPSMPSPRLQHSKPPRRLSRAQKHSSGSSNTSTANRSTHNELEKNRDMDEAGNHHSQQTIARTKTQTLRVLTHRWELNNDNTWTQEGEHHTPGPVVGWWKWGGIALGDIPNAK

SEQ ID NO: 985 - protein, 110 aa, Artificial Sequence
  Synthetic polypeptide
MPSPRLQHSKPPRRLSRAQKHSSGSSNTSTANRSTHNELEKNRDMDEAGNHHSQQTIARTKTQTLRVLTHRWELNNDNTWTQEGEHHTPGPVVGWWKWGGIALGDIPNAK

SEQ ID NO: 986 - protein, 853 aa, Artificial Sequence
  Synthetic polypeptide
MVLAAAMSQDADPSGPEQPDRVACSVPGARASPAPSGPRGMQQPPPPPQPPPPPQAGLPQIIQNAAKLLDKNPFSVSNPNPLLPSPASLQLAQLQAQLTLHRLKLAQTAVTNNTAAATVLNQVLSKVAMSQPLFNQLRHPSVITGPHGHAGVPQHAAAIPSTRFPSNAIAFSPPSQTRGPGPSMNLPNQPPSAMVMHPFTGVMPQTPGQPAVILGIGKTGPAPATAGFYEYGKASSGQTYGPETDGQPGFLPSSASTSGSVTYEGHYSHTGQDGQAAFSKDFYGPNSQGSHVASGFPAEQAGGLKSEVGPLLQGTNSQWESPHGFSGQSKPDLTAGPMWPPPHNQPYELYDPEEPTSDRTPPSFGGRLNNSKQGFIGAGRRAKEDQALLSVRPLQAHELNDFHGVAPLHLPHICSICDKKVFDLKDWELHVKGKLHAQKCLVFSENAGIRCILGSAEGTLCASPNSTAVYNPAGNEDYASNLGTSYVPIPARSFTQSSPTFPLASVGTTFAQRKGAGRVVHICNLPEGSCTENDVINLGLPFGKVTNYILMKSTNQAFLEMAYTEAAQAMVQYYQEKSAVINGEKLLIRMSKRYKELQLKKPGKAVAAIIQDIHSQRERDMFREADRYGPERPRSRSPVSRSLSPRSHTPSFTSCSSSHSPPGPSRADWGNGRDSWEHSPYARREEERDPAPWRDNGDDKRDRMDPWAHDRKHHPRQLDKAELDERPEGGRPHREKYPRSGSPNLPHSVSSYKSREDGYYRKEPKAKWDKYLKQQQDAPGRSRRKDEARLRESRHPHPDDSGKEDGLGPKVTRAPEGAKAKQNEKNKTKRTDRDQEGADDRKENTMAENELQV

SEQ ID NO: 987 - protein, 42 aa, Artificial Sequence
  Synthetic polypeptide
MSSDFEGYEQDFAVLTAEITSKIARVPRLPPDCQLCEGGSCV

SEQ ID NO: 988 - protein, 147 aa, Artificial Sequence [sequence omitted]

SEQ ID NO: 989 - protein, 171 aa, Artificial Sequence
  Synthetic polypeptide
MPQLNGGGGDDLGANDELISFKDEGEQEEKSSENSSAERDLADVKSSLVNESETNQNSSSDSEAERRPPPRSESFRDKSRESLEEAAKRQDGGLFKGPPYPGYPFIMIPDLTSPYLPNGSLSPTARTLHFQSGSTHYSAYKTIEHQIAVQPTHPKDGKDEDLYDDPLPLNE

SEQ ID NO: 990 - protein, 118 aa, Artificial Sequence
  Synthetic polypeptide
TNQNSSSDSEAERRPPPRSESFRDKSRESLEEAAKRQDGGLFKGPPYPGYPFIMIPDLTSPYLPNGSLSPTARTLHFQSGSTHYSAYKTIEHQIAVQPTHPKDGKDEDLYDDPLPLNE

SEQ ID NO: 991 - protein, 142 aa, Artificial Sequence
  Synthetic polypeptide
MNSDQDVALKLAQERAEIVAKYDRGREGAEIEPWEDADYLVYKVTDRFGFLHEEELPDHNVAVERQKHLEIERTTKWLKMLKGWEKYKNTEKFHRRIYKGIPLQLRGEVWALLLEIPKMKEETRDLYSEKPGHTEIGAEGTQ

SEQ ID NO: 992 - protein, 159 aa, Artificial Sequence
  Synthetic polypeptide
MRTEAVVNSQGQTDYLTKDSDQDVALKLAQERAEIVAKYDRGREGAEIEPWEDADYLVYKVTDRFGFLHEEELPDHNVAVERQKHLEIERTTKWLKMLKGWEKYKNTEKFHRRIYKGIPLQLRGEVWALLLEIPKMKEETRDLYSEKPGHTEIGAEGTQ

SEQ ID NO: 993 - protein, 165 aa, Artificial Sequence
  Synthetic polypeptide
MIQVLQIVKELVTPSRQKAATVKEDSDQDVALKLAQERAEIVAKYDRGREGAEIEPWEDADYLVYKVTDRFGFLHEEELPDHNVAVERQKHLEIERTTKWLKMLKGWEKYKNTEKFHRRIYKGIPLQLRGEVWALLLEIPKMKEETRDLYSEKPGHTEIGAEGTQ

SEQ ID NO: 994 - protein, 643 aa, Artificial Sequence
  Synthetic polypeptide
MAAPGGRGRSLSGLLPAQTSLEYALLDAVTQQEKDSLVYQYLQKVDGWEQDLSVPEFPEGLEWLNTEEPISVYKDLCGKIVVLDFFTYCCINCIHLLPDLHALEHTYSDKDGLLIIGVHSAKFPNEKVLDNIKSAVLRYNITHPMVNDADASLWQELEVSCWPTLVILGPRGNMLFSLIGEGHKDKLFLYTSIALKYYKDRGQIRDNKIGIKLYKDSLPPSPLLFPGKVTVDQVTDRLVIADTGHHRILVVWKNGQIQYSIGGPNPGRKDGIFSESTFNSPQGVAIMNNIIYVADTENHLIRKIDLEAEKVSTVAGIGIQGTDKEGGAKGEQQPISSPWDVVFGTSGSEVQRGDILWIAMAGTHQIWALLLDSGKLPKKNELTKGTCLRFAGSGNEENRNNAYPHKAGFAQPSGLSLASEDPWSCLFVADSESSTVRTVSLKDGAVKHLVGGERDPMNLFAFGDVDGVGINAKLQHPLGVTWDKKRNLLYVADSYNHKIKVVDPKTKNCTTLAGTGDTNNVTSSSFTESTFNEPGGLCIGENGELLYVADTNNHQIKVMDLETKMVSVLPIFRSENAVVDGPFLVEKQKTLPKLPKSAPSIRLSPVTACAGQTLQFKLRLDLPSGSKLTEGVSSCWFLTAEVN

SEQ ID NO: 995 - protein, 135 aa, Artificial Sequence
  Synthetic polypeptide
MPPFLLLEAVCVFLFSRVPPSLPLQEVHVSKETIGKISAASKMMWCSAAVDIMFLLDGSNSVGKGSFERSKHFAITVCDGLDISPERVRVGAFQFSSTPHLEFPLDSFSTQQEVKARIKRMVFNGSTVNTHRLKK

SEQ ID NO: 996 - protein, 546 aa, Artificial Sequence
  Synthetic polypeptide
MPPFLLLEAVCVFLFSRVPPSLPLQEVHVSKETIGKISAASKMMWCSAAVDIMFLLDGSNSVGKGSFERSKHFAITVCDGLDISPERVRVGAFQFSSTPHLEFPLDSFSTQQEVKARIKRMVFKGGRTETELALKYLLHRGLPGGRNASVPQILIIVTDGKSQGDVALPSKQLKERGVTVFAVGVRFPRWEELHALASEPRGQHVLLAEQVEDATNGLFSTLSSSAICSSATPDCRVEAHPCEHRTLEMVREFAGNAPCWRGSRRTLAVLAAHCPFYSWKRVFLTHPATCYRTTCPGPCDSQPCQNGGTCVPEGLDGYQCLCPLAFGGEANCALKLSLECRVDLLFLLDSSAGTTLDGFLRAKVFVKRFVRAVLSEDSRARVGVATYSRELLVAVPVGEYQDVPDLVWSLDGIPFRGGPTLTGSALRQAAERGFGSATRTGQDRPRRVVVLLTESHSEDEVAGPARHARARELLLLGVGSEAVRAELEEITGSPKHVMVYSDPQDLFNQIPELQGKLCSRQRPDCQPVDSRHGPILSIQHLISALH

SEQ ID NO: 997 - protein, 526 aa, Artificial Sequence
  Synthetic polypeptide
MPPFLLLEAVCVFLFSRVPPSLPLQEVHVSKETIGKISAASKMMWCSAAVDIMFLLDGSNSVGKGSFERSKHFAITVCDGLDISPERVRVGAFQFSSTPHLEFPLDSFSTQQEVKARIKRMVFKGGRTETELALKYLLHRGLPGGRNASVPQILIIVTDGKSQGDVALPSKQLKERGVTVFAVGVRFPRWEELHALASEPRGQHVLLAEQVEDATNGLFSTLSSSAICSSATPDCRVEAHPCEHRTLEMVREFAGNAPCWRGSRRTLAVLAAHCPFYSWKRVFLTHPATCYRTTCPGPCDSQPCQNGGTCVPEGLDGYQCLCPLAFGGEANCALKLSLECRVDLLFLLDSSAGTTLDGFLRAKVFVKRFVRAVLSEDSRARVGVATYSRELLVAVPVGEYQDVPDLVWSLDGIPFRGGPTLTGSALRQAAERGFGSATRTGQDRPRRVVVLLTESHSEDEVAGPARHARARELLLLGVGSEAVRAELEEITGSPKHVMVYSDPQDLFNQIPELQGKLCSRQRPASN

SEQ ID NO: 998 - protein, 1099 aa, Artificial Sequence
  Synthetic polypeptide
METGGRARTGTPQPAAPGVWRARPAGGGGGGASSWLLDGNSWLLCYGFLYLALYAQVSQSKPCERTGSCFSGRCVNSTCLCDPGWVGDQCQHCQGRFKLTEPSGYLTDGPINYKYKTKCTWLIEGYPNAVLRLRFNHFATECSWDHMYVYDGDSIYAPLIAVLSGLIVPEIRGNETVPEVVTTSGYALLHFFSDAAYNLTGFNIFYSINSCPNNCSGHGKCTTSVSVPSQVYCECDKYWKGEACDIPYCKANCGSPDHGYCDLTGEKLCVCNDSWQGPDCSLNVPSTESYWILPNVKPFSPSVGRASHKAVLHGKFMWVIGGYTFNYSSFQMVLNYNLESSIWNVGTPSRGPLQRYGHSLALYQENIFMYGGRIETNDGNVTDELWVFNIHSQSWSTKTPTVLGHGQQYAVEGHSAHIMELDSRDVVMIIIFGYSAIYGYTSSIQEYHISSNTWLVPETKGAIVQGGYGHTSVYDEITKSIYVHGGYKALPGNKYGLVDDLYKYEVNTKTWTILKESGFARYLHSAVLINGAMLIFGGNTHNDTSLSNGAKCFSADFLAYDIACDEWKILPKPNLHRDVNRFGHSAVVINGSMYIFGGFSSVLLNDILVYKPPNCKAFRDEELCKNAGPGIKCVWNKNHCESWESGNTNNILRAKCPPKTAASDDRCYRYADCASCTANTNGCQWCDDKKCISANSNCSMSVKNYTKCHVRNEQICNKLTSCKSCSLNLNCQWDQRQQECQALPAHLCGEGWSHIGDACLRVNSSRENYDNAKLYCYNLSGNLASLTTSKEVEFVLDEIQKYTQQKVSPWVGLRKINISYWGWEDMSPFTNTTLQWLPGEPNDSGFCAYLERAAVAGLKANPCTSMANGLVCEKPVVSPNQNARPCKKPCSLRTSCSNCTSNGMECMWCSSTKRCVDSNAYIISFPYGQCLEWQTATCSPQNCSGLRTCGQCLEQPGCGWCNDPSNTGRGHCIEGSSRGPMKLIGMHHSEMVLDTNLCPKEKNYEWSFIQCPACQCNGHSTCINNNVCEQCKNLTTGKQCQDCMPGYYGDPTNGGQCTACTCSGHANICHLHTGKCFCTTKGIKGDQCQFSSMERKMRI

SEQ ID NO: 999 - protein, 1 aa, Artificial Sequence
  Synthetic polypeptide
M

SEQ ID NO: 1000 - protein, 150 aa, Artificial Sequence
  Synthetic polypeptide
MECMWCSSTKRCVDSNAYIISFPYGQCLEWQTATCSPQNCSGLRTCGQCLEQPGCGWCNDPSNTGRGHCIEGSSRGPMKLIGMHHSEMVLDTNLCPKEKNYEWSFIQCPACTCSGHANICHLHTGKCFCTTKGIKGDQCQFSSMERKMRI

SEQ ID NO: 1001 - protein, 255 aa, Artificial Sequence
  Synthetic polypeptide
MLGIWIVAFLFFGTSRGKEVCYERLGCFKDGLPWTRTFSTELVGLPWSPEKINTRFLLYTIHNPNAYQEISAVNSSTIQASYFGTDKITRINIAGWKTDGKWQRDMCNVLLQLEDINCINLDWINGSREYIHAVNNLRVVGAEVAYFIDVLMKKFEYSPSKVHLIGHSLGAHLAGEAGSRIPGLGRITEACPSSARLGYMWLLCAWITLMITTASARRTLTGVPFPSNGKSLEDKARSYSSYLNAKPSSWHILGA

SEQ ID NO: 1002 - protein, 24 aa, Artificial Sequence
  Synthetic polypeptide
MADKEAGGSDGPRGSPGRPAGEAT

SEQ ID NO: 1003 - protein, 88 aa, Artificial Sequence
  Synthetic polypeptide
MPVTHRKSDASDMNSDTSPSCRLRAFSRGGSLESRSSSSRSRSFTLFFLHRPLSLEAWLGNHARRVSITPQAHLVIGVPHSRAVADLI

SEQ ID NO: 1004 - protein, 1065 aa, Artificial Sequence
  Synthetic polypeptide
MPAERKKPASMEEKDSLPNNKEKDCSERRTVSSKERPKDDIKLTAKKEVSKAPEDKKKRLEDDKRKKEDKERKKKDEEKVKAEEESKKKEEEEKKKHQEEERKKQEEQAKRQQEEEAAAQMKEKEESIQLHQEAWERHHLRKELRSKNQNAPDSRPEENFFSRLDSSLKKNTAFVKKLKTITEQQRDSLSHDFNGLNLSKYIAEAVASIVEAKLKISDVNCAVHLCSLFHQRYADFAPSLLQVWKKHFEARKEEKTPNITKLRTDLRFIAELTIVGIFTDKEGLSLIYEQLKNIINADRESHTHVSVVISFCRHCGDDIAGLVPRKVKSAAEKFNLSFPPSEIISPEKQQPFQNLLKEYFTSLTKHLKRDHRELQNTERQNRRILHSKGELSEDRHKQYEEFAMSYQKLLANSQSLADLLDENMPDLPQDKPTPEEHGPGIDIFTPGKPGEYDLEGGIWEDEDARNFYENLIDLKAFVPAILFKDNEKSCQNKESNKDDTKEAKESKENKEVSSPDDLELELENLEINDDTLELEGGDEAEDLTKKLLDEQEQEDEEASTGSHLKLIVDAFLQQLPNCVNRDLIDKAAMDFCMNMNTKANRKKLVRALFIVPRQRLDLLPFYARLVATLHPCMSDVAEDLCSMLRGDFRFHVRKKDQINIETKNKTVRFIGELTKFKMFTKNDTLHCLKMLLSDFSHHHIEMACTLLETCGRFLFRSPESHLRTSVLLEQMMRKKQAMHLDARYVTMVENAYYYCNPPPAEKTVKKKRPPLQEYVRKLLYKDLSKVTTEKVLRQMRKLPWQDQEVKDYVICCMINIWNVKYNSIHCVANLLAGLVLYQEDVGIHVVDGVLEDIRLGMEVNQPKFNQRRISSAKFLGELYNYRMVESAVIFRTLYSFTSFGVNPDGSPSSLDPPEHLFRIRLVCTILDTCGQYFDRGSSKRKLDCFLVYFQRYVWWKKSLEVWTKDHPFPIDIDYMISDTLELLRPKIKLCNSLEESIRQVQDLEREFLIKLGLVNDKDSKDSMTEGENLEEDEEEEEGGAETEEQSGNESEVNEPEEETWVEQTK

SEQ ID NO: 1005 - protein, 1025 aa, Artificial Sequence
  Synthetic polypeptide
MPAERKKPASMEEKDSLPNNKEKDCSERRTVSSKERPKDDIKLTAKKEVSKAPEDKKKRLEDDKRKKEDKERKKKDEEKVKAEEESKKKEEEEKKKHQEEERKKQEEQAKRQQEEEAAAQMKEKEESIQLHQEAWERHHLRKELRSKNQNAPDSRPEENFFSRLDSSLKKNTAFVKKLKTITEQQRDSLSHDFNGLNLSKYIAEAVASIVEAKLKISDVNCAVHLCSLFHQRYADFAPSLLQVWKKHFEARKEEKTPNITKLRTDLRFIAELTIVGIFTDKEGLSLIYEQLKNIINADRESHTHVSVVISFCRHCGDDIAGLVPRKVKSAAEKFNLSFPPSEIISPEKQQPFQNLLKEYFTSLTKHLKRDHRELQNTERQNRRILHSKGELSEDRHKQYEEFAMSYQKLLANSQSLADLLDENMPDLPQDKPTPEEHGPGIDIFTPGKPGEYDLEGGIWEDEDARNFYENLIDLKAFVPAILFKDNEKSCQNKESNKDDTKEAKESKENKEVSSPDDLELELENLEINDDTLELEGGDEAEDLTKKLLDEQEQEDEEASTGSHLKLIVDAFLQQLPNCVNRDLIDKAAMDFCMNMNTKANRKKLVRALFIVPRQRLDLLPFYARLVATLHPCMSDVAEDLCSMLRGDFRFHVRKKDQINIETKNKTVRFIGELTKFKMFTKNDTLHCLKMLLSDFSHHHIEMACTLLETCGRFLFRSPESHLRTSVLLEQMMRKKQAMHLDARYVTMVENAYYYCNPPPAEKTVKKKRPPLQEYVRKLLYKDLSKVTTEKVLRQMRKLPWQDQEVKDYVICCMINIWNVKYNSIHCVANLLAGLVLYQEDVGIHVVDGVLEDIRLGMEVNQPKFNQRRISSAKFLGELYNYRMVESAVIFRTLYSFTSFGVNPDGSPSSLDPPEHLFRIRLVCTILDTCGQYFDRGSSKRKLDCFLVYFQRYVWWKKSLEVWTKDHPFPIDIDYMISDTLELLRPKIKLCNSLEESIRQVQDLEREFLIKLGMLAHTCNPSYSGG

SEQ ID NO: 1006 - protein, 709 aa, Artificial Sequence
  Synthetic polypeptide
MPAERKKPASMEEKDSLPNNKEKDCSERRTVSSKERPKDDIKLTAKKEVSKAPEDKKKRLEDDKRKKEDKERKKKDEEKVKAEEESKKKEEEEKKKHQEEERKKQEEQAKRQQEEEAAAQMKEKEESIQLHQEAWERHHLRKELRSKNQNAPDSRPEENFFSRLDSSLKKNTAFVKKLKTITEQQRDSLSHDFNGLNLSKYIAEAVASIVEAKLKISDVNCAVHLCSLFHQRYADFAPSLLQVWKKHFEARKEEKTPNITKLRTDLRFIAELTIVGIFTDKEGLSLIYEQLKNIINADRESHTHVSVVISFCRHCGDDIAGLVPRKVKSAAEKFNLSFPPSEIISPEKQQPFQNLLKEYFTSLTKHLKRDHRELQNTERQNRRILHSKGELSEDRHKQYEEFAMSYQKLLANSQSLADLLDENMPDLPQDKPTPEEHGPGIDIFTPGKPGEYDLEGGIWEDEDARNFYENLIDLKAFVPAILFKDNEKSCQNKESNKDDTKEAKESKENKEVSSPDDLELELENLEINDDTLELEGGDEAEDLTKKLLDEQEQEDEEASTGSHLKLIVDAFLQQLPNCVNRDLIDKAAMDFCMNMNTKANRKKLVRALFIVPRQRLDLLPFYARLVATLHPCMSDVAEDLCSMLRGDFRFHVRKKDQINIETKNKTVRFIGELTKFKMFTKNDTLHCLKKIGNPKHFWSQAFQIRDTSP

SEQ ID NO: 1007 - protein, 58 aa, Artificial Sequence
  Synthetic polypeptide
MLPSLGYCVDIVSQFGMETVILHTALMLKKRIVVYHPKIEAVQEFTRKRRRGQAESLR

SEQ ID NO: 1008 - protein, 209 aa, Artificial Sequence
  Synthetic polypeptide
MAAAEVADTQLMLGVGLIEKDTNGEVLWVWCYPSTTATLRNLLLRKCCLTDENKLLHPFVFGQYRRTWFYITTIEVPDSSILKKVTHFSIVLTAKDFNPEKYAAFTRILCRMYLKHGSPVKMMESYIAVLTKGICQSEENGSFLSKDFDARKAYLAGSIKDIVSQFGMETVILHTALMLKKRIVVYHPKIEAVQEFTRKRRRGQAESLR

SEQ ID NO: 1009 - protein, 93 aa, Artificial Sequence
  Synthetic polypeptide
MLPSLGYCVDIVSQFGMETVILHTALMLKKRIVVYHPKIEAVQEFTRTLPALVWHRQDWTILHSYVHLNADELEALQMCTGYVAGFVDLEEEL

SEQ ID NO: 1010 - protein, 244 aa, Artificial Sequence
  Synthetic polypeptide
MAAAEVADTQLMLGVGLIEKDTNGEVLWVWCYPSTTATLRNLLLRKCCLTDENKLLHPFVFGQYRRTWFYITTIEVPDSSILKKVTHFSIVLTAKDFNPEKYAAFTRILCRMYLKHGSPVKMMESYIAVLTKGICQSEENGSFLSKDFDARKAYLAGSIKDIVSQFGMETVILHTALMLKKRIVVYHPKIEAVQEFTRTLPALVWHRQDWTILHSYVHLNADELEALQMCTGYVAGFVDLEEEL

SEQ ID NO: 1011 - protein, 40 aa, Artificial Sequence
  Synthetic polypeptide
MELFQAKDHYILQQGERALWCSRRDGGLQLRPARHGGSRL

SEQ ID NO: 1012 - protein, 93 aa, Artificial Sequence
  Synthetic polypeptide
MELFQAKDHYILQQGERALWCSRRDGGLQLRPATDLLLAWNPICLGLVEGVIGKIQLHSEDSNWGHVYSAYLLCLCVLAHCRAIQKYSVSTYG

SEQ ID NO: 1013 - protein, 92 aa, Artificial Sequence
  Synthetic polypeptide
MELFQAKDHYILQQGERALWCSRRDGGLQLRPATDLLLAWNPICLGLVEGVIGKIQLHSDSNWGHVYSAYLLCLCVLAHCRAIQKYSVSTYG

SEQ ID NO: 1014 - protein, 899 aa, Artificial Sequence
  Synthetic polypeptide
MASATAAAARRGLGRALPLFWRGYQTERGVYGYRPRKPESREPQGALERPPVDHGLARLVTVYCEHGHKAAKINPLFTGQALLENVPEIQALVQTLQGPFHTAGLLNMGKEEASLEEVLVYLNQIYCGQISIETSQLQSQDEKDWFAKRFEELQKETFTTEERKHLSKLMLESQEFDHFLATKFSTVKRYGGEGAESMMGFFHELLKMSAYSGITDVIIGMPHRGRLNLLTGLLQFPPELMFRKMRGLSEFPENFSATGDVLSHLTSSVDLYFGAHHPLHVTMLPNPSHLEAVNPVAVGKTRGRQQSRQDGDYSPDNSAQPGDRVICLQVHGDASFCGQGIVPETFTLSNLPHFRIGGSVHLIVNNQLGYTTPAERGRSSLYCSDIGKLVGCAIIHVNGDSPEEVVRATRLAFEYQRQFRKDVIIDLLCYRQWGHNELDEPFYTNPIMYKIIRARKSIPDTYAEHLIAGGLMTQEEVSEIKSSYYAKLNDHLNNMAHYRPPALNLQAHWQGLAQPEAQITTWSTGVPLDLLRFVGMKSVEVPRELQMHSHLLKTHVQSRMEKMMDGIKLDWATAEALALGSLLAQGFNVRLSGQDVGRGTFSQRHAIVVCQETDDTYIPLNHMDPNQKGFLEVSNSPLSEEAVLGFEYGMSIESPKLLPLWEAQFGDFFNGAQIIFDTFISGGEAKWLLQSGIVILLPHGYDGAGPDHSSCRIERFLQMCDSAEEGVDGDTVNMFVVHPTTPAQYFHLLRRQMVRNFRKPLIVASPKMLLRLPAAVSTLQEMAPGTTFNPVIGDSSVDPKKVKTLVFCSGKHFYSLVKQRESLGAKKHDFAIIRVEELCPFPLDSLQQEMSKYKHVKDHIWSQEEPQNMGPWSFVSPRFEKQLACKQHGWNWKSSCYVK

SEQ ID NO: 1015 - protein, 242 aa, Artificial Sequence
  Synthetic polypeptide
MRELAIEIGVRALLFGVFVFTEFLDPFQRVIQPEEIWLYKNPLVQSDNIPTRLMFAISFLTPLAVICVVKIIRRTDKTEIKEAFLAVSLALALNGVCTNTIKLIVGRPRPDFFYRCFPDGVMNSEMHCTGDPDLVSEGRKSFPSIHSSFAFSGLGFTTFYLAGKLHCFTESGRGKSWRLCAAILPLYCAMMIALSRMCDYKHHWQAEAGLYCRHLDSLQPPLPDSPASACRVPGIASAHRHA

SEQ ID NO: 1016 - protein, 179 aa, Artificial Sequence
  Synthetic polypeptide
MRELAIEIGVRALLFGVFVFTEFLDPFQRVIQPEEIWLYKNPLVQSDNIPTRLMFAISFLTPLAVICVVKIIRRTDKTEIKEAFLVAFSGLGFTTFYLAGKLHCFTESGRGKSWRLCAAILPLYCAMMIALSRMCDYKHHWQAEAGLYCRHLDSLQPPLPDSPASACRVPGIASAHRHA

SEQ ID NO: 1017 - protein, 232 aa, Artificial Sequence
  Synthetic polypeptide
MHGIGPSGSFTEFLDPFQRVIQPEEIWLYKNPLVQSDNIPTRLMFAISFLTPLAVICVVKIIRRTDKTEIKEAFLAVSLALALNGVCTNTIKLIVGRPRPDFFYRCFPDGVMNSEMHCTGDPDLVSEGRKSFPSIHSSFAFSGLGFTTFYLAGKLHCFTESGRGKSWRLCAAILPLYCAMMIALSRMCDYKHHWQAEAGLYCRHLDSLQPPLPDSPASACRVPGIASAHRHA

SEQ ID NO: 1018 - protein, 84 aa, Artificial Sequence
  Synthetic polypeptide
MKKEHVLHCQFSAWYPFFRGVTIKSVILPLPQNVKDYLLDDGTLVVSGRMQFHENRDLAHLFTPAHGTVPDIAEVLDKHLLDEG

SEQ ID NO: 1019 - protein, 5 aa, Artificial Sequence
  Synthetic polypeptide
VYSLY

SEQ ID NO: 1020 - protein, 221 aa, Artificial Sequence
  Synthetic polypeptide
MKKEHVLHCQFSAWYPFFRGVTIKSVILPLPQNVKDYLLDDGTLVVSGRDDPPTHSQPDSDDEAEEIQWSDDENTATLTAPEFPEFATKVQEAINSLGGSVFPKLNWSAPRDAYWIAMNSSLKCKTLSDIFLLFKSSDFITRDFTQPFIHCTDDSPDPCIEYELVLRKWCELIPGAEFRCFVKENKLIDATSNQLILTLWNAVLTGILSPESLAAGNGIVR

SEQ ID NO: 1021 - protein, 189 aa, Artificial Sequence
  Synthetic polypeptide
MKKEHVLHCQFSAWYPFFRGVTIKSVILPLPQNVKDYLLDDGTLVVSGRDDPPTHSQPDSDDEAEEIQWSDDENTATLTDAYWIAMNSSLKCKTLSDIFLLFKSSDFITRDFTQPFIHCTDDSPDPCIEYELVLRKWCELIPGAEFRCFVKENKLIDATSNQLILTLWNAVLTGILSPESLAAGNGIVR

SEQ ID NO: 1022 - protein, 5 aa, Artificial Sequence
  Synthetic polypeptide
VYSLY

SEQ ID NO: 1023 - protein, 204 aa, Artificial Sequence
  Synthetic polypeptide
MKKEHVLHCQFSAWYPFFRGVTIKSVILPLPQNVKDYLLDDGTLVVSGRDDPPTHSQPDSDDEAEEIQWSDDENTATLTAPEFPEFATKVQEAINSLGGSVFPKLNWSAPRDAYWIAMNSSLKCKTLSDIFLLFKSSDFITRDFTQPFIHCTDDSPDPCIEYELVLRKWCELIPGAEFRCFVKENKLIGILSPESLAAGNGIVR

SEQ ID NO: 1024 - protein, 172 aa, Artificial Sequence
  Synthetic polypeptide
MKKEHVLHCQFSAWYPFFRGVTIKSVILPLPQNVKDYLLDDGTLVVSGRDDPPTHSQPDSDDEAEEIQWSDDENTATLTDAYWIAMNSSLKCKTLSDIFLLFKSSDFITRDFTQPFIHCTDDSPDPCIEYELVLRKWCELIPGAEFRCFVKENKLIGILSPESLAAGNGIVR

SEQ ID NO: 1025 - protein, 5 aa, Artificial Sequence
  Synthetic polypeptide
VYSLY

SEQ ID NO: 1026 - protein, 321 aa, Artificial Sequence
  Synthetic polypeptide
MKKEHVLHCQFSAWYPFFRGVTIKSVILPLPQNVKDYLLDDGTLVVSGRDDPPTHSQPDSDDEAEEIQWSDDENTATLTAPEFPEFATKVQEAINSLGGSVFPKLNWSAPRDAYWIAMNSSLKCKTLSDIFLLFKSSDFITRDFTQPFIHCTDDSPDPCIEYELVLRKWCELIPGAEFRCFVKENKLIGISQRDYTQYYDHISKQKEEIRRCIQDFFKKHIQYKFLDEDFVFDIYRDSRALYRGDEAKMRPSKWVLIQYEGVLIRRGNLDTKTPGMPKRRGKATSRTQQEGGHLHTVERDLRNAPCRHPDLGLPASRTVRQ

SEQ ID NO: 1027 - protein, 280 aa, Artificial Sequence
  Synthetic polypeptide
MKKEHVLHCQFSAWYPFFRGVTIKSVILPLPQNVKDYLLDDGTLVVSGRDDPPTHSQPDSDDEAEEIQWSDDENTATLTAPEFPEFATKVQEAINSLGGSVFPKLNWSAPRDAYWIAMNSSLKCKTLSDIFLLFKSSDFITRDFTQPFIHCTDDSPDPCIEYELVLRKWCELIPGAEFRCFVKENKLIVVFDIYRDSRALYRGDEAKMRPSKWVLIQYEGVLIRRGNLDTKTPGMPKRRGKATSRTQQEGGHLHTVERDLRNAPCRHPDLGLPASRTVRQ

SEQ ID NO: 1028 - protein, 364 aa, Artificial Sequence
  Synthetic polypeptide
MKKEHVLHCQFSAWYPFFRGVTIKSVILPLPQNVKDYLLDDGTLVVSGRDDPPTHSQPDSDDEAEEIQWSDDENTATLTAPEFPEFATKVQEAINSLGGSVFPKLNWSAPRDAYWIAMNSSLKCKTLSDIFLLFKSSDFITRDFTQPFIHCTDDSPDPCIEYELVLRKWCELIPGAEFRCFVKENKLIGISQRDYTQYYDHISKQKEEIRRCIQDFFKKHIQYKFLDEDFVFDIYRDSRGKVWLIDFNPFGEVTDSLLFTWEELISENNLNGDFSEVDAQEQALYRGDEAKMRPSKWVLIQYEGVLIRRGNLDTKTPGMPKRRGKATSRTQQEGGHLHTVERDLRNAPCRHPDLGLPASRTVRQ

SEQ ID NO: 1029 - protein, 323 aa, Artificial Sequence
  Synthetic polypeptide
MKKEHVLHCQFSAWYPFFRGVTIKSVILPLPQNVKDYLLDDGTLVVSGRDDPPTHSQPDSDDEAEEIQWSDDENTATLTAPEFPEFATKVQEAINSLGGSVFPKLNWSAPRDAYWIAMNSSLKCKTLSDIFLLFKSSDFITRDFTQPFIHCTDDSPDPCIEYELVLRKWCELIPGAEFRCFVKENKLIVVFDIYRDSRGKVWLIDFNPFGEVTDSLLFTWEELISENNLNGDFSEVDAQEQALYRGDEAKMRPSKWVLIQYEGVLIRRGNLDTKTPGMPKRRGKATSRTQQEGGHLHTVERDLRNAPCRHPDLGLPASRTVRQ

SEQ ID NO: 1030 - protein, 5 aa, Artificial Sequence
  Synthetic polypeptide
VYSLY

SEQ ID NO: 1031 - protein, 321 aa, Artificial Sequence
  Synthetic polypeptide
MAFWAGGSPSVVDYFPSEDFYRCGYCKNESGSRSNGMWAHSMTVQDYQDLIDRGWRRSGKYVYKPVMNQTCCPQYTIRCRPLQFQPSKSHKKVLKKMLKFLAKGEVPKGSCEDEPMDSTMDDAVAGDFALINKLDIQCDLKTLSDDIKESLESEGKNSKKEEPQELLQSQDFVGEKLGSGEPSHSVKVHTVPKPGKGADLSKPPCRKAKEIRKERKRLKLMQQNPAGELEGFQAQGHPPSLFPPKAKSNQPKSLEDLIFESLPENASHKLEVRLVPVSFEDPEFKSSFSQSFSLYVKYQVAIHQDPPDECGKTEDAEVAVS

SEQ ID NO: 1032 - protein, 225 aa, Artificial Sequence
  Synthetic polypeptide
MLKFLAKGEVPKGSCEDEPMDSTMDDAVAGDFALINKLDIQCDLKTLSDDIKESLESEGKNSKKEEPQELLQSQDFVGEKLGSGEPSHSVKVHTVPKPGKGADLSKPPCRKAKEIRKERKRLKLMQQNPAGELEGFQAQGHPPSLFPPKAKSNQPKSLEDLIFESLPENASHKLEVRLVPVSFEDPEFKSSFSQSFSLYVKYQVAIHQDPPDECGKTEDAEVAVS

SEQ ID NO: 1033 - protein, 314 aa, Artificial Sequence
  Synthetic polypeptide
MASVVEYKGLRAGYHCGYCDSKEGKASCGMWAHSMTVQDYQDLIDRGWRRSGKYVYKPVMNQTCCPQYTIRCRPLQFQPSKSHKKVLKKMLKFLAKGEVPKGSCEDEPMDSTMDDAVAGDFALINKLDIQCDLKTLSDDIKESLESEGKNSKKEEPQELLQSQDFVGEKLGSGEPSHSVKVHTVPKPGKGADLSKPPCRKAKEIRKERKRLKLMQQNPAGELEGFQAQGHPPSLFPPKAKSNQPKSLEDLIFESLPENASHKLEVRLVPVSFEDPEFKSSFSQSFSLYVKYQVAIHQDPPDECGKTEDAEVAVS

SEQ ID NO: 1034 - protein, 1 aa, Artificial Sequence
  Synthetic polypeptide
A

SEQ ID NO: 1035 - protein, 295 aa, Artificial Sequence
  Synthetic polypeptide
MKTAENIRGTGSDGPRKRGLCVLCGLPAAGKSTFARALAHRLQQEQGWAIGVVAYDDVMPDAFLAGARARPAPSQWKLLRQELLKYLEYFLMAVINGCQMSVPPNRTEAMWEDFITCLKDQDLIFSAAFEAQSCYLLTKTAVSRPLFLVLDDNFYYQSMRYEVYQLARKYSLGFCQLFLDCPLETCLQRNGQRPQALPPETIHLMGRKLEKPNPEKNAWEHNSLTIPSPACASEASLEVTDLLLTALENPVKYAEDNMEQKDTDRIICSTNILHKTDQTLRRIVSQTMKEAKAKI

SEQ ID NO: 1036 - protein, 227 aa, Artificial Sequence
  Synthetic polypeptide
MAPWGKRLAGVRGVLLDISGVLYDSGAGGGTAIAGSVEAVARLKRSRLKVRFCTNESQKSRAELVGQLQRLGFDISEQEVTAPAPAACQILKEQGLRPYLLIHDGVRSEFDQIDTSNPNCVVIADAGESFSYQNMNNAFQVLMELEKPVLISLGKGRYYKETSGLMLDVGPYMKALEYACGIKAEVVGKPSPEFFKSALQAIGVEAHQILQKKETNLILTMTWMDSQ

SEQ ID NO: 1037 - protein, 212 aa, Artificial Sequence
  Synthetic polypeptide
MALVDKHKVKRQRLDRICEGIRPQIMNGPLHPRPLVALLDGRDCTVEMPILKDLATVAFCDAQSTQEIHEKVLNEAVGAMMYHTITLTREDLEKFKALRVIVRIGSGYDNVDIKAAGELGIAVCNIPSAAVEETADSTICHILNLYRRNTWLYQALREGTRVQSVEQIREVASGAARIRGETLGLIGFGDLGPLPLNLNPTAYQLCGLVGIT

SEQ ID NO: 1038 - protein, 752 aa, Artificial Sequence
  Synthetic polypeptide
MPVPSRHINIGRSQSWDAAGWYEGPWENAESLRPLGRRSSLTYGTAEGTWFEPNHRPQDAALPVAAEPYLYREAVYNSVAARKGSTPDFTFYDSRQAVMSGRSPLLPREYYSDPSGAARVPKEPPLYRDPGVSRPVPSYGVLGSRTSWDPMQGRSPALQDAGHLYRDPGGKMIPQGRQTQSRAASPGRYGREQPDTRYGAEVPAYPLSQVFSDISERPIDPAPARQVAPTCLVVDPSSAAAPEGSTGVAPGALNRGYGPARESIPSKMAYETYEADLSTFQGPGGKRTVLPEFLAFLRAEGLAEATLGALLQQGFDSPAVLATLEDADIKSVAPNLGQARVLSRLANSCRTEMQLRRQDRGGPLPRARSSSFSHRSELLHGDLASLGAAAPLQTASPRAGDPARRPSSAPSQHLLETAATYSAPGVGTHAPHFPSNSGYSSPTPCALTARLSPTYPLQAGVALTNPGPSNPLHPGPRTAYSTAYTVPMELLKRERNVAASPLPSPHGSPQVLRKPGAPLGPSTLPPASQSLHTPHSPYQKVARRTGAPIIVSTMLAPEPSIRPQIMNGPLHPRPLVALLDGRDCTVEMPILKDLATVAFCDAQSTQEIHEKVLNEAVGAMMYHTITLTREDLEKFKALRVIVRIGSGYDNVDIKAAGELGIAVCNIPSAAVEETADSTICHILNLYRRNTWLYQALREGTRVQSVEQIREVASGAARIRGETLGLIGFGDLGPLPLNLNPTAYQLCGLVGIT

SEQ ID NO: 1039 - protein, 280 aa, Artificial Sequence
  Synthetic polypeptide
MRPGLPGPTGLCAQTSSRGQKSVLKQKESCGIWQLYHFLSRKQEPRWEPCVSGSSSGDGAVADLADELRGYPALCCTLPVHSYRSWAGIRPQIMNGPLHPRPLVALLDGRDCTVEMPILKDLATVAFCDAQSTQEIHEKVLNEAVGAMMYHTITLTREDLEKFKALRVIVRIGSGYDNVDIKAAGELGIAVCNIPSAAVEETADSTICHILNLYRRNTWLYQALREGTRVQSVEQIREVASGAARIRGETLGLIGFGDLGPLPLNLNPTAYQLCGLVGIT

SEQ ID NO: 1040 - protein, 531 aa, Artificial Sequence
  Synthetic polypeptide
MASVLGSGRGSGGLSSQLKCKSKRRRRRRSKRKDKVSILSTFLAPFKHLSPGITNTEDDDTLSTSSAEVKENRNVGNLAARPPPSGDRARGGAPGAKRKRPLEEGNGGHLCKLQLVWKKLSWSVAPKNALVQLHELRPGLQYRTVSQTGPVHAPVFAVAVEVNGLTFEGTGPTKKKAKMRAAELALRSFVQFPNACQAHLAMGGGPGPGTDFTSDQADFPDTLFQEFEPPAPRPGLAGGRPGDAALLSAAYGRRRLLCRALDLVGPTPATPAAPGERNPVVLLNRLRAGLRYVCLAEPAERRARSFVMAVSVDGRTFEGSGRSKKLARGQAAQAALQELFDIQMPGHAPGRARRTPMPQEFADSISQLVTQKFREVTTDLTPMHARHKALAGIVMTKGLDARQAQVVALSSGTKCISGEHLSDQGLVVNDCHAEVVARRAFLHFLYTQLELHLSKRREDSERSIFVRLKEGGYRLRENILFHLYVSTSPCGDARLHSPYEITTDRLKNGIPGDYIPHLARRVLHPRSLADC

SEQ ID NO: 1041 - protein, 22 aa, Artificial Sequence
  Synthetic polypeptide
LGVVLFHWKTQNWQMWELTKSL

SEQ ID NO: 1042 - protein, 664 aa, Artificial Sequence
  Synthetic polypeptide
MLKLSGEGLRDSYHSRRDQIALKNLQSDVTEAKSDFTKETLASQNTKMISSIVISQMIDENKSRENRASLPLPCAIAQSRAHHAKQSLANRSGVNIHRAFALLPGRLGIPAPSDERGPEAELPPKEERPCGGPRRGFASITITARRVGPPARALVWGTAGDSLCPKCRAEDTLFQAPPALANGAHPGRHQRSFACTEFSRNSSVVRLKVPEAHTGLCERRKYWVTHADDKETSFSPDTPLSGKSPLVFSSCVHLRVSQQCPDSIYYVDKSLSVPIEPPQIASPKMHRSVLSLNLNCSSHRLTADGVDGLVNREPISEALKQELLEGDQDLVGQRWNPGLQESHLKETPSLRRVHLGTGACPWSGSFPLENTELANVGANQVTVRKGEKDHTTHCHASDHANQLSIHIPGWSYRAVHTKVFSGSSKRQQGEVCMTVSAPPVEQKPTRHFLPIGDSSPSDDCLSRDLSEPTERRHQSFLKPRILFPGFLCPLQDVCASLQEDNGVQIESKFPKGDYTCCDLVVKIKECKKSEDPTTPEPSPAAPSPAPRDGAGSPGLSEDCSESQQTPARSLTLQEALEVRKPQFISRSQERLKKLEHMVQQRKAQRKEDLRQKQSLLPIRTSKKQFTIPHPLSDNLFKPKERCISEKEMHMRSKRSAHPDSFLQL

SEQ ID NO: 1043 - protein, 567 aa, Artificial Sequence
  Synthetic polypeptide
MLKLSGEGLRDSYHSRRDQIALKNLQSDVTEAKSDFTKETLASQNTKMISSIVISQMIDENKSRENRASLPLPCAIAQSRAHHAKQSLANRSGVNIHRAFALLPGRLGIPAPSDERGPEAELPPKEERPCGGPRRGFASITITARRVGPPARALVWGTAGDSLCPKCRAEDTLFQAPPALANGAHPGRHQRSFACTEFSRNSSVVRLKVPEAHTGLCERRKYWVTHADDKETSFSPDTPLSGKSPLVFSSCVHLRVSQQCPDSIYYVDKSLSVPIEPPQIASPKMHRSVLSLNLNCSSHRLTADGVDGLVNREPISEALKQELLEGDQDLVGQRWNPGLQESHLKETPSLRRVHLGTGACPWSGSFPLENTELANVGANQVTVRKGEKDHTTHCHASDHANQLSIHIPGWSYRAGDYTCCDLVVKIKECKKSEDPTTPEPSPAAPSPAPRDGAGSPGLSEDCSESQQTPARSLTLQEALEVRKPQFISRSQERLKKLEHMVQQRKAQRKEDLRQKQSLLPIRTSKKQFTIPHPLSDNLFKPKERCISEKEMHMRSKRSAHPDSFLQL

SEQ ID NO: 1044 - protein, 68 aa, Artificial Sequence
  Synthetic polypeptide
MVQQRKAQRKEDLRQKQSLLPIRTSKKQFTIPHPLSDNLFKPKERCISEKEMHMRSKRSAHPDSFLQL

SEQ ID NO: 1045 - protein, 761 aa, Artificial Sequence
  Synthetic polypeptide
MQHSGIPTKTHPQGYAARYTETAVHRTFQIKTFSTELKNHVMVMDFVKSNWFPSQRRAKVCIIHMCQGLKTAEQTASRYEIHSRLFSSPKDHSAWERNESLSNAGLRDSYHSRRDQIALKNLQSDVTEAKSDFTKETLASQNTKMISSIVISQMIDENKSRENRASLPLPCAIAQSRAHHAKQSLANRSGVNIHRAFALLPGRLGIPAPSDERGPEAELPPKEERPCGGPRRGFASITITARRVGPPARALVWGTAGDSLCPKCRAEDTLFQAPPALANGAHPGRHQRSFACTEFSRNSSVVRLKVPEAHTGLCERRKYWVTHADDKETSFSPDTPLSGKSPLVFSSCVHLRVSQQCPDSIYYVDKSLSVPIEPPQIASPKMHRSVLSLNLNCSSHRLTADGVDGLVNREPISEALKQELLEGDQDLVGQRWNPGLQESHLKETPSLRRVHLGTGACPWSGSFPLENTELANVGANQVTVRKGEKDHTTHCHASDHANQLSIHIPGWSYRAVHTKVFSGSSKRQQGEVCMTVSAPPVEQKPTRHFLPIGDSSPSDDCLSRDLSEPTERRHQSFLKPRILFPGFLCPLQDVCASLQEDNGVQIESKFPKGDYTCCDLVVKIKECKKSEDPTTPEPSPAAPSPAPRDGAGSPGLSEDCSESQQTPARSLTLQEALEVRKPQFISRSQERLKKLEHMVQQRKAQRKEDLRQKQSLLPIRTSKKQFTIPHPLSDNLFKPKERCISEKEMHMRSKRSAHPDSFLQL

SEQ ID NO: 1046 - protein, 617 aa, Artificial Sequence
  Synthetic polypeptide
MISSIVISQMIDENKSRENRASLPLPCAIAQSRAHHAKQSLANRSGVNIHRAFALLPGRLGIPAPSDERGPEAELPPKEERPCGGPRRGFASITITARRVGPPARALVWGTAGDSLCPKCRAEDTLFQAPPALANGAHPGRHQRSFACTEFSRNSSVVRLKVPEAHTGLCERRKYWVTHADDKETSFSPDTPLSGKSPLVFSSCVHLRVSQQCPDSIYYVDKSLSVPIEPPQIASPKMHRSVLSLNLNCSSHRLTADGVDGLVNREPISEALKQELLEGDQDLVGQRWNPGLQESHLKETPSLRRVHLGTGACPWSGSFPLENTELANVGANQVTVRKGEKDHTTHCHASDHANQLSIHIPGWSYRAVHTKVFSGSSKRQQGEVCMTVSAPPVEQKPTRHFLPIGDSSPSDDCLSRDLSEPTERRHQSFLKPRILFPGFLCPLQDVCASLQEDNGVQIESKFPKGDYTCCDLVVKIKECKKSEDPTTPEPSPAAPSPAPRDGAGSPGLSEDCSESQQTPARSLTLQEALEVRKPQFISRSQERLKKLEHMVQQRKAQRKEDLRQKQSLLPIRTSKKQFTIPHPLSDNLFKPKERCISEKEMHMRSKRSAHPDSFLQL

SEQ ID NO: 1047 - protein, 108 aa, Artificial Sequence
  Synthetic polypeptide
MQHSGIPTKTHPQGYAARYTETAVHRTFQIKTFSTELKNHVMVMDFVKSNWFPSQRRAKVCIIHMCQGLKTAEQTASRYEIHSRLFSSPKDHSAWERNESLSNAGFKK

SEQ ID NO: 1048 - protein, 110 aa, Artificial Sequence
  Synthetic polypeptide
MQHSGIPTKTHPQGYAARYTETAVHRTFQIKTFSTELKNHVMVMDFVKSNWFPSQRRAKVCIIHMCQGLKTAEQTASRYEIHSRLFSSPKDHSAWERNESLSNAGYVQNG

SEQ ID NO: 1049 - protein, 139 aa, Artificial Sequence
  Synthetic polypeptide
MQHSGIPTKTHPQGYAARYTETAVHRTFQIKTFSTELKNHVMVMDFVKSNWFPSQRRAKVCIIHMCQGLKTAEQTASRYEELLQPLQPSANTTLISWQLSTPRQDPPPEKDCNLLKAQMISIFVLAVSSLKLRYVHFLT

SEQ ID NO: 1050 - protein, 113 aa, Artificial Sequence
  Synthetic polypeptide
MQHSGIPTKTHPQGYAARYTETAVHRTFQIKTFSTELKNHVMVMDFVKSNWFPSQRRAKVCIIHMCQGLKTAEQTASRYENGITVVPSFGSCHGDYIMPVKHLEWCLALGKHS

SEQ ID NO: 1051 - protein, 932 aa, Artificial Sequence
  Synthetic polypeptide
MTRWVPTKREEKYGVAFYNYDARGADELSLQIGDTVHILETYEGWYRGYTLRKKSKKGIFPASYIHLKEAIVEGKGQHETVIPGDLPLIQEVTTTLREWSTIWRQLYVQDNREMFRSVRHMIYDLIEWRSQILSGTLPQDELKELKKKVTAKIDYGNRILDLDLVVRDEDGNILDPELTSTISLFRAHEIASKQVEERLQEEKSQKQNIDINRQAKFAATPSLALFVNLKNVVCKIGEDAEVLMSLYDPVESKFISENYLVRWSSSGLPKDIDRLHNLRAVFTDLGSKDLKREKISFVCQIVRVGRMELRDNNTRKLTSGLRRPFGVAVMDVTDIINGKVDDEDKQHFIPFQPVAGENDFLQTVINKVIAAKEVNHKGQGLWVTLKLLPGDIHQIRKEFPHLVDRTTAVARKTGFPEIIMPGDVRNDIYVTLVQGDFDKGSKTTAKNVEVTVSVYDEDGKRLEHVIFPGAGDEAISEYKSVIYYQVKQPRWFETVKVAIPIEDVNRSHLRFTFRHRSSQDSKDKSEKIFALAFVKLMRYDGTTLRDGEHDLIVYKAEAKKLEDAATYLSLPSTKAELEEKGHSATGKSMQSLGSCTISKDSFQISTLVCSTKLTQNVDLLGLLKWRSNTSLLQQNLRQLMKVDGGEVVKFLQDTLDALFNIMMENSESETFDTLVFDALVFIIGLIADRKFQHFNPVLETYIKKHFSATLAYTKLTKVLKNYVDGAEKPGVNEQLYKAMKALESIFKFIVRSRILFNQLYENKGEADFVESLLQLFRSINDMMSSMSDQTVRVKGAALKYLPTIVNDVKLVFDPKELSKMFTEFILNVPMGLLTIQKLYCLIEIVHSDLFTQHDCREILLPMMTDQLKYHLERQEDLEACCQLLSHILEVLYRKDVGPTQRHVQIIMEKLLRTVNRTVISMGRDSELIIEHP

SEQ ID NO: 1052 - protein, 1297 aa, Artificial Sequence
  Synthetic polypeptide
MTRWVPTKREEKYGVAFYNYDARGADELSLQIGDTVHILETYEGWYRGYTLRKKSKKGIFPASYIHLKEAIVEGKGQHETVIPGDLPLIQEVTTTLREWSTIWRQLYVQDNREMFRSVRHMIYDLIEWRSQILSGTLPQDELKELKKKVTAKIDYGNRILDLDLVVRDEDGNILDPELTSTISLFRAHEIASKQVEERLQEEKSQKQNIDINRQAKFAATPSLALFVNLKNVVCKIGEDAEVLMSLYDPVESKFISENYLVRWSSSGLPKDIDRLHNLRAVFTDLGSKDLKREKISFVCQIVRVGRMELRDNNTRKLTSGLRRPFGVAVMDVTDIINGKVDDEDKQHFIPFQPVAGENDFLQTVINKVIAAKEVNHKGQGLWVTLKLLPGDIHQIRKEFPHLVDRTTAVARKTGFPEIIMPGDVRNDIYVTLVQGDFDKGSKTTAKNVEVTVSVYDEDGKRLEHVIFPGAGDEAISEYKSVIYYQVKQPRWFETVKVAIPIEDVNRSHLRFTFRHRSSQDSKDKSEKIFALAFVKLMRYDGTTLRDGEHDLIVYKAEAKKLEDAATYLSLPSTKAELEEKGHSATGKSMQSLGSCTISKDSFQISTLVCSTKLTQNVDLLGLLKWRSNTSLLQQNLRQLMKVDGGEVVKFLQDTLDALFNIMMENSESETFDTLVFDALVFIIGLIADRKFQHFNPVLETYIKKHFSATLAYTKLTKVLKNYVDGAEKPGVNEQLYKAMKALESIFKFIVRSRILFNQLYENKGEADFVESLLQLFRSINDMMSSMSDQTVRVKGAALKYLPTIVNDVKLVFDPKELSKMFTEFILNVPMGLLTIQKLYCLIEIVHSDLFTQHDCREILLPMMTDQLKYHLERQEDLEACCQLLSHILEVLYRKDVGPTQRHVQIIMEKLLRTVNRTVISMGRDSELIGNFVACMTAILRQMEDYHYAHLIKTFGKMRTDVVDFLMETFIMFKNLIGKNVYPFDWVIMNMVQNKVFLRAINQYADMLNKKFLDQANFELQLWNNYFHLAVAFLTQESLQLENFSSAKRAKILNKYGDMRRQIGFEIRDMWYNLGQHKIKFIPEMVGPILEMTLIPETELRKATIPIFFDMMQCEFHSTRSFQMFENEIITKLDHEVEGGRGDEQYKVLFDKILLEHCRKHKYLAKTGETFVKLVVRLMERLLDYRTIMHDENKENRMSCTVNVLNFYKEIEREEMYIRYLYKLCDLHKECDNYTEAAYTLLLHAKLLKWSEDVCVAHLTQRDGYQATTQGQLKEQLYQEIIHYFDKGKPFPIARITT

SEQ ID NO: 1053 - protein, 192 aa, Artificial Sequence
  Synthetic polypeptide
MSTRESFNPESYELDKSFRLTRFTELKGTGCKVPQDVLQKLLESLQENHFQEDEQFLGAVMPRLGIGMDTCVIPLRHGGLSLVQTTDYIYPIVDDPYMMGRIACANVLSDLYAMGVTECDNMLMLLGVSNKMTDRERDKVMPLIIQGFKDAAEEAGTSVTGGQTVLNPWIVLGGVATTVCQPNEFIITIHNS

SEQ ID NO: 1054 - protein, 125 aa, Artificial Sequence
  Synthetic polypeptide
MDTCVIPLRHGGLSLVQTTDYIYPIVDDPYMMGRIACANVLSDLYAMGVTECDNMLMLLGVSNKMTDRERDKVMPLIIQGFKDAAEEAGTSVTGGQTVLNPWIVLGGVATTVCQPNEFIITIHNS

SEQ ID NO: 1055 - protein, 381 aa, Artificial Sequence
  Synthetic polypeptide
MTADIISTVEFNYSGDLLATGDKGGRVVIFQREQENKSRPHSRGEYNVYSTFQSHEPEFDYLKSLEIEEKINKIRWLPQQNAAHFLLSTNDKTIKLWKISERDKRAEGYNLKDEDGRLRDPFRITALRVPILKPMDLMVEASPRRIFANAHTYHINSISVNSDHETYLSADDLRINLWHLEITDRSFNIVDIKPANMEELTEVITAAEFHPHQCNVFVYSSSKGTIRLCDMRSSALCDRHSKFFEEPEDPSSRSFFSEIISSISDVKFSHSGRYMMTRDYLSVKVWDLNMESRPVETHQVHEYLRSKLCSLYENDCIFDKFECCWNGSDSFRQGQSDTRYLPAARVSAGPWKGSGPLLSHGTLKTRQRERPLTAHDHGGRT

SEQ ID NO: 1056 - protein, 165 aa, Artificial Sequence
  Synthetic polypeptide
MEELTEVITAAEFHPHQCNVFVYSSSKGTIRLCDMRSSALCDRHSKFFEEPEDPSSRSFFSEIISSISDVKFSHSGRYMMTRDPVGEGVGPQHRAGRWRPTRSTSTCAASSALSMRTTASLTSLSVAGTVRIVLDKVSQTLGICQQPGSVLGHGREAARFFLMAP

SEQ ID NO: 1057 - protein, 366 aa, Artificial Sequence
  Synthetic polypeptide
MTADIISTVEFNYSGDLLATGDKGGRVVIFQREQENKSRPHSRGEYNVYSTFQSHEPEFDYLKSLEIEEKINKIRWLPQQNAAHFLLSTNDKTIKLWKISERDKRAEGYNLKDEDGRLRDPFRITALRVPILKPMDLMVEASPRRIFANAHTYHINSISVNSDHETYLSADDLRINLWHLEITDRSFNIVDIKPANMEELTEVITAAEFHPHQCNVFVYSSSKGTIRLCDMRSSALCDRHSKFFEEPEDPSSRSFFSEIISSISDVKFSHSGRYMMTRDYLSVKVWDLNMESRPVETHQVHEYLRSKLCSLYENDCIFDKFECCWNGSDRKSSFLPFIWNSQATFVGMQELMEYTSFLSLNELWGF

SEQ ID NO: 1058 - protein, 153 aa, Artificial Sequence
  Synthetic polypeptide
MEELTEVITAAEFHPHQCNVFVYSSSKGTIRLCDMRSSALCDRHSKFFEEPEDPSSRSFFSEIISSISDVKFSHSGRYMMTRDPVGEGVGPQHRAGRWRPTRSTSTCAASSALSMRTTASLTSLSVAGTVRIGSHHSFHLSGIPKLPLSGCRN

SEQ ID NO: 1059 - protein, 353 aa, Artificial Sequence
  Synthetic polypeptide
MAGKAAAPGTAVLLVTANVGSLFDDPENLQKNWLREFYQVVHTHKPHFMALHCQEFGGKNYEASMSHVDKFVKELLSSDAMKEYNRARVYLDENYKSQEHFTALGSFYFLHESLKNIYQFDFKAKKYRKVAGKEIYSDTLESTPMLEKEKFPQDYFPECKWSRKGFIRTRWCIADCAFDLVNIHLFHDASNLVAWETSPSVYSGIRHKALGYVLDRIIDQRFEKVSYFVFGDFNFRLDSKSVVETLCTKATMQTVRAADTNEVVKLIFRESDNDRKVMLQLEKKLFDYFNQEVFRDNNGTAVCSDAQVLTVCYATCGGRWPAVRVCSPGATGLPLYSPGVERTRAVMSHSEIA

SEQ ID NO: 1060 - protein, 258 aa, Artificial Sequence
  Synthetic polypeptide
MDTSPDPVCGGSHTSHVLLHDARGSAVGMEGGRPPPQSVGPAGLKKMQSSLKLVDCIIEVHDARIPLSGRNPLFQETLGLKPHLLVLNKMDLADLTEQQKIMQHLEGEGLKNVIFTNCVKDENVKQIIPMVTELIGRSHRYHRKENLEYCIMVIGVPNVGKSSLINSLRRQHLRKGKATRVGGEPGITRAVMSKIQVSERPLMFLLDTPGVLAPRIESVETGLKLALCGTVLDHLVGEETMADYLLYTLNKHQRFGIG

SEQ ID NO: 1061 - protein, 212 aa, Artificial Sequence
  Synthetic polypeptide
MQSSLKLVDCIIEVHDARIPLSGRNPLFQETLGLKPHLLVLNKMDLADLTEQQKIMQHLEGEGLKNVIFTNCVKDENVKQIIPMVTELIGRSHRYHRKENLEYCIMVIGVPNVGKSSLINSLRRQHLRKGKATRVGGEPGITRAVMSKIQVSERPLMFLLDTPGVLAPRIESVETGLKLALCGTVLDHLVGEETMADYLLYTLNKHQRFGIG

SEQ ID NO: 1062 - protein, 253 aa, Artificial Sequence
  Synthetic polypeptide
MRLTPRALCSAAQAAWRENFPLCGRDVARWFPGHMAKGLKKMQSSLKLVDCIIEVHDARIPLSGRNPLFQETLGLKPHLLVLNKMDLADLTEQQKIMQHLEGEGLKNVIFTNCVKDENVKQIIPMVTELIGRSHRYHRKENLEYCIMVIGVPNVGKSSLINSLRRQHLRKGKATRVGGEPGITRAVMSKIQVSERPLMFLLDTPGVLAPRIESVETGLKLALCGTVLDHLVGEETMADYLLYTLNKHQRFGIG

SEQ ID NO: 1063 - protein, 202 aa, Artificial Sequence
  Synthetic polypeptide
MRLTPRALCSAAQAAWRENFPLCGRDVARWFPGHMAKGLKKMQSSLKLVDCIIEVHDARIPLSGRNPLFQETLGLKPHLLVLNKMDLADLTEQQKIMQHLEGEGLKNVIFTNCVKDENVKQIIPMVTELIGRSHRYHRKEVSERPLMFLLDTPGVLAPRIESVETGLKLALCGTVLDHLVGEETMADYLLYTLNKHQRFGIG

SEQ ID NO: 1064 - protein, 263 aa, Artificial Sequence
  Synthetic polypeptide
MDTSPDPVCGGSHTSHVLLHDARGSAVGMEGGRPPPQSVGPAGLKKMQSSLKLVDCIIEVHDARIPLSGRNPLFQETLGLKPHLLVLNKMDLADLTEQQKIMQHLEGEGLKNVIFTNCVKDENVKQIIPMVTELIGRSHRYHRKENLEYCIMVIGVPNVGKSSLINSLRRQHLRKGKATRVGGEPGITRAVMSKIQVSERPLMFLLDTPGVLAPRIESVETGLKLALCGTVLDHLVGEETMADYLLYTLNKHQRFGKNQAIQR

SEQ ID NO: 1065 - protein, 217 aa, Artificial Sequence
  Synthetic polypeptide
MQSSLKLVDCIIEVHDARIPLSGRNPLFQETLGLKPHLLVLNKMDLADLTEQQKIMQHLEGEGLKNVIFTNCVKDENVKQIIPMVTELIGRSHRYHRKENLEYCIMVIGVPNVGKSSLINSLRRQHLRKGKATRVGGEPGITRAVMSKIQVSERPLMFLLDTPGVLAPRIESVETGLKLALCGTVLDHLVGEETMADYLLYTLNKHQRFGKNQAIQR

SEQ ID NO: 1066 - protein, 258 aa, Artificial Sequence
  Synthetic polypeptide
MRLTPRALCSAAQAAWRENFPLCGRDVARWFPGHMAKGLKKMQSSLKLVDCIIEVHDARIPLSGRNPLFQETLGLKPHLLVLNKMDLADLTEQQKIMQHLEGEGLKNVIFTNCVKDENVKQIIPMVTELIGRSHRYHRKENLEYCIMVIGVPNVGKSSLINSLRRQHLRKGKATRVGGEPGITRAVMSKIQVSERPLMFLLDTPGVLAPRIESVETGLKLALCGTVLDHLVGEETMADYLLYTLNKHQRFGKNQAIQR

SEQ ID NO: 1067 - protein, 207 aa, Artificial Sequence
  Synthetic polypeptide
MRLTPRALCSAAQAAWRENFPLCGRDVARWFPGHMAKGLKKMQSSLKLVDCIIEVHDARIPLSGRNPLFQETLGLKPHLLVLNKMDLADLTEQQKIMQHLEGEGLKNVIFTNCVKDENVKQIIPMVTELIGRSHRYHRKEVSERPLMFLLDTPGVLAPRIESVETGLKLALCGTVLDHLVGEETMADYLLYTLNKHQRFGKNQAIQR

SEQ ID NO: 1068 - protein, 258 aa, Artificial Sequence; identical to SEQ ID NO: 1060
  Synthetic polypeptide

SEQ ID NO: 1069 - protein, 212 aa, Artificial Sequence; identical to SEQ ID NO: 1061
  Synthetic polypeptide

SEQ ID NO: 1070 - protein, 253 aa, Artificial Sequence; identical to SEQ ID NO: 1062
  Synthetic polypeptide

SEQ ID NO: 1071 - protein, 202 aa, Artificial Sequence; identical to SEQ ID NO: 1063
  Synthetic polypeptide

SEQ ID NO: 1072 - protein, 296 aa, Artificial Sequence
  Synthetic polypeptide
MDTSPDPVCGGSHTSHVLLHDARGSAVGMEGGRPPPQSVGPAGLKKMQSSLKLVDCIIEVHDARIPLSGRNPLFQETLGLKPHLLVLNKMDLADLTEQQKIMQHLEGEGLKNVIFTNCVKDENVKQIIPMVTELIGRSHRYHRKENLEYCIMVIGVPNVGKSSLINSLRRQHLRKGKATRVGGEPGITRAVMSKIQVSERPLMFLLDTPGVLAPRIESVETGLKLALCGTVLDHLVGEETMADYLLYTLNKHQRFGYVQHYGLGSACDNVERVLKSVAVKLGKTQKVKVLTGTALA

SEQ ID NO: 1073 - protein, 250 aa, Artificial Sequence
  Synthetic polypeptide
MQSSLKLVDCIIEVHDARIPLSGRNPLFQETLGLKPHLLVLNKMDLADLTEQQKIMQHLEGEGLKNVIFTNCVKDENVKQIIPMVTELIGRSHRYHRKENLEYCIMVIGVPNVGKSSLINSLRRQHLRKGKATRVGGEPGITRAVMSKIQVSERPLMFLLDTPGVLAPRIESVETGLKLALCGTVLDHLVGEETMADYLLYTLNKHQRFGYVQHYGLGSACDNVERVLKSVAVKLGKTQKVKVLTGTALA

SEQ ID NO: 1074 - protein, 291 aa, Artificial Sequence
  Synthetic polypeptide
MRLTPRALCSAAQAAWRENFPLCGRDVARWFPGHMAKGLKKMQSSLKLVDCIIEVHDARIPLSGRNPLFQETLGLKPHLLVLNKMDLADLTEQQKIMQHLEGEGLKNVIFTNCVKDENVKQIIPMVTELIGRSHRYHRKENLEYCIMVIGVPNVGKSSLINSLRRQHLRKGKATRVGGEPGITRAVMSKIQVSERPLMFLLDTPGVLAPRIESVETGLKLALCGTVLDHLVGEETMADYLLYTLNKHQRFGYVQHYGLGSACDNVERVLKSVAVKLGKTQKVKVLTGTALA

SEQ ID NO: 1075 - protein, 240 aa, Artificial Sequence
  Synthetic polypeptide
MRLTPRALCSAAQAAWRENFPLCGRDVARWFPGHMAKGLKKMQSSLKLVDCIIEVHDARIPLSGRNPLFQETLGLKPHLLVLNKMDLADLTEQQKIMQHLEGEGLKNVIFTNCVKDENVKQIIPMVTELIGRSHRYHRKEVSERPLMFLLDTPGVLAPRIESVETGLKLALCGTVLDHLVGEETMADYLLYTLNKHQRFGYVQHYGLGSACDNVERVLKSVAVKLGKTQKVKVLTGTALA

SEQ ID NO: 1076 - protein, 296 aa, Artificial Sequence; identical to SEQ ID NO: 1072
  Synthetic polypeptide

SEQ ID NO: 1077 - protein, 250 aa, Artificial Sequence; identical to SEQ ID NO: 1073
  Synthetic polypeptide

SEQ ID NO: 1078 - protein, 291 aa, Artificial Sequence; identical to SEQ ID NO: 1074
  Synthetic polypeptide

SEQ ID NO: 1079 - protein, 240 aa, Artificial Sequence; identical to SEQ ID NO: 1075
  Synthetic polypeptide

SEQ ID NO: 1080 - protein, 148 aa, Artificial Sequence
  Synthetic polypeptide
MEMVQKLQKVGSLEPRVEVLINRINEVQQAKKKANKDLGEARTICEALQKELDSLHGEKVHLKEILSKKQETLRILRLHCQEKESEAHRKHTMLQECKERISALNLQIEEEKNKQRQLRLAFEEQLEDLMGQHKDLWDFHSPSKPWWC

SEQ ID NO: 1081 - protein, 184 aa, Artificial Sequence
  Synthetic polypeptide
MAGRSLTSKAEPTAGAVDRAEKAGGQDTSSQKIEDLMEMVQKLQKVGSLEPRVEVLINRINEVQQAKKKANKDLGEARTICEALQKELDSLHGEKVHLKEILSKKQETLRILRLHCQEKESEAHRKHTMLQECKERISALNLQIEEEKNKQRQLRLAFEEQLEDLMGQHKDLWDFHSPSKPWWC

SEQ ID NO: 1082 - protein, 347 aa, Artificial Sequence
  Synthetic polypeptide
MDILKSEILRKRQLVEDRNLLVENKKYFKRSELAKKEEEAYFERCGYKIQPKEEDQKPLTSSNPVLELELAEEKLPMTLSRQEVIRRLRERGEPIRLFGETDYDAFQRLRKIEILTPEVNKGLRNDLKAALDKIDQQYLNEIVGGQEPGEEDTQNDLKVHEENTTIEELEALGESLGKGDDHKDMDIITKFLKFLLGVWAKELNAREDYVKRSVQGKLNSATQKQTESYLRPLFRKLRKRNLPADIKESITDIIKFMLQREYVKANDAYLQMAIGNAPWPIGVTMVGIHARTGREKIFSKHVAHVLNDETQRKYIQGLKRLMTICQKHFPTDPSKCVEYNALALICL

SEQ ID NO: 1083 - protein, 9 aa, Artificial Sequence
  Synthetic polypeptide
KLSGNIFRD

SEQ ID NO: 1084 - protein, 23 aa, Artificial Sequence
  Synthetic polypeptide
CQKHFPTDPSKCVEYNALALICL

SEQ ID NO: 1085 - protein, 459 aa, Artificial Sequence
  Synthetic polypeptide
MTEGRRCQVHLLDDRKLELLVQPKLLAKELLDLVASHFNLKEKEYFGIAFTDETGHLNWLQLDRRVLEHDFPKKSGPVVLYFCVRFYIESISYLKDNATIELFFLNAKSCIYKELIDVDSEVVFELASYILQEAKGDFSSNEVVRSDLKKLPALPTQALKEHPSLAYCEDRVIEHYKKLNGQTRGQAIVNYMSIVESLPTYGVHYYAVKDKQGIPWWLGLSYKGIFQYDYHDKVKPRKIFQWRQLENLYFREKKFSVEVHDPRRASVTRRTFGHSGIAVHTWYACPALIKSIWAMAISQHQFYLDRKQSKSKIHAARSLSEIAIDLTETGTLKTSKLANMGSKGKIISGSSGSLLSSGSQESDSSQSAKKDMLAALKSRQEALEETLRQRLEELKKLCLREAELTGKLPVEYPLDPGEEPPIVRRRIGTAFKLDEQKILPKGEEAEAGESFEPGKQWLQ

SEQ ID NO: 1086 - protein, 474 aa, Artificial Sequence
  Synthetic polypeptide
MAVQLVPDSALGLLMMTEGRRCQVHLLDDRKLELLVQPKLLAKELLDLVASHFNLKEKEYFGIAFTDETGHLNWLQLDRRVLEHDFPKKSGPVVLYFCVRFYIESISYLKDNATIELFFLNAKSCIYKELIDVDSEVVFELASYILQEAKGDFSSNEVVRSDLKKLPALPTQALKEHPSLAYCEDRVIEHYKKLNGQTRGQAIVNYMSIVESLPTYGVHYYAVKDKQGIPWWLGLSYKGIFQYDYHDKVKPRKIFQWRQLENLYFREKKFSVEVHDPRRASVTRRTFGHSGIAVHTWYACPALIKSIWAMAISQHQFYLDRKQSKSKIHAARSLSEIAIDLTETGTLKTSKLANMGSKGKIISGSSGSLLSSGSQESDSSQSAKKDMLAALKSRQEALEETLRQRLEELKKLCLREAELTGKLPVEYPLDPGEEPPIVRRRIGTAFKLDEQKILPKGEEAEAGESFEPGKQWLQ

SEQ ID NO: 1087 - protein, 507 aa, Artificial Sequence
  Synthetic polypeptide
MAAGLLGSEDPPWSWNLTCRALRTCQVRNIRVLQLLLKPWCISRAVYQMTEGRRCQVHLLDDRKLELLVQPKLLAKELLDLVASHFNLKEKEYFGIAFTDETGHLNWLQLDRRVLEHDFPKKSGPVVLYFCVRFYIESISYLKDNATIELFFLNAKSCIYKELIDVDSEVVFELASYILQEAKGDFSSNEVVRSDLKKLPALPTQALKEHPSLAYCEDRVIEHYKKLNGQTRGQAIVNYMSIVESLPTYGVHYYAVKDKQGIPWWLGLSYKGIFQYDYHDKVKPRKIFQWRQLENLYFREKKFSVEVHDPRRASVTRRTFGHSGIAVHTWYACPALIKSIWAMAISQHQFYLDRKQSKSKIHAARSLSEIAIDLTETGTLKTSKLANMGSKGKIISGSSGSLLSSGSQESDSSQSAKKDMLAALKSRQEALEETLRQRLEELKKLCLREAELTGKLPVEYPLDPGEEPPIVRRRIGTAFKLDEQKILPKGEEAEAGESFEPGKQWLQ

SEQ ID NO: 1088 - protein, 25 aa, Artificial Sequence
  Synthetic polypeptide
MAVQLVPDSALGLLMLGSCTWPDFH

SEQ ID NO: 1089 - protein, 152 aa, Artificial Sequence
  Synthetic polypeptide
MSTWKARLTKRLKSPSRSMHPFPCSALLACFGNTRESASFNQSGVADTHSTVRVQPVAKAGRQPRHPSAEGAPEKRQDSSTHAERNGSANRNSSHRTAAQPAETPEDVPGSLDDGADCEAVVFHASIPRPSIIDTPKVLTYCLAPVGCMDVY

SEQ ID NO: 1090 - protein, 87 aa, Artificial Sequence
  Synthetic polypeptide
MSSFEGQMAEYPTISIDRFDRENLRARAYFLSHCHKDHMKGLRAPTLKRRLECSLKVYLYCSPVTKELLLTSPKYRFWKKRISSHNS

SEQ ID NO: 1091 - protein, 47 aa, Artificial Sequence
  Synthetic polypeptide
MAEDSESAASQQSLELDDQDTCGIDGDNEEETEHAKGSRSAQMSFLS

SEQ ID NO: 1092 - protein, 23 aa, Artificial Sequence
  Synthetic polypeptide
MRRRRSTPKVQGQPKCPFFHEAF

SEQ ID NO: 1093 - protein, 885 aa, Artificial Sequence
  Synthetic polypeptide
MSPGASRGPRGSQAPLIAPLCCAAAALGMLLWSPACQAFNLDVEKLTVYSGPKGSYFGYAVDFHIPDARTASVLVGAPKANTSQPDIVEGGAVYYCPWPAEGSAQCRQIPFDTTNNRKIRVNGTKEPIEFKSNQWFGATVKAHKGKVVACAPLYHWRTLKPTPEKDPVGTCYVAIQNFSAYAEFSPCRNSNADPEGQGYCQAGFSLDFYKNGDLIVGGPGSFYWQGQVITASVADIIANYSFKDILRKLAGEKQTEVAPASYDDSYLGYSVAAGEFTGDSQQELVAGIPRGAQNFGYVSIINSTDMTFIQNFTGEQMASYFGYTVVVSDVNSDGLDDVLVGAPLFMEREFESNPREVGQIYLYLQVSSLLFRDPQILTGTETFGRFGSAMAHLGDLNQDGYNDIAIGVPFAGKDQRGKVLIYNGNKDGLNTKPSQVLQGVWASHAVPSGFGFTLRGDSDIDKNDYPDLIVGAFGTGKVAVYRARPVVTVDAQLLLHPMIINLENKTCQVPDSMTSAACFSLRVCASVTGQSIANTIVLMAEVQLDSLKQKGAIKRTLFLDNHQAHRVFPLVIKRQKSHQCQDFIVYLRDETEFRDKLSPINISLNYSLDESTFKEGLEVKPILNYYRENIVSEQAHILVDCGEDNLCVPDLKLSARPDKHQVIIGDENHLMLIINARNEGEGAYEAELFVMIPEEADYVGIERNNKGFRPLSCEYKMENVTRMVVCDLGNPMVSGTNYSLGLRFAVPRLEKTNMSINFDLQIRSSNKDNPDSNFVSLQINITAVAQVEIRGVSHPPQIVLPIHNWEPEEEPHKEEEVGPLVEHIYELHNIGPSTISDTILEVGWPFSARDEFLLYIFHIQTLGPLQCQPNPNINPQDIKEHGSCL

SEQ ID NO: 1094 - protein, 143 aa, Artificial Sequence
  Synthetic polypeptide
MRPGGALLALLASLLLLLLLRLLWCPADAPGRARILVEESREATHGTPAALRTLRSPATAVPRATNSTYLNEKSLQLTEKCKNLQYGIESFSNKTKGYSENDYLQIITDIQSCPWKRQAEEYANFRITNTIKAETMLDLLTNV

SEQ ID NO: 1095 - protein, 261 aa, Artificial Sequence
  Synthetic polypeptide
MGRLTEAAAAGSGSRAAGWAGSPPTLLPLSPTSPRCAATMASSDEDGTNGGASEAGEDREAPGERRRLGVLATAWLTFYDIAMTAGWLVLAIAMVRFYMEKGTHRGLYKSIQKTLKFFQTFALLEIVHCLIGIVPTSVIVTGVQVSSRIFMVWLITHSIKPIQNEESVVLFLVAWTVTEITRYSFYTFSLLDHLPYFIKWARYNFFIILYPVGVAGELLTIYAALPHVKKTGMFSIRLPNKYNVSFDYYYFLLITMASYIP

SEQ ID NO: 1096 - protein, 498 aa, Artificial Sequence
  Synthetic polypeptide
MPLFATNPFDQDVEKATSEMNTAEDWGLILDICDKVGQSRTGPKDCLRSIMRRVNHKDPHVAMQALTLLGACVSNCGKIFHLEVCSRDFASEVSNVLNKGHPKVCEKLKALMVEWTDEFKNDPQLSLISAMIKNLKEQGVTFPAIGSQAAEQAKASPALVAKDPGTVANKKEEEDLAKAIELSLKEQRQQSTTLSTLYPSTSSLLTNHQHEGRKVRAIYDFEAAEDNELTFKAGEIITVLDDSDPNWWKGETHQGIGLFPSNFVTADLTAEPEMIKTEKKTVQFSDDVQVETIEPEPEPAFIDEDKMDQLLQMLQSTDPSDDQPDLPELLHLEAMCHQMGPLIDEKLEDIDRKHSELSELNVKVMEALSLYTKLMNEDPMYSMYAKLQNQPYYMQSSGVSGSQVYAGPPPSGAYLVAGNAQMSHLQSYSLPPEQLSSLSQAVVPPSANPALPSQQTQAAYPNRSPGDLMKPGDSECRGSAEDSQMRISPPYFPTGQQA

SEQ ID NO: 1097 - protein, 387 aa, Artificial Sequence
  Synthetic polypeptide
MVEWTDEFKNDPQLSLISAMIKNLKEQGVTFPAIGSQAAEQAKASPALVAKDPGTVANKKEEEDLAKAIELSLKEQRQQSTTLSTLYPSTSSLLTNHQHEGRKVRAIYDFEAAEDNELTFKAGEIITVLDDSDPNWWKGETHQGIGLFPSNFVTADLTAEPEMIKTEKKTVQFSDDVQVETIEPEPEPAFIDEDKMDQLLQMLQSTDPSDDQPDLPELLHLEAMCHQMGPLIDEKLEDIDRKHSELSELNVKVMEALSLYTKLMNEDPMYSMYAKLQNQPYYMQSSGVSGSQVYAGPPPSGAYLVAGNAQMSHLQSYSLPPEQLSSLSQAVVPPSANPALPSQQTQAAYPNRSPGDLMKPGDSECRGSAEDSQMRISPPYFPTGQQA

SEQ ID NO: 1098 - protein, 35 aa, Artificial Sequence
  Synthetic polypeptide
MASVLGSGRGSGGLSSQLKCKSKRRRRRRSKRKGW

SEQ ID NO: 1099 - protein, 78 aa, Artificial Sequence
  Synthetic polypeptide
MVQRDMSKSPPTAAAAVAQEIQMELLENVAPAGALGAAAQSYGKGARRKNRFKGSDGSTSSDTTSNSFVRQEYSLQGT

SEQ ID NO: 1100 - protein, 50 aa, Artificial Sequence
  Synthetic polypeptide
MNQGSGLDLLKISYGKGARRKNRFKGSDGSTSSDTTSNSFVRQEYSLQGT

SEQ ID NO: 1101 - protein, 145 aa, Artificial Sequence
  Synthetic polypeptide
MVSSDRPVSLEDEVSHSMKEMIGGCCVCSDERGWAENPLVYCDGHGCSVAVHQACYGIVQVPTGPWFCRKCESQERAARVRCELCPHKDGALKRTDNGGWAHVVCALYIPEVQFANVSTMEPIVLQSVPHDRYNKASLFPKTQQY

SEQ ID NO: 1102 - protein, 117 aa, Artificial Sequence
  Synthetic polypeptide
MARLLWLLRGLTLGTAPRRAVRGQAGGGGPGTGPGLGEAGSLATCELPLAKSEWQKKLTPEQFYVTREKGTEPPFSGIYLNNKEAGMYHCVCCDSPLFRREAQTERRQPCENGSRDW

SEQ ID NO: 1103 - protein, 18 aa, Artificial Sequence
  Synthetic polypeptide
GLLQRVSCLLPRVSGKRN

SEQ ID NO: 1104 - protein, 143 aa, Artificial Sequence
  Synthetic polypeptide
GRKIMEGLEASIEQFQFNPRLNISDDLKIGFFSTDHATQTDSSEILSVKELSSSTQKLAQMMKSLQVDFGFLKQLLQLKFEDRLKEESLSLFTILHDRILEIEKHYQQNEDKMRKSFNQQLADAIAVIKGMYQQHGWSWRPLF

SEQ ID NO: 1105 - protein, 193 aa, Artificial Sequence
  Synthetic polypeptide
MMALVRDRRAHYVMSIVIRWVHCFSSSLRGTFGTRWEAMKAKATELRVCCARRKREAREFKPPQMRGSTRLNISDDLKIGFFSTDHATQTDSSEILSVKELSSSTQKLAQMMKSLQVDFGFLKQLLQLKFEDRLKEESLSLFTILHDRILEIEKHYQQNEDKMRKSFNQQLADAIAVIKGMYQQHGWSWRPLF

SEQ ID NO: 1106 - protein, 52 aa, Artificial Sequence
  Synthetic polypeptide
MQTSEMDRKREAFLEHLKQKYPHHASAIMGHQERLRDQFPRLSKENSIYIME

SEQ ID NO: 1107 - protein, 132 aa, Artificial Sequence
  Synthetic polypeptide
MEENESQKCEPCLPYSADRRQMQEQGKGNLHVTSPEDAECRRTKERLSNGNSRGSVSKSSRNIPRRHTLGGPRSSKEILGMQTSEMDRKREAFLEHLKQKYPHHASAIMGHQERLRDQFPRLSKENSIYIME

SEQ ID NO: 1108 - protein, 144 aa, Artificial Sequence
  Synthetic polypeptide
MAGSSEEAPDYGRGVVIMDDWPGYDLNLFTYPQHYYGDLEYVLIPHGIIVDRIERLAKDIMKDIGYSDIMVLCVLKGGYKFCADLVEHLKNISRNSDRFVSMKVDFIRLKSYRMQWLMHIIPTLWEAKTEGSPEARSSRPAWAT

SEQ ID NO: 1109 - protein, 61 aa, Artificial Sequence
  Synthetic polypeptide
MGESSEDIDQMFSTLLGEMDLLTQSLGVDTLPPPDPNPPRAEFNYSVGFKDLNAMHDGSHL

SEQ ID NO: 1110 - protein, 274 aa, Artificial Sequence
  Synthetic polypeptide
MAELQMLLEEEIPSGKRALIESYQNLTRVADYCENNYIQATDKRKALEETKAYTTQSLASVAYQINALANNVLQLLDIQASQLRRMESSINHISQTVDIHKEKVARREIGILTTNKNTSRTHKIIAPANMERPVRYIRKPIDYTVLDDVGHGVKWLKAKHGNNQPARTGTLSRTNPPTQKPPSPPMSGRGTLGRNTPYKTLEPVKPPTVPNDYMTSPARLGSQHSPGRTASLNQRPRTHSGSSGGSGSRENSGSSSIGIPIAVPTPSPPTIGPE

SEQ ID NO: 1111 - protein, 269 aa, Artificial Sequence
  Synthetic polypeptide
MAELQMLLEEEIPSGKRALIESYQNLTRVADYCENNYIQATDKRKALEETKAYTTQSLASVAYQINALANNVLQLLDIQASQLRRMESSINHISQTVDIHKEKVARREIGILTTNKNTSRTHKIIAPANMERPVRYIRKPIDYTVLDDVGHGVKHGNNQPARTGTLSRTNPPTQKPPSPPMSGRGTLGRNTPYKTLEPVKPPTVPNDYMTSPARLGSQHSPGRTASLNQRPRTHSGSSGGSGSRENSGSSSIGIPIAVPTPSPPTIGPE

SEQ ID NO: 1112 - protein, 291 aa, Artificial Sequence
  Synthetic polypeptide
MAELQMLLEEEIPSGKRALIESYQNLTRVADYCENNYIQRHGFAVLLCLLSNSWPQATDKRKALEETKAYTTQSLASVAYQINALANNVLQLLDIQASQLRRMESSINHISQTVDIHKEKVARREIGILTTNKNTSRTHKIIAPANMERPVRYIRKPIDYTVLDDVGHGVKWLKAKHGNNQPARTGTLSRTNPPTQKPPSPPMSGRGTLGRNTPYKTLEPVKPPTVPNDYMTSPARLGSQHSPGRTASLNQRPRTHSGSSGGSGSRENSGSSSIGIPIAVPTPSPPTIGPE

SEQ ID NO: 1113 - protein, 275 aa, Artificial Sequence
  Synthetic polypeptide
MAELQMLLEEEIPSGKRALIESYQNLTRVADYCENNYIQATDKRKALEETKAYTTQSLASVAYQINALANNVLQLLDIQASQLRRMESSINHISQTVDIHKEKVARREIGILTTNKNTSRTHKIIAPANMERPVRYIRKPIDYTVLDDVGHGVKKWHKIIHGNNQPARTGTLSRTNPPTQKPPSPPMSGRGTLGRNTPYKTLEPVKPPTVPNDYMTSPARLGSQHSPGRTASLNQRPRTHSGSSGGSGSRENSGSSSIGIPIAVPTPSPPTIGPE

SEQ ID NO: 1114 - protein, 210 aa, Artificial Sequence
  Synthetic polypeptide
MAELQMLLEEEIPSGKRALIESYQNLTRVADYCENNYIQATDKRKALEETKAYTTQSLASVAYQINALANNVLQLLDIQASQLRRMESSINHISQHGNNQPARTGTLSRTNPPTQKPPSPPMSGRGTLGRNTPYKTLEPVKPPTVPNDYMTSPARLGSQHSPGRTASLNQRPRTHSGSSGGSGSRENSGSSSIGIPIAVPTPSPPTIGPE

SEQ ID NO: 1115 - protein, 1268 aa, Artificial Sequence
  Synthetic polypeptide
MNHMFHIKRHSISAGTDAYKKTKPIQNLFQKPLYDHCSANNYKSMEPELENVRSSPPRGDRTSKVSLKEELQQDMQRFKNEIGMLKVEFQALEKEKVQLQKEVEEERKKHRNNEMEVSANIHDGATDDAEDDDDDDGLIQKRKSGETDHQQFPRKENKEYASSGPALQMKEVKSTEKEKRTSKESVNSPVFGKASLLTGGLLQVDDDSSLSEIDEDEGRPTKKTSNEKNKVKNQIQSMDDVDDLTQSSETASEDCELPHSSYKNFMLLIEQLGMECKDSVSLLKIQDAALSCERLLELKKNHCELLTVKIKKMEDKVNVLQRELSETKEIKSQLEHQKVEWERELCSLRFSLNQEEEKRRNADTLYEKIREQLRRKEEQYRKEVEVKQQLELSLQTLEMELRTVKSNLNQVVQERNDAQRQLSREQNARMLQDGILTNHLSKQKEIEMAQKKMNSENSHSHEEEKDLSHKNSMLQEEIAMLRLEIDTIKNQNQEKEKKCFEDLKIVKEKNEDLQKTIKQNEETLTQTISQYNGRLSVLTAENAMLNSKLENEKQSKERLEAEVESYHSRLAAAIHDRDQSETSKRELELAFQRARDECSRLQDKMNFDVSNLKDNNEILSQQLFKTESKLNSLEIEFHHTRDALREKTLGLERVQKDLSQTQCQMKEMEQKYQNEQVKVNKYIGKQESVEERLSQLQSENMLLRQQLDDAHNKADNKEKTVINIQDQFHAIVQKLQAESEKQSLLLEERNKELISECNHLKERQYQYENEKAEREVVVRQLQQELADTLKKQSMSEASLEVTSRYRINLEDETQDLKKKLGQIRNQLQEAQDRHTEAVRCAEKMQDHKQKLEKDNAKLKVTVKKQMDKIEELQKNLLNANLSEDEKEQLKKLMELKQSLECNLDQEMKKNVELEREITGFKNLLKMTRKKLNEYENGEFSFHGDLKTSQFEMDIQINKLKHKIDDLTAELETAGSKCLHLDTKNQILQEELLSMKTVQKKCEKLQKNKKKLEQEVINLRSHIERNMVELGQVKQYKQEIEERARQEIAEKLKEVNLFLQAQAASQENLEQFRENNFASMKSQMELRIKDLESELSKIKTSQEDFNKTELEKYKQLYLEELKVRKSLSSKLTKTNERLAEVNTKLLVEKQQSRSLFTTLTTRPVMEPPCVGNLNNSLDLNRKLIPRENLVISTSNPRASNNSMENYLSKMQQELEKNITRELKEAAAELESGSIASPLGSTDESNLNQDLVWKASREYVQVVVMVCACN

SEQ ID NO: 1116 - protein, 1711 aa, Artificial Sequence
  Synthetic polypeptide
MKKIFSKKGESPLGSFARRQRSSAGGGGEPGEGAYSQPGYHVRDRDLGKIHKAASAGNVAKVQQILLLRKNGLNDRDKMNRTALHLACANGHPEVVTLLVDRKCQLNVCDNENRTALMKAVQCQEEKCATILLEHGADPNLADVHGNTALHYAVYNEDISVATKLLLYDANIEAKNKDDLTPLLLAVSGKKQQMVEFLIKKKANVNAVDKLESSHQLISEYKEERIPKHSSQNSNSVDESSEDSLSRLSGKPGVDDSWPTSDDEDLNFDTKNVPKPSLAKLMTASQQSRKNLEATYGTVRTGNRTLFEDRDSDSQDEVVVESLPTTSIKVQCFSHPTYQSPDLLPKPSHKSLANPGLMKEEPTKPGIAKKENGIDIIESAPLEQTNNDNLTYVDEVHKNNRSDMMSALGLGQEEDIESPWDSESISENFPQKYVDPLAGAADGKEKNIGNEQAEDVFYIPSCMSGSRNFKMAKLEDTRNVGMPVAHMESPERYLHLKPTIEMKDSVPNKAGGMKDVQTSKAAEHDLEVASEEEQEREGSENNQPQVEEERKKHRNNEMEVSANIHDGATDDAEDDDDDDGLIQKRKSGETDHQQFPRKENKEYASSGPALQMKEVKSTEKEKRTSKESVNSPVFGKASLLTGGLLQVDDDSSLSEIDEDEGRPTKKTSNEKNKVKNQIQSMDDVDDLTQSSETASEDCELPHSSYKNFMLLIEQLGMECKDSVSLLKIQDAALSCERLLELKKNHCELLTVKIKKMEDKVNVLQRELSETKEIKSQLEHQKVEWERELCSLRFSLNQEEEKRRNADTLYEKIREQLRRKEEQYRKEVEVKQQLELSLQTLEMELRTVKSNLNQVVQERNDAQRQLSREQNARMLQDGILTNHLSKQKEIEMAQKKMNSENSHSHEEEKDLSHKNSMLQEEIAMLRLEIDTIKNQNQEKEKKCFEDLKIVKEKNEDLQKTIKQNEETLTQTISQYNGRLSVLTAENAMLNSKLENEKQSKERLEAEVESYHSRLAAAIHDRDQSETSKRELELAFQRARDECSRLQDKMNFDVSNLKDNNEILSQQLFKTESKLNSLEIEFHHTRDALREKTLGLERVQKDLSQTQCQMKEMEQKYQNEQVKVNKYIGKQESVEERLSQLQSENMLLRQQLDDAHNKADNKEKTVINIQDQFHAIVQKLQAESEKQSLLLEERNKELISECNHLKERQYQYENEKAEREVVVRQLQQELADTLKKQSMSEASLEVTSRYRINLEDETQDLKKKLGQIRNQLQEAQDRHTEAVRCAEKMQDHKQKLEKDNAKLKVTVKKQMDKIEELQKNLLNANLSEDEKEQLKKLMELKQSLECNLDQEMKKNVELEREITGFKNLLKMTRKKLNEYENGEFSFHGDLKTSQFEMDIQINKLKHKIDDLTAELETAGSKCLHLDTKNQILQEELLSMKTVQKKCEKLQKNKKKLEQEVINLRSHIERNMVELGQVKQYKQEIEERARQEIAEKLKEVNLFLQAQAASQENLEQFRENNFASMKSQMELRIKDLESELSKIKTSQEDFNKTELEKYKQLYLEELKVRKSLSSKLTKTNERLAEVNTKLLVEKQQSRSLFTTLTTRPVMEPPCVGNLNNSLDLNRKLIPRENLVISTSNPRASNNSMENYLSKMQQELEKNITRELKEAAAELESGSIASPLGSTDESNLNQDLVWKASREYVQVVVMVCACN

SEQ ID NO: 1117 - protein, 1727 aa, Artificial Sequence
  Synthetic polypeptide
MKKIFSKKGESPLGSFARRQRSSAGGGGEPGEGAYSQPGYHVRDRDLGKIHKAASAGNVAKVQQILLLRKNGLNDRDKMNRTALHLACANGHPEVVTLLVDRKCQLNVCDNENRTALMKAVQCQEEKCATILLEHGADPNLADVHGNTALHYAVYNEDISVATKLLLYDANIEAKNKDDLTPLLLAVSGKKQQMVEFLIKKKANVNAVDKLESSHQLISEYKEERIPKHSSQNSNSVDESSEDSLSSLFYFIFFETKSCTVAQAGVLQHDLSSLQSLLPGFTQFFCLHLPSSWDHRLSGKPGVDDSWPTSDDEDLNFDTKNVPKPSLAKLMTASQQSRKNLEATYGTVRTGNRTLFEDRDSDSQDEVVVESLPTTSIKVQCFSHPTYQSPDLLPKPSHKSLANPGLMKEEPTKPGIAKKENGIDIIESAPLEQTNNDNLTYVDEVHKNNRSDMMSALGLGQEEDIESPWDSESISENFPQKYVDPLAGAADGKEKNIGNEQAEESPERYLHLKPTIEMKDSVPNKAGGMKDVQTSKAAEHDLEVASEEEQEREGSENNQPQVEEERKKHRNNEMEVSANIHDGATDDAEDDDDDDGLIQKRKSGETDHQQFPRKENKEYASSGPALQMKEVKSTEKEKRTSKESVNSPVFGKASLLTGGLLQVDDDSSLSEIDEDEGRPTKKTSNEKNKVKNQIQSMDDVDDLTQSSETASEDCELPHSSYKNFMLLIEQLGMECKDSVSLLKIQDAALSCERLLELKKNHCELLTVKIKKMEDKVNVLQRELSETKEIKSQLEHQKVEWERELCSLRFSLNQEEEKRRNADTLYEKIREQLRRKEEQYRKEVEVKQQLELSLQTLEMELRTVKSNLNQVVQERNDAQRQLSREQNARMLQDGILTNHLSKQKEIEMAQKKMNSENSHSHEEEKDLSHKNSMLQEEIAMLRLEIDTIKNQNQEKEKKCFEDLKIVKEKNEDLQKTIKQNEETLTQTISQYNGRLSVLTAENAMLNSKLENEKQSKERLEAEVESYHSRLAAAIHDRDQSETSKRELELAFQRARDECSRLQDKMNFDVSNLKDNNEILSQQLFKTESKLNSLEIEFHHTRDALREKTLGLERVQKDLSQTQCQMKEMEQKYQNEQVKVNKYIGKQESVEERLSQLQSENMLLRQQLDDAHNKADNKEKTVINIQDQFHAIVQKLQAESEKQSLLLEERNKELISECNHLKERQYQYENEKAEREVVVRQLQQELADTLKKQSMSEASLEVTSRYRINLEDETQDLKKKLGQIRNQLQEAQDRHTEAVRCAEKMQDHKQKLEKDNAKLKVTVKKQMDKIEELQKNLLNANLSEDEKEQLKKLMELKQSLECNLDQEMKKNVELEREITGFKNLLKMTRKKLNEYENGEFSFHGDLKTSQFEMDIQINKLKHKIDDLTAELETAGSKCLHLDTKNQILQEELLSMKTVQKKCEKLQKNKKKLEQEVINLRSHIERNMVELGQVKQYKQEIEERARQEIAEKLKEVNLFLQAQAASQENLEQFRENNFASMKSQMELRIKDLESELSKIKTSQEDFNKTELEKYKQLYLEELKVRKSLSSKLTKTNERLAEVNTKLLVEKQQSRSLFTTLTTRPVMEPPCVGNLNNSLDLNRKLIPRENLVISTSNPRASNNSMENYLSKMQQELEKNITRELKEAAAELESGSIASPLGSTDESNLNQDLVWKASREYVQVVVMVCACN

SEQ ID NO: 1118 - protein, 1284 aa, Artificial Sequence
  Synthetic polypeptide
MNHMFHIKRHSISAGTDAYKKTKPIQNLFQKPLYDHCSANNYKSMEPELENVRSSPPRGDRTSKVSLKEELQQDMQRFKNEIGMLKVEFQALEKEKVQLQKEVEEERKKHRNNEMEVSANIHDGATDDAEDDDDDDGLIQKRKSGETDHQQFPRKENKEYASSGPALQMKEVKSTEKEKRTSKESVNSPVFGKASLLTGGLLQVDDDSSLSEIDEDEGRPTKKTSNEKNKVKNQIQSMDDVDDLTQSSETASEDCELPHSSYKNFMLLIEQLGMECKDSVSLLKIQDAALSCERLLELKKNHCELLTVKIKKMEDKVNVLQRELSETKEIKSQLEHQKVEWERELCSLRFSLNQEEEKRRNADTLYEKIREQLRRKEEQYRKEVEVKQQLELSLQTLEMELRTVKSNLNQVVQERNDAQRQLSREQNARMLQDGILTNHLSKQKEIEMAQKKMNSENSHSHEEEKDLSHKNSMLQEEIAMLRLEIDTIKNQNQEKEKKCFEDLKIVKEKNEDLQKTIKQNEETLTQTISQYNGRLSVLTAENAMLNSKLENEKQSKERLEAEVESYHSRLAAAIHDRDQSETSKRELELAFQRARDECSRLQDKMNFDVSNLKDNNEILSQQLFKTESKLNSLEIEFHHTRDALREKTLGLERVQKDLSQTQCQMKEMEQKYQNEQVKVNKYIGKQESVEERLSQLQSENMLLRQQLDDAHNKADNKEKTVINIQDQFHAIVQKLQAESEKQSLLLEERNKELISECNHLKERQYQYENEKAEREVVVRQLQQELADTLKKQSMSEASLEVTSRYRINLEDETQDLKKKLGQIRNQLQEAQDRHTEAVRCAEKMQDHKQKLEKDNAKLKVTVKKQMDKIEELQKNLLNANLSEDEKEQLKKLMELKQSLECNLDQEMKKNVELEREITGFKNLLKMTRKKLNEYENGEFSFHGDLKTSQFEMDIQINKLKHKIDDLTAELETAGSKCLHLDTKNQILQEELLSMKTVQKKCEKLQKNKKKLEQEVINLRSHIERNMVELGQVKQYKQEIEERARQEIAEKLKEVNLFLQAQAASQENLEQFRENNFASMKSQMELRIKDLESELSKIKTSQEDFNKTELEKYKQLYLEELKVRKSLSSKLTKTNERLAEVNTKLLVEKQQSRSLFTTLTTRPVMEPPCVGNLNNSLDLNRKLIPRENLVISTSNPRASNNSMENYLSKMQQELEKNITRELKEAAAELESGSIASPLGSTDESNLNQDLVWKASREYVQGPSDETPHDYVLMTDQCLTSRTDLQ

SEQ ID NO: 1119 - protein, 1727 aa, Artificial Sequence
  Synthetic polypeptide
MKKIFSKKGESPLGSFARRQRSSAGGGGEPGEGAYSQPGYHVRDRDLGKIHKAASAGNVAKVQQILLLRKNGLNDRDKMNRTALHLACANGHPEVVTLLVDRKCQLNVCDNENRTALMKAVQCQEEKCATILLEHGADPNLADVHGNTALHYAVYNEDISVATKLLLYDANIEAKNKDDLTPLLLAVSGKKQQMVEFLIKKKANVNAVDKLESSHQLISEYKEERIPKHSSQNSNSVDESSEDSLSRLSGKPGVDDSWPTSDDEDLNFDTKNVPKPSLAKLMTASQQSRKNLEATYGTVRTGNRTLFEDRDSDSQDEVVVESLPTTSIKVQCFSHPTYQSPDLLPKPSHKSLANPGLMKEEPTKPGIAKKENGIDIIESAPLEQTNNDNLTYVDEVHKNNRSDMMSALGLGQEEDIESPWDSESISENFPQKYVDPLAGAADGKEKNIGNEQAEDVFYIPSCMSGSRNFKMAKLEDTRNVGMPVAHMESPERYLHLKPTIEMKDSVPNKAGGMKDVQTSKAAEHDLEVASEEEQEREGSENNQPQVEEERKKHRNNEMEVSANIHDGATDDAEDDDDDDGLIQKRKSGETDHQQFPRKENKEYASSGPALQMKEVKSTEKEKRTSKESVNSPVFGKASLLTGGLLQVDDDSSLSEIDEDEGRPTKKTSNEKNKVKNQIQSMDDVDDLTQSSETASEDCELPHSSYKNFMLLIEQLGMECKDSVSLLKIQDAALSCERLLELKKNHCELLTVKIKKMEDKVNVLQRELSETKEIKSQLEHQKVEWERELCSLRFSLNQEEEKRRNADTLYEKIREQLRRKEEQYRKEVEVKQQLELSLQTLEMELRTVKSNLNQVVQERNDAQRQLSREQNARMLQDGILTNHLSKQKEIEMAQKKMNSENSHSHEEEKDLSHKNSMLQEEIAMLRLEIDTIKNQNQEKEKKCFEDLKIVKEKNEDLQKTIKQNEETLTQTISQYNGRLSVLTAENAMLNSKLENEKQSKERLEAEVESYHSRLAAAIHDRDQSETSKRELELAFQRARDECSRLQDKMNFDVSNLKDNNEILSQQLFKTESKLNSLEIEFHHTRDALREKTLGLERVQKDLSQTQCQMKEMEQKYQNEQVKVNKYIGKQESVEERLSQLQSENMLLRQQLDDAHNKADNKEKTVINIQDQFHAIVQKLQAESEKQSLLLEERNKELISECNHLKERQYQYENEKAEREVVVRQLQQELADTLKKQSMSEASLEVTSRYRINLEDETQDLKKKLGQIRNQLQEAQDRHTEAVRCAEKMQDHKQKLEKDNAKLKVTVKKQMDKIEELQKNLLNANLSEDEKEQLKKLMELKQSLECNLDQEMKKNVELEREITGFKNLLKMTRKKLNEYENGEFSFHGDLKTSQFEMDIQINKLKHKIDDLTAELETAGSKCLHLDTKNQILQEELLSMKTVQKKCEKLQKNKKKLEQEVINLRSHIERNMVELGQVKQYKQEIEERARQEIAEKLKEVNLFLQAQAASQENLEQFRENNFASMKSQMELRIKDLESELSKIKTSQEDFNKTELEKYKQLYLEELKVRKSLSSKLTKTNERLAEVNTKLLVEKQQSRSLFTTLTTRPVMEPPCVGNLNNSLDLNRKLIPRENLVISTSNPRASNNSMENYLSKMQQELEKNITRELKEAAAELESGSIASPLGSTDESNLNQDLVWKASREYVQGPSDETPHDYVLMTDQCLTSRTDLQ

SEQ ID NO: 1120 - protein, 1743 aa, Artificial Sequence
  Synthetic polypeptide
MKKIFSKKGESPLGSFARRQRSSAGGGGEPGEGAYSQPGYHVRDRDLGKIHKAASAGNVAKVQQILLLRKNGLNDRDKMNRTALHLACANGHPEVVTLLVDRKCQLNVCDNENRTALMKAVQCQEEKCATILLEHGADPNLADVHGNTALHYAVYNEDISVATKLLLYDANIEAKNKDDLTPLLLAVSGKKQQMVEFLIKKKANVNAVDKLESSHQLISEYKEERIPKHSSQNSNSVDESSEDSLSSLFYFIFFETKSCTVAQAGVLQHDLSSLQSLLPGFTQFFCLHLPSSWDHRLSGKPGVDDSWPTSDDEDLNFDTKNVPKPSLAKLMTASQQSRKNLEATYGTVRTGNRTLFEDRDSDSQDEVVVESLPTTSIKVQCFSHPTYQSPDLLPKPSHKSLANPGLMKEEPTKPGIAKKENGIDIIESAPLEQTNNDNLTYVDEVHKNNRSDMMSALGLGQEEDIESPWDSESISENFPQKYVDPLAGAADGKEKNIGNEQAEESPERYLHLKPTIEMKDSVPNKAGGMKDVQTSKAAEHDLEVASEEEQEREGSENNQPQVEEERKKHRNNEMEVSANIHDGATDDAEDDDDDDGLIQKRKSGETDHQQFPRKENKEYASSGPALQMKEVKSTEKEKRTSKESVNSPVFGKASLLTGGLLQVDDDSSLSEIDEDEGRPTKKTSNEKNKVKNQIQSMDDVDDLTQSSETASEDCELPHSSYKNFMLLIEQLGMECKDSVSLLKIQDAALSCERLLELKKNHCELLTVKIKKMEDKVNVLQRELSETKEIKSQLEHQKVEWERELCSLRFSLNQEEEKRRNADTLYEKIREQLRRKEEQYRKEVEVKQQLELSLQTLEMELRTVKSNLNQVVQERNDAQRQLSREQNARMLQDGILTNHLSKQKEIEMAQKKMNSENSHSHEEEKDLSHKNSMLQEEIAMLRLEIDTIKNQNQEKEKKCFEDLKIVKEKNEDLQKTIKQNEETLTQTISQYNGRLSVLTAENAMLNSKLENEKQSKERLEAEVESYHSRLAAAIHDRDQSETSKRELELAFQRARDECSRLQDKMNFDVSNLKDNNEILSQQLFKTESKLNSLEIEFHHTRDALREKTLGLERVQKDLSQTQCQMKEMEQKYQNEQVKVNKYIGKQESVEERLSQLQSENMLLRQQLDDAHNKADNKEKTVINIQDQFHAIVQKLQAESEKQSLLLEERNKELISECNHLKERQYQYENEKAEREVVVRQLQQELADTLKKQSMSEASLEVTSRYRINLEDETQDLKKKLGQIRNQLQEAQDRHTEAVRCAEKMQDHKQKLEKDNAKLKVTVKKQMDKIEELQKNLLNANLSEDEKEQLKKLMELKQSLECNLDQEMKKNVELEREITGFKNLLKMTRKKLNEYENGEFSFHGDLKTSQFEMDIQINKLKHKIDDLTAELETAGSKCLHLDTKNQILQEELLSMKTVQKKCEKLQKNKKKLEQEVINLRSHIERNMVELGQVKQYKQEIEERARQEIAEKLKEVNLFLQAQAASQENLEQFRENNFASMKSQMELRIKDLESELSKIKTSQEDFNKTELEKYKQLYLEELKVRKSLSSKLTKTNERLAEVNTKLLVEKQQSRSLFTTLTTRPVMEPPCVGNLNNSLDLNRKLIPRENLVISTSNPRASNNSMENYLSKMQQELEKNITRELKEAAAELESGSIASPLGSTDESNLNQDLVWKASREYVQGPSDETPHDYVLMTDQCLTSRTDLQ

SEQ ID NO: 1121 - protein, 1 aa, Artificial Sequence
  Synthetic polypeptide
V

SEQ ID NO: 1122 - protein, 1307 aa, Artificial Sequence
  Synthetic polypeptide
MNHMFHIKRHSISAGTDAYKKTKPIQNLFQKPLYDHCSANNYKSMEPELENVRSSPPRGDRTSKVSLKEELQQDMQRFKNEIGMLKVEFQALEKEKVQLQKEVEEERKKHRNNEMEVSANIHDGATDDAEDDDDDDGLIQKRKSGETDHQQFPRKENKEYASSGPALQMKEVKSTEKEKRTSKESVNSPVFGKASLLTGGLLQVDDDSSLSEIDEDEGRPTKKTSNEKNKVKNQIQSMDDVDDLTQSSETASEDCELPHSSYKNFMLLIEQLGMECKDSVSLLKIQDAALSCERLLELKKNHCELLTVKIKKMEDKVNVLQRELSETKEIKSQLEHQKVEWERELCSLRFSLNQEEEKRRNADTLYEKIREQLRRKEEQYRKEVEVKQQLELSLQTLEMELRTVKSNLNQVVQERNDAQRQLSREQNARMLQDGILTNHLSKQKEIEMAQKKMNSENSHSHEEEKDLSHKNSMLQEEIAMLRLEIDTIKNQNQEKEKKCFEDLKIVKEKNEDLQKTIKQNEETLTQTISQYNGRLSVLTAENAMLNSKLENEKQSKERLEAEVESYHSRLAAAIHDRDQSETSKRELELAFQRARDECSRLQDKMNFDVSNLKDNNEILSQQLFKTESKLNSLEIEFHHTRDALREKTLGLERVQKDLSQTQCQMKEMEQKYQNEQVKVNKYIGKQESVEERLSQLQSENMLLRQQLDDAHNKADNKEKTVINIQDQFHAIVQKLQAESEKQSLLLEERNKELISECNHLKERQYQYENEKAEREVVVRQLQQELADTLKKQSMSEASLEVTSRYRINLEDETQDLKKKLGQIRNQLQEAQDRHTEAVRCAEKMQDHKQKLEKDNAKLKVTVKKQMDKIEELQKNLLNANLSEDEKEQLKKLMELKQSLECNLDQEMKKNVELEREITGFKNLLKMTRKKLNEYENGEFSFHGDLKTSQFEMDIQINKLKHKIDDLTAELETAGSKCLHLDTKNQILQEELLSMKTVQKKCEKLQKNKKKLEQEVINLRSHIERNMVELGQVKQYKQEIEERARQEIAEKLKEVNLFLQAQAASQENLEQFRENNFASMKSQMELRIKDLESELSKIKTSQEDFNKTELEKYKQLYLEELKVRKSLSSKLTKTNERLAEVNTKLLVEKQQSRSLFTTLTTRPVMEPPCVGNLNNSLDLNRKLIPRENLVISTSNPRASNNSMENYLSKMQQELEKNITRELKEGTSPAYSDLSELPGPDLFPLPACSSLPSSSPCLLLTQQKATGWSTSTTPSPDDFTTVSLAAFHLEEVEKGEPVGTSLMITPYRE

SEQ ID NO: 1123 - protein, 1750 aa, Artificial Sequence
  Synthetic polypeptide
MKKIFSKKGESPLGSFARRQRSSAGGGGEPGEGAYSQPGYHVRDRDLGKIHKAASAGNVAKVQQILLLRKNGLNDRDKMNRTALHLACANGHPEVVTLLVDRKCQLNVCDNENRTALMKAVQCQEEKCATILLEHGADPNLADVHGNTALHYAVYNEDISVATKLLLYDANIEAKNKDDLTPLLLAVSGKKQQMVEFLIKKKANVNAVDKLESSHQLISEYKEERIPKHSSQNSNSVDESSEDSLSRLSGKPGVDDSWPTSDDEDLNFDTKNVPKPSLAKLMTASQQSRKNLEATYGTVRTGNRTLFEDRDSDSQDEVVVESLPTTSIKVQCFSHPTYQSPDLLPKPSHKSLANPGLMKEEPTKPGIAKKENGIDIIESAPLEQTNNDNLTYVDEVHKNNRSDMMSALGLGQEEDIESPWDSESISENFPQKYVDPLAGAADGKEKNIGNEQAEDVFYIPSCMSGSRNFKMAKLEDTRNVGMPVAHMESPERYLHLKPTIEMKDSVPNKAGGMKDVQTSKAAEHDLEVASEEEQEREGSENNQPQVEEERKKHRNNEMEVSANIHDGATDDAEDDDDDDGLIQKRKSGETDHQQFPRKENKEYASSGPALQMKEVKSTEKEKRTSKESVNSPVFGKASLLTGGLLQVDDDSSLSEIDEDEGRPTKKTSNEKNKVKNQIQSMDDVDDLTQSSETASEDCELPHSSYKNFMLLIEQLGMECKDSVSLLKIQDAALSCERLLELKKNHCELLTVKIKKMEDKVNVLQRELSETKEIKSQLEHQKVEWERELCSLRFSLNQEEEKRRNADTLYEKIREQLRRKEEQYRKEVEVKQQLELSLQTLEMELRTVKSNLNQVVQERNDAQRQLSREQNARMLQDGILTNHLSKQKEIEMAQKKMNSENSHSHEEEKDLSHKNSMLQEEIAMLRLEIDTIKNQNQEKEKKCFEDLKIVKEKNEDLQKTIKQNEETLTQTISQYNGRLSVLTAENAMLNSKLENEKQSKERLEAEVESYHSRLAAAIHDRDQSETSKRELELAFQRARDECSRLQDKMNFDVSNLKDNNEILSQQLFKTESKLNSLEIEFHHTRDALREKTLGLERVQKDLSQTQCQMKEMEQKYQNEQVKVNKYIGKQESVEERLSQLQSENMLLRQQLDDAHNKADNKEKTVINIQDQFHAIVQKLQAESEKQSLLLEERNKELISECNHLKERQYQYENEKAEREVVVRQLQQELADTLKKQSMSEASLEVTSRYRINLEDETQDLKKKLGQIRNQLQEAQDRHTEAVRCAEKMQDHKQKLEKDNAKLKVTVKKQMDKIEELQKNLLNANLSEDEKEQLKKLMELKQSLECNLDQEMKKNVELEREITGFKNLLKMTRKKLNEYENGEFSFHGDLKTSQFEMDIQINKLKHKIDDLTAELETAGSKCLHLDTKNQILQEELLSMKTVQKKCEKLQKNKKKLEQEVINLRSHIERNMVELGQVKQYKQEIEERARQEIAEKLKEVNLFLQAQAASQENLEQFRENNFASMKSQMELRIKDLESELSKIKTSQEDFNKTELEKYKQLYLEELKVRKSLSSKLTKTNERLAEVNTKLLVEKQQSRSLFTTLTTRPVMEPPCVGNLNNSLDLNRKLIPRENLVISTSNPRASNNSMENYLSKMQQELEKNITRELKEGTSPAYSDLSELPGPDLFPLPACSSLPSSSPCLLLTQQKATGWSTSTTPSPDDFTTVSLAAFHLEEVEKGEPVGTSLMITPYRE

SEQ ID NO: 1124 - protein, 1766 aa, Artificial Sequence
  Synthetic polypeptide
MKKIFSKKGESPLGSFARRQRSSAGGGGEPGEGAYSQPGYHVRDRDLGKIHKAASAGNVAKVQQILLLRKNGLNDRDKMNRTALHLACANGHPEVVTLLVDRKCQLNVCDNENRTALMKAVQCQEEKCATILLEHGADPNLADVHGNTALHYAVYNEDISVATKLLLYDANIEAKNKDDLTPLLLAVSGKKQQMVEFLIKKKANVNAVDKLESSHQLISEYKEERIPKHSSQNSNSVDESSEDSLSSLFYFIFFETKSCTVAQAGVLQHDLSSLQSLLPGFTQFFCLHLPSSWDHRLSGKPGVDDSWPTSDDEDLNFDTKNVPKPSLAKLMTASQQSRKNLEATYGTVRTGNRTLFEDRDSDSQDEVVVESLPTTSIKVQCFSHPTYQSPDLLPKPSHKSLANPGLMKEEPTKPGIAKKENGIDIIESAPLEQTNNDNLTYVDEVHKNNRSDMMSALGLGQEEDIESPWDSESISENFPQKYVDPLAGAADGKEKNIGNEQAEESPERYLHLKPTIEMKDSVPNKAGGMKDVQTSKAAEHDLEVASEEEQEREGSENNQPQVEEERKKHRNNEMEVSANIHDGATDDAEDDDDDDGLIQKRKSGETDHQQFPRKENKEYASSGPALQMKEVKSTEKEKRTSKESVNSPVFGKASLLTGGLLQVDDDSSLSEIDEDEGRPTKKTSNEKNKVKNQIQSMDDVDDLTQSSETASEDCELPHSSYKNFMLLIEQLGMECKDSVSLLKIQDAALSCERLLELKKNHCELLTVKIKKMEDKVNVLQRELSETKEIKSQLEHQKVEWERELCSLRFSLNQEEEKRRNADTLYEKIREQLRRKEEQYRKEVEVKQQLELSLQTLEMELRTVKSNLNQVVQERNDAQRQLSREQNARMLQDGILTNHLSKQKEIEMAQKKMNSENSHSHEEEKDLSHKNSMLQEEIAMLRLEIDTIKNQNQEKEKKCFEDLKIVKEKNEDLQKTIKQNEETLTQTISQYNGRLSVLTAENAMLNSKLENEKQSKERLEAEVESYHSRLAAAIHDRDQSETSKRELELAFQRARDECSRLQDKMNFDVSNLKDNNEILSQQLFKTESKLNSLEIEFHHTRDALREKTLGLERVQKDLSQTQCQMKEMEQKYQNEQVKVNKYIGKQESVEERLSQLQSENMLLRQQLDDAHNKADNKEKTVINIQDQFHAIVQKLQAESEKQSLLLEERNKELISECNHLKERQYQYENEKAEREVVVRQLQQELADTLKKQSMSEASLEVTSRYRINLEDETQDLKKKLGQIRNQLQEAQDRHTEAVRCAEKMQDHKQKLEKDNAKLKVTVKKQMDKIEELQKNLLNANLSEDEKEQLKKLMELKQSLECNLDQEMKKNVELEREITGFKNLLKMTRKKLNEYENGEFSFHGDLKTSQFEMDIQINKLKHKIDDLTAELETAGSKCLHLDTKNQILQEELLSMKTVQKKCEKLQKNKKKLEQEVINLRSHIERNMVELGQVKQYKQEIEERARQEIAEKLKEVNLFLQAQAASQENLEQFRENNFASMKSQMELRIKDLESELSKIKTSQEDFNKTELEKYKQLYLEELKVRKSLSSKLTKTNERLAEVNTKLLVEKQQSRSLFTTLTTRPVMEPPCVGNLNNSLDLNRKLIPRENLVISTSNPRASNNSMENYLSKMQQELEKNITRELKEGTSPAYSDLSELPGPDLFPLPACSSLPSSSPCLLLTQQKATGWSTSTTPSPDDFTTVSLAAFHLEEVEKGEPVGTSLMITPYRE

SEQ ID NO: 1125 - protein, 1 aa, Artificial Sequence
  Synthetic polypeptide
V

SEQ ID NO: 1126 - protein, 1257 aa, Artificial Sequence
  Synthetic polypeptide
MNHMFHIKRHSISAGTDAYKKTKPIQNLFQKPLYDHCSANNYKSMEPELENVRSSPPRGDRTSKVSLKEELQQDMQRFKNEIGMLKVEFQALEKEKVQLQKEVEEERKKHRNNEMEVSANIHDGATDDAEDDDDDDGLIQKRKSGETDHQQFPRKENKEYASSGPALQMKEVKSTEKEKRTSKESVNSPVFGKASLLTGGLLQVDDDSSLSEIDEDEGRPTKKTSNEKNKVKNQIQSMDDVDDLTQSSETASEDCELPHSSYKNFMLLIEQLGMECKDSVSLLKIQDAALSCERLLELKKNHCELLTVKIKKMEDKVNVLQRELSETKEIKSQLEHQKVEWERELCSLRFSLNQEEEKRRNADTLYEKIREQLRRKEEQYRKEVEVKQQLELSLQTLEMELRTVKSNLNQVVQERNDAQRQLSREQNARMLQDGILTNHLSKQKEIEMAQKKMNSENSHSHEEEKDLSHKNSMLQEEIAMLRLEIDTIKNQNQEKEKKCFEDLKIVKEKNEDLQKTIKQNEETLTQTISQYNGRLSVLTAENAMLNSKLENEKQSKERLEAEVESYHSRLAAAIHDRDQSETSKRELELAFQRARDECSRLQDKMNFDVSNLKDNNEILSQQLFKTESKLNSLEIEFHHTRDALREKTLGLERVQKDLSQTQCQMKEMEQKYQNEQVKVNKYIGKQESVEERLSQLQSENMLLRQQLDDAHNKADNKEKTVINIQDQFHAIVQKLQAESEKQSLLLEERNKELISECNHLKERQYQYENEKAEREVVVRQLQQELADTLKKQSMSEASLEVTSRYRINLEDETQDLKKKLGQIRNQLQEAQDRHTEAVRCAEKMQDHKQKLEKDNAKLKVTVKKQMDKIEELQKNLLNANLSEDEKEQLKKLMELKQSLECNLDQEMKKNVELEREITGFKNLLKMTRKKLNEYENGEFSFHGDLKTSQFEMDIQINKLKHKIDDLTAELETAGSKCLHLDTKNQILQEELLSMKTVQKKCEKLQKNKKKLEQEVINLRSHIERNMVELGQVKQYKQEIEERARQEIAEKLKEVNLFLQAQAASQENLEQFRENNFASMKSQMELRIKDLESELSKIKTSQEDFNKTELEKYKQLYLEELKVRKSLSSKLTKTNERLAEVNTKLLVEKQQSRSLFTTLTTRPVMEPPCVGNLNNSLDLNRKLIPRENLVISTSNPRASNNSMENYLSKMQQELEKNITRELKEGCRNGMCLQLRQCATEKSRVMVAQRSALTEEAVA

SEQ ID NO: 1127 - protein, 1700 aa, Artificial Sequence
  Synthetic polypeptide
MKKIFSKKGESPLGSFARRQRSSAGGGGEPGEGAYSQPGYHVRDRDLGKIHKAASAGNVAKVQQILLLRKNGLNDRDKMNRTALHLACANGHPEVVTLLVDRKCQLNVCDNENRTALMKAVQCQEEKCATILLEHGADPNLADVHGNTALHYAVYNEDISVATKLLLYDANIEAKNKDDLTPLLLAVSGKKQQMVEFLIKKKANVNAVDKLESSHQLISEYKEERIPKHSSQNSNSVDESSEDSLSRLSGKPGVDDSWPTSDDEDLNFDTKNVPKPSLAKLMTASQQSRKNLEATYGTVRTGNRTLFEDRDSDSQDEVVVESLPTTSIKVQCFSHPTYQSPDLLPKPSHKSLANPGLMKEEPTKPGIAKKENGIDIIESAPLEQTNNDNLTYVDEVHKNNRSDMMSALGLGQEEDIESPWDSESISENFPQKYVDPLAGAADGKEKNIGNEQAEDVFYIPSCMSGSRNFKMAKLEDTRNVGMPVAHMESPERYLHLKPTIEMKDSVPNKAGGMKDVQTSKAAEHDLEVASEEEQEREGSENNQPQVEEERKKHRNNEMEVSANIHDGATDDAEDDDDDDGLIQKRKSGETDHQQFPRKENKEYASSGPALQMKEVKSTEKEKRTSKESVNSPVFGKASLLTGGLLQVDDDSSLSEIDEDEGRPTKKTSNEKNKVKNQIQSMDDVDDLTQSSETASEDCELPHSSYKNFMLLIEQLGMECKDSVSLLKIQDAALSCERLLELKKNHCELLTVKIKKMEDKVNVLQRELSETKEIKSQLEHQKVEWERELCSLRFSLNQEEEKRRNADTLYEKIREQLRRKEEQYRKEVEVKQQLELSLQTLEMELRTVKSNLNQVVQERNDAQRQLSREQNARMLQDGILTNHLSKQKEIEMAQKKMNSENSHSHEEEKDLSHKNSMLQEEIAMLRLEIDTIKNQNQEKEKKCFEDLKIVKEKNEDLQKTIKQNEETLTQTISQYNGRLSVLTAENAMLNSKLENEKQSKERLEAEVESYHSRLAAAIHDRDQSETSKRELELAFQRARDECSRLQDKMNFDVSNLKDNNEILSQQLFKTESKLNSLEIEFHHTRDALREKTLGLERVQKDLSQTQCQMKEMEQKYQNEQVKVNKYIGKQESVEERLSQLQSENMLLRQQLDDAHNKADNKEKTVINIQDQFHAIVQKLQAESEKQSLLLEERNKELISECNHLKERQYQYENEKAEREVVVRQLQQELADTLKKQSMSEASLEVTSRYRINLEDETQDLKKKLGQIRNQLQEAQDRHTEAVRCAEKMQDHKQKLEKDNAKLKVTVKKQMDKIEELQKNLLNANLSEDEKEQLKKLMELKQSLECNLDQEMKKNVELEREITGFKNLLKMTRKKLNEYENGEFSFHGDLKTSQFEMDIQINKLKHKIDDLTAELETAGSKCLHLDTKNQILQEELLSMKTVQKKCEKLQKNKKKLEQEVINLRSHIERNMVELGQVKQYKQEIEERARQEIAEKLKEVNLFLQAQAASQENLEQFRENNFASMKSQMELRIKDLESELSKIKTSQEDFNKTELEKYKQLYLEELKVRKSLSSKLTKTNERLAEVNTKLLVEKQQSRSLFTTLTTRPVMEPPCVGNLNNSLDLNRKLIPRENLVISTSNPRASNNSMENYLSKMQQELEKNITRELKEGCRNGMCLQLRQCATEKSRVMVAQRSALTEEAVA

SEQ ID NO: 1128 - protein, 1716 aa, Artificial Sequence
  Synthetic polypeptide
MKKIFSKKGESPLGSFARRQRSSAGGGGEPGEGAYSQPGYHVRDRDLGKIHKAASAGNVAKVQQILLLRKNGLNDRDKMNRTALHLACANGHPEVVTLLVDRKCQLNVCDNENRTALMKAVQCQEEKCATILLEHGADPNLADVHGNTALHYAVYNEDISVATKLLLYDANIEAKNKDDLTPLLLAVSGKKQQMVEFLIKKKANVNAVDKLESSHQLISEYKEERIPKHSSQNSNSVDESSEDSLSSLFYFIFFETKSCTVAQAGVLQHDLSSLQSLLPGFTQFFCLHLPSSWDHRLSGKPGVDDSWPTSDDEDLNFDTKNVPKPSLAKLMTASQQSRKNLEATYGTVRTGNRTLFEDRDSDSQDEVVVESLPTTSIKVQCFSHPTYQSPDLLPKPSHKSLANPGLMKEEPTKPGIAKKENGIDIIESAPLEQTNNDNLTYVDEVHKNNRSDMMSALGLGQEEDIESPWDSESISENFPQKYVDPLAGAADGKEKNIGNEQAEESPERYLHLKPTIEMKDSVPNKAGGMKDVQTSKAAEHDLEVASEEEQEREGSENNQPQVEEERKKHRNNEMEVSANIHDGATDDAEDDDDDDGLIQKRKSGETDHQQFPRKENKEYASSGPALQMKEVKSTEKEKRTSKESVNSPVFGKASLLTGGLLQVDDDSSLSEIDEDEGRPTKKTSNEKNKVKNQIQSMDDVDDLTQSSETASEDCELPHSSYKNFMLLIEQLGMECKDSVSLLKIQDAALSCERLLELKKNHCELLTVKIKKMEDKVNVLQRELSETKEIKSQLEHQKVEWERELCSLRFSLNQEEEKRRNADTLYEKIREQLRRKEEQYRKEVEVKQQLELSLQTLEMELRTVKSNLNQVVQERNDAQRQLSREQNARMLQDGILTNHLSKQKEIEMAQKKMNSENSHSHEEEKDLSHKNSMLQEEIAMLRLEIDTIKNQNQEKEKKCFEDLKIVKEKNEDLQKTIKQNEETLTQTISQYNGRLSVLTAENAMLNSKLENEKQSKERLEAEVESYHSRLAAAIHDRDQSETSKRELELAFQRARDECSRLQDKMNFDVSNLKDNNEILSQQLFKTESKLNSLEIEFHHTRDALREKTLGLERVQKDLSQTQCQMKEMEQKYQNEQVKVNKYIGKQESVEERLSQLQSENMLLRQQLDDAHNKADNKEKTVINIQDQFHAIVQKLQAESEKQSLLLEERNKELISECNHLKERQYQYENEKAEREVVVRQLQQELADTLKKQSMSEASLEVTSRYRINLEDETQDLKKKLGQIRNQLQEAQDRHTEAVRCAEKMQDHKQKLEKDNAKLKVTVKKQMDKIEELQKNLLNANLSEDEKEQLKKLMELKQSLECNLDQEMKKNVELEREITGFKNLLKMTRKKLNEYENGEFSFHGDLKTSQFEMDIQINKLKHKIDDLTAELETAGSKCLHLDTKNQILQEELLSMKTVQKKCEKLQKNKKKLEQEVINLRSHIERNMVELGQVKQYKQEIEERARQEIAEKLKEVNLFLQAQAASQENLEQFRENNFASMKSQMELRIKDLESELSKIKTSQEDFNKTELEKYKQLYLEELKVRKSLSSKLTKTNERLAEVNTKLLVEKQQSRSLFTTLTTRPVMEPPCVGNLNNSLDLNRKLIPRENLVISTSNPRASNNSMENYLSKMQQELEKNITRELKEGCRNGMCLQLRQCATEKSRVMVAQRSALTEEAVA

SEQ ID NO: 1129 - protein, 206 aa, Artificial Sequence
  Synthetic polypeptide
MFSLSSTVQPQVTVPLSHLINAFHTPKNTSVSLSGVSVSQNQHRDVVPEHEAPSSECMFSDFLTKLNIVSIGKGKIFEGYRSMFMEPAKRMKKSLDTTDNWHIRPEPFSLSIPPSLNLRDLGLSELKIGQIDQLVENLLPGFCKGKNISSHWHTSHVSAQSFFENKYGNLDIFSTLRSSCLYRHHSRALQSICSDLQYWPALIWRF

SEQ ID NO: 1130 - protein, 149 aa, Artificial Sequence
  Synthetic polypeptide
MFSLSSTVQPQVTVPLSHLINAFHTPKNTSVSLSGVSVSQNQHRDVVPEHEAPSSEPSLNLRDLGLSELKIGQIDQLVENLLPGFCKGKNISSHWHTSHVSAQSFFENKYGNLDIFSTLRSSCLYRHHSRALQSICSDLQYWPALIWRF

SEQ ID NO: 1131 - protein, 141 aa, Artificial Sequence
  Synthetic polypeptide
MYQVTVPLSHLINAFHTPKNTSVSLSGVSVSQNQHRDVVPEHEAPSSEPSLNLRDLGLSELKIGQIDQLVENLLPGFCKGKNISSHWHTSHVSAQSFFENKYGNLDIFSTLRSSCLYRHHSRALQSICSDLQYWPALIWRF

SEQ ID NO: 1132 - protein, 534 aa, Artificial Sequence
  Synthetic polypeptide
MLFLSFHAGSWESWCCCCLIPADRPWDRGQHWQLEMADTRSVHETRFEAAVKVIQSLPKNGSFQPTNEMMLKFYSFYKQATEGPCKLSRPGFWDPIGRYKWDAWSSLGDMTKEEAMIAYVEEMKKIIETMPMTEKVEELLRVIGPFYEIVEDKKSGRSSDITSDLGNVLTSTPNAKTVNGKAESSDSGAESEEEEAQEEVKGAEQSDNDKKMMKKSADHKNLEVIVTNGYDKDGFVQDIQNDIHASSSLNGRSTEEVKPIDENLGQTGKSAVCIHQDINDDHVEDVTGIQHLTSDSDSEVYCDSMEQFGQEESLDSFTSNNGPFQYYLGGHSSQPMENSGFREDIQVPPGNGNIGNMQVVAVEGKGEVKHGGEDGRNNSGAPHREKRGGETDEFSNVRRGRGHRMQHLSEGTKGRQVGSGGDGERWGSDRGSRGSLNEQIALVLMRLQEDMQNVLQRLQKLETLTALQAKSSTSTLQTAPQPTSQRPSWWPFEMSPGVLTFAIIWPFIAQWLVYLYYQRRRRFLLKCPSSQRSS

SEQ ID NO: 1133 - protein, 425 aa, Artificial Sequence
  Synthetic polypeptide
MTKEEAMIAYVEEMKKIIETMPMTEKVEELLRVIGPFYEIVEDKKSGRSSDITSDLGNVLTSTPNAKTVNGKAESSDSGAESEEEEAQEEVKGAEQSDNDKKMMKKSADHKNLEVIVTNGYDKDGFVQDIQNDIHASSSLNGRSTEEVKPIDENLGQTGKSAVCIHQDINDDHVEDVTGIQHLTSDSDSEVYCDSMEQFGQEESLDSFTSNNGPFQYYLGGHSSQPMENSGFREDIQVPPGNGNIGNMQVVAVEGKGEVKHGGEDGRNNSGAPHREKRGGETDEFSNVRRGRGHRMQHLSEGTKGRQVGSGGDGERWGSDRGSRGSLNEQIALVLMRLQEDMQNVLQRLQKLETLTALQAKSSTSTLQTAPQPTSQRPSWWPFEMSPGVLTFAIIWPFIAQWLVYLYYQRRRRFLLKCPSSQRSS

SEQ ID NO: 1134 - protein, 499 aa, Artificial Sequence
  Synthetic polypeptide
MADTRSVHETRFEAAVKVIQSLPKNGSFQPTNEMMLKFYSFYKQATEGPCKLSRPGFWDPIGRYKWDAWSSLGDMTKEEAMIAYVEEMKKIIETMPMTEKVEELLRVIGPFYEIVEDKKSGRSSDITSDLGNVLTSTPNAKTVNGKAESSDSGAESEEEEAQEEVKGAEQSDNDKKMMKKSADHKNLEVIVTNGYDKDGFVQDIQNDIHASSSLNGRSTEEVKPIDENLGQTGKSAVCIHQDINDDHVEDVTGIQHLTSDSDSEVYCDSMEQFGQEESLDSFTSNNGPFQYYLGGHSSQPMENSGFREDIQVPPGNGNIGNMQVVAVEGKGEVKHGGEDGRNNSGAPHREKRGGETDEFSNVRRGRGHRMQHLSEGTKGRQVGSGGDGERWGSDRGSRGSLNEQIALVLMRLQEDMQNVLQRLQKLETLTALQAKSSTSTLQTAPQPTSQRPSWWPFEMSPGVLTFAIIWPFIAQWLVYLYYQRRRRFLLKCPSSQRSS

SEQ ID NO: 1135 - protein, 357 aa, Artificial Sequence
  Synthetic polypeptide
MTKEEAMIAYVEEMKKIIETMPMTEKVEELLRVIGPFYEIVEDKKSGRSSDITSDLGNVLTSTPNAKTVNGKAESSDSGAESEEEEAQEEVKGAEQSDNDINDDHVEDVTGIQHLTSDSDSEVYCDSMEQFGQEESLDSFTSNNGPFQYYLGGHSSQPMENSGFREDIQVPPGNGNIGNMQVVAVEGKGEVKHGGEDGRNNSGAPHREKRGGETDEFSNVRRGRGHRMQHLSEGTKGRQVGSGGDGERWGSDRGSRGSLNEQIALVLMRLQEDMQNVLQRLQKLETLTALQAKSSTSTLQTAPQPTSQRPSWWPFEMSPGVLTFAIIWPFIAQWLVYLYYQRRRRFLLKCPSSQRSS

SEQ ID NO: 1136 - protein, 543 aa, Artificial Sequence
  Synthetic polypeptide
MFQFHAGSWESWCCCCLIPADRPWDRGQHWQLEMADTRSVHETRFEAAVKVIQSLPKNGSFQPTNEMMLKFYSFYKQATEGPCKLSRPGFWDPIGRYKWDAWSSLGDMTKEEAMIAYVEEMKKIIETMPMTEKVEELLRVIGPFYEIVEDKKSGRSSDITSVRLEKISKCLEDLGNVLTSTPNAKTVNGKAESSDSGAESEEEEAQEEVKGAEQSDNDKKMMKKSADHKNLEVIVTNGYDKDGFVQDIQNDIHASSSLNGRSTEEVKPIDENLGQTGKSAVCIHQDINDDHVEDVTGIQHLTSDSDSEVYCDSMEQFGQEESLDSFTSNNGPFQYYLGGHSSQPMENSGFREDIQVPPGNGNIGNMQVVAVEGKGEVKHGGEDGRNNSGAPHREKRGGETDEFSNVRRGRGHRMQHLSEGTKGRQVGSGGDGERWGSDRGSRGSLNEQIALVLMRLQEDMQNVLQRLQKLETLTALQAKSSTSTLQTAPQPTSQRPSWWPFEMSPGVLTFAIIWPFIAQWLVYLYYQRRRRFLLKCPSSQRSS

SEQ ID NO: 1137 - protein, 50 aa, Artificial Sequence
  Synthetic polypeptide
MDEDVLTTLKILIIGESGVGKSSLLLRFTDDTFDPELAATIAVGEEMTAL

SEQ ID NO: 1138 - protein, 20 aa, Artificial Sequence
  Synthetic polypeptide
APAWFPAFARPKFSGSLSLL

SEQ ID NO: 1139 - protein, 20 aa, Artificial Sequence
  Synthetic polypeptide
APAWFPAFARPKFSGSLSLL

SEQ ID NO: 1140 - protein, 49 aa, Artificial Sequence
  Synthetic polypeptide
MDEDVLTTLKILIIGESGVGKSSLLLRFTDDTFDPELAATIVGEEMTAL

SEQ ID NO: 1141 - protein, 20 aa, Artificial Sequence
  Synthetic polypeptide
APAWFPAFARPKFSGSLSLL

SEQ ID NO: 1142 - protein, 67 aa, Artificial Sequence
  Synthetic polypeptide
MDEDVLTTLKILIIGESGVGKSSLLLRFTDDTFDPELAATIAHQHYKSKAESSGYGNDRWKLHYRKQ

SEQ ID NO: 1143 - protein, 20 aa, Artificial Sequence
  Synthetic polypeptide
APAWFPAFARPKFSGSLSLL

SEQ ID NO: 1144 - protein, 55 aa, Artificial Sequence
  Synthetic polypeptide
MDEDVLTTLKILIIGESGVGKSSLLLRFTDDTFDPELAATIGVDQTHDLLLNNRI

SEQ ID NO: 1145 - protein, 225 aa, Artificial Sequence
  Synthetic polypeptide
MDEDVLTTLKILIIGESGVGKSSLLLRFTDDTFDPELAATIGVDFKVKTISVDGNKAKLAIWDTAGQERFRTLTPSYYRGAQGVILVYDVTRRDTFVKLDNWLNELETYCTRNDIVNMLVGNKIDKENREVDRNEGLKFARKHSMLFIEASAKTCDGVQCAFEELVEKIIQTPGLWESENQNKGVKLSHREEGQGGGACAHQHYKSKAESSGYGNDRWKLHYRKQ

SEQ ID NO: 1146 - protein, 161 aa, Artificial Sequence
  Synthetic polypeptide
MDEDVLTTLKILIIGESGVGKSSLLLRFTDDTFDPELAATIGVDFKVKTISVDGNKAKLAIWENREVDRNEGLKFARKHSMLFIEASAKTCDGVQCAFEELVEKIIQTPGLWESENQNKGVKLSHREEGQGGGACAHQHYKSKAESSGYGNDRWKLHYRKQ

SEQ ID NO: 1147 - protein, 180 aa, Artificial Sequence
  Synthetic polypeptide
MDEDVLTTLKILIIGESGVGKSSLLLRFTDDTFDPELAATIVYDVTRRDTFVKLDNWLNELETYCTRNDIVNMLVGNKIDKENREVDRNEGLKFARKHSMLFIEASAKTCDGVQCAFEELVEKIIQTPGLWESENQNKGVKLSHREEGQGGGACAHQHYKSKAESSGYGNDRWKLHYRKQ

SEQ ID NO: 1148 - protein, 720 aa, Artificial Sequence
  Synthetic polypeptide
MSKLGISFSEDQQKEKDQLGKAPKKEEAAALRKDISGSDKRSLEKNQINFWRNQMTKRWEPSLNWKTTVNYKGKGSAKEIQEDKHTGKLEKPRPSVSHGRAQLLRKSAEKIEETVSDSSSESEEDEEPPDHRQEASADLPSEYWQIQKLVKYLKGGNQTATVIALCSMRDFSLAQETCQLAIRDVGGLEVLINLLETDEVKCKIGSLKILKEISHNPQIRQNIVDLGGLPIMVNILDSPHKSLKCLAAETIANVAKFKRARRVVRQHGGITKLVALLDCAHDSTKPAQSSLYEARDVEVARCGALALWSCSKSHTNKEAIRKAGGIPLLARLLKTSHENMLIPVVGTLQECASEENYRAAIKAERIIENLVKNLNSENEQLQEHCAMAIYQCAEDKETRDLVRLHGGLKPLASLLNNTDNKERLAAVTGAIWKCSISKENVTKFREYKAIETLVGLLTDQPEEVLVNVVGALGECCQERENRVIVRKCGGIQPLVNLLVGINQALLVNVTKAVGACAVEPESMMIIDRLDGVRLLWSLLKNPHPDVKASAAWALCPCIKNAKDAGEMVRSFVGGLELIVNLLKSDNKEVLASVCAAITNIAKDQENLAVITDHGVVPLLSKLANTNNNKLRHHLAEAISRCCMWGRNRVAFGEHKAVAPLVRYLKSNDTNVHRATAQALYQLSEDADNCITMHENGAVKATQREDDEDEDLYDDPLPLNV

SEQ ID NO: 1149 - protein, 1028 aa, Artificial Sequence
  Synthetic polypeptide
MGVALRKLTQWTAAGHGTGILEITPLNEAILKEIIVFVESFIYKHPQEAKFVFVEPLEWNTSLAPSAFESGYVVSETTVKSEEVDKNGQPLLFLSVPQIKIRSFGQLSRLLLIAKTGKLKEAQACVEANRDPIVKILGSDYNTMKENSIALNILGKITRDDDPESEIKMKIAMLLKQLDLHLLNHSLKHISLEISLSPMTVKKDIELLKRFSGKGNQTVLESIEYTSDYEFSNGCRAPPWRQIRGEICYVLVKPHDGETLCITCSAGGVFLNGGKTDDEGDVNYERKGSIYKNLVTFLREKSPKFSENMSKLGISFSEDQQKEKDQLGKAPKKEEAAALRKDISGSDKRSLEKNQINFWRNQMTKRWEPSLNWKTTVNYKGKGSAKEIQEDKHTGKLEKPRPSVSHGRAQLLRKSAEKIEETVSDSSSESEEDEEPPDHRQEASADLPSEYWQIQKLVKYLKGGNQTATVIALCSMRDFSLAQETCQLAIRDVGGLEVLINLLETDEVKCKIGSLKILKEISHNPQIRQNIVDLGGLPIMVNILDSPHKSLKCLAAETIANVAKFKRARRVVRQHGGITKLVALLDCAHDSTKPAQSSLYEARDVEVARCGALALWSCSKSHTNKEAIRKAGGIPLLARLLKTSHENMLIPVVGTLQECASEENYRAAIKAERIIENLVKNLNSENEQLQEHCAMAIYQCAEDKETRDLVRLHGGLKPLASLLNNTDNKERLAAVTGAIWKCSISKENVTKFREYKAIETLVGLLTDQPEEVLVNVVGALGECCQERENRVIVRKCGGIQPLVNLLVGINQALLVNVTKAVGACAVEPESMMIIDRLDGVRLLWSLLKNPHPDVKASAAWALCPCIKNAKDAGEMVRSFVGGLELIVNLLKSDNKEVLASVCAAITNIAKDQENLAVITDHGVVPLLSKLANTNNNKLRHHLAEAISRCCMWGRNRVAFGEHKAVAPLVRYLKSNDTNVHRATAQALYQLSEDADNCITMHENGAVKATQREDDEDEDLYDDPLPLNV

SEQ ID NO: 1150 - protein, 553 aa, Artificial Sequence
  Synthetic polypeptide
MRDFSLAQETCQLAIRDVGGLEVLINLLETDEVKCKIGSLKILKEISHNPQIRQNIVDLGGLPIMVNILDSPHKSLKCLAAETIANVAKFKRARRVVRQHGGITKLVALLDCAHDSTKPAQSSLYEARDVEVARCGALALWSCSKSHTNKEAIRKAGGIPLLARLLKTSHENMLIPVVGTLQECASEENYRAAIKAERIIENLVKNLNSENEQLQEHCAMAIYQCAEDKETRDLVRLHGGLKPLASLLNNTDNKERLAAVTGAIWKCSISKENVTKFREYKAIETLVGLLTDQPEEVLVNVVGALGECCQERENRVIVRKCGGIQPLVNLLVGINQALLVNVTKAVGACAVEPESMMIIDRLDGVRLLWSLLKNPHPDVKASAAWALCPCIKNAKDAGEMVRSFVGGLELIVNLLKSDNKEVLASVCAAITNIAKDQENLAVITDHGVVPLLSKLANTNNNKLRHHLAEAISRCCMWGRNRVAFGEHKAVAPLVRYLKSNDTNVHRATAQALYQLSEDADNCITMHENGAVKATQREDDEDEDLYDDPLPLNV

SEQ ID NO: 1151 - protein, 174 aa, Artificial Sequence
  Synthetic polypeptide
MSKLGISFSEDQQKEKDQLGKAPKKEEAAALRKDISGSDKRSLEKNQINFWRNQMTKRWEPSLNWKTTVNYKGKGSAKEIQEDKHTGKLEKPRPSVSHGRAQLLRKSAEKIEETVSDSSSESEEDEEPPDHRQEASADLPSEYWQIQKLVKYLKGAVAHTYNPSTLGGRGGWIV

SEQ ID NO: 1152 - protein, 482 aa, Artificial Sequence
  Synthetic polypeptide
MGVALRKLTQWTAAGHGTGILEITPLNEAILKEIIVFVESFIYKHPQEAKFVFVEPLEWNTSLAPSAFESGYVVSETTVKSEEVDKNGQPLLFLSVPQIKIRSFGQLSRLLLIAKTGKLKEAQACVEANRDPIVKILGSDYNTMKENSIALNILGKITRDDDPESEIKMKIAMLLKQLDLHLLNHSLKHISLEISLSPMTVKKDIELLKRFSGKGNQTVLESIEYTSDYEFSNGCRAPPWRQIRGEICYVLVKPHDGETLCITCSAGGVFLNGGKTDDEGDVNYERKGSIYKNLVTFLREKSPKFSENMSKLGISFSEDQQKEKDQLGKAPKKEEAAALRKDISGSDKRSLEKNQINFWRNQMTKRWEPSLNWKTTVNYKGKGSAKEIQEDKHTGKLEKPRPSVSHGRAQLLRKSAEKIEETVSDSSSESEEDEEPPDHRQEASADLPSEYWQIQKLVKYLKGAVAHTYNPSTLGGRGGWIV

SEQ ID NO: 1153 - protein, 339 aa, Artificial Sequence
  Synthetic polypeptide
MKENSIALNILGKITRDDDPESEIKMKIAMLLKQLDLHLLNHSLKHISLEISLSPMTVKKDIELLKRFSGKGNQTVLESIEYTSDYEFSNGCRAPPWRQIRGEICYVLVKPHDGETLCITCSAGGVFLNGGKTDDEGDVNYERKGSIYKNLVTFLREKSPKFSENMSKLGISFSEDQQKEKDQLGKAPKKEEAAALRKDISGSDKRSLEKNQINFWRNQMTKRWEPSLNWKTTVNYKGKGSAKEIQEDKHTGKLEKPRPSVSHGRAQLLRKSAEKIEETVSDSSSESEEDEEPPDHRQEASADLPSEYWQIQKLVKYLKGAVAHTYNPSTLGGRGGWIV

SEQ ID NO: 1154 - protein, 376 aa, Artificial Sequence
  Synthetic polypeptide
MSRLLLIAKTGKLKEAQACVEANRDPIVKILGSDYNTMKENSIALNILGKITRDDDPESEIKMKIAMLLKQLDLHLLNHSLKHISLEISLSPMTVKKDIELLKRFSGKGNQTVLESIEYTSDYEFSNGCRAPPWRQIRGEICYVLVKPHDGETLCITCSAGGVFLNGGKTDDEGDVNYERKGSIYKNLVTFLREKSPKFSENMSKLGISFSEDQQKEKDQLGKAPKKEEAAALRKDISGSDKRSLEKNQINFWRNQMTKRWEPSLNWKTTVNYKGKGSAKEIQEDKHTGKLEKPRPSVSHGRAQLLRKSAEKIEETVSDSSSESEEDEEPPDHRQEASADLPSEYWQIQKLVKYLKGAVAHTYNPSTLGGRGGWIV

SEQ ID NO: 1155 - protein, 1375 aa, Artificial Sequence
  Synthetic polypeptide
MKRKERIARRLEGIENDTQPILLQSCTGLVTHRLLEEDTPRYMRASDPASPHIGRSNEEEETSDSSLEKQTRSKYCTETSGVHGDSPYGSGTMDTHSLESKAERIARYKAERRRQLAEKYGLTLDPEADSEYLSRYTKSRKEPDAVEKRGGKSDKQEESSRDASSLYPGTETMGLRTCAGESKDYALHVGDGSSDPEVLLNIENQRRGQELSATRQAHDLSPAAESSSTFSFSGRDSSFTEVPRSPKHAHSSSLQQAASRSPSFGDPQLSPEARPRCTSHSETPTVDDEEKVDERAKLSVAAKRLLFREMEKSFDEQNVPKRRSRNTAVEQRLRRLQDRSLTQPITTEEVVIAATLQASAHQKALAKDQTNEGKELAEQGEPDSSTLSLAEKLALFNKLSQPVSKAISTRNRIDTRQRRMNARYQTQPVTLGEVEQVQSGKLIPFSPAVNTSVSTVASTVAPMYAGDLRTKPPLDHNASATDYKFSSSIENSDSPVRSILKSQAWQPLVEGSENKGMLREYGETESKRALTGRDSGMEKYGSFEEAEASYPILNRAREGDSHKESKYAVPRRGSLERANPPITHLGDEPKEFSMAKMNAQGNLDLRDRLPFEEKVEVENVMKRKFSLRAAEFGEPTSEQTGTAAGKTIAQTTAPVSWKPQDSSEQPQEKLCKNPCAMFAAGEIKTPTGEGLLDSPSKTMSIKERLALLKKSGEEDWRNRLSRRQEGGKAPASSLHTQEAGRSLIKKRVTESRESQMTIEERKQLITVREEAWKTRGRGAANDSTQFTVAGRMVKKGLASPTAITPVASPICGKTRGTTPVSKPLEDIEARPDMQLESDLKLDRLETFLRRLNNKVGGMHETVLTVTGKSVKEVMKPDDDETFAKFYRSVDYNMPRSPVEMDEDFDVIFDPYAPKLTSSVAEHKRAVRPKRRVQASKNPLKMLAAREDLLQEYTEQRLNVAFMESKRMKVEKMSSNSNFSEVTLAGLASKENFSNVSLRSVNLTEQNSNNSAVPYKRLMLLQIKGRRHVQTRLVEPRASALNSGDCFLLLSPHCCFLWVGEFANVIEKAKASELATLIQTKRELGCRATYIQTIEEGINTHTHAAKDFWKLLGGQTSYQSAGDPKEDELYEAAIIETNCIYRLMDDKLVPDDDYWGKIPKCSLLQPKEVLVFDFGSEVYVWHGKEVTLAQRKIAFQLAKHLWNGTFDYENCDINPLDPGECNPLIPRKGQGRPDWAIFGRLTEHNETILFKEKFLDWTELKRSNEKNPGELAQHKEDPRTDVKAYDVTRMVSMPQTTAGTILDGVNVGRGYGLVEGHDRRQFEITSVSVDVWHILEFDYSRLPKQSIGQFHEGDAYVVKWKFMVSTAAQNPEVPAH

SEQ ID NO: 1156 - protein, 1801 aa, Artificial Sequence
  Synthetic polypeptide
MKRKERIARRLEGIENDTQPILLQSCTGLVTHRLLEEDTPRYMRASDPASPHIGRSNEEEETSDSSLEKQTRSKYCTETSGVHGDSPYGSGTMDTHSLESKAERIARYKAERRRQLAEKYGLTLDPEADSEYLSRYTKSRKEPDAVEKRGGKSDKQEESSRDASSLYPGTETMGLRTCAGESKDYALHVGDGSSDPEVLLNIENQRRGQELSATRQAHDLSPAAESSSTFSFSGRDSSFTEVPRSPKHAHSSSLQQAASRSPSFGDPQLSPEARPSTGKPKHEWFLQKDSEGDTPSLINWPSRVKVREKLVKEESARNSPELASESVTQRRHQPAPVHYVSFQSEHSAFDRVPSKAAGSTRQPIRGYVQPADTGHTAKLVTPETPENASECSWVASATQNVPKPPSLTVLEGDGRDSPVLHVCESKAEEEEGEGEGEEKEEDVCFTEALEQSKKTLLALEGDGLVRSPEDPSRNEDFGKPAVSTVTLEHQKELENVAQPPQAPHQPTERTGRSEMVLYIQSEPVSQDAKPTGHNREASKKRKVRTRSLSDFTGPPQLQALKYKDPASRRELELPSSKTEGPYGEISMLDTKVSVAQLRSAFLASANACRRPELKSRVERSAEGPGLPTGVERERGSRKPRRYFSPGESRKTSERFRTQPITSAERKESDRCTSHSETPTVDDEEKVDERAKLSVAAKRLLFREMEKSFDEQNVPKRRSRNTAVEQRLRRLQDRSLTQPITTEEVVIAATEPIPASCSGGTHPVMARLPSPTVARSAVQPARLQASAHQKALAKDQTNEGKELAEQGEPDSSTLSLAEKLALFNKLSQPVSKAISTRNRIDTRQRRMNARYQTQPVTLGEVEQVQSGKLIPFSPAVNTSVSTVASTVAPMYAGDLRTKPPLDHNASATDYKFSSSIENSDSPVRSILKSQAWQPLVEGSENKGMLREYGETESKRALTGRDSGMEKYGSFEEAEASYPILNRAREGDSHKESKYAVPRRGSLERANPPITHLGDEPKEFSMAKMNAQGNLDLRDRLPFEEKVEVENVMKRKFSLRAAEFGEPTSEQTGTAAGKTIAQTTAPVSWKPQDSSEQPQEKLCKNPCAMFAAGEIKTPTGEGLLDSPSKTMSIKERLALLKKSGEEDWRNRLSRRQEGGKAPASSLHTQEAGRSLIKKRVTESRESQMTIEERKQLITVREEAWKTRGRGAANDSTQFTVAGRMVKKGLASPTAITPVASPICGKTRGTTPVSKPLEDIEARPDMQLESDLKLDRLETFLRRLNNKVGGMHETVLTVTGKSVKEVMKPDDDETFAKFYRSVDYNMPRSPVEMDEDFDVIFDPYAPKLTSSVAEHKRAVRPKRRVQASKNPLKMLAAREDLLQEYTEQRLNVAFMESKRMKVEKMSSNSNFSEVTLAGLASKENFSNVSLRSVNLTEQNSNNSAVPYKRLMLLQIKGRRHVQTRLVEPRASALNSGDCFLLLSPHCCFLWVGEFANVIEKAKASELATLIQTKRELGCRATYIQTIEEGINTHTHAAKDFWKLLGGQTSYQSAGDPKEDELYEAAIIETNCIYRLMDDKLVPDDDYWGKIPKCSLLQPKEVLVFDFGSEVYVWHGKEVTLAQRKIAFQLAKHLWNGTFDYENCDINPLDPGECNPLIPRKGQGRPDWAIFGRLTEHNETILFKEKFLDWTELKRSNEKNPGELAQHKEDPRTDVKAYDVTRMVSMPQTTAGTILDGVNVGRGYGLVEGHDRRQFEITSVSVDVWHILEFDYSRLPKQSIGQFHEGDAYVVKWKFMVSTAAQNPEVPAH

SEQ ID NO: 1157 - protein, 715 aa, Artificial Sequence
  Synthetic polypeptide
MFAAGEIKTPTGEGLLDSPSKTMSIKERLALLKKSGEEDWRNRLSRRQEGGKAPASSLHTQEAGRSLIKKEEGGVADDSAISNLLWRVTESRESQMTIEERKQLITVREEAWKTRGRGAANDSTQFTVAGRMVKKGLASPTAITPVASPICGKTRGTTPVSKPLEDIEARPDMQLESDLKLDRLETFLRRLNNKVGGMHETVLTVTGKSVKEVMKPDDDETFAKFYRSVDYNMPRSPVEMDEDFDVIFDPYAPKLTSSVAEHKRAVRPKRRVQASKNPLKMLAAREDLLQEYTEQRLNVAFMESKRMKVEKMSSNSNFSEVTLAGLASKENFSNVSLRSVNLTEQNSNNSAVPYKRLMLLQIKGRRHVQTRLVEPRASALNSGDCFLLLSPHCCFLWVGEFANVIEKAKASELATLIQTKRELGCRATYIQTIEEGINTHTHAAKDFWKLLGGQTSYQSAGDPKEDELYEAAIIETNCIYRLMDDKLVPDDDYWGKIPKCSLLQPKEVLVFDFGSEVYVWHGKEVTLAQRKIAFQLAKHLWNGTFDYENCDINPLDPGECNPLIPRKGQGRPDWAIFGRLTEHNETILFKEKFLDWTELKRSNEKNPGELAQHKEDPRTDVKAYDVTRMVSMPQTTAGTILDGVNVGRGYGLVEGHDRRQFEITSVSVDVWHILEFDYSRLPKQSIGQFHEGDAYVVKWKFMVSTAAQNPEVPAH

SEQ ID NO: 1158 - protein, 593 aa, Artificial Sequence
  Synthetic polypeptide
MNSSDVSSLKHPSSLASPTAITPVASPICGKTRGTTPVSKPLEDIEARPDMQLESDLKLDRLETFLRRLNNKVGGMHETVLTVTGKSVKEVMKPDDDETFAKFYRSVDYNMPRSPVEMDEDFDVIFDPYAPKLTSSVAEHKRAVRPKRRVQASKNPLKMLAAREDLLQEYTEQRLNVAFMESKRMKVEKMSSNSNFSEVTLAGLASKENFSNVSLRSVNLTEQNSNNSAVPYKRLMLLQIKGRRHVQTRLVEPRASALNSGDCFLLLSPHCCFLWVGEFANVIEKAKASELATLIQTKRELGCRATYIQTIEEGINTHTHAAKDFWKLLGGQTSYQSAGDPKEDELYEAAIIETNCIYRLMDDKLVPDDDYWGKIPKCSLLQPKEVLVFDFGSEVYVWHGKEVTLAQRKIAFQLAKHLWNGTFDYENCDINPLDPGECNPLIPRKGQGRPDWAIFGRLTEHNETILFKEKFLDWTELKRSNEKNPGELAQHKEDPRTDVKAYDVTRMVSMPQTTAGTILDGVNVGRGYGLVEGHDRRQFEITSVSVDVWHILEFDYSRLPKQSIGQFHEGDAYVVKWKFMVSTAAQNPEVPAH

SEQ ID NO: 1159 - protein, 1382 aa, Artificial Sequence
  Synthetic polypeptide
MKRKERIARRLEGIENDTQPILLQSCTGLVTHRLLEEDTPRYMRASDPASPHIGRSNEEEETSDSSLEKQTRSKYCTETSGVHGDSPYGSGTMDTHSLESKAERIARYKAERRRQLAEKYGLTLDPEADSEYLSRYTKSRKEPDAVEKRGGKSDKQEESSRDASSLYPGTETMGLRTCAGESKDYALHVGDGSSDPEVLLNIENQRRGQELSATRQAHDLSPAAESSSTFSFSGRDSSFTEVPRSPKHAHSSSLQQAASRSPSFGDPQLSPEARPRCTSHSETPTVDDEEKVDERAKLSVAAKRLLFREMEKSFDEQNVPKRRSRNTAVEQRLRRLQDRSLTQPITTEEVVIAATLQASAHQKALAKDQTNEGKELAEQGEPDSSTLSLAEKLALFNKLSQPVSKAISTRNRIDTRQRRMNARYQTQPVTLGEVEQVQSGKLIPFSPAVNTSVSTVASTVAPMYAGDLRTKPPLDHNASATDYKFSSSIENSDSPVRSILKSQAWQPLVEGSENKGMLREYGETESKRALTGRDSGMEKYGSFEEAEASYPILNRAREGDSHKESKYAVPRRGSLERANPPITHLGDEPKEFSMAKMNAQGNLDLRDRLPFEEKVEVENVMKRKFSLRAAEFGEPTSEQTGTAAGKTIAQTTAPVSWKPQDSSEQPQEKLCKNPCAMFAAGEIKTPTGEGLLDSPSKTMSIKERLALLKKSGEEDWRNRLSRRQEGGKAPASSLHTQEAGRSLIKKRVTESRESQMTIEERKQLITVREEAWKTRGRGAANDSTQFTVAGRMVKKGLASPTAITPVASPICGKTRGTTPVSKPLEDIEARPDMQLESDLKLDRLETFLRRLNNKVGGMHETVLTVTGKSVKEVMKPDDDETFAKFYRSVDYNMPRSPVEMDEDFDVIFDPYAPKLTSSVAEHKRAVRPKRRVQASKNPLKMLAAREDLLQEYTEQRLNVAFMESKRMKVEKMSSNSNFSEVTLAGLASKENFSNVSLRSVNLTEQNSNNSAVPYKRLMLLQIKGRRHVQTRLVEPRASALNSGDCFLLLSPHCCFLWVGEFANVIEKAKASELATLIQTKRELGCRATYIQTIEEGINTHTHAAKDFWKLLGGQTSYQSAGDPKEDELYEAAIIETNCIYRLMDDKLVPDDDYWGKIPKCSLLQPKEVLVFDFGSEVYVWHGKEVTLAQRKIAFQLAKHLWNGTFDYENCDINPLDPGECNPLIPRKGQGRPDWAIFGRLTEHNETILFKEKFLDWTELKRSNEKNPGELAQHKEDPRTDVKAYDVTRMVSMPQTTAGTILDGVNVGRGYGLVEGHDRRQFEITSVSVDVWHILEFDYSRLPKQSIGQFHEGDAYVVKWKFMVSTAEQKHPASSSSLSCSPL

SEQ ID NO: 1160 - protein, 1808 aa, Artificial Sequence
  Synthetic polypeptide
MKRKERIARRLEGIENDTQPILLQSCTGLVTHRLLEEDTPRYMRASDPASPHIGRSNEEEETSDSSLEKQTRSKYCTETSGVHGDSPYGSGTMDTHSLESKAERIARYKAERRRQLAEKYGLTLDPEADSEYLSRYTKSRKEPDAVEKRGGKSDKQEESSRDASSLYPGTETMGLRTCAGESKDYALHVGDGSSDPEVLLNIENQRRGQELSATRQAHDLSPAAESSSTFSFSGRDSSFTEVPRSPKHAHSSSLQQAASRSPSFGDPQLSPEARPSTGKPKHEWFLQKDSEGDTPSLINWPSRVKVREKLVKEESARNSPELASESVTQRRHQPAPVHYVSFQSEHSAFDRVPSKAAGSTRQPIRGYVQPADTGHTAKLVTPETPENASECSWVASATQNVPKPPSLTVLEGDGRDSPVLHVCESKAEEEEGEGEGEEKEEDVCFTEALEQSKKTLLALEGDGLVRSPEDPSRNEDFGKPAVSTVTLEHQKELENVAQPPQAPHQPTERTGRSEMVLYIQSEPVSQDAKPTGHNREASKKRKVRTRSLSDFTGPPQLQALKYKDPASRRELELPSSKTEGPYGEISMLDTKVSVAQLRSAFLASANACRRPELKSRVERSAEGPGLPTGVERERGSRKPRRYFSPGESRKTSERFRTQPITSAERKESDRCTSHSETPTVDDEEKVDERAKLSVAAKRLLFREMEKSFDEQNVPKRRSRNTAVEQRLRRLQDRSLTQPITTEEVVIAATEPIPASCSGGTHPVMARLPSPTVARSAVQPARLQASAHQKALAKDQTNEGKELAEQGEPDSSTLSLAEKLALFNKLSQPVSKAISTRNRIDTRQRRMNARYQTQPVTLGEVEQVQSGKLIPFSPAVNTSVSTVASTVAPMYAGDLRTKPPLDHNASATDYKFSSSIENSDSPVRSILKSQAWQPLVEGSENKGMLREYGETESKRALTGRDSGMEKYGSFEEAEASYPILNRAREGDSHKESKYAVPRRGSLERANPPITHLGDEPKEFSMAKMNAQGNLDLRDRLPFEEKVEVENVMKRKFSLRAAEFGEPTSEQTGTAAGKTIAQTTAPVSWKPQDSSEQPQEKLCKNPCAMFAAGEIKTPTGEGLLDSPSKTMSIKERLALLKKSGEEDWRNRLSRRQEGGKAPASSLHTQEAGRSLIKKRVTESRESQMTIEERKQLITVREEAWKTRGRGAANDSTQFTVAGRMVKKGLASPTAITPVASPICGKTRGTTPVSKPLEDIEARPDMQLESDLKLDRLETFLRRLNNKVGGMHETVLTVTGKSVKEVMKPDDDETFAKFYRSVDYNMPRSPVEMDEDFDVIFDPYAPKLTSSVAEHKRAVRPKRRVQASKNPLKMLAAREDLLQEYTEQRLNVAFMESKRMKVEKMSSNSNFSEVTLAGLASKENFSNVSLRSVNLTEQNSNNSAVPYKRLMLLQIKGRRHVQTRLVEPRASALNSGDCFLLLSPHCCFLWVGEFANVIEKAKASELATLIQTKRELGCRATYIQTIEEGINTHTHAAKDFWKLLGGQTSYQSAGDPKEDELYEAAIIETNCIYRLMDDKLVPDDDYWGKIPKCSLLQPKEVLVFDFGSEVYVWHGKEVTLAQRKIAFQLAKHLWNGTFDYENCDINPLDPGECNPLIPRKGQGRPDWAIFGRLTEHNETILFKEKFLDWTELKRSNEKNPGELAQHKEDPRTDVKAYDVTRMVSMPQTTAGTILDGVNVGRGYGLVEGHDRRQFEITSVSVDVWHILEFDYSRLPKQSIGQFHEGDAYVVKWKFMVSTAEQKHPASSSSLSCSPL

SEQ ID NO: 1161 - protein, 722 aa, Artificial Sequence
  Synthetic polypeptide
MFAAGEIKTPTGEGLLDSPSKTMSIKERLALLKKSGEEDWRNRLSRRQEGGKAPASSLHTQEAGRSLIKKEEGGVADDSAISNLLWRVTESRESQMTIEERKQLITVREEAWKTRGRGAANDSTQFTVAGRMVKKGLASPTAITPVASPICGKTRGTTPVSKPLEDIEARPDMQLESDLKLDRLETFLRRLNNKVGGMHETVLTVTGKSVKEVMKPDDDETFAKFYRSVDYNMPRSPVEMDEDFDVIFDPYAPKLTSSVAEHKRAVRPKRRVQASKNPLKMLAAREDLLQEYTEQRLNVAFMESKRMKVEKMSSNSNFSEVTLAGLASKENFSNVSLRSVNLTEQNSNNSAVPYKRLMLLQIKGRRHVQTRLVEPRASALNSGDCFLLLSPHCCFLWVGEFANVIEKAKASELATLIQTKRELGCRATYIQTIEEGINTHTHAAKDFWKLLGGQTSYQSAGDPKEDELYEAAIIETNCIYRLMDDKLVPDDDYWGKIPKCSLLQPKEVLVFDFGSEVYVWHGKEVTLAQRKIAFQLAKHLWNGTFDYENCDINPLDPGECNPLIPRKGQGRPDWAIFGRLTEHNETILFKEKFLDWTELKRSNEKNPGELAQHKEDPRTDVKAYDVTRMVSMPQTTAGTILDGVNVGRGYGLVEGHDRRQFEITSVSVDVWHILEFDYSRLPKQSIGQFHEGDAYVVKWKFMVSTAEQKHPASSSSLSCSPL

SEQ ID NO: 1162 - protein, 600 aa, Artificial Sequence
  Synthetic polypeptide
MNSSDVSSLKHPSSLASPTAITPVASPICGKTRGTTPVSKPLEDIEARPDMQLESDLKLDRLETFLRRLNNKVGGMHETVLTVTGKSVKEVMKPDDDETFAKFYRSVDYNMPRSPVEMDEDFDVIFDPYAPKLTSSVAEHKRAVRPKRRVQASKNPLKMLAAREDLLQEYTEQRLNVAFMESKRMKVEKMSSNSNFSEVTLAGLASKENFSNVSLRSVNLTEQNSNNSAVPYKRLMLLQIKGRRHVQTRLVEPRASALNSGDCFLLLSPHCCFLWVGEFANVIEKAKASELATLIQTKRELGCRATYIQTIEEGINTHTHAAKDFWKLLGGQTSYQSAGDPKEDELYEAAIIETNCIYRLMDDKLVPDDDYWGKIPKCSLLQPKEVLVFDFGSEVYVWHGKEVTLAQRKIAFQLAKHLWNGTFDYENCDINPLDPGECNPLIPRKGQGRPDWAIFGRLTEHNETILFKEKFLDWTELKRSNEKNPGELAQHKEDPRTDVKAYDVTRMVSMPQTTAGTILDGVNVGRGYGLVEGHDRRQFEITSVSVDVWHILEFDYSRLPKQSIGQFHEGDAYVVKWKFMVSTAEQKHPASSSSLSCSPL

SEQ ID NO: 1163 - protein, 88 aa, Artificial Sequence
  Synthetic polypeptide
MADGPRCKRRKQANPRRNNVTNYNTVVETNSDSDDEDKLHIVEEESVTDAADCEGVPEDDLPTDQTVLPGRSSEREGNAKNCWEDDMA

SEQ ID NO: 1164 - protein, 96 aa, Artificial Sequence
  Synthetic polypeptide
GDSAASPASGVHVWRGAAGRRGEQGRKVTNYNTVVETNSDSDDEDKLHIVEEESVTDAADCEGVPEDDLPTDQTVLPGRSSEREGNAKNCWEDDMA

SEQ ID NO: 1165 - protein, 71 aa, Artificial Sequence
  Synthetic polypeptide
MKVTNYNTVVETNSDSDDEDKLHIVEEESVTDAADCEGVPEDDLPTDQTVLPGRSSEREGNAKNCWEDDMA

SEQ ID NO: 1166 - protein, 295 aa, Artificial Sequence
  Synthetic polypeptide
MWRCGGRQGLCVLRRLSGGHAHHRAWRWNSNRACERALQYKLGDKIHGFTVNQVTSVPELFLTAVKLTHDDTGARYLHLAREDTNNLFSVQFRTTPMDSTGVPHILEHTVLCGSQKYPCRDPFFKMLNRSLSTFMNAFTASDYTLYPFSTQNPKDFQNLLSVYLDATFFPCLRELDFWQEGWRLEHENPSDPQTPLVFKGVVFNEMKGAFTDNERIFSQHLQNRLLPDHTYSVVSGGDPLCIPELTWEQLKQFHATHYHPSNARCGGSCLQIQALTEAKMGGLLEARSLRPAWVT

SEQ ID NO: 1167 - protein, 263 aa, Artificial Sequence
  Synthetic polypeptide
MRNVALRRAAGPVCAEAAERRVTSVPELFLTAVKLTHDDTGARYLHLAREDTNNLFSVQFRTTPMDSTGVPHILEHTVLCGSQKYPCRDPFFKMLNRSLSTFMNAFTASDYTLYPFSTQNPKDFQNLLSVYLDATFFPCLRELDFWQEGWRLEHENPSDPQTPLVFKGVVFNEMKGAFTDNERIFSQHLQNRLLPDHTYSVVSGGDPLCIPELTWEQLKQFHATHYHPSNARCGGSCLQIQALTEAKMGGLLEARSLRPAWVT

SEQ ID NO: 1168 - protein, 26 aa, Artificial Sequence
  Synthetic polypeptide
CSWCGCWNCSYWPCITADMEAFNDNS

SEQ ID NO: 1169 - protein, 795 aa, Artificial Sequence
  Synthetic polypeptide
MNLQPIFWIGLISSVCCVFAQTDENRCLKANAKSCGECIQAGPNCGWCTNSTFLQEGMPTSARCDDLEALKKKGCPPDDIENPRGSKDIKKNKNVTNRSKGTAEKLKPEDITQIQPQQLVLRLRSGEPQTFTLKFKRAEDYPIDLYYLMDLSYSMKDDLENVKSLGTDLMNEMRRITSDFRIGFGSFVEKTVMPYISTTPAKLRNPCTSEQNCTSPFSYKNVLSLTNKGEVFNELVGKQRISGNLDSPEGGFDAIMQVAVCGSLIGWRNVTRLLVFSTDAGFHFAGDGKLGGIVLPNDGQCHLENNMYTMSHYYDYPSIAHLVQKLSENNIQTIFAVTEEFQPVYKELKNLIPKSAVGTLSANSSNVIQLIIDAYNSLSSEVILENGKLSEGVTISYKSYCKNGVNGTGENGRKCSNISIGDEVQFEISITSNKCPKKDSDSFKIRPLGFTEEVEVILQYICECECQSEGIPESPKCHEGNGTFECGACRCNEGRVGRHCECSTDEVNSEDMDAYCRKENSSEICSNNGECVCGQCVCRKRDNTNEIYSGKFCECDNFNCDRSNGLICGGNGVCKCRVCECNPNYTGSACDCSLDTSTCEASNGQICNGRGICECGVCKCTDPKFQGQTCEMCQTCLGVCAEHKECVQCRAFNKGEKKDTCTQECSYFNITKVESRDKLPQPVQPDPVSHCKEKDVDDCWFYFTYSVNGNNEVMVHVVENPECPTGPDIIPIVAGVVAGIVLIGLALLLIWKLLMIIHDRREFAKFEKEKMNAKWDTNSLRQVPQDVFQKKASLS

SEQ ID NO: 1170 - protein, 955 aa, Artificial Sequence
  Synthetic polypeptide
MKVTVCFGRTRVVVPCGDGHMKVFSLIQQAVTRYRKAIAKDPNYWIQVHRLEHGDGGILDLDDILCDVADDKDRLVAVFDEQDPHHGGDGTSASSTGTQSPEIFGSELGTNNVSAFQPYQATSEIEVTPSVLRANMPLHVRRSSDPALIGLSTSVSDSNFSSEEPSRKNPTRWSTTAGFLKQNTAGSPKTCDRKDEDGTEEDNSRVEPVGHADTGLEHIPNFSLDDMVKLVEVPNDGGPLGIHVVPFSARGGRTLGLLVKRLEKGGKAEHENLFRENDCIVRINDGDLRNRRFEQAQHMFRQAMRTPIIWFHVVPAANKEQYEQLSQSEKNNYYSSRFSPDSQYIDNRSVNSAGLHTVQRAPRLNHPPEQIDSHSRLPHSAHPSGKPPSAPASAPQNVFSTTVSSGYNTKKIGKRLNIQLKKGTEGLGFSITSRDVTIGGSAPIYVKNILPRGAAIQDGRLKAGDRLIEVNGVDLVGKSQEEVVSLLRSTKMEGTVSLLVFRQEDAFHPRELKAEDEDIVLTPDGTREFLTFEVPLNDSGSAGLGVSVKGNRSKENHADLGIFVKSIINGGAASKDGRLRVNDQLIAVNGESLLGKTNQDAMETLRRSMSTEGNKRGMIQLIVARRISKCNELKSPGSPPGPELPIETALDDRERRISHSLYSGIEGLDESPSRNAALSRIMGKYQLSPTVNMPQDDTVIIEDDRLPVLPPHLSDQSSSSSHDDVGFVTADAGTWAKAAISDSADCSLSPDVDPVLAFQREGFGRQIADETKLNTVDDQKAGSPSRDVGPSLGLKKSSSLESLQTAVAEVTLNGDIPFHRPRPRIIRGRGCNESFRAAIDKSYDKPAVDDDDEGMETLEEDTEESSRSGRESVSTASDQPSHSLERQMNGNQEKGDKTDRKKDKTGKEKKKDRDKEKDKMKAKKGMLKGLGDMFSCEVWIIMVPASQGCFEANGN

SEQ ID NO: 1171 - protein, 1029 aa, Artificial Sequence
  Synthetic polypeptide
MKVTVCFGRTRVVVPCGDGHMKVFSLIQQAVTRYRKAIAKDPNYWIQVHRLEHGDGGILDLDDILCDVADDKDRLVAVFDEQDPHHGGDGTSASSTGTQSPEIFGSELGTNNVSAFQPYQATSEIEVTPSVLRANMPLHVRRSSDPALIGLSTSVSDSNFSSEEPSRKNPTRWSTTAGFLKQNTAGSPKTCDRKKDENYRSLPRDTSNWSNQFQRDNARSSLSASHPMVGKWLEKQEQDEDGTEEDNSRVEPVGHADTGLEHIPNFSLDDMVKLVEVPNDGGPLGIHVVPFSARGGRTLGLLVKRLEKGGKAEHENLFRENDCIVRINDGDLRNRRFEQAQHMFRQAMRTPIIWFHVVPAANKEQYEQLSQSEKNNYYSSRFSPDSQYIDNRSVNSAGLHTVQRAPRLNHPPEQIDSHSRLPHSAHPSGKPPSAPASAPQNVFSTTVSSGYNTKKIGKRLNIQLKKGTEGLGFSITSRDVTIGGSAPIYVKNILPRGAAIQDGRLKAGDRLIEVNGVDLVGKSQEEVVSLLRSTKMEGTVSLLVFRQEDAFHPRELKAEDEDIVLTPDGTREFLTFEVPLNDSGSAGLGVSVKGNRSKENHADLGIFVKSIINGGAASKDGRLRVNDQLIAVNGESLLGKTNQDAMETLRRSMSTEGNKRGMIQLIVARRISKCNELKSPGSPPGPELPIETALDDRERRISHSLYSGIEGLDESPSRNAALSRIMGKYQLSPTVNMPQDDTVIIEDDRLPVLPPHLSDQSSSSSHDDVGFVTADAGTWAKAAISDSADCSLSPDVDPVLAFQREGFGRQSMSEKRTKQFSDASQLDFVKTRKSKSMDLGIADETKLNTVDDQKAGSPSRDVGPSLGLKKSSSLESLQTAVAEVTLNGDIPFHRPRPRIIRGRGCNESFRAAIDKSYDKPAVDDDDEGMETLEEDTEESSRSGRESVSTASDQPSHSLERQMNGNQEKGDKTDRKKDKTGKEKKKDRDKEKDKMKAKKGMLKGLGDMFSCEVWIIMVPASQGCFEANGN

SEQ ID NO: 1172 - protein, 1045 aa, Artificial Sequence
  Synthetic polypeptide
MKVTVCFGRTRVVVPCGDGHMKVFSLIQQAVTRYRKAIAKDPNYWIQVHRLEHGDGGILDLDDILCDVADDKDRLVAVFDEQDPHHGGDGTSASSTGTQSPEIFGSELGTNNVSAFQPYQATSEIEVTPSVLRANMPLHVRRSSDPALIGLSTSVSDSNFSSEEPSRKNPTRWSTTAGFLKQNTAGSPKTCDRKKDENYRSLPRDTSNWSNQFQRDNARSSLSASHPMVGKWLEKQEQDEDGTEEDNSRVEPVGHADTGLEHIPNFSLDDMVKLVEVPNDGGPLGIHVVPFSARGGRTLGLLVKRLEKGGKAEHENLFRENDCIVRINDGDLRNRRFEQAQHMFRQAMRTPIIWFHVVPAANKEQYEQLSQSEKNNYYSSRFSPDSQYIDNRSVNSAGLHTVQRAPRLNHPPEQIDSHSRLPHSAHPSGKPPSAPASAPQNVFSTTVSSGYNTKKIGKRLNIQLKKGTEGLGFSITSRDVTIGGSAPIYVKNILPRGAAIQDGRLKAGDRLIEVNGVDLVGKSQEEVVSLLRSTKMEGTVSLLVFRQEDAFHPRELNAEPSQMQIPKETKAEDEDIVLTPDGTREFLTFEVPLNDSGSAGLGVSVKGNRSKENHADLGIFVKSIINGGAASKDGRLRVNDQLIAVNGESLLGKTNQDAMETLRRSMSTEGNKRGMIQLIVARRISKCNELKSPGSPPGPELPIETALDDRERRISHSLYSGIEGLDESPSRNAALSRIMGESGKYQLSPTVNMPQDDTVIIEDDRLPVLPPHLSDQSSSSSHDDVGFVTADAGTWAKAAISDSADCSLSPDVDPVLAFQREGFGRQSMSEKRTKQFSDASQLDFVKTRKSKSMDLGIADETKLNTVDDQKAGSPSRDVGPSLGLKKSSSLESLQTAVAEVTLNGDIPFHRPRPRIIRGRGCNESFRAAIDKSYDKPAVDDDDEGMETLEEDTEESSRSGRESVSTASDQPSHSLERQMNGNQEKGDKTDRKKDKTGKEKKKDRDKEKDKMKAKKGMLKGLGDMFSCEVWIIMVPASQGCFEANGN

SEQ ID NO: 1173 - protein, 999 aa, Artificial Sequence
  Synthetic polypeptide
MKVTVCFGRTRVVVPCGDGHMKVFSLIQQAVTRYRKAIAKDPNYWIQVHRLEHGDGGILDLDDILCDVADDKDRLVAVFDEQDPHHGGDGTSASSTGTQSPEIFGSELGTNNVSAFQPYQATSEIEVTPSVLRANMPLHVRRSSDPALIGLSTSVSDSNFSSEEPSRKNPTRWSTTAGFLKQNTAGSPKTCDRKKDENYRSLPRDTSNWSNQFQRDNARSSLSASHPMVGKWLEKQEQDEDGTEEDNSRVEPVGHADTGLEHIPNFSLDDMVKLVEVPNDGGPLGIHVVPFSARGGRTLGLLVKRLEKGGKAEHENLFRENDCIVRINDGDLRNRRFEQAQHMFRQAMRTPIIWFHVVPAANKEQYEQLSQSEKNNYYSSRFSPDSQYIDNRSVNSAGLHTVQRAPRLNHPPEQIDSHSRLPHSAHPSGKPPSAPASAPQNVFSTTVSSGYNTKKIGKRLNIQLKKGTEGLGFSITSRDVTIGGSAPIYVKNILPRGAAIQDGRLKAGDRLIEVNGVDLVGKSQEEVVSLLRSTKMEGTVSLLVFRQEDAFHPRELKAEDEDIVLTPDGTREFLTFEVPLNDSGSAGLGVSVKGNRSKENHADLGIFVKSIINGGAASKDGRLRVNDQLIAVNGESLLGKTNQDAMETLRRSMSTEGNKRGMIQLIVARRISKCNELKSPGSPPGPELPIETALDDRERRISHSLYSGIEGLDESPSRNAALSRIMGKYQLSPTVNMPQDDTVIIEDDRLPVLPPHLSDQSSSSSHDDVGFVTADAGTWAKAAISDSADCSLSPDVDPVLAFQREGFGRQIADETKLNTVDDQKAGSPSRDVGPSLGLKKSSSLESLQTAVAEVTLNGDIPFHRPRPRIIRGRGCNESFRAAIDKSYDKPAVDDDDEGMETLEEDTEESSRSGRESVSTASDQPSHSLERQMNGNQEKGDKTDRKKDKTGKEKKKDRDKEKDKMKAKKGMLKGLGDMFSCEVWIIMVPASQGCFEANGN

SEQ ID NO: 1174 - protein, 1042 aa, Artificial Sequence
  Synthetic polypeptide
MKVTVCFGRTRVVVPCGDGHMKVFSLIQQAVTRYRKAIAKDPNYWIQVHRLEHGDGGILDLDDILCDVADDKDRLVAVFDEQDPHHGGDGTSASSTGTQSPEIFGSELGTNNVSAFQPYQATSEIEVTPSVLRANMPLHVRRSSDPALIGLSTSVSDSNFSSEEPSRKNPTRWSTTAGFLKQNTAGSPKTCDRKKDENYRSLPRDTSNWSNQFQRDNARSSLSASHPMVGKWLEKQEQDEDGTEEDNSRVEPVGHADTGLEHIPNFSLDDMVKLVEVPNDGGPLGIHVVPFSARGGRTLGLLVKRLEKGGKAEHENLFRENDCIVRINDGDLRNRRFEQAQHMFRQAMRTPIIWFHVVPAANKEQYEQLSQSEKNNYYSSRFSPDSQYIDNRSVNSAGLHTVQRAPRLNHPPEQIDSHSRLPHSAHPSGKPPSAPASAPQNVFSTTVSSGYNTKKIGKRLNIQLKKGTEGLGFSITSRDVTIGGSAPIYVKNILPRGAAIQDGRLKAGDRLIEVNGVDLVGKSQEEVVSLLRSTKMEGTVSLLVFRQEDAFHPRELNAEPSQMQIPKETKAEDEDIVLTPDGTREFLTFEVPLNDSGSAGLGVSVKGNRSKENHADLGIFVKSIINGGAASKDGRLRVNDQLIAVNGESLLGKTNQDAMETLRRSMSTEGNKRGMIQLIVARRISKCNELKSPGSPPGPELPIETALDDRERRISHSLYSGIEGLDESPSRNAALSRIMGKYQLSPTVNMPQDDTVIIEDDRLPVLPPHLSDQSSSSSHDDVGFVTADAGTWAKAAISDSADCSLSPDVDPVLAFQREGFGRQSMSEKRTKQFSDASQLDFVKTRKSKSMDLGIADETKLNTVDDQKAGSPSRDVGPSLGLKKSSSLESLQTAVAEVTLNGDIPFHRPRPRIIRGRGCNESFRAAIDKSYDKPAVDDDDEGMETLEEDTEESSRSGRESVSTASDQPSHSLERQMNGNQEKGDKTDRKKDKTGKEKKKDRDKEKDKMKAKKGMLKGLGDMFSCEVWIIMVPASQGCFEANGN

SEQ ID NO: 1175 - protein, 985 aa, Artificial Sequence
  Synthetic polypeptide
MKVTVCFGRTRVVVPCGDGHMKVFSLIQQAVTRYRKAIAKDPNYWIQVHRLEHGDGGILDLDDILCDVADDKDRLVAVFDEQDPHHGGDGTSASSTGTQSPEIFGSELGTNNVSAFQPYQATSEIEVTPSVLRANMPLHVRRSSDPALIGLSTSVSDSNFSSEEPSRKNPTRWSTTAGFLKQNTAGSPKTCDRKDEDGTEEDNSRVEPVGHADTGLEHIPNFSLDDMVKLVEVPNDGGPLGIHVVPFSARGGRTLGLLVKRLEKGGKAEHENLFRENDCIVRINDGDLRNRRFEQAQHMFRQAMRTPIIWFHVVPAANKEQYEQLSQSEKNNYYSSRFSPDSQYIDNRSVNSAGLHTVQRAPRLNHPPEQIDSHSRLPHSAHPSGKPPSAPASAPQNVFSTTVSSGYNTKKIGKRLNIQLKKGTEGLGFSITSRDVTIGGSAPIYVKNILPRGAAIQDGRLKAGDRLIEVNGVDLVGKSQEEVVSLLRSTKMEGTVSLLVFRQEDAFHPRELKAEDEDIVLTPDGTREFLTFEVPLNDSGSAGLGVSVKGNRSKENHADLGIFVKSIINGGAASKDGRLRVNDQLIAVNGESLLGKTNQDAMETLRRSMSTEGNKRGMIQLIVARRISKCNELKSPGSPPGPELPIETALDDRERRISHSLYSGIEGLDESPSRNAALSRIMGKYQLSPTVNMPQDDTVIIEDDRLPVLPPHLSDQSSSSSHDDVGFVTADAGTWAKAAISDSADCSLSPDVDPVLAFQREGFGRQSMSEKRTKQFSDASQLDFVKTRKSKSMDLGIADETKLNTVDDQKAGSPSRDVGPSLGLKKSSSLESLQTAVAEVTLNGDIPFHRPRPRIIRGRGCNESFRAAIDKSYDKPAVDDDDEGMETLEEDTEESSRSGRESVSTASDQPSHSLERQMNGNQEKGDKTDRKKDKTGKEKKKDRDKEKDKMKAKKGMLKGLGDMFSCEVWIIMVPASQGCFEANGN

SEQ ID NO: 1176 - protein, 970 aa, Artificial Sequence
  Synthetic polypeptide
MKVTVCFGRTRVVVPCGDGHMKVFSLIQQAVTRYRKAIAKDPNYWIQVHRLEHGDGGILDLDDILCDVADDKDRLVAVFDEQDPHHGGDGTSASSTGTQSPEIFGSELGTNNVSAFQPYQATSEIEVTPSVLRANMPLHVRRSSDPALIGLSTSVSDSNFSSEEPSRKNPTRWSTTAGFLKQNTAGSPKTCDRKDEDGTEEDNSRVEPVGHADTGLEHIPNFSLDDMVKLVEVPNDGGPLGIHVVPFSARGGRTLGLLVKRLEKGGKAEHENLFRENDCIVRINDGDLRNRRFEQAQHMFRQAMRTPIIWFHVVPAANKEQYEQLSQSEKNNYYSSRFSPDSQYIDNRSVNSAGLHTVQRAPRLNHPPEQIDSHSRLPHSAHPSGKPPSAPASAPQNVFSTTVSSGYNTKKIGKRLNIQLKKGTEGLGFSITSRDVTIGGSAPIYVKNILPRGAAIQDGRLKAGDRLIEVNGVDLVGKSQEEVVSLLRSTKMEGTVSLLVFRQEDAFHPRELKAEDEDIVLTPDGTREFLTFEVPLNDSGSAGLGVSVKGNRSKENHADLGIFVKSIINGGAASKDGRLRVNDQLIAVNGESLLGKTNQDAMETLRRSMSTEGNKRGMIQLIVARRISKCNELKSPGSPPGPELPIETALDDRERRISHSLYSGIEGLDESPSRNAALSRIMGKYQLSPTVNMPQDDTVIIEDDRLPVLPPHLSDQSSSSSHDDVGFVTADAGTWAKAAISDSADCSLSPDVDPVLAFQREGFGRQSMSEKRTKQFSDASQLDFVKTRKSKSMDLGSSPSRDVGPSLGLKKSSSLESLQTAVAEVTLNGDIPFHRPRPRIIRGRGCNESFRAAIDKSYDKPAVDDDDEGMETLEEDTEESSRSGRESVSTASDQPSHSLERQMNGNQEKGDKTDRKKDKTGKEKKKDRDKEKDKMKAKKGMLKGLGDMFSCEVWIIMVPASQGCFEANGN

SEQ ID NO: 1177 - protein, 758 aa, Artificial Sequence
  Synthetic polypeptide
MVKLVEVPNDGGPLGIHVVPFSARGGRTLGLLVKRLEKGGKAEHENLFRENDCIVRINDGDLRNRRFEQAQHMFRQAMRTPIIWFHVVPAANKEQYEQLSQSEKNNYYSSRFSPDSQYIDNRSVNSAGLHTVQRAPRLNHPPEQIDSHSRLPHSAHPSGKPPSAPASAPQNVFSTTVSSGYNTKKIGKRLNIQLKKGTEGLGFSITSRDVTIGGSAPIYVKNILPRGAAIQDGRLKAGDRLIEVNGVDLVGKSQEEVVSLLRSTKMEGTVSLLVFRQEDAFHPRELKAEDEDIVLTPDGTREFLTFEVPLNDSGSAGLGVSVKGNRSKENHADLGIFVKSIINGGAASKDGRLRVNDQLIAVNGESLLGKTNQDAMETLRRSMSTEGNKRGMIQLIVARRISKCNELKSPGSPPGPELPIETALDDRERRISHSLYSGIEGLDESPSRNAALSRIMGKYQLSPTVNMPQDDTVIIEDDRLPVLPPHLSDQSSSSSHDDVGFVTADAGTWAKAAISDSADCSLSPDVDPVLAFQREGFGRQSMSEKRTKQFSDASQLDFVKTRKSKSMDLVADETKLNTVDDQKAGSPSRDVGPSLGLKKSSSLESLQTAVAEVTLNGDIPFHRPRPRIIRGRGCNESFRAAIDKSYDKPAVDDDDEGMETLEEDTEESSRSGRESVSTASDQPSHSLERQMNGNQEKGDKTDRKKDKTGKEKKKDRDKEKDKMKAKKGMLKGLGDMFSCEVWIIMVPASQGCFEANGN

SEQ ID NO: 1178 - protein, 1012 aa, Artificial Sequence
  Synthetic polypeptide
MKVTVCFGRTRVVVPCGDGHMKVFSLIQQAVTRYRKAIAKDPNYWIQVHRLEHGDGGILDLDDILCDVADDKDRLVAVFDEQDPHHGGDGTSASSTGTQSPEIFGSELGTNNVSAFQPYQATSEIEVTPSVLRANMPLHVRRSSDPALIGLSTSVSDSNFSSEEPSRKNPTRWSTTAGFLKQNTAGSPKTCDRKKDENYRSLPRDTSNWSNQFQRDNARSSLSASHPMVGKWLEKQEQDEDGTEEDNSRVEPVGHADTGLEHIPNFSLDDMVKLVEVPNDGGPLGIHVVPFSARGGRTLGLLVKRLEKGGKAEHENLFRENDCIVRINDGDLRNRRFEQAQHMFRQAMRTPIIWFHVVPAANKEQYEQLSQSEKNNYYSSRFSPDSQYIDNRSVNSAGLHTVQRAPRLNHPPEQIDSHSRLPHSAHPSGKPPSAPASAPQNVFSTTVSSGYNTKKIGKRLNIQLKKGTEGLGFSITSRDVTIGGSAPIYVKNILPRGAAIQDGRLKAGDRLIEVNGVDLVGKSQEEVVSLLRSTKMEGTVSLLVFRQEDAFHPRELNAEPSQMQIPKETKAEDEDIVLTPDGTREFLTFEVPLNDSGSAGLGVSVKGNRSKENHADLGIFVKSIINGGAASKDGRLRVNDQLIAVNGESLLGKTNQDAMETLRRSMSTEGNKRGMIQLIVARRISKCNELKSPGSPPGPELPIETALDDRERRISHSLYSGIEGLDESPSRNAALSRIMGKYQLSPTVNMPQDDTVIIEDDRLPVLPPHLSDQSSSSSHDDVGFVTADAGTWAKAAISDSADCSLSPDVDPVLAFQREGFGRQIADETKLNTVDDQKAGSPSRDVGPSLGLKKSSSLESLQTAVAEVTLNGDIPFHRPRPRIIRGRGCNESFRAAIDKSYDKPAVDDDDEGMETLEEDTEESSRSGRESVSTASDQPSHSLERQMNGNQEKGDKTDRKKDKTGKEKKKDRDKEKDKMKAKKGMLKGLGDMFSCEVWIIMVPASQGCFEANGN

SEQ ID NO: 1179 - protein, 9 aa, Artificial Sequence
  Synthetic polypeptide
MITSQAPQG

SEQ ID NO: 1180 - protein, 93 aa, Artificial Sequence
  Synthetic polypeptide
MNKVDQKFQGSVSFKDVTVGFTQEEWQHLDPSQRALYRDVMLENYSNLVSVGYCAHKPEVIFRLEQGEEPWRLEEEFPSQSFPDLHHKTCSDV

SEQ ID NO: 1181 - protein, 92 aa, Artificial Sequence
  Synthetic polypeptide
MNKVDQKFQGSVSFKDVTVGFTQEEWQHLDPSQRALYRDVMLENYSNLVSVGYCAHKPEVIFRLEQGEEPWRLEEEFPSQSFPAACQFKNCL

SEQ ID NO: 1182 - protein, 147 aa, Artificial Sequence
  Synthetic polypeptide
MPSYTVTVATGSQWFAGTDDYIYLSLVGSAGCSEKHLLDKPFYNDFERGAVDSYDVTVDEELGEIQLVRIEKRKYWLNDDWYLKYITLKTPHGDYIEFPCYRWITGDVEVVLRDGRGTWMKLEITLLSKLSQGQKNKHYMFSLIGGN

SEQ ID NO: 1183 - protein, 158 aa, Artificial Sequence
  Synthetic polypeptide
MPSYTVTVATGSQWFAGTDDYIYLSLVGSAGCSEKHLLDKPFYNDFERGAVDSYDVTVDEELGEIQLVRIEKRKYWLNDDWYLKYITLKTPHGDYIEFPCYRWITGDVEVVLRDGRAKLARDDQIHILKQHRRKELETRQKQYRSQAKRIFQTRLRTY

SEQ ID NO: 1184 - protein, 332 aa, Artificial Sequence
  Synthetic polypeptide
MPSYTVTVATGSQWFAGTDDYIYLSLVGSAGCSEKHLLDKPFYNDFERGAVDSYDVTVDEELGEIQLVRIEKRKYWLNDDWYLKYITLKTPHGDYIEFPCYRWITGDVEVVLRDGRAKLARDDQIHILKQHRRKELETRQKQYRWMEWNPGFPLSIDAKCHKDLPRDIQFDSEKGVDFVLNYSKAMENLFINRFMHMFQSSWNDFADFEKIFVKISNTISERVMNHWQEDLMFGYQFLNGCNPVLIRRCTELPEKLPVTTEMVECSLERQLSLEQEVQQGNIFIVDFELLDGIDANKTDPCTLQFLAAPICLLYKNLANKIVPIAIQVAPLH

SEQ ID NO: 1185 - protein, 125 aa, Artificial Sequence
  Synthetic polypeptide
MGNILTCRVHPSVSLEFDQQQGSVCPSESEIYEAGAGDRMAGAPMAAAVQPAEVTVEVGEDLHMHHVRDREMPEALEFNPSANPEASTIFQRNSQTDVVEIRRSNCTNHVAEAGESLEPRRQRLQ

SEQ ID NO: 1186 - protein, 108 aa, Artificial Sequence
  Synthetic polypeptide
AGAPMAAAVQPAEVTVEVGEDLHMHHVRDREMPEALEFNLSANPEASTIFQRNSQTDALEFNPSANPEASTIFQRNSQTDVVEIRRSNCTNHVAEAGESLEPRRQRLQ

SEQ ID NO: 1187 - protein, 28 aa, Artificial Sequence
  Synthetic polypeptide
MAWWKSWVLQEGFQNKALSSQEMTAPCA

SEQ ID NO: 1188 - protein, 55 aa, Artificial Sequence
  Synthetic polypeptide
MAWWKSWAGSSGGIPEQGTLITGDDSSMCMTAPEDHLVGQDVGVERSDIDNPDPG

SEQ ID NO: 1189 - protein, 8 aa, Artificial Sequence
  Synthetic polypeptide
MAWWKSWE

SEQ ID NO: 1190 - protein, 40 aa, Artificial Sequence
  Synthetic polypeptide
MAWWKSWVKIKIKAEIKKSLKVMKMEIQLNKVSGIQPKQC

SEQ ID NO: 1191 - protein, 82 aa, Artificial Sequence
  Synthetic polypeptide
ELLRISPDLLAAAVISAQEEPLTNIQRASGPTGLLWSCSFTCSHSLCGHHVSRTCPSAMIVSFLKDFPLCHDCKFPEASPAM

SEQ ID NO: 1192 - protein, 190 aa, Artificial Sequence
  Synthetic polypeptide
MFEDVFSDSGNTGNFDRGKKRRLTIIECGCDINMMIDLAKVADLVLMLIDASFGFEMEMFEFLNICQAHGFPKILGVLTHLDSFKHNKQLKKTKKRLKHRFWTEVYQDKVGLTHELVQSLISTYSTIDAKMASSRVTLLSNSKPLGSEAIDNQGCSFTCSHSLCGHHVSRTCPSAMIVSFLKDFPLCHDC

SEQ ID NO: 1193 - protein, 199 aa, Artificial Sequence
  Synthetic polypeptide
MFEDVFSDSGNTGNFDRGKKRRLTIIECGCDINMMIDLAKVADLVLMLIDASFGFEMEMFEFLNICQAHGFPKILGVLTHLDSFKHNKQLKKTKKRLKHRFWTEVYQDKVGLTHELVQSLISTYSTIDAKMASSRVTLLSNSKPLGSEAIDNQGCSFTCSHSLCGHHVSRTCPSAMIVSFLKDFPLCHDCKFPEASPAM

SEQ ID NO: 1194 - protein, 72 aa, Artificial Sequence
  Synthetic polypeptide
MFEDVFSDSGNTGNFDRGKKRRLTIIECGCDINMMIDLAKVADLVRWLTPVIPALRRPRQADHGVRRSRPSW

SEQ ID NO: 1195 - protein, 72 aa, Artificial Sequence; identical to SEQ ID NO: 1194
  Synthetic polypeptide

SEQ ID NO: 1196 - protein, 199 aa, Artificial Sequence; identical to SEQ ID NO: 1193
  Synthetic polypeptide

SEQ ID NO: 1197 - protein, 212 aa, Artificial Sequence
  Synthetic polypeptide
MGFKPPHPEWIMSCSELSFCLSHPRVQDLPLDESNMVIPSDTDFLDTWEAMEDLVITGLVKNIGVSNFNHEQLERLLNKPGLRFKPLTNQIECHPYLTQKNLISFCQSRDVSVTAYRPLGGSCEGVDLIDNPVIKRIAKEHGKSPAQILIRFQIQRNVIVIPGSITPSHIKENIQVFDFELTQHDMDNILSLNRNLRLAMFPMLSFCLLPSM

SEQ ID NO: 1198 - protein, 316 aa, Artificial Sequence
  Synthetic polypeptide
MGDIPAVGLSSWKASPGKVTEAVKEAIDAGYRHFDCAYFYHNEREVGAGIRCKIKEGAVRREDLFIATKLWCTCHKKSLVETACRKSLKALKLNYLDLYLIHWPMGFKPPHPEWIMSCSELSFCLSHPRVQDLPLDESNMVIPSDTDFLDTWEAMEDLVITGLVKNIGVSNFNHEQLERLLNKPGLRFKPLTNQIECHPYLTQKNLISFCQSRDVSVTAYRPLGGSCEGVDLIDNPVIKRIAKEHGKSPAQILIRFQIQRNVIVIPGSITPSHIKENIQVFDFELTQHDMDNILSLNRNLRLAMFPMLSFCLLPSM

SEQ ID NO: 1199 - protein, 259 aa, Artificial Sequence
  Synthetic polypeptide
MGDIPAVGLSSWKASPGKVTEAVKEAIDAGYRHFDCAYFYHNEREVGAGIRCKIKEGAVRREDLFIATKLWCTCHKKSLVETACRKSLKALKLNYLDLYLIHWPMGFKPPHPEWIMSCSELSFCLSHPRVQDLPLDESNMVIPSDTDFLDTWEAMEDLVITGLVKNIGVSNFNHEQLERLLNKPGLRFKPLTNQILIRFQIQRNVIVIPGSITPSHIKENIQVFDFELTQHDMDNILSLNRNLRLAMFPMLSFCLLPSM

SEQ ID NO: 1200 - protein, 218 aa, Artificial Sequence
  Synthetic polypeptide
MGDIPAVGLSSWKASPGKVTEAVKEAIDAGYRHFDCAYFYHNEREVGAGIRCKIKEGAVRREDLFIATKLWCTCHKKSLVETACRKSLKALKLNYLDLYLIHWPMGFKPPHPEWIMSCSELSFCLSHPRVQDLPLDESNMVIPSDTDFLDTWEILIRFQIQRNVIVIPGSITPSHIKENIQVFDFELTQHDMDNILSLNRNLRLAMFPMLSFCLLPSM

SEQ ID NO: 1201 - protein, 131 aa, Artificial Sequence
  Synthetic polypeptide
MLSPKIRQARRARSKSLVMGEQSRSPGRMPCPHRLGPVLKAGWLKKQRSIMKNWQQRWFVLRGDQLFYYKDKDEIKPQGFISLQGTQVTELPPGPEDPGKHLFEISPEQKLEFNKDRPNLSLTHLTVPGAK

SEQ ID NO: 1202 - protein, 137 aa, Artificial Sequence
  Synthetic polypeptide
MLPTASSKRRTFAARYFTRSKSLVMGEQSRSPGRMPCPHRLGPVLKAGWLKKQRSIMKNWQQRWFVLRGDQLFYYKDKDEIKPQGFISLQGTQVTELPPGPEDPGKHLFEISPEQKLEFNKDRPNLSLTHLTVPGAK

SEQ ID NO: 1203 - protein, 17 aa, Artificial Sequence
  Synthetic polypeptide
SETSSPRSCFLLWNYST

SEQ ID NO: 1204 - protein, 2238 aa, Artificial Sequence
  Synthetic polypeptide
MEAEDLSKAEDRNEDPGSKNEGQLAAVQPDVPHGGQSSSPTALWDMLERKFLEYQQLTHKSPIERQKSLLSLLPLFLKAWEHSVGIICFPSLQRLAEDVSDQLAQQLQKALVGKPAEQARLAAGQLLWWKGDVDQDGYLLLKSVYVLTGTDSETLGRVAESGLPALLLQCLYLFFVFPLDKDELLESDLQVQKMFVQMLLNICSDSQGLEGLLSGSELQSLLIATTCLREHSCCFWKEPTFCVLRAISKAQNLSIIQYLQATDCVRLSLQNLSRLTDTLPAPEVSEAVSLILGFVKDSYPVSSALFLEFENSEGYPLLLKVLLRYDGLTQSEVDPHLEELLGLVVWLTTCGRSELKVFDSITYPQLEGFKFHHEASGVTVKNLQAFQVLQNVFHKASDSVLCIQVLSVIRTMWAWNARNFFLLEWTLQPISQFVEIMPLKPAPVQEHFFQLLEALVFELHYVPHEILRKVQHLIKESPGPSCTLMALQSILSIAGGDPLFTDIFRDSGLLGLLLAQLRKQAKIMRKSGNKVSTPGVQDPERELTCVMLRIVVTLLKGSVRNAVVLKDHGMVPFIKIFLDDECYREASLSILEQLSAINAEEYMSIIVGALCSSTQGELQLKLDLLKSLLRILVTPKGRAAFRVSSGFNGLLSLLSDLEGSLQEPPLQAWGAVSPRQTLELVLYTLCAVSAALHWDPVNGYFFRRNGLFEKLAEDLCLLGCFGALEEEGNLLRSWVDTKARPFADLLGTAFSSSGSLPPRIQSCLQILGFLDSMASGTLHLRGDLKESLRTKQGPVVDVQKGETGSDPQRNFKQWPDLEERMDEGDAAIMHPGVVCIMVRLLPRLYHEDHPQLSEEIQCSLASHIQSLVKSEKNRQVMCEAGLLGTLMASCHRALVTSGSPLHSRLIRIFEKLASQAIEPDVLRQFLGLGIPSSLSATTKILDSSHTHRGNPGCSGSQTAQGLAEGPWPAAPDAGLHPGVTQAPQPLGESQDSTTALQTALSLISMTSPRNLQPQRAALAPSFVEFDMSVEGYGCLFIPTLSTVMGTSTEYSVSGGIGTGATRPFPPPGGLTFSCWFLISRHGAATEGHPLRFLTLVRHLARTEQPFVCFSVSLCPDDLSLVVSTEEKEFQPLDVMEPEDDSEPSAGCQLQVRCGQLLACGQWHHLAVVVTKEMKRHCTVSTCLDGQVIGSAKMLYIQALPGPFLSMDPSAFVDVYGYIATPRVWKQKSSLIWRLGPTYLFEEAISMETLEVINKLGPRYCGNFQAVHVQGEDLDSEATPFVAEERVSFGLHIASSSITSVADIRNAYNEVDSRLIAKEMNISSRDNAMPVFLLRNCAGHLSGSLRTIGAVAVGQLGVRVFHSSPAASSLDFIGGPAILLGLISLATDDHTMYAAVKVLHSVLTSNAMCDFLMQHICGYQIMAFLLRKKASLLNHRIFQLILSVAGTVELGFRSSAITNTGVFQHILCNFELWMNTADNLELSLFSHLLEILQSPREGPRNAEAAHQAQLIPKLIFLFNEPSLIPSKISTIIGILACQLRGHFSTQDLLRIGLFVVYTLKPSSVNERQICMDGALDPSLPAGSQTSGKTIWLRNQLLEMLLSVISSPQLHLSSESKEEMFLKLGPDWFLLLLQGHLHASTTVLALKLLLYFLASPSLRTRFRDGLCAGSWVERSTEGVDIVMDNLKSQSPLPEQSPCLLPGFRVLNDFLAHHVHIPEVYLIVSTFFLQTPLTELMDGPKDSLDAMLQWLLQRHHQEEVLQAGLCTEGALLLLEMLKATMSQPLAGSEDGAWAQTFPASVLQFLSLVHRTYPQDPAWRAPEFLQTLAIAAFPLGAQKGVGAESTRNTSSPEAAAEGDSTVEGLQAPTKAHPARRKLREFTQLLLRELLLGASSPKQWLPLEVLLEASPDHATSQQKRDFQSEVLLSAMELFHMTSGGDAAMFRDGKEPQPSAEAAAAPSLANISCFTQKLVEKLYSGMFSADPRHILLFILEHIMVVIETASSQRDTVLSTLYSSLNKVILYCLSKPQQSLSECLGLLSILGFLQEHWDVVFATYNSNISFLLCLMHCLLLLNERSYPEGFGLEPKPRMSTYHQVFLSPNEDVKEKREDLPSLSDVQHNIQKTVQTLWQQLVAQRQQTLEDAFKIDLSVKPGEREVKIEEVTPLWEETMLKAWQHYLASEKKSLASRSNVAHHSKVTLWSGSLSSAMKLMPGRQAKDPECKTEAFLEYLGTCPLKVRRDY

SEQ ID NO: 1205 - protein, 17 aa, Artificial Sequence
  Synthetic polypeptide
SETSSPRSCFLLWNYST

SEQ ID NO: 1206 - protein, 2395 aa, Artificial Sequence
  Synthetic polypeptide
MEAEDLSKAEDRNEDPGSKNEGQLAAVQPDVPHGGQSSSPTALWDMLERKFLEYQQLTHKSPIERQKSLLSLLPLFLKAWEHSVGIICFPSLQRLAEDVSDQLAQQLQKALVGKPAEQARLAAGQLLWWKGDVDQDGYLLLKSVYVLTGTDSETLGRVAESGLPALLLQCLYLFFVFPLDKDELLESDLQVQKMFVQMLLNICSDSQGLEGLLSGSELQSLLIATTCLREHSCCFWKEPTFCVLRAISKAQNLSIIQYLQATDCVRLSLQNLSRLTDTLPAPEVSEAVSLILGFVKDSYPVSSALFLEFENSEGYPLLLKVLLRYDGLTQSEVDPHLEELLGLVVWLTTCGRSELKVFDSITYPQLEGFKFHHEASGVTVKNLQAFQVLQNVFHKASDSVLCIQVLSVIRTMWAWNARNFFLLEWTLQPISQFVEIMPLKPAPVQEHFFQLLEALVFELHYVPHEILRKVQHLIKESPGPSCTLMALQSILSIAGGDPLFTDIFRDSGLLGLLLAQLRKQAKIMRKSGNKVSTPGVQDPERELTCVMLRIVVTLLKGSVRNAVVLKDHGMVPFIKIFLDDECYREASLSILEQLSAINAEEYMSIIVGALCSSTQGELQLKLDLLKSLLRILVTPKGRAAFRVSSGFNGLLSLLSDLEGSLQEPPLQAWGAVSPRQTLELVLYTLCAVSAALHWDPVNGYFFRRNGLFEKLAEDLCLLGCFGALEEEGNLLRSWVDTKARPFADLLGTAFSSSGSLPPRIQSCLQILGFLDSMASGTLHLRGDLKESLRTKQGPVVDVQKGETGSDPQRNFKQWPDLEERMDEGDAAIMHPGVVCIMVRLLPRLYHEDHPQLSEEIQCSLASHIQSLVKSEKNRQVMCEAGLLGTLMASCHRALVTSGSPLHSRLIRIFEKLASQAIEPDVLRQFLGLGIPSSLSATTKILDSSHTHRGNPGCSGSQTAQGLAEGPWPAAPDAGLHPGVTQAPQPLGESQDSTTALQTALSLISMTSPRNLQPQRAALAPSFVEFDMSVEGYGCLFIPTLSTVMGTSTEYSVSGGIGTGATRPFPPPGGLTFSCWFLISRHGAATEGHPLRFLTLVRHLARTEQPFVCFSVSLCPDDLSLVVSTEEKEFQPLDVMEPEDDSEPSAGCQLQVRCGQLLACGQWHHLAVVVTKEMKRHCTVSTCLDGQVIGSAKMLYIQALPGPFLSMDPSAFVDVYGYIATPRVWKQKSSLIWRLGPTYLFEEAISMETLEVINKLGPRYCGNFQAVHVQGEDLDSEATPFVAEERVSFGLHIASSSITSVADIRNAYNEVDSRLIAKEMNISSRDNAMPVFLLRNCAGHLSGSLRTIGAVAVGQLGVRVFHSSPAASSLDFIGGPAILLGLISLATDDHTMYAAVKVLHSVLTSNAMCDFLMQHICGYQIMAFLLRKKASLLNHRIFQLILSVAGTVELGFRSSAITNTGVFQHILCNFELWMNTADNLELSLFSHLLEILQSPREGPRNAEAAHQAQLIPKLIFLFNEPSLIPSKISTIIGILACQLRGHFSTQDLLRIGLFVVYTLKPSSVNERQICMDGALDPSLPAGSQTSGKTIWLRNQLLEMLLSVISSPQLHLSSESKEEMFLKLGPDWFLLLLQGHLHASTTVLALKLLLYFLASPSLRTRFRDGLCAGSWVERSTEGVDIVMDNLKSQSPLPEQSPCLLPGFRVLNDFLAHHVHIPEVYLIVSTFFLQTPLTELMDGPKDSLDAMLQWLLQRHHQEEVLQAGLCTEGALLLLEMLKATMSQPLAGSEDGAWAQTFPASVLQFLSLVHRTYPQDPAWRAPEFLQTLAIAAFPLGAQKGVGAESTRNTSSPEAAAEGDSTVEGLQAPTKAHPARRKLREFTQLLLRELLLGASSPKQWLPLEVLLEASPDHATSQQKRDFQSEVLLSAMELFHMTSGGDAAMFRDGKEPQPSAEAAAAPSLANISCFTQKLVEKLYSGMFSADPRHILLFILEHIMVVIETASSQRDTVLSTLYSSLNKVILYCLSKPQQSLSECLGLLSILGFLQEHWDVVFATYNSNISFLLCLMHCLLLLNERSYPEGFGLEPKPRMSTYHQVFLSPNEDVKEKREDLPSLSDVQHNIQKTVQTLWQQLVAQRQQTLEDAFKIDLSVKPGEREVKIEEVTPLWEETMLKAWQHYLASEKKSLASRSNVAHHSKVTLWSGSLSSAMKLMPGRQAKDPECKTEDFVSCIENYRRRGQELYASLYKDHVQRRKCGNIKAANAWARIQEQLFGELGLWSQGEETKPCSPWELDWREGPARMRKRIKRLSPLEALSSGRHKESQDKNDHISQTNAENQDELTLREAEGEPDEVGVDCTQLTFFPALHESLHSEDFLELCRERQVILQELLDKEKPQFSHL

SEQ ID NO: 1207 - protein, 157 aa, Artificial Sequence
  Synthetic polypeptide
MNLGVSMLRILFLLDVGGAQVLATGKTPGAEIDFKYALIGTAVGVAISAGFLALKICMIRRHLFDDDSSDLKSTPGGLSDTIPLKKRAPRFLGFPAGIKVPCSSAQSPRPQGRSCLGTFALAVFCNWNALCQKAASLDPLFLQIPASVSPLHHGGPI

SEQ ID NO: 1208 - protein, 261 aa, Artificial Sequence
  Synthetic polypeptide
VDLLRAGEVPKPFPTHYKDLWDNKHVKMPCSEQNLYPVEDENGERTAGSRWELIQTALLNKFTRPQNLKDAILKYNVAYSKKWDFTALIDFWDKVLEEAEAQHLYQSILPDMVKIALCLPNICTQPIPLLKQKMNHSITMSQEQIASLLANAFFCTFPRRNAKMKSEYSSYPDINFNRLFEGRSSRKPEKLKTLFCYFRRVTEKKPTGLVTFTRQSLEDFPEWERCEKPLTRLHVTYEGTIEENGQGMLQVQVLLESFPEP

SEQ ID NO: 1209 - protein, 109 aa, Artificial Sequence
  Synthetic polypeptide
MAGAPMAAAVQPAEVTVEVGEDLHMHHVRDREMPEALEFNLSANPEASTIFQRNSQTDALEFNPSANPEASTIFQRNSQTDVVEIRRSNCTNHVAEAGESLEPRRQRLQ

SEQ ID NO: 1210 - protein, 125 aa, Artificial Sequence; identical to SEQ ID NO: 1185
  Synthetic polypeptide

SEQ ID NO: 1211 - protein, 132 aa, Artificial Sequence
  Synthetic polypeptide
FDQQQGSVCPSESEIYEAGAGDRMAGAPMAAAVQPAEVTVEVGEDLHMHHVRDREMPEALEFNLSANPEASTIFQRNSQTDALEFNPSANPEASTIFQRNSQTDVVEIRRSNCTNHVAEAGESLEPRRQRLQ

SEQ ID NO: 1212 - protein, 172 aa, Artificial Sequence
  Synthetic polypeptide
MEGGGGSGNKTTGGLAGFFGAGGAGYSHADLAGVPLTGMNPLSPYLNVDPRYLVQDTDEFILPTGANKTRGRFELAFFTIGGCCMTGAAFGAMNGLRLGLKETQNMAWSKPRNVQILNMVTRQGALWANTLGSLALLYSAFGVIIEKTRGAEDDLNTVAAGTMTGMLYKCTA

SEQ ID NO: 1213 - protein, 135 aa, Artificial Sequence
  Synthetic polypeptide
MEGGGGSGNKTTGGLAGFFGAGGAGYSHADLAGVPLTGMNPLSPYLNVDPRYLVQDTDEFILPTGANKTRGRFELAFFTIGGCCMTGALWANTLGSLALLYSAFGVIIEKTRGAEDDLNTVAAGTMTGMLYKCTA

SEQ ID NO: 1214 - protein, 174 aa, Artificial Sequence
  Synthetic polypeptide
MEGGGGSGNKTTGGLAGFFGAGGAGYSHADLAGVPLTGMNPLSPYLNVDPRYLVQDTDEFILPTGANKTRGRFELAFFTIGGCCMTGAAFGAMNGLRLGLKETQNMAWSKPRNVQILNMVTRQGALWANTLGSLALLYSAFGVIIEKTRGAEDDLNTVAAGTMTGMLYKCTEEV

SEQ ID NO: 1215 - protein, 137 aa, Artificial Sequence
  Synthetic polypeptide
MEGGGGSGNKTTGGLAGFFGAGGAGYSHADLAGVPLTGMNPLSPYLNVDPRYLVQDTDEFILPTGANKTRGRFELAFFTIGGCCMTGALWANTLGSLALLYSAFGVIIEKTRGAEDDLNTVAAGTMTGMLYKCTEEV

SEQ ID NO: 1216 - protein, 173 aa, Artificial Sequence
  Synthetic polypeptide
MEGGGGSGNKTTGGLAGFFGAGGAGYSHADLAGVPLTGMNPLSPYLNVDPRYLVQDTDEFILPTGANKTRGRFELAFFTIGGCCMTGAAFGAMNGLRLGLKETQNMAWSKPRNVQILNMVTRQGALWANTLGSLALLYSAFGVIIEKTRGAEDDLNTVAAGTMTGMLYKCTAC

SEQ ID NO: 1217 - protein, 136 aa, Artificial Sequence
  Synthetic polypeptide
MEGGGGSGNKTTGGLAGFFGAGGAGYSHADLAGVPLTGMNPLSPYLNVDPRYLVQDTDEFILPTGANKTRGRFELAFFTIGGCCMTGALWANTLGSLALLYSAFGVIIEKTRGAEDDLNTVAAGTMTGMLYKCTAC

SEQ ID NO: 1218 - protein, 188 aa, Artificial Sequence
  Synthetic polypeptide
MEGGGGSGNKTTGGLAGFFGAGGAGYSHADLAGVPLTGMNPLSPYLNVDPRYLVQDTDEFILPTGANKTRGRFELAFFTIGGCCMTGAAFGAMNGLRLGLKETQNMAWSKPRNVQILNMVTRQGALWANTLGSLALLYSAFGVIIEKTRGAEDDLNTVAAGTMTGMLYKCTDGVSPCWPGWSPAPNRE

SEQ ID NO: 1219 - protein, 151 aa, Artificial Sequence
  Synthetic polypeptide
MEGGGGSGNKTTGGLAGFFGAGGAGYSHADLAGVPLTGMNPLSPYLNVDPRYLVQDTDEFILPTGANKTRGRFELAFFTIGGCCMTGALWANTLGSLALLYSAFGVIIEKTRGAEDDLNTVAAGTMTGMLYKCTDGVSPCWPGWSPAPNRE

SEQ ID NO: 1220 - protein, 177 aa, Artificial Sequence
  Synthetic polypeptide
MEGGGGSGNKTTGGLAGFFGAGGAGYSHADLAGVPLTGMNPLSPYLNVDPRYLVQDTDEFILPTGANKTRGRFELAFFTIGGCCMTGAAFGAMNGLRLGLKETQNMAWSKPRNVQILNMVTRQGALWANTLGSLALLYSAFGVIIEKTRGAEDDLNTVAAGTMTGMLYKCTGWSAVA

SEQ ID NO: 1221 - protein, 140 aa, Artificial Sequence
  Synthetic polypeptide
MEGGGGSGNKTTGGLAGFFGAGGAGYSHADLAGVPLTGMNPLSPYLNVDPRYLVQDTDEFILPTGANKTRGRFELAFFTIGGCCMTGALWANTLGSLALLYSAFGVIIEKTRGAEDDLNTVAAGTMTGMLYKCTGWSAVA

SEQ ID NO: 1222 - protein, 185 aa, Artificial Sequence
  Synthetic polypeptide
MEGGGGSGNKTTGGLAGFFGAGGAGYSHADLAGVPLTGMNPLSPYLNVDPRYLVQDTDEFILPTGANKTRGRFELAFFTIGGCCMTGAAFGAMNGLRLGLKETQNMAWSKPRNVQILNMVTRQGALWANTLGSLALLYSAFGVIIEKTRGAEDDLNTVAAGTMTGMLYKCTGSEERLGPATHRLR

SEQ ID NO: 1223 - protein, 148 aa, Artificial Sequence
  Synthetic polypeptide
MEGGGGSGNKTTGGLAGFFGAGGAGYSHADLAGVPLTGMNPLSPYLNVDPRYLVQDTDEFILPTGANKTRGRFELAFFTIGGCCMTGALWANTLGSLALLYSAFGVIIEKTRGAEDDLNTVAAGTMTGMLYKCTGSEERLGPATHRLR

SEQ ID NO: 1224 - protein, 185 aa, Artificial Sequence
  Synthetic polypeptide
MEGGGGSGNKTTGGLAGFFGAGGAGYSHADLAGVPLTGMNPLSPYLNVDPRYLVQDTDEFILPTGANKTRGRFELAFFTIGGCCMTGAAFGAMNGLRLGLKETQNMAWSKPRNVQILNMVTRQGALWANTLGSLALLYSAFGVIIEKTRGAEDDLNTVAAGTMTGMLYKCTVAPSHVPTLCAATM

SEQ ID NO: 1225 - protein, 148 aa, Artificial Sequence
  Synthetic polypeptide
MEGGGGSGNKTTGGLAGFFGAGGAGYSHADLAGVPLTGMNPLSPYLNVDPRYLVQDTDEFILPTGANKTRGRFELAFFTIGGCCMTGALWANTLGSLALLYSAFGVIIEKTRGAEDDLNTVAAGTMTGMLYKCTVAPSHVPTLCAATM

SEQ ID NO: 1226 - protein, 125 aa, Artificial Sequence
  Synthetic polypeptide
MGNILTCRVHPSVSLEFDQQQGSVCPSESEIYEAGAEDRMAGAPMAAAVQPAEVTVEVGEDLHMHHVRDREMPEALEFNPSANPEASTIFQRNSQTDVVEIRRSNCTNHVAEAGESLEPRRQRLQ

SEQ ID NO: 1227 - protein, 177 aa, Artificial Sequence; identical to SEQ ID NO: 1220
  Synthetic polypeptide

SEQ ID NO: 1228 - protein, 140 aa, Artificial Sequence; identical to SEQ ID NO: 1221
  Synthetic polypeptide

SEQ ID NO: 1229 - protein, 35 aa, Artificial Sequence
  Synthetic polypeptide
RGKRQQNHRGIGRLFRSRRSRLLARGFGWRPAFAL

SEQ ID NO: 1230 - protein, 129 aa, Artificial Sequence
  Synthetic polypeptide
MEGGGGSGNKTTGGLAGFFGAGGAGYSHADLAGVPLTGMNPLSPYLNVDPRYLVQDTDEFILPTGANKTRGRFELAFFTIGGCCMTALLYSAFGVIIEKTRGAEDDLNTVAAGTMTGMLYKCTGWSAVA

SEQ ID NO: 1231 - protein, 35 aa, Artificial Sequence; identical to SEQ ID NO: 1229
  Synthetic polypeptide

SEQ ID NO: 1232 - protein, 189 aa, Artificial Sequence
  Synthetic polypeptide
MEGGGGSGNKTTGGLAGFFGAGGAGYSHADLAGVPLTGMNPLSPYLNVDPRYLVQDTDEFILPTGANKTRGRFELAFFTIGGCCMTGAAFGAMNGLRLGLKETQNMAWSKPRNVQILNMVTRQGALWANTLGSLALLYSAFGVIIEKTRGAEDDLNTVAAGTMTGMLYKCTEMEQQSLDDSAPVHSMVY

SEQ ID NO: 1233 - protein, 141 aa, Artificial Sequence
  Synthetic polypeptide
MEGGGGSGNKTTGGLAGFFGAGGAGYSHADLAGVPLTGMNPLSPYLNVDPRYLVQDTDEFILPTGANKTRGRFELAFFTIGGCCMTALLYSAFGVIIEKTRGAEDDLNTVAAGTMTGMLYKCTEMEQQSLDDSAPVHSMVY

SEQ ID NO: 1234 - protein, 152 aa, Artificial Sequence
  Synthetic polypeptide
MEGGGGSGNKTTGGLAGFFGAGGAGYSHADLAGVPLTGMNPLSPYLNVDPRYLVQDTDEFILPTGANKTRGRFELAFFTIGGCCMTGALWANTLGSLALLYSAFGVIIEKTRGAEDDLNTVAAGTMTGMLYKCTEMEQQSLDDSAPVHSMVY

SEQ ID NO: 1235 - protein, 35 aa, Artificial Sequence; identical to SEQ ID NO: 1229
  Synthetic polypeptide

SEQ ID NO: 1236 - protein, 176 aa, Artificial Sequence
  Synthetic polypeptide
MEGGGGSGNKTTGGLAGFFGAGGAGYSHADLAGVPLTGMNPLSPYLNVDPRYLVQDTDEFILPTGANKTRGRFELAFFTIGGCCMTGAAFGAMNGLRLGLKETQNMAWSKPRNVQILNMVTRQGALWANTLGSLALLYSAFGVIIEKTRGAEDDLNTVAAGTMTGMLYKCTGLPVP

SEQ ID NO: 1237 - protein, 128 aa, Artificial Sequence
  Synthetic polypeptide
MEGGGGSGNKTTGGLAGFFGAGGAGYSHADLAGVPLTGMNPLSPYLNVDPRYLVQDTDEFILPTGANKTRGRFELAFFTIGGCCMTALLYSAFGVIIEKTRGAEDDLNTVAAGTMTGMLYKCTGLPVP

SEQ ID NO: 1238 - protein, 139 aa, Artificial Sequence
  Synthetic polypeptide
MEGGGGSGNKTTGGLAGFFGAGGAGYSHADLAGVPLTGMNPLSPYLNVDPRYLVQDTDEFILPTGANKTRGRFELAFFTIGGCCMTGALWANTLGSLALLYSAFGVIIEKTRGAEDDLNTVAAGTMTGMLYKCTGLPVP

SEQ ID NO: 1239 - protein, 174 aa, Artificial Sequence; identical to SEQ ID NO: 1214
  Synthetic polypeptide

SEQ ID NO: 1240 - protein, 137 aa, Artificial Sequence; identical to SEQ ID NO: 1215
  Synthetic polypeptide

SEQ ID NO: 1241 - protein, 35 aa, Artificial Sequence; identical to SEQ ID NO: 1229
  Synthetic polypeptide

SEQ ID NO: 1242 - protein, 126 aa, Artificial Sequence
  Synthetic polypeptide
MEGGGGSGNKTTGGLAGFFGAGGAGYSHADLAGVPLTGMNPLSPYLNVDPRYLVQDTDEFILPTGANKTRGRFELAFFTIGGCCMTALLYSAFGVIIEKTRGAEDDLNTVAAGTMTGMLYKCTEEV

SEQ ID NO: 1243 - protein, 35 aa, Artificial Sequence; identical to SEQ ID NO: 1229
  Synthetic polypeptide

SEQ ID NO: 1244 - protein, 173 aa, Artificial Sequence
  Synthetic polypeptide
MEGGGGSGNKTTGGLAGFFGAGGAGYSHADLAGVPLTGMNPLSPYLNVDPRYLVQDTDEFILPTGANKTRGRFELAFFTIGGCCMTGAAFGAMNGLRLGLKETQNMAWSKPRNVQILNMVTRQGALWANTLGSLALLYSAFGVIIEKTRGAEDDLNTVAAGTMTGMLYKCTGT

SEQ ID NO: 1245 - protein, 125 aa, Artificial Sequence
  Synthetic polypeptide
MEGGGGSGNKTTGGLAGFFGAGGAGYSHADLAGVPLTGMNPLSPYLNVDPRYLVQDTDEFILPTGANKTRGRFELAFFTIGGCCMTALLYSAFGVIIEKTRGAEDDLNTVAAGTMTGMLYKCTGT

SEQ ID NO: 1246 - protein, 136 aa, Artificial Sequence
  Synthetic polypeptide
MEGGGGSGNKTTGGLAGFFGAGGAGYSHADLAGVPLTGMNPLSPYLNVDPRYLVQDTDEFILPTGANKTRGRFELAFFTIGGCCMTGALWANTLGSLALLYSAFGVIIEKTRGAEDDLNTVAAGTMTGMLYKCTGT

SEQ ID NO: 1247 - protein, 35 aa, Artificial Sequence; identical to SEQ ID NO: 1229
  Synthetic polypeptide

SEQ ID NO: 1248 - protein, 172 aa, Artificial Sequence; identical to SEQ ID NO: 1212
  Synthetic polypeptide

SEQ ID NO: 1249 - protein, 124 aa, Artificial Sequence
  Synthetic polypeptide
MEGGGGSGNKTTGGLAGFFGAGGAGYSHADLAGVPLTGMNPLSPYLNVDPRYLVQDTDEFILPTGANKTRGRFELAFFTIGGCCMTALLYSAFGVIIEKTRGAEDDLNTVAAGTMTGMLYKCTA

SEQ ID NO: 1250 - protein, 135 aa, Artificial Sequence; identical to SEQ ID NO: 1213
  Synthetic polypeptide

SEQ ID NO: 1251 - protein, 125 aa, Artificial Sequence
  Synthetic polypeptide
MGNILTCRVHPSVSLEFDQQQGSVCPSESETYEAGARDRMAGAPMAAAVQPAEVTVEVGEDLHMHHVRDREMPEALEFNPSANPEASTIFQRNSQTDVVEIRRSNCTNHVAEAGESLEPRRQRLQ

SEQ ID NO: 1252 - protein, 148 aa, Artificial Sequence
  Synthetic polypeptide
MGNILTCRVHPSVSLEFDQQQGSVCPSESETYEAGARDRMAGAPMAAAVQPAEVTVEVGEDLHMHHVRDREMPEALEFNLSANPESSTIFQRNSQTEALEFNPSANPEASTIFQRNSQTDVVEIRRSNCTNHVAEAGESLEPRRQRLQ

SEQ ID NO: 1253 - protein, 240 aa, Artificial Sequence
  Synthetic polypeptide
MSELEEDFAKILMLKEERIKELEKRLSEKEEEIQELKRKLHKCQSVLPVPSTHIGPRTTRAQGISAEPQTYRSFHDLRQAFRKFTKSERSKDLIKEAILDNDFMKNLELSQIQEIVDCMYPVEYGKDSCIIKEGDVGSLVYVMEDGKVEVTKEGVKLCTMGPGKVFGELAILYNCTRTATVKTLVNVKLWAIDRQCFQTIMMRTGLIKHTEYMEFLKSVPTFQSLPEEILSKLADVLEES

SEQ ID NO: 1254 - protein, 228 aa, Artificial Sequence
  Synthetic polypeptide
MLKEERIKELEKRLSEKEEEIQELKRKLHKCQSVLPVPSTHIGPRTTRAQGISAEPQTYRSFHDLRQAFRKFTKSERSKDLIKEAILDNDFMKNLELSQIQEIVDCMYPVEYGKDSCIIKEGDVGSLVYVMEDGKVEVTKEGVKLCTMGPGKVFGELAILYNCTRTATVKTLVNVKLWAIDRQCFQTIMMRTGLIKHTEYMEFLKSVPTFQSLPEEILSKLADVLEES

SEQ ID NO: 1255 - protein, 255 aa, Artificial Sequence [sequence omitted]

SEQ ID NO: 1256 - protein, 113 aa, Artificial Sequence
  Synthetic polypeptide
SCIIKEGDVGSLVYVMEDGKVEVTKEGVKLCTMGPGKVFGELAILYNCTRTATVKTLVNVKLWAIDRQCFQTIMMRTGLIKHTEYMEFLKSVPTFQSLPEEILSKLADVLEES

SEQ ID NO: 1257 - protein, 88 aa, Artificial Sequence
  Synthetic polypeptide
MEPELAAQKQPRPRRRSRRASGLSTEGATGPSADTSGSELDGRCSLRRGSSFTFLTPGPNWDFTLKRKRREKDDDVVSLSSLDLKLPS

SEQ ID NO: 1258 - protein, 78 aa, Artificial Sequence
  Synthetic polypeptide
MAPPAHKSILERSENVLMSPWKGKLIVQDRMLCDIALWSTYGAMIPTQLRAWWHVPVILATGDAEAGESLEPGRWRLH

SEQ ID NO: 1259 - protein, 270 aa, Artificial Sequence
  Synthetic polypeptide
MNEEYDVIVLGTGLTECILSGIMSVNGKKVLHMDRNPYYGGESASITPLEDLYKRFKIPGSPPESMGRGRDWNVDLIPKFLMANGQLVKMLLYTEVTRYLDFKVTEGSFVYKGGKIYKVPSTEAEALASSLMGLFEKRRFRKFLVYVANFDEKDPRTFEGIDPKKTTMRDVYKKFDLGQDVIDFTGHALALYRTDDYLDQPCYETINRIKLYSESLARYGKSPYLYPLYGLGELPQGFARYRIAEWIRTHQPSICCLQEIHQTQKDSNLR

SEQ ID NO: 1260 - protein, 98 aa, Artificial Sequence
  Synthetic polypeptide
KKFDLGQDVIDFTGHALALYRTDDYLDQPCYETINRIKLYSESLARYGKSPYLYPLYGLGELPQGFARYRIAEWIRTHQPSICCLQEIHQTQKDSNLR

SEQ ID NO: 1261 - protein, 274 aa, Artificial Sequence
  Synthetic polypeptide
MSLGKRKPSNFYLANFLGKECILSGIMSVNGKKVLHMDRNPYYGGESASITPLEDLYKRFKIPGSPPESMGRGRDWNVDLIPKFLMANGQLVKMLLYTEVTRYLDFKVTEGSFVYKGGKIYKVPSTEAEALASSLMGLFEKRRFRKFLVYVANFDEKDPRTFEGIDPKKTTMRDVYKKFDLGQDVIDFTGHALALYRTDDYLDQPCYETINRIKLYSESLARYGKSPYLYPLYGLGELPQGFARYRIAEWIRTHQPSICCLQEIHQTQKDSNLR

SEQ ID NO: 1262 - protein, 225 aa, Artificial Sequence
  Synthetic polypeptide
MNEEYDVIVLGTGLTECILSGIMSVNGKKVLHMDRNPYYGGESASITPLEDLYKRFKIPGSPPESMGRGRDWNVDLIPKFLMANGLMGLFEKRRFRKFLVYVANFDEKDPRTFEGIDPKKTTMRDVYKKFDLGQDVIDFTGHALALYRTDDYLDQPCYETINRIKLYSESLARYGKSPYLYPLYGLGELPQGFARYRIAEWIRTHQPSICCLQEIHQTQKDSNLR

SEQ ID NO: 1263 - protein, 260 aa, Artificial Sequence
  Synthetic polypeptide
MNEEYDVIVLGTGLTECILSGIMSVNGKKVLHMDRNPYYGGESASITPLEDLYKRFKIPGSPPESMGRGRDWNVDLIPKFLMANEVTRYLDFKVTEGSFVYKGGKIYKVPSTEAEALASSLMGLFEKRRFRKFLVYVANFDEKDPRTFEGIDPKKTTMRDVYKKFDLGQDVIDFTGHALALYRTDDYLDQPCYETINRIKLYSESLARYGKSPYLYPLYGLGELPQGFARYRIAEWIRTHQPSICCLQEIHQTQKDSNLR

SEQ ID NO: 1264 - protein, 247 aa, Artificial Sequence
  Synthetic polypeptide
MNEEYDVIVLGTGLTECILSGIMSVNGKKVLHMDRNPYYGGESASITPLEDLYKRFKIPGSPPESMGRGRDWNVDLIPKFLMANGQLVKMLLYTEVTRYLDFKVTEGSFVYKGGKIYKVPSTEAEALASSLMGLFEKRRFRKFLVYVANFDEKDPRTFEGIDPKKTTMRDVYKKFDLGQDVIDFTGHALALYRTDDYLDQPCYETINRIKLYSESLARYGKSPYLYPLYGLGELPQGFARVSAGIHA

SEQ ID NO: 1265 - protein, 75 aa, Artificial Sequence
  Synthetic polypeptide
KKFDLGQDVIDFTGHALALYRTDDYLDQPCYETINRIKLYSESLARYGKSPYLYPLYGLGELPQGFARVSAGIHA

SEQ ID NO: 1266 - protein, 251 aa, Artificial Sequence
  Synthetic polypeptide
MSLGKRKPSNFYLANFLGKECILSGIMSVNGKKVLHMDRNPYYGGESASITPLEDLYKRFKIPGSPPESMGRGRDWNVDLIPKFLMANGQLVKMLLYTEVTRYLDFKVTEGSFVYKGGKIYKVPSTEAEALASSLMGLFEKRRFRKFLVYVANFDEKDPRTFEGIDPKKTTMRDVYKKFDLGQDVIDFTGHALALYRTDDYLDQPCYETINRIKLYSESLARYGKSPYLYPLYGLGELPQGFARVSAGIHA

SEQ ID NO: 1267 - protein, 202 aa, Artificial Sequence
  Synthetic polypeptide
MNEEYDVIVLGTGLTECILSGIMSVNGKKVLHMDRNPYYGGESASITPLEDLYKRFKIPGSPPESMGRGRDWNVDLIPKFLMANGLMGLFEKRRFRKFLVYVANFDEKDPRTFEGIDPKKTTMRDVYKKFDLGQDVIDFTGHALALYRTDDYLDQPCYETINRIKLYSESLARYGKSPYLYPLYGLGELPQGFARVSAGIHA

SEQ ID NO: 1268 - protein, 237 aa, Artificial Sequence
  Synthetic polypeptide
MNEEYDVIVLGTGLTECILSGIMSVNGKKVLHMDRNPYYGGESASITPLEDLYKRFKIPGSPPESMGRGRDWNVDLIPKFLMANEVTRYLDFKVTEGSFVYKGGKIYKVPSTEAEALASSLMGLFEKRRFRKFLVYVANFDEKDPRTFEGIDPKKTTMRDVYKKFDLGQDVIDFTGHALALYRTDDYLDQPCYETINRIKLYSESLARYGKSPYLYPLYGLGELPQGFARVSAGIHA

SEQ ID NO: 1269 - protein, 21 aa, Artificial Sequence
  Synthetic polypeptide
MNEEYDVIVLGTGLTEAEAGE

SEQ ID NO: 1270 - protein, 26 aa, Artificial Sequence
  Synthetic polypeptide
MNEEYDVIVLGTGLTKCTLRRHMREC

SEQ ID NO: 1271 - protein, 287 aa, Artificial Sequence
  Synthetic polypeptide
MAQPGDPRRLCRLVQEGRLRALKEELQAAGGCPGPAGDTLLHCAARHGHRDVLAYLAEAWGMDIEATNRDYKRPLHEAASMGHRDCVRYLLGRGAAVDCLKKADWTPLMMACTRKNLGVIQELVEHGANPLLKNKDGWNSFHIASREGDPLILQYLLTVCPGAWKTESKIRRTPLHTAAMHGHLEAVKVLLKRCQYEPDYRDNCGVTALMDAIQCGHIDVARLLLDEHGACLSAEDSLGAQALHRAAVTGQDEAIRFLVSELGVDVDVRATSTHLTALHYAAKSCWE

SEQ ID NO: 1272 - protein, 72 aa, Artificial Sequence
  Synthetic polypeptide
MAAQGEPGYLAAQSDPGSNSERSTDSPVPGSEDDLVAGATLHSPEWSEERFRVDRKKLEAMLQDLEVTMLPL

SEQ ID NO: 1273 - protein, 110 aa, Artificial Sequence
  Synthetic polypeptide
MEDYTKIEKIGEGTYGVVYKGRHKTTGQVVAMKKIRLESEEEGVPSTAIREISLLKELRHPNIVSLQDVLMQDSRLYLIFEFLSMDLKKYLDSIPPGQYMDSSLVKYSIQ

SEQ ID NO: 1274 - protein, 122 aa, Artificial Sequence
  Synthetic polypeptide
MEDYTKIEKIGEGTYGVVYKGRHKTTGQVVAMKKIRLESEEEGVPSTAIREISLLKELRHPNIVSLQDVLMQDSRLYLIFEFLSMDLKKYLDSIPPGQYMDSSLVKYSINNEVFNTSNYMLM

SEQ ID NO: 1275 - protein, 491 aa, Artificial Sequence
  Synthetic polypeptide
MPFRKACGPKLTNSPTVIVMVGLPARGKTYISKKLTRYLNWIGVPTKVFNVGEYRREAVKQYSSYNFFRPDNEEAMKVRKQCALAALRDVKSYLAKEGGQIAVFDATNTTRERRHMILHFAKENDFKAFFIESVCDDPTVVASNIMEVKISSPDYKDCNSAEAMDDFMKRISCYEASYQPLDPDKCDRDLSLIKVIDVGRRFLVNRVQDHIQSRIVYYLMNIHVQPRTIYLCRHGENEHNLQGRIGGDSGLSSRGKKFASALSKFVEEQNLKDLRVWTSQLKSTIQTAEALRLPYEQWKALNEIDAGVCEELTYEEIRDTYPEEYALREQDKYYYRYPTGESYQDLVQRLEPVIMELERQENVLVICHQAVLRCLLAYFLDKSAEEMPYLKCPLHTVLKLTPVAYGCRVESIYLNVESVCTHRERSEDAKKGPNPLMRRNSVTPLASPEPTKKPRINSFEEHVASTSAALPSCLPPEVPTQLPGQPMSLWE

SEQ ID NO: 1276 - protein, 525 aa, Artificial Sequence
  Synthetic polypeptide
MGEGGQKEGDSQQAGALPLLCQLDTFSPKATVFGVSINPACGPKLTNSPTVIVMVGLPARGKTYISKKLTRYLNWIGVPTKVFNVGEYRREAVKQYSSYNFFRPDNEEAMKVRKQCALAALRDVKSYLAKEGGQIAVFDATNTTRERRHMILHFAKENDFKAFFIESVCDDPTVVASNIMEVKISSPDYKDCNSAEAMDDFMKRISCYEASYQPLDPDKCDRDLSLIKVIDVGRRFLVNRVQDHIQSRIVYYLMNIHVQPRTIYLCRHGENEHNLQGRIGGDSGLSSRGKKFASALSKFVEEQNLKDLRVWTSQLKSTIQTAEALRLPYEQWKALNEIDAGVCEELTYEEIRDTYPEEYALREQDKYYYRYPTGESYQDLVQRLEPVIMELERQENVLVICHQAVLRCLLAYFLDKSAEEMPYLKCPLHTVLKLTPVAYGCRVESIYLNVESVCTHRERSEDAKKGPNPLMRRNSVTPLASPEPTKKPRINSFEEHVASTSAALPSCLPPEVPTQLPGQPMSLWE

SEQ ID NO: 1277 - protein, 511 aa, Artificial Sequence
  Synthetic polypeptide
MPLELTQSRVQKIWVPVDHRPSLPRSCGPKLTNSPTVIVMVGLPARGKTYISKKLTRYLNWIGVPTKVFNVGEYRREAVKQYSSYNFFRPDNEEAMKVRKQCALAALRDVKSYLAKEGGQIAVFDATNTTRERRHMILHFAKENDFKAFFIESVCDDPTVVASNIMEVKISSPDYKDCNSAEAMDDFMKRISCYEASYQPLDPDKCDRDLSLIKVIDVGRRFLVNRVQDHIQSRIVYYLMNIHVQPRTIYLCRHGENEHNLQGRIGGDSGLSSRGKKFASALSKFVEEQNLKDLRVWTSQLKSTIQTAEALRLPYEQWKALNEIDAGVCEELTYEEIRDTYPEEYALREQDKYYYRYPTGESYQDLVQRLEPVIMELERQENVLVICHQAVLRCLLAYFLDKSAEEMPYLKCPLHTVLKLTPVAYGCRVESIYLNVESVCTHRERSEDAKKGPNPLMRRNSVTPLASPEPTKKPRINSFEEHVASTSAALPSCLPPEVPTQLPGQPMSLWE

SEQ ID NO: 1278 - protein, 80 aa, Artificial Sequence
  Synthetic polypeptide
IYLNVESVCTHRERSEDAKKGPNPLMRRNSVTPLASPEPTKKPRINSFEEHVASTSAALPSCLPPEVPTQLPGQPMSLWE

SEQ ID NO: 1279 - protein, 186 aa, Artificial Sequence
  Synthetic polypeptide
MLYPAYYSYKAVKTKNVKEYVRWMMYWIVFALYTVIETVADQTVAWFPLYYELKIAFVIWLLSPYTKGASLIYRKFLHPLLSSKEREIDDYIVQAKERGYETMVNFGRQGLNLAATAAVTAAVKADMLPRAREWSTKKKTHGIWETSHSAQKGDDKNSQREHHTASPKCSQPKLDVVDERCQEGCL

SEQ ID NO: 1280 - protein, 201 aa, Artificial Sequence
  Synthetic polypeptide
MVSWMISRAVVLVFGMLYPAYYSYKAVKTKNVKEYVRWMMYWIVFALYTVIETVADQTVAWFPLYYELKIAFVIWLLSPYTKGASLIYRKFLHPLLSSKEREIDDYIVQAKERGYETMVNFGRQGLNLAATAAVTAAVKADMLPRAREWSTKKKTHGIWETSHSAQKGDDKNSQREHHTASPKCSQPKLDVVDERCQEGCL

SEQ ID NO: 1281 - protein, 806 aa, Artificial Sequence
  Synthetic polypeptide
MCVDSLVRICSGLSYGRIRNIKSLSDIQIVQVACGYYHSLALSKASEVFCWGQNKYGQLGLGTDCKKQTSPQLLKSLLGIPFMQVAAGGAHSFVLTLSGAIFGWGRNKFGQLGLNDENDRYVPNLLKSLRSQKIVYICCGEDHTAALTKEGGVFTFGAGGYGQLGHNSTSHEINPRKVFELMGSIVTEIACGRQHTSAFVPSSGRIYSFGLGGNGQLGTGSTSNRKSPFTVKGNWYPYNGQCLPDIDSEEYFCVKRIFSGGDQSFSHYSSPQNCGPPDDFRCPNPTKQIWTVNEALIQKWLSYPSGRFPVEIANEIDGTFSSSGCLNGSFLAVSNDDHYRTGTRFSGVDMNAARLLFHKLIQPDHPQISQQVAASLEKNLIPKLTSSLPDVEALRFYLTLPECPLMSDSNNFTTIAIPFGTALVNLEKAPLKVLENWWSVLEPPLFLKIVELFKEVVVHLLKLYKIGIPPSERRIFNSFLHTALKVLEILHRVNEKMGQIIQYDKFYIHEVQELIDIRNDYINWVQQQAYGMDVNHGLTELADIPVTICTYPFVFDAQAKTTLLQTDAVLQMQMAIDQAHRQNVSSLFLPVIESVNPCLILVVRRENIVGDAMEVLRKTKNIDYKKPLKVIFVGEDAVDAGGVRKEFFLLIMRELLDPKYGMFRYYEDSRLIWFSDKTFEDSDLFHLIGVICGLAIYNCTIVDLHFPLALYKKLLKKKPSLDDLKELMPDVGRSMQQLLDYPEDDIEETFCLNFTITVENFGATEVKELVLNGADTAVNKQNRKLLEDVFCLPKQGIKPRKRKTQD

SEQ ID NO: 1282 - protein, 916 aa, Artificial Sequence
  Synthetic polypeptide
MLCWGNASFGQLGLGGIDEEIVLEPRKSDFFINKRVRDVGCGLRHTVFVLDDGTVYTCGCNDLGQLGHEKSRKKPEQVVALDAQNIVAVSCGEAHTLALNDKGQVYAWGLDSDGQLGLVGSEECIRVPRNIKSLSDIQIVQVACGYYHSLALSKASEVFCWGQNKYGQLGLGTDCKKQTSPQLLKSLLGIPFMQVAAGGAHSFVLTLSGAIFGWGRNKFGQLGLNDENDRYVPNLLKSLRSQKIVYICCGEDHTAALTKEGGVFTFGAGGYGQLGHNSTSHEINPRKVFELMGSIVTEIACGRQHTSAFVPSSGRIYSFGLGGNGQLGTGSTSNRKSPFTVKGNWYPYNGQCLPDIDSEEYFCVKRIFSGGDQSFSHYSSPQNCGPPDDFRCPNPTKQIWTVNEALIQKWLSYPSGRFPVEIANEIDGTFSSSGCLNGSFLAVSNDDHYRTGTRFSGVDMNAARLLFHKLIQPDHPQISQQVAASLEKNLIPKLTSSLPDVEALRFYLTLPECPLMSDSNNFTTIAIPFGTALVNLEKAPLKVLENWWSVLEPPLFLKIVELFKEVVVHLLKLYKIGIPPSERRIFNSFLHTALKVLEILHRVNEKMGQIIQYDKFYIHEVQELIDIRNDYINWVQQQAYGMDVNHGLTELADIPVTICTYPFVFDAQAKTTLLQTDAVLQMQMAIDQAHRQNVSSLFLPVIESVNPCLILVVRRENIVGDAMEVLRKTKNIDYKKPLKVIFVGEDAVDAGGVRKEFFLLIMRELLDPKYGMFRYYEDSRLIWFSDKTFEDSDLFHLIGVICGLAIYNCTIVDLHFPLALYKKLLKKKPSLDDLKELMPDVGRSMQQLLDYPEDDIEETFCLNFTITVENFGATEVKELVLNGADTAVNKQNRKLLEDVFCLPKQGIKPRKRKTQD

SEQ ID NO: 1283 - protein, 838 aa, Artificial Sequence
  Synthetic polypeptide
MLCWGNASFGQLGLGGIDEEIVLEPRKSDFFINKRVRDVGCGLRHTVFVLDDGTVYTCGCNDLGQLGHEKSRKKPEQVVALDAQNIVAVSCGEAHTLALNDKGQVYAWGLDSDGQLGLVGSEECIRVPRNIKSLSDIQIVQVACGYYHSLALSKASEVFCWGQNKYGQLGLGTDCKKQTSPQLLKSLLGIPFMQVAAGGAHSFVLTLSGAIFGWGRNKFGQLGLNDENDRYVPNLLKSLRSQKIVYICCGEDHTAALTKEGGVFTFGAGGYGQLGHNSTSHEINPRKVFELMGSIVTEIACGRQHTSAFVPSSGRIYSFGLGGNGQLGTGSTSNRKSPFTVKGNWYPYNGQCLPDIDSEEYFCVKRIFSGGDQSFSHYSSPQNCGPPDDFRCPNPTKQIWTVNEALIQKWLSYPSGRFPVEIANEIDGTFSSSGCLNGSFLAVSNDDHYRTGTRFSGVDMNAARLLFHKLIQPDHPQISQQVAASLEKNLIPKLTSSLPDVEALRFYLTLPECPLMSDSNNFTTIAIPFGTALVNLEKAPLKVLENWWSVLEPPLFLKIVELFKEVVVHLLKLYKIGIPPSERRIFNSFLHTALKVLEILHRVNEKMGQIIQYDKFYIHEVQELIDIRNDYINWVQQQAYGMDVNHGLTELADIPVTICTYPFVFDAQAKTTLLQTDAVLQMQMAIDQAHRQNVSSLFLPVIESVNPCLILVVRRENIVGDAMEVLRKTKNIDYKKPLKVIFVGEDAVDAGGVRKEFFLLIMRELLDPKYGMFRYYEDSRLIWFSDKITVENFGATEVKELVLNGADTAVNKQNRKLLEDVFCLPKQGIKPRKRKTQD

SEQ ID NO: 1284 - protein, 908 aa, Artificial Sequence
  Synthetic polypeptide
MLCWGNASFGQLGLGGIDEEIVLEPRKSDFFINKRVRDVGCGLRHTVFVLDDGTVYTCGCNDLGQLGHEKSRKKPEQVVALDAQNIVAVSCGEAHTLALNDKGQVYAWGLDSDGQLGLVGSEECIRVPRNIKSLSDIQIVQVACGYYHSLALSKASEVFCWGQNKYGQLGLGTDCKKQTSPQLLKSLLGIPFMQVAAGGAHSFVLTLSGAIFGWGRNKFGQLGLNDENDRYVPNLLKSLRSQKIVYICCGEDHTAALTKEGGVFTFGAGGYGQLGHNSTSHEINPRKVFELMGSIVTEIACGRQHTSAFVPSSGRIYSFGLGGNGQLGTGSTSNRKSPFTVKGNWYPYNGQCLPDIDSEEYFCVKRIFSGGDQSFSHYSSPQNCGPPDDFRCPNPTKQIWTVNEALIQKWLSYPSGRFPVEIANEIDGTFSSSGCLNGSFLAVSNDDHYRTGTRFSGVDMNAARLLFHKLIQPDHPQISQQVAASLEKNLIPKLTSSLPDVEALRFYLTLPECPLMSDSNNFTTIAIPFGTALVNLEKAPLKVLENWWSVLEPPLFLKIVELFKEVVVHLLKLYKIGIPPSERRIFNSFLHTALKVLEILHRVNEKMGQIIQYDKFYIHEVQELIDIRNDYINWVQQQAYGMLADIPVTICTYPFVFDAQAKTTLLQTDAVLQMQMAIDQAHRQNVSSLFLPVIESVNPCLILVVRRENIVGDAMEVLRKTKNIDYKKPLKVIFVGEDAVDAGGVRKEFFLLIMRELLDPKYGMFRYYEDSRLIWFSDKTFEDSDLFHLIGVICGLAIYNCTIVDLHFPLALYKKLLKKKPSLDDLKELMPDVGRSMQQLLDYPEDDIEETFCLNFTITVENFGATEVKELVLNGADTAVNKQNRKLLEDVFCLPKQGIKPRKRKTQD

SEQ ID NO: 1285 - protein, 813 aa, Artificial Sequence
  Synthetic polypeptide
MCVDSLVRICSGLSYGRIRNIKSLSDIQIVQVACGYYHSLALSKASEVFCWGQNKYGQLGLGTDCKKQTSPQLLKSLLGIPFMQVAAGGAHSFVLTLSGAIFGWGRNKFGQLGLNDENDRYVPNLLKSLRSQKIVYICCGEDHTAALTKEGGVFTFGAGGYGQLGHNSTSHEINPRKVFELMGSIVTEIACGRQHTSAFVPSSGRIYSFGLGGNGQLGTGSTSNRKSPFTVKGNWYPYNGQCLPDIDSEEYFCVKRIFSGGDQSFSHYSSPQNCGPPDDFRCPNPTKQIWTVNEALIQKWLSYPSGRFPVEIANEIDGTFSSSGCLNGSFLAVSNDDHYRTGTRFSGVDMNAARLLFHKLIQPDHPQISQQVAASLEKNLIPKLTSSLPDVEALRFYLTLPECPLMSDSNNFTTIAIPFGTALVNLEKAPLKVLENWWSVLEPPLFLKIVELFKEVVVHLLKLYKIGIPPSERRIFNSFLHTALKVLEILHRVNEKMGQIIQYDKFYIHEVQELIDIRNDYINWVQQQAYGMDVNHGLTELADIPVTICTYPFVFDAQAKTTLLQTDAVLQMQMAIDQAHRQNVSSLFLPVIESVNPCLILVVRRENIVGDAMEVLRKTKNIDYKKPLKVIFVGEDAVDAGGVRKEFFLLIMRELLDPKYGMFRYYEDSRLIWFSDKTFEDSDLFHLIGVICGLAIYNCTIVDLHFPLALYKKLLKKKPSLDDLKELMPDVGRSMQQLLDYPEDDIEETFCLNFTITVENFGATEVKELVLNGADTAVNKQNRPRTVTHTCNPSTLGGRGGRITRSRQRDHPG

SEQ ID NO: 1286 - protein, 923 aa, Artificial Sequence
  Synthetic polypeptide
MLCWGNASFGQLGLGGIDEEIVLEPRKSDFFINKRVRDVGCGLRHTVFVLDDGTVYTCGCNDLGQLGHEKSRKKPEQVVALDAQNIVAVSCGEAHTLALNDKGQVYAWGLDSDGQLGLVGSEECIRVPRNIKSLSDIQIVQVACGYYHSLALSKASEVFCWGQNKYGQLGLGTDCKKQTSPQLLKSLLGIPFMQVAAGGAHSFVLTLSGAIFGWGRNKFGQLGLNDENDRYVPNLLKSLRSQKIVYICCGEDHTAALTKEGGVFTFGAGGYGQLGHNSTSHEINPRKVFELMGSIVTEIACGRQHTSAFVPSSGRIYSFGLGGNGQLGTGSTSNRKSPFTVKGNWYPYNGQCLPDIDSEEYFCVKRIFSGGDQSFSHYSSPQNCGPPDDFRCPNPTKQIWTVNEALIQKWLSYPSGRFPVEIANEIDGTFSSSGCLNGSFLAVSNDDHYRTGTRFSGVDMNAARLLFHKLIQPDHPQISQQVAASLEKNLIPKLTSSLPDVEALRFYLTLPECPLMSDSNNFTTIAIPFGTALVNLEKAPLKVLENWWSVLEPPLFLKIVELFKEVVVHLLKLYKIGIPPSERRIFNSFLHTALKVLEILHRVNEKMGQIIQYDKFYIHEVQELIDIRNDYINWVQQQAYGMDVNHGLTELADIPVTICTYPFVFDAQAKTTLLQTDAVLQMQMAIDQAHRQNVSSLFLPVIESVNPCLILVVRRENIVGDAMEVLRKTKNIDYKKPLKVIFVGEDAVDAGGVRKEFFLLIMRELLDPKYGMFRYYEDSRLIWFSDKTFEDSDLFHLIGVICGLAIYNCTIVDLHFPLALYKKLLKKKPSLDDLKELMPDVGRSMQQLLDYPEDDIEETFCLNFTITVENFGATEVKELVLNGADTAVNKQNRPRTVTHTCNPSTLGGRGGRITRSRQRDHPG

SEQ ID NO: 1287 - protein, 845 aa, Artificial Sequence
  Synthetic polypeptide
MLCWGNASFGQLGLGGIDEEIVLEPRKSDFFINKRVRDVGCGLRHTVFVLDDGTVYTCGCNDLGQLGHEKSRKKPEQVVALDAQNIVAVSCGEAHTLALNDKGQVYAWGLDSDGQLGLVGSEECIRVPRNIKSLSDIQIVQVACGYYHSLALSKASEVFCWGQNKYGQLGLGTDCKKQTSPQLLKSLLGIPFMQVAAGGAHSFVLTLSGAIFGWGRNKFGQLGLNDENDRYVPNLLKSLRSQKIVYICCGEDHTAALTKEGGVFTFGAGGYGQLGHNSTSHEINPRKVFELMGSIVTEIACGRQHTSAFVPSSGRIYSFGLGGNGQLGTGSTSNRKSPFTVKGNWYPYNGQCLPDIDSEEYFCVKRIFSGGDQSFSHYSSPQNCGPPDDFRCPNPTKQIWTVNEALIQKWLSYPSGRFPVEIANEIDGTFSSSGCLNGSFLAVSNDDHYRTGTRFSGVDMNAARLLFHKLIQPDHPQISQQVAASLEKNLIPKLTSSLPDVEALRFYLTLPECPLMSDSNNFTTIAIPFGTALVNLEKAPLKVLENWWSVLEPPLFLKIVELFKEVVVHLLKLYKIGIPPSERRIFNSFLHTALKVLEILHRVNEKMGQIIQYDKFYIHEVQELIDIRNDYINWVQQQAYGMDVNHGLTELADIPVTICTYPFVFDAQAKTTLLQTDAVLQMQMAIDQAHRQNVSSLFLPVIESVNPCLILVVRRENIVGDAMEVLRKTKNIDYKKPLKVIFVGEDAVDAGGVRKEFFLLIMRELLDPKYGMFRYYEDSRLIWFSDKITVENFGATEVKELVLNGADTAVNKQNRPRTVTHTCNPSTLGGRGGRITRSRQRDHPG

SEQ ID NO: 1288 - protein, 915 aa, Artificial Sequence
  Synthetic polypeptide
MLCWGNASFGQLGLGGIDEEIVLEPRKSDFFINKRVRDVGCGLRHTVFVLDDGTVYTCGCNDLGQLGHEKSRKKPEQVVALDAQNIVAVSCGEAHTLALNDKGQVYAWGLDSDGQLGLVGSEECIRVPRNIKSLSDIQIVQVACGYYHSLALSKASEVFCWGQNKYGQLGLGTDCKKQTSPQLLKSLLGIPFMQVAAGGAHSFVLTLSGAIFGWGRNKFGQLGLNDENDRYVPNLLKSLRSQKIVYICCGEDHTAALTKEGGVFTFGAGGYGQLGHNSTSHEINPRKVFELMGSIVTEIACGRQHTSAFVPSSGRIYSFGLGGNGQLGTGSTSNRKSPFTVKGNWYPYNGQCLPDIDSEEYFCVKRIFSGGDQSFSHYSSPQNCGPPDDFRCPNPTKQIWTVNEALIQKWLSYPSGRFPVEIANEIDGTFSSSGCLNGSFLAVSNDDHYRTGTRFSGVDMNAARLLFHKLIQPDHPQISQQVAASLEKNLIPKLTSSLPDVEALRFYLTLPECPLMSDSNNFTTIAIPFGTALVNLEKAPLKVLENWWSVLEPPLFLKIVELFKEVVVHLLKLYKIGIPPSERRIFNSFLHTALKVLEILHRVNEKMGQIIQYDKFYIHEVQELIDIRNDYINWVQQQAYGMLADIPVTICTYPFVFDAQAKTTLLQTDAVLQMQMAIDQAHRQNVSSLFLPVIESVNPCLILVVRRENIVGDAMEVLRKTKNIDYKKPLKVIFVGEDAVDAGGVRKEFFLLIMRELLDPKYGMFRYYEDSRLIWFSDKTFEDSDLFHLIGVICGLAIYNCTIVDLHFPLALYKKLLKKKPSLDDLKELMPDVGRSMQQLLDYPEDDIEETFCLNFTITVENFGATEVKELVLNGADTAVNKQNRPRTVTHTCNPSTLGGRGGRITRSRQRDHPG

SEQ ID NO: 1289 - protein, 172 aa, Artificial Sequence
  Synthetic polypeptide
MLTVQVKTSSAIELPDSLAFLWIIPMWYCEGKELENSPDIHIVQAGNLHSLTIAEAFEEDTGRYSCFASNIYGTDSTSAEIYIEGVSSSDSEGDPNKEEMNRIQKPNEVSSPPTTSAVIPPAVPQAQHLVAQPRVATIQQCQSPTNYLQGLDGKPIIAAPVFTKARHGGSQL

SEQ ID NO: 1290 - protein, 447 aa, Artificial Sequence
  Synthetic polypeptide
MQDDSIEASTSISQLLRESYLAETRHRGNNERSRAEPSSNPCHFGSPSGAAEGGGGQDDLPDLSAFLSQEELDESVNLARLAINYDPLEKADETQARKRLSPDQMKHSPNLSFEPNFCQDNPRSPTSSKESPQEAKRPQYCSETQSKKVFLNKAADFIEELSSLFKSHSSKRIRPRACKNHKSKLESQNKVMQENSSSFSDLSERRERSSVPIPIPADTRDNEVNHALEQQEAKRREAEQAASEAAGGDTTPGSSPSSLYYEEPLGQPPRFTQKLRSREVPEGTRVQLDCIVVGIPPPQVRWYCEGKELENSPDIHIVQAGNLHSLTIAEAFEEDTGRYSCFASNIYGTDSTSAEIYIEGVSSSDSEGDPNKEEMNRIQKPNEVSSPPTTSAVIPPAVPQAQHLVAQPRVATIQQCQSPTNYLQGLDGKPIIAAPVFTKARHGGSQL

SEQ ID NO: 1291 - protein, 658 aa, Artificial Sequence
  Synthetic polypeptide
MSRSRHARPSRLVRKEDVNKKKKNSQLRKTTKGANKNVASVKTLSPGKLKQLIQERDVKKKTEPKPPVPVRSLLTRAGAARMNLDRTEVLFQNPESLTCNGFTMALRSTSLSRRLSQPPLVVAKSKKVPLSKGLEKQHDCDYKILPALGVKHSENDSVPMQDTQVLPDIETLIGVQNPSLLKGKSQETTQFWSQRVEDSKINIPTHSGPAAEILPGPLEGTRCGEGLFSEETLNDTSGSPKMFAQDTVCAPFPQRATPKVTSQGNPSIQLEELGSRVESLKLSDSYLDPIKSEHDCYPTSSLNKVIPDLNLRNCLALGGSTSPTSVIKFLLAGSKQATLGAKPDHQEAFEATANQQEVSDTTSFLGQAFGAIPHQWELPGADPVHGEALGETPDLPEIPGAIPVQGEVFGTILDQQETLGMSGSVVPDLPVFLPVPPNPIATFNAPSKWPEPQSTVSYGLAVQGAIQILPLGSGHTPQSSSNSEKNSLPPVMAISNVENEKQVHISFLPANTQGFPLAPERGLFHASLGIAQLSQAGPSKSDRGSSQVSVTSTVHVVNTTVVTMPVPMVSTSSSSYTTLLPTLEKKKRKRCGVCEPCQQKTNCGECTYCKNRKNSHQICKKRKCEELKKKPSVVVPLEVIKENKRPQREKKPKVLKPR

SEQ ID NO: 1292 - protein, 1 aa, Artificial Sequence
  Synthetic polypeptide
V

SEQ ID NO: 1293 - protein, 880 aa, Artificial Sequence
  Synthetic polypeptide
MAQFGGQKNPPWATQFTATAVSQPAALGVQQPSLLGASPTIYTQQTALAAAGLTTQTPANYQLTQTAALQQQAAAAAAALQQLQQPQQTLLTQPAVALPTSLSLSTPQPTAQITVSYPTPRSSQQQTQPQKQRVFTGVVTKLHDTFGFVDEDVFFQLSAVKGKTPQVGDRVLVEATYNPNMPFKWNAQRIQTLPNQNQSQTQPLLKTPPAVLQPIAPQTTFGVQTQPQPQSLLQAQISAASITPLLQTQPQPLLQQPQQKAGLLQPPVRIVSQPQPARRLDPPSRFSGRNDRGDQVPNRKDDRSRERERERRRSRERSPQRKRSRERSPRRERERSPRRVRRVVPRYTVQFSKFSLDCPSCDMMELRRRYQNLYIPSDFFDAQFTWVDAFPLSRPFQLGNYCNFYVMHREVESLEKNMAILDPPDADHLYSAKVMLMASPSMEDLYHKSCALAEDPQELRDGFQHPARLVKFLVGMKGKDEAMAIGGHWSPSLDGPDPEKDPSVLIKTAIRCCKALTGIDLSVCTQWYRFAEIRYHRPEETHKGRTVPAHVETVVLFFPDVWHCLPTRSEWETLSRGYKQQLVEKLQGERKEADGEQDEEEKDDGEAKEISTPTHWSKLDPKTMKVNDLRKELESRALSSKGLKSQLIARLTKQLKVEEQKEEQKELEKSEKEEDEDDDRKSEDDKEEEERKRQEEIERQRRERRYILPDEPAIIVHPNWAAKSGKFDCSIMSLSVLLDYRLEDNKEHSFEVSLFAELFNEMLQRDFGVRIYKSLLSLPEKEDKKEKDKKSKKDERKDKKEERDDETDEPKPKRRKSGDDKDKKEDRDERKKEDKRKDDSKDDDETEEDNNQDEYDPMEAEEAEDEEDVYPHHFYFIEEA

SEQ ID NO: 1294 - protein, 895 aa, Artificial Sequence
  Synthetic polypeptide
MAQFGGQKNPPWATQFTATAVSQPAALGVQQPSLLGASPTIYTQQTALAAAGLTTQTPANYQLTQTAALQQQAAAAAAALQQQYSQPQQALYSVQQQLQQPQQTLLTQPAVALPTSLSLSTPQPTAQITVSYPTPRSSQQQTQPQKQRVFTGVVTKLHDTFGFVDEDVFFQLSAVKGKTPQVGDRVLVEATYNPNMPFKWNAQRIQTLPNQNQSQTQPLLKTPPAVLQPIAPQTTFGVQTQPQPQSLLQAQISAASITPLLQTQPQPLLQQPQQKAGLLQPPVRIVSQPQPARRLDPPSRFSGRNDRGDQVPNRKDDRSRERERERRRSRERSPQRKRSRERSPRRERERSPRRVRRVVPRYTVQFSKFSLDCPSCDMMELRRRYQNLYIPSDFFDAQFTWVDAFPLSRPFQLGNYCNFYVMHREVESLEKNMAILDPPDADHLYSAKVMLMASPSMEDLYHKSCALAEDPQELRDGFQHPARLVKFLVGMKGKDEAMAIGGHWSPSLDGPDPEKDPSVLIKTAIRCCKALTGIDLSVCTQWYRFAEIRYHRPEETHKGRTVPAHVETVVLFFPDVWHCLPTRSEWETLSRGYKQQLVEKLQGERKEADGEQDEEEKDDGEAKEISTPTHWSKLDPKTMKVNDLRKELESRALSSKGLKSQLIARLTKQLKVEEQKEEQKELEKSEKEEDEDDDRKSEDDKEEEERKRQEEIERQRRERRYILPDEPAIIVHPNWAAKSGKFDCSIMSLSVLLDYRLEDNKEHSFEVSLFAELFNEMLQRDFGVRIYKSLLSLPEKEDKKEKDKKSKKDERKDKKEERDDETDEPKPKRRKSGDDKDKKEDRDERKKEDKRKDDSKDDDETEEDNNQDEYDPMEAEEAEDEEDVYPHHFYFIEEA

SEQ ID NO: 1295 - protein, 1 aa, Artificial Sequence
  Synthetic polypeptide
V

SEQ ID NO: 1296 - protein, 887 aa, Artificial Sequence
  Synthetic polypeptide
MAQFGGQKNPPWATQFTATAVSQPAALGVQQPSLLGASPTIYTQQTALAAAGLTTQTPANYQLTQTAALQQQAAAAAAALQQLQQPQQTLLTQPAVALPTSLSLSTPQPTAQITVSYPTPRSSQQQTQPQKQRVFTGVVTKLHDTFGFVDEDVFFQLSAVKGKTPQVGDRVLVEATYNPNMPFKWNAQRIQTLPNQNQSQTQPLLKTPPAVLQPIAPQTTFGVQTQPQPQSLLQAQISAASITPLLQTQPQPLLQQPQQKAGLLQPPVRIVSQPQPARRLDPPSRFSGRNDRGDQVPNRKDDRSRERERERRRSRERSPQRKRSRERSPRRERERSPRRVRRVVPRYTVQFSKFSLDCPSCDMMELRRRYQNLYIPSDFFDAQFTWVDAFPLSRPFQLGNYCNFYVMHREVESLEKNMAILDPPDADHLYSAKVMLMASPSMEDLYHKSCALAEDPQELRDGFQHPARLVKFLVGMKGKDEAMAIGGHWSPSLDGPDPEKDPSVLIKTAIRCCKALTGIDLSVCTQWYRFAEIRYHRPEETHKGRTVPAHVETVVLFFPDVWHCLPTRSEWETLSRGYKQQLVEKLQGERKEADGEQDEEEKDDGEAKEISTPTHWSKLDPKTMKVNDLRKELESRALSSKGLKSQLIARLTKQLKVEEQKEEQKELEKSEKEEDEDDDRKSEDDKEEEERKRQEEIERQRRERRYILPDEPAIIVHPNWAAKSGKFDCSIMSLSVLLDYRLEDNKEHSFEVSLFAELFNEMLQRDFGVRIYKSLLSLPEKEDKKEKDKKSKKDERKDKKEERDDETDEPKPKRRKSGDDKDKKEDRDERKKEDKRKDDSKDDDETEEDNNQDEYDPMEAEEAEDEEDDTQEAEAGESLEPGWQRLQ

SEQ ID NO: 1297 - protein, 902 aa, Artificial Sequence
  Synthetic polypeptide
MAQFGGQKNPPWATQFTATAVSQPAALGVQQPSLLGASPTIYTQQTALAAAGLTTQTPANYQLTQTAALQQQAAAAAAALQQQYSQPQQALYSVQQQLQQPQQTLLTQPAVALPTSLSLSTPQPTAQITVSYPTPRSSQQQTQPQKQRVFTGVVTKLHDTFGFVDEDVFFQLSAVKGKTPQVGDRVLVEATYNPNMPFKWNAQRIQTLPNQNQSQTQPLLKTPPAVLQPIAPQTTFGVQTQPQPQSLLQAQISAASITPLLQTQPQPLLQQPQQKAGLLQPPVRIVSQPQPARRLDPPSRFSGRNDRGDQVPNRKDDRSRERERERRRSRERSPQRKRSRERSPRRERERSPRRVRRVVPRYTVQFSKFSLDCPSCDMMELRRRYQNLYIPSDFFDAQFTWVDAFPLSRPFQLGNYCNFYVMHREVESLEKNMAILDPPDADHLYSAKVMLMASPSMEDLYHKSCALAEDPQELRDGFQHPARLVKFLVGMKGKDEAMAIGGHWSPSLDGPDPEKDPSVLIKTAIRCCKALTGIDLSVCTQWYRFAEIRYHRPEETHKGRTVPAHVETVVLFFPDVWHCLPTRSEWETLSRGYKQQLVEKLQGERKEADGEQDEEEKDDGEAKEISTPTHWSKLDPKTMKVNDLRKELESRALSSKGLKSQLIARLTKQLKVEEQKEEQKELEKSEKEEDEDDDRKSEDDKEEEERKRQEEIERQRRERRYILPDEPAIIVHPNWAAKSGKFDCSIMSLSVLLDYRLEDNKEHSFEVSLFAELFNEMLQRDFGVRIYKSLLSLPEKEDKKEKDKKSKKDERKDKKEERDDETDEPKPKRRKSGDDKDKKEDRDERKKEDKRKDDSKDDDETEEDNNQDEYDPMEAEEAEDEEDDTQEAEAGESLEPGWQRLQ

SEQ ID NO: 1298 - protein, 869 aa, Artificial Sequence
  Synthetic polypeptide
MAQFGGQKNPPWATQFTATAVSQPAALGVQQPSLLGASPTIYTQQTALAAAGLTTQTPANYQLTQTAALQQQAAAAAAALQQLQQPQQTLLTQPAVALPTSLSLSTPQPTAQITVSYPTPRSSQQQTQPQKQRVFTGVVTKLHDTFGFVDEDVFFQLSAVKGKTPQVGDRVLVEATYNPNMPFKWNAQRIQTLPNQNQSQTQPLLKTPPAVLQPIAPQTTFGVQTQPQPQSLLQAQISAASITPLLQTQPQPLLQQPQQKAGLLQPPVRIVSQPQPARRLDPPSRFSGRNDRGDQVPNRKDDRSRERERERRRSRERSPQRKRSRERSPRRERERSPRRVRRVVPRYTVQFSKFSLDCPSCDMMELRRRYQNLYIPSDFFDAQFTWVDAFPLSRPFQLGNYCNFYVMHREVESLEKNMAILDPPDADHLYSAKVMLMASPSMEDLYHKSCALAEDPQELRDGFQHPARLVKFLVGMKGKDEAMAIGGHWSPSLDGPDPEKDPSVLIKTAIRCCKALTGIDLSVCTQWYRFAEIRYHRPEETHKGRTVPAHVETVVLFFPDVWHCLPTRSEWETLSRGYKQQLVEKLQGERKEADGEQDEEEKDDGEAKEISTPTHWSKLDPKTMKVNDLRKELESRALSSKGLKSQLIARLTKQLKVEEQKEEQKELEKSEKEEDEDDDRKSEDDKEEEERKRQEEIERQRRERRYILPDEPAIIVHPNWAAKSGKFDCSIMSLSVLLDYRLEDNKEHSFEVSLFAELFNEMLQRDFGVRIYKSLLSLPEKEDKKEKDKKSKKDERKDKKEERDDETDEPKPKRRKSGDDKDKKEDRDERKKEDKRKDDSKDDDETEEDNNQDEYDPMEAEEAEDEEDG

SEQ ID NO: 1299 - protein, 884 aa, Artificial Sequence
  Synthetic polypeptide
MAQFGGQKNPPWATQFTATAVSQPAALGVQQPSLLGASPTIYTQQTALAAAGLTTQTPANYQLTQTAALQQQAAAAAAALQQQYSQPQQALYSVQQQLQQPQQTLLTQPAVALPTSLSLSTPQPTAQITVSYPTPRSSQQQTQPQKQRVFTGVVTKLHDTFGFVDEDVFFQLSAVKGKTPQVGDRVLVEATYNPNMPFKWNAQRIQTLPNQNQSQTQPLLKTPPAVLQPIAPQTTFGVQTQPQPQSLLQAQISAASITPLLQTQPQPLLQQPQQKAGLLQPPVRIVSQPQPARRLDPPSRFSGRNDRGDQVPNRKDDRSRERERERRRSRERSPQRKRSRERSPRRERERSPRRVRRVVPRYTVQFSKFSLDCPSCDMMELRRRYQNLYIPSDFFDAQFTWVDAFPLSRPFQLGNYCNFYVMHREVESLEKNMAILDPPDADHLYSAKVMLMASPSMEDLYHKSCALAEDPQELRDGFQHPARLVKFLVGMKGKDEAMAIGGHWSPSLDGPDPEKDPSVLIKTAIRCCKALTGIDLSVCTQWYRFAEIRYHRPEETHKGRTVPAHVETVVLFFPDVWHCLPTRSEWETLSRGYKQQLVEKLQGERKEADGEQDEEEKDDGEAKEISTPTHWSKLDPKTMKVNDLRKELESRALSSKGLKSQLIARLTKQLKVEEQKEEQKELEKSEKEEDEDDDRKSEDDKEEEERKRQEEIERQRRERRYILPDEPAIIVHPNWAAKSGKFDCSIMSLSVLLDYRLEDNKEHSFEVSLFAELFNEMLQRDFGVRIYKSLLSLPEKEDKKEKDKKSKKDERKDKKEERDDETDEPKPKRRKSGDDKDKKEDRDERKKEDKRKDDSKDDDETEEDNNQDEYDPMEAEEAEDEEDG

SEQ ID NO: 1300 - protein, 1 aa, Artificial Sequence
  Synthetic polypeptide
V

SEQ ID NO: 1301 - protein, 442 aa, Artificial Sequence
  Synthetic polypeptide
MPGKLLWGDIMELEAPLEESESQKKERQKSDRRKSRHHYDSDEKSETRENGVTDDLDAPKAKKSKMKEKLNGDTEEGFNRLSDEFSKSHKSRRKDLPNGDIDEYEKKSKRVSSLDTSTHKSSDNKLEETLTREQKEGAFSNFPISEETIKLLKGRGVTYLFPIQVKTFGPVYEGKDLIAQARTGTGKTFSFAIPLIERLQRNQETIKKSRSPKVLVLAPTRELANQVAKDFKDITRKLSVACFYGGTSYQSQINHIRNGIDILVGTPGRIKDHLQSGRLDLSKLRHVVLDEVDQMLDLGFAEQVEDIIHESYKTDSEDNPQTLLFSATCPQWVYKVAKKYMKSRYEQVDLVGKMTQKAATTVEHLAIQCHWSQRPAVIGDVLQVYSGSEGRAIIFCETKKNVTEMAMNPHIKQLMAVIPALWEAEVGGSPDVRSSRPAWSTC

SEQ ID NO: 1302 - protein, 684 aa, Artificial Sequence
  Synthetic polypeptide
MPGKLRSDAGLESDTAMKKGETLRKQTEEKEKKEKPKSDKTEEIAEEEETVFPKAKQVKKKAEPSEVDMNSPKSKKAKKKEEPSQNDISPKTKSLRKKKEPIEKKVVSSKTKKVTKNEEPSEEEIDAPKPKKMKKEKEMNGETREKSPKLKNGFPHPEPDCNPSEAASEESNSEIEQEIPVEQKEGAFSNFPISEETIKLLKGRGVTFLFPIQAKTFHHVYSGKDLIAQARTGTGKTFSFAIPLIEKLHGELQDRKRGRAPQVLVLAPTRELANQVSKDFSDITKKLSVACFYGGTPYGGQFERMRNGIDILVGTPGRIKDHIQNGKLDLTKLKHVVLDEVDQMLDMGFADQVEEILSVAYKKDSEDNPQTLLFSATCPHWVFNVAKKYMKSTYEQVDLIGKKTQKTAITVEHLAIKCHWTQRAAVIGDVIRVYSGHQGRTIIFCETKKEAQELSQNSAIKQDAQSLHGDIPQKQREITLKGFRNGSFGVLVATNVAARGLDIPEVDLVIQSSPPKDVESYIHRSGRTGRAGRTGVCICFYQHKEEYQLVQVEQKAGIKFKRIGVPSATEIIKASSKDAIRLLDSVPPTAISHFKQSAEKLIEEKGAVEALAAALAHISGATSVDQRSLINSNVGFVTMILQCSIEMPNISYAWKELKEQLGEEIDSKVKGMVFLKGKLMPLCH

SEQ ID NO: 1303 - protein, 31 aa, Artificial Sequence
  Synthetic polypeptide
MMQKLLKCSRLVLALALILVLESSVQVQNRS

SEQ ID NO: 1304 - protein, 114 aa, Artificial Sequence
  Synthetic polypeptide
MMQKLLKCSRLVLALALILVLESSVQGYPTRRARYQWVRCNPDSNSANCLEEKGPMFELLPGESNKIPRLRTDLFPSKQVLKQQRQLATSTTHLAQELLTNVQCSGGQNVLQKR

SEQ ID NO: 1305 - protein, 173 aa, Artificial Sequence
  Synthetic polypeptide
MVAERTHKAAATGARGPGELGAPGTVALVAARAERGARLPSPGSCGLLTLALCSLALSLLAHFRTAELQARVLRLEAERGEQQMETAILGRVNQLLDEKWKLHSRRRREAPKTSPGCNCPPAFQGPTGRPGLPGDKGAIGMPGRVLLPFGSSLSRSSSPYLPAPRSLSPFLSP

SEQ ID NO: 1306 - protein, 173 aa, Artificial Sequence
  Synthetic polypeptide
MVAERTHKAAATGARGPGELGAPGTVALVAARAERGARLPSPGSCGLLTLALCSLALSLLAHFRTAELQARVLRLEAERGEQQMETAILGRVNQLLDEKWKLHSRRRREAPKTSPGCNCPPGPPGPTGRPGLPGDKGAIGMPGRVLLPFGSSLSRSSSPYLPAPRSLSPFLSP

SEQ ID NO: 1307 - protein, 182 aa, Artificial Sequence
  Synthetic polypeptide
MVAERTHKAAATGARGPGELGAPGTVALVAARAERGARLPSPGSCGLLTLALCSLALSLLAHFRTAELQARVLRLEAERGEQQMETAILGRVNQLLDEKWKLHSRRRREAPKTSPGCNCPPGPPGPTGRPGLPGDKGAIGMPGRVGVKGQPGEKLLPFGSSLSRSSSPYLPAPRSLSPFLSP

SEQ ID NO: 1308 - protein, 794 aa, Artificial Sequence
  Synthetic polypeptide
MGTTASTAQQTVSAGTPFEGLQGSGTMDSRHSVSIHSFQSTSLHNSKAKSIIPNKVAPVVITYNCKEEFQIHDELLKAHYTLGRLSDNTPEHYLVQGRYFLVRDVTEKMDVLGTVGSCGAPNFRQVQGGLTVFGMGQPSLSGFRRVLQKLQKDGHRECVIFCVREEPVLFLRADEDFVSYTPRDKQNLHENLQGLGPGVRVESLELAIRKEIHDFAQLSENTYHVYHNTEDLWGEPHAVAIHGEDDLHVTEEVYKRPLFLQPTYRYHRLPLPEQGSPLEAQLDAFVSVLRETPSLLQLRDAHGPPPALVFSCQMGVGRTNLGMVLGTLILLHRSGTTSQPEAAPTQAKPLPMEQFQVIQSFLRMVPQGRRMVEEVDRAITACAELHDLKEVVLENQKKLEGIRPESPAQGSGSRHSVWQRALWSLERYFYLILFNYYLHEQYPLAFALSFSRWLCAHPELYRLPVTLSSAGPVAPRDLIARGSLREDDLVSPDALSTVREMDVANFRRVPRMPIYGTAQPSAKALGSILAYLTDAKRRLRKVVWVSLREEAVLECDGHTYSLRWPGPPVAPDQLETLEAQLKAHLSEPPPGKEGPLTYRFQTCLTMQEVFSQHRRACPGLTYHRIPMPDFCAPREEDFDQLLEALRAALSKDPGTGFVFSCLSGQGRTTTAMVVAVLAFWHIQGFPEVGEEELVSVPDAKFTKGEFQVVMKVVQLLPDGHRVKKEVDAALDTVSETMTPMHYHLREIIICTYRQGKAMETTSHLLGWLQEETEEKCWRGCGDRKPSHPVGGIVG

SEQ ID NO: 1309 - protein, 774 aa, Artificial Sequence
  Synthetic polypeptide
MGTTASTAQQTVSAGTPFEGLQGSGTMDSRHSVSIHSFQSTSLHNSKAKSIIPNKVAPVVITYNCKEEFQIHDELLKAHYTLGRLSDNTPEHYLVQGRYFLVRDVTEKMDVLGTVGSCGAPNFRQVQGGLTVFGMGQPSLSGFRRVLQKLQKDGHRECVIFCVREEPVLFLRADEDFVSYTPRDKQNLHENLQGLGPGVRVESLELAIRKEIHDFAQLSENTYHVYHNTEDLWGEPHAVAIHGEDDLHVTEEVYKRPLFLQPTYRYHRLPLPEQGSPLEAQLDAFVSVLRETPSLLQLRDAHGPPPALVFSCQMGVGRTNLGMVLGTLILLHRSGTTSQPEAAPTQAKPLPMEQFQVIQSFLRMVPQGRRMVEEVDRAITACAELHDLKEVVLENQKKLEGIRPESPAQGSGSRHSVWQRALWSLERYFYLILFNYYLHEQYPLAFALSFSRWLCAHPELYRLPVTLSSAGPVAPRDLIARGSLREDDLVSPDALSTVREMDVANFRRVPRMPIYGTAQPSAKALGSILAYLTDAKRRLRKVVWVSLREEAVLECDGHTYSLRWPGPPVAPDQLETLEAQLKAHLSEPPPGKEGPLTYRFQTCLTMQEVFSQHRRACPGLTYHRIPMPDFCAPREEDFDQLLEALRAALSKDPGTGFVFSCLSGQGRTTTAMVVAVLAFWHIQGFPEVGEEELVSVPDAKFTKGEFQVVMKVVQLLPDGHRVKKEVDAALDTVSETMTPMHYHLREIIICTYRQREDFKCSRNLVAMCHQMISM

SEQ ID NO: 1310 - protein, 797 aa, Artificial Sequence
  Synthetic polypeptide
MGTTASTAQQTVSAGTPFEGLQGSGTMDSRHSVSIHSFQSTSLHNSKAKSIIPNKVAPVVITYNCKEEFQIHDELLKAHYTLGRLSDNTPEHYLVQGRYFLVRDVTEKMDVLGTVGSCGAPNFRQVQGGLTVFGMGQPSLSGFRRVLQKLQKDGHRECVIFCVREEPVLFLRADEDFVSYTPRDKQNLHENLQGLGPGVRVESLELAIRKEIHDFAQLSENTYHVYHNTEDLWGEPHAVAIHGEDDLHVTEEVYKRPLFLQPTYRYHRLPLPEQGSPLEAQLDAFVSVLRETPSLLQLRDAHGPPPALVFSCQMGVGRTNLGMVLGTLILLHRSGTTSQPEAAPTQAKPLPMEQFQVIQSFLRMVPQGRRMVEEVDRAITACAELHDLKEVVLENQKKLEGIRPESPAQGSGSRHSVWQRALWSLERYFYLILFNYYLHEQYPLAFALSFSRWLCAHPELYRLPVTLSSAGPVAPRDLIARGSLREDDLVSPDALSTVREMDVANFRRVPRMPIYGTAQPSAKALGSILAYLTDAKRRLRKVVWVSLREEAVLECDGHTYSLRWPGPPVAPDQLETLEAQLKAHLSEPPPGKEGPLTYRFQTCLTMQEVFSQHRRACPGLTYHRIPMPDFCAPREEDFDQLLEALRAALSKDPGTGFVFSCLSGQGRTTTAMVVAVLAFWHIQGFPEVGEEELVSVPDAKFTKGEFQVVMKVVQLLPDGHRVKKEVDAALDTVSETMTPMHYHLREIIICTYRQDNLLLLQREQLDHLPAIAPLDPTQCSCQGLAPPSSTLHPQAAD

SEQ ID NO: 1311 - protein, 274 aa, Artificial Sequence
  Synthetic polypeptide
MPSTDLLMLKAFEPYLEILEVYSTKAKNYVNGHCTKYEPWQLIAWSVVWTLLIVWGYEFVFQPESLWSRFKKKCFKLTRKMPIIGRKIQDKLNKTKDDISKNMSFLKVDKEYVKALPSQGLSSSAVLEKLKEYSSMDAFWQEGRASGTVYSGEEKLTELLVKAYGDFAWSNPLHPDIFPGLRKIEAEIVRIACSLFNGGPDSCGCVCSFTPEASETTSPPGGTNNSGRAALRAVTLTVKVCSFTPEPARPRTHQKEEIPDTSEHQKEQTPDVLP

SEQ ID NO: 1312 - protein, 257 aa, Artificial Sequence
  Synthetic polypeptide
ILEVYSTKAKNYVNGHCTKYEPWQLIAWSVVWTLLIVWGYEFVFQPESLWSRFKKKCFKLTRKMPIIGRKIQDKLNKTKDDISKNMSFLKVDKEYVKALPSQGLSSSAVLEKLKEYSSMDAFWQEGRASGTVYSGEEKLTELLVKAYGDFAWSNPLHPDIFPGLRKIEAEIVRIACSLFNGGPDSCGCVCSFTPEASETTSPPGGTNNSGRAALRAVTLTVKVCSFTPEPARPRTHQKEEIPDTSEHQKEQTPDVLP

SEQ ID NO: 1313 - protein, 5 aa, Artificial Sequence
  Synthetic polypeptide
RFKTS

SEQ ID NO: 1314 - protein, 5 aa, Artificial Sequence
  Synthetic polypeptide
RFKTS

SEQ ID NO: 1315 - protein, 208 aa, Artificial Sequence
  Synthetic polypeptide
MPSTDLLMLKAFEPYLEILEVYSTKAKNYVNGHCTKYEPWQLIAWSVVWTLLIVWGYEFVFQPESLWSRFKKKCFKLTRKMPIIGRKIQDKLNKTKDDISKNMSFLKVDKEYVKALPSQGLSSSAVLEKLKEYSSMDAFWQEGRASGTVYSGEEKLTELLVKAYGDFAWSNPLHPDIFPGLRKIEAEIVRIACSLFNGGPDSCGCLHS

SEQ ID NO: 1316 - protein, 191 aa, Artificial Sequence
  Synthetic polypeptide
ILEVYSTKAKNYVNGHCTKYEPWQLIAWSVVWTLLIVWGYEFVFQPESLWSRFKKKCFKLTRKMPIIGRKIQDKLNKTKDDISKNMSFLKVDKEYVKALPSQGLSSSAVLEKLKEYSSMDAFWQEGRASGTVYSGEEKLTELLVKAYGDFAWSNPLHPDIFPGLRKIEAEIVRIACSLFNGGPDSCGCLHS

SEQ ID NO: 1317 - protein, 34 aa, Artificial Sequence
  Synthetic polypeptide
MGARSGARGALLLALLLCWDPRLSQAGLSEEEPG

SEQ ID NO: 1318 - protein, 1057 aa, Artificial Sequence
  Synthetic polypeptide
MSLRAGGKTRRWPGPEQAARGGRSGGEQSPRRGEARRRCTHAHGAMGRHVATSCHVAWLLVLISGCWGQVNRLPFFTNHFFDTYLLISEDTPVGSSVTQLLAQDMDNDPLVFGVSGEEASRFFAVEPDTGVVWLRQPLDRETKSEFTVEFSVSDHQGVITRKVNIQVGDVNDNAPTFHNQPYSVRIPENTPVGTPIFIVNATDPDLGAGGSVLYSFQPPSQFFAIDSARGIVTVIRELDYETTQAYQLTVNATDQDKTRPLSTLANLAIIITDVQDMDPIFINLPYSTNIYEHSPPGTTVRIITAIDQDKGRPRGIGYTIVSGNTNSIFALDYISGVLTLNGLLDRENPLYSHGFILTVKGTELNDDRTPSDATVTTTFNILVIDINDNAPEFNSSEYSVAITELAQVGFALPLFIQVVDKDENLGLNSMFEVYLVGNNSHHFIISPTSVQGKADIRIRVAIPLDYETVDRYDFDLFANESVPDHVGYAKVKITLINENDNRPIFSQPLYNISLYENVTVGTSVLTVLATDNDAGTFGEVSYFFSDDPDRFSLDKDTGLIMLIARLDYELIQRFTLTIIARDGGGEETTGRVRINVLDVNDNVPTFQKDAYVGALRENEPSVTQLVRLRATDEDSPPNNQITYSIVSASAFGSYFDISLYEGYGVISVSRPLDYEQISNGLIYLTVMAMDAGNPPLNSTVPVTIEVFDENDNPPTFSKPAYFVSVVENIMAGATVLFLNATDLDRSREYGQESIIYSLEGSTQFRINARSGEITTTSLLDRETKSEYILIVRAVDGGVGHNQKTGIATVNITLLDINDNHPTWKDAPYYINLVEMTPPDSDVTTVVAVDPDLGENGTLVYSIQPPNKFYSLNSTTGKIRTTHAMLDRENPDPHEAELMRKIVVSVTDCGRPPLKATSSATVFVNLLDLNDNDPTFQNLPFVAEVLEGIPAGVSIYQVVAIDLDEGLNGLVSYRMPVGMPRMDFLINSSSGVVVTTTELDRERIAEYQLRVVASDAGTPTKSSTSTLTIHGCSEGCMWSCMGSTQHGLGTLDKLVNGH

SEQ ID NO: 1319 - protein, 1017 aa, Artificial Sequence
  Synthetic polypeptide
MGRHVATSCHVAWLLVLISGCWGQVNRLPFFTNHFFDTYLLISEDTPVGSSVTQLLAQDMDNDPLVFGVSGEEASRFFAVEPDTGVVWLRQPLDRETKSEFTVEFSVSDHQGVITRKVNIQVGDVNDNAPTFHNQPYSVRIPEVGATGNTPVGTPIFIVNATDPDLGAGGSVLYSFQPPSQFFAIDSARGIVTVIRELDYETTQAYQLTVNATDQDKTRPLSTLANLAIIITDVQDMDPIFINLPYSTNIYEHSPPGTTVRIITAIDQDKGRPRGIGYTIVSGNTNSIFALDYISGVLTLNGLLDRENPLYSHGFILTVKGTELNDDRTPSDATVTTTFNILVIDINDNAPEFNSSEYSVAITELAQVGFALPLFIQVVDKDENLGLNSMFEVYLVGNNSHHFIISPTSVQGKADIRIRVAIPLDYETVDRYDFDLFANESVPDHVGYAKVKITLINENDNRPIFSQPLYNISLYENVTVGTSVLTVLATDNDAGTFGEVSYFFSDDPDRFSLDKDTGLIMLIARLDYELIQRFTLTIIARDGGGEETTGRVRINVLDVNDNVPTFQKDAYVGALRENEPSVTQLVRLRATDEDSPPNNQITYSIVSASAFGSYFDISLYEGYGVISVSRPLDYEQISNGLIYLTVMAMDAGNPPLNSTVPVTIEVFDENDNPPTFSKPAYFVSVVENIMAGATVLFLNATDLDRSREYGQESIIYSLEGSTQFRINARSGEITTTSLLDRETKSEYILIVRAVDGGVGHNQKTGIATVNITLLDINDNHPTWKDAPYYINLVEMTPPDSDVTTVVAVDPDLGENGTLVYSIQPPNKFYSLNSTTGKIRTTHAMLDRENPDPHEAELMRKIVVSVTDCGRPPLKATSSATVFVNLLDLNDNDPTFQNLPFVAEVLEGIPAGVSIYQVVAIDLDEGLNGLVSYRMPVGMPRMDFLINSSSGVVVTTTELDRERIAEYQLRVVASDAGTPTKSSTSTLTIHGCSEGCMWSCMGSTQHGLGTLDKLVNGH

SEQ ID NO: 1320 - protein, 54 aa, Artificial Sequence
  Synthetic polypeptide
RQDQASVHPGQLGHHHHRCPGHGPHLHQPALQHQHLRAFSSGHDGAHHHRHRPG

SEQ ID NO: 1321 - protein, 37 aa, Artificial Sequence
  Synthetic polypeptide
RTFVFGWPSHWTTRPWTATTLISLPMRVCLTMWAMPR

SEQ ID NO: 1322 - protein, 83 aa, Artificial Sequence
  Synthetic polypeptide
MAAAAGRSLLLLLSSRGGGGGGAGGCGALTAGCFPGLGVSRHRQQQHHRTGVEEEVKMWKAQRVGELREGRKQLSHALQNDIG

SEQ ID NO: 1323 - protein, 176 aa, Artificial Sequence
  Synthetic polypeptide
MAAAAGRSLLLLLSSRGGGGGGAGGCGALTAGCFPGLGVSRHRQQQHHRTVHQRIASWQNLGAVYCSTVVPSDDVTVVYQNGLPVISVRLPSRRERCQFTLKPISDSVGVFLRQLQEEDRGIDRVAIYSPDGVRVAASTGIDLLLLDDFKLVINDLTYHVRPPKRVHHGTHTKCYQ

SEQ ID NO: 1324 - protein, 127 aa, Artificial Sequence
  Synthetic polypeptide
MVHQRIASWQNLGAVYCSTVVPSDDVTVVYQNGLPVISVRLPSRRERCQFTLKPISDSVGVFLRQLQEEDRGIDRVAIYSPDGVRVAASTGIDLLLLDDFKLVINDLTYHVRPPKRVHHGTHTKCYQ

SEQ ID NO: 1325 - protein, 141 aa, Artificial Sequence
  Synthetic polypeptide
MSCTRYRAASATKQYTRGSLPGRIWELFIAALLCPLMVNVTVVYQNGLPVISVRLPSRRERCQFTLKPISDSVGVFLRQLQEEDRGIDRVAIYSPDGVRVAASTGIDLLLLDDFKLVINDLTYHVRPPKRVHHGTHTKCYQ

SEQ ID NO: 1326 - protein, 158 aa, Artificial Sequence
  Synthetic polypeptide
MIWYILIIGILLPQSLAHPGFFTSIGQMTDLIHTEKDLVTSLKDYIKAEEDKLEQIKKWAEKLDRLTSTATKDPEGFVGHPVNAFKLMKRLNTEWSELENLVLKDMSDGFISNLTIQRQYFPNDEDQVGAAKALLRLQDTYNLDTDTISKGNLPAFTM

SEQ ID NO: 1327 - protein, 205 aa, Artificial Sequence
  Synthetic polypeptide
MISRYTRKAVPQSLELKGITKHALNHHPPPEKLEEISPTSDSHEKDTSSQSKSDITRESSFTSADTGNSLSAFPSYTGAGISTEGSSDFSWGYGELDQNATEKVQTMFTAIDELLYEQKLSVHTKSLQEECQQWTASFPHLRILGRQIITPSEGYRLYPRSPSAVSASYETTLSQERDSTMLIAGRDVPCLRGDVGLWTFELTLE

SEQ ID NO: 1328 - protein, 60 aa, Artificial Sequence
  Synthetic polypeptide
LLHQPTLGIHCLLFQVIQAQGYLLKEARTSPGDMVNSIKMPLKKSRQCSQPLMNSCMSRS

SEQ ID NO: 1329 - protein, 259 aa, Artificial Sequence
  Synthetic polypeptide
MGLLDLCEEVFGTADLYRVLGVRREASDGEVRRGYHKVSLQVHPDRVGEGDKEDATRRFQILGKVYSVLSDREQRAVYDEQGTVDEDSPVLTQDRDWEAYWRLLFKKISLEDIQAFEKTYKGSEEELADIKQAYLDFKGDMDQIMESVLCVQYTEEPRIRNIIQQAIDAGEVPSYNAFVKESKQKMNARKRRAQEEAKEAEMSRKELGLDEGVDSLKAAIQFHRSTDGEKLCIEPVLNRLHLGTSSTPGPDLDDKILDL

SEQ ID NO: 1330 - protein, 264 aa, Artificial Sequence
  Synthetic polypeptide
MEQVPSAGRLVQITVTEGYDLKGFKGDTPVTFIRAEFNQVVLGDSAKITVSPEGSAKYNFTSSFEFNPEGGITSDDLAHKPVFLTVTEVLPKEKKQKEEKTLILGQAVVDLLPLLEGQSSFQTTVPLHPVQGSPLETPRSSAKQCSLEVKVLVAEPLLTTAQISGGNLLKVTLEAAYSVPESFIPTGPGQNYMVGLQVPSLGEKDYPILFKNGTLKLGGEREPVPRPKKWPIANILAPGANNIPDAFIVGGPYEEEEGELNHPE

SEQ ID NO: 1331 - protein, 1043 aa, Artificial Sequence
  Synthetic polypeptide
MELMFAEWEDGERFSFEDSDRFEEDSLCSFISEAESLCQNWRGWRKQSAGPNSPTGGGGGGGSGGTRMRDGLVIPLVELSAKQVAFHIPFEVVEKVYPPVPEQLQLRIAFWSFPENEEDIRLYSCLANGSADEFQRGDQLFRMRAVKDPLQIGFHLSATVVPPQMVPPKGAYNVAVMFDRCRVTSCSCTCGAGAKWCTHVVALCLFRIHNASAVCLRAPVSESLSRLQRDQLQKFAQYLISELPQQILPTAQRLLDELLSSQSTAINTVCGAPDPTAGPSASDQSTWYLDESTLTDNIKKTLHKFCGPSPVVFSDVNSMYLSSTEPPAAAEWACLLRPLRGREPEGVWNLLSIVREMFKRRDSNAAPLLEILTDQCLTYEQITGWWYSVRTSASHSSASGHTGRSNGQSEVAAHACASMCDEMVTLWRLAVLDPALSPQRRRELCTQLRQWQLKVIENVKRGQHKKTLERLFPGFRPAVEACYFNWEEAYPLPGVTYSGTDRKLALCWARALPSRPGASRSGGLEESRDRPRPLPTEPAVRPKEPGTKRKGLGEGVPSSQRGPRRLSAEGGDKALHKMGPGGGKAKALGGAGSGSKGSAGGGSKRRLSSEDSSLEPDLAEMSLDDSSLALGAEASTFGGFPESPPPCPLHGGSRGPSTFLPEPPDTYEEDGGVYFSEGPEPPTASVGPPGLLPGDVCTQDDLPSTDESGNGLPKTKEAAPAVGEEDDDYQAYYLNAQDGAGGEEEKAEGGAGEEHDLFAGLKPLEQESRMEVLFACAEALHAHGYSSEASRLTVELAQDLLANPPDLKVEPPPAKGKKNKVSTSRQTWVATNTLSKAAFLLTVLSERPEHHNLAFRVGMFALELQRPPASTKALEVKLAYQESEVAALLKKIPLGPSEMSTMRCRAEELREGTLCDYRPVLPLMLASFIFDVLCAPVVSPTGSRPPSRNWNSETPGDEELGFEAAVAALGMKTTVSEAEHPLLCEGTRREKGDLALALMITYKDDQAKLKKKISRAWWRAPVVPATREAEVGELLEPRSLRLQ

SEQ ID NO: 1332 - protein, 1005 aa, Artificial Sequence
  Synthetic polypeptide
MELMFAEWEDGERFSFEDSDRFEEDSLCSFISEAESLCQNWRGWRKQSAGPNSPTGGGGGGGSGGTRMRDGLVIPLVELSAKQVAFHIPFEVVEKVYPPVPEQLQLRIAFWSFPENEEDIRLYSCLANGSADEFQRGDQLFRMRAVKDPLQIGFHLSATVVPPQMVPPKGAYNVAVMFDRCRVTSCSCTCGAGAKWCTHVVALCLFRIHNASAVCLRAPVSESLSRLQRDQLQKFAQYLISELPQQILPTAQRLLDELLSSQSTAINTVCGAPDPTAGPSASDQSTWYLDESTLTDNIKKTLHKFCGPSPVVFSDVNSMYLSSTEPPAAAEWACLLRPLRGREPEGVWNLLSIVREMFKRRDSNAAPLLEILTDQCLTYEQITGWWYSVRTSASHSSASGHTGRSNGQSEVAAHACASMCDEMVTLWRLAVLDPALSPQRRRELCTQLRQWQLKVIENVKRGQHKKTLERLFPGFRPAVEACYFNWEEAYPLPGVTYSGTDRKLALCWARALPSRPGASRSGGLEESRDRPRPLPTEPAVRPKEPGTKRKGLGEGVPSSQRGPRRLSAEGGDKALHKMGPGGGKAKALGGAGSGSKGSAGGGSKRRLSSEDSSLEPDLAEMSLDDSSLALGAEASTFGGFPESPPPCPLHASVGPPGLLPGDVCTQDDLPSTDESGNGLPKTKEAAPAVGEEDDDYQAYYLNAQDGAGGEEEKAEGGAGEEHDLFAGLKPLEQESRMEVLFACAEALHAHGYSSEASRLTVELAQDLLANPPDLKVEPPPAKGKKNKVSTSRQTWVATNTLSKAAFLLTVLSERPEHHNLAFRVGMFALELQRPPASTKALEVKLAYQESEVAALLKKIPLGPSEMSTMRCRAEELREGTLCDYRPVLPLMLASFIFDVLCAPGSRPPSRNWNSETPGDEELGFEAAVAALGMKTTVSEAEHPLLCEGTRREKGDLALALMITYKDDQAKLKKKISRAWWRAPVVPATREAEVGELLEPRSLRLQ

SEQ ID NO: 1333 - protein, 1038 aa, Artificial Sequence
  Synthetic polypeptide
MELMFAEWEDGERFSFEDSDRFEEDSLCSFISEAESLCQNWRGWRKQSAGPNSPTGGGGGGGSGGTRMRDGLVIPLVELSAKQVAFHIPFEVVEKVYPPVPEQLQLRIAFWSFPENEEDIRLYSCLANGSADEFQRGDQLFRMRAVKDPLQIGFHLSATVVPPQMVPPKGAYNVAVMFDRCRVTSCSCTCGAGAKWCTHVVALCLFRIHNASAVCLRAPVSESLSRLQRDQLQKFAQYLISELPQQILPTAQRLLDELLSSQSTAINTVCGAPDPTAGPSASDQSTWYLDESTLTDNIKKTLHKFCGPSPVVFSDVNSMYLSSTEPPAAAEWACLLRPLRGREPEGVWNLLSIVREMFKRRDSNAAPLLEILTDQCLTYEQITGWWYSVRTSASHSSASGHTGRSNGQSEVAAHACASMCDEMVTLWRLAVLDPALSPQRRRELCTQLRQWQLKVIENVKRGQHKKTLERLFPGFRPAVEACYFNWEEAYPLPGVTYSGTDRKLALCWARALPSRPGASRSGGLEESRDRPRPLPTEPAVRPKEPGTKRKGLGEGVPSSQRGPRRLSAEGGDKALHKMGPGGGKAKALGGAGSGSKGSAGGGSKRRLSSEDSSLEPDLAEMSLDDSSLALGAEASTFGGFPESPPPCPLHGGSRGPSTFLPEPPDTYEEDGGVYFSEGPEPPTASVGPPGLLPGDVCTQDDLPSTDESGNGLPKTKEAAPAVGEEDDDYQAYYLNAQDGAGGEEEKAEGGAGEEHDLFAGLKPLEQESRMEVLFACAEALHAHGYSSEASRLTVELAQDLLANPPDLKVEPPPAKGKKNKVSTSRQTWVATNTLSKAAFLLTVLSERPEHHNLAFRVGMFALELQRPPASTKALEVKLAYQESEVAALLKKIPLGPSEMSTMRCRAEELREGTLCDYRPVLPLMLASFIFDVLCAPGSRPPSRNWNSETPGDEELGFEAAVAALGMKTTVSEAEHPLLCEGTRREKGDLALALMITYKDDQAKLKKKISRAWWRAPVVPATREAEVGELLEPRSLRLQ

SEQ ID NO: 1334 - protein, 1036 aa, Artificial Sequence
  Synthetic polypeptide
MELMFAEWEDGERFSFEDSDRFEEDSLCSFISEAESLCQNWRGWRKQSAGPNSPTGGGGGGGSGGTRMRDGLVIPLVELSAKQVAFHIPFEVVEKVYPPVPEQLQLRIAFWSFPENEEDIRLYSCLANGSADEFQRGDQLFRMRAVKDPLQIGFHLSATVVPPQMVPPKGAYNVAVMFDRCRVTSCSCTCGAGAKWCTHVVALCLFRIHNASAVCLRAPVSESLSRLQRDQLQKFAQYLISELPQQILPTAQRLLDELLSSQSTAINTVCGAPDPTAGPSASDQSTWYLDESTLTDNIKKTLHKFCGPSPVVFSDVNSMYLSSTEPPAAAEWACLLRPLRGREPEGVWNLLSIVREMFKRRDSNAAPLLEILTDQCLTYEQITGWWYSVRTSASHSSASGHTGRSNGQSEVAAHACASMCDEMVTLWRLAVLDPALSPQRRRELCTQLRQWQLKVIENVKRGQHKKTLERLFPGFRPAVEACYFNWEEAYPLPGVTYSGTDRKLALCWARALPSRPGASRSGGLEESRDRPRPLPTEPAVRPKEPGTKRKGLGEGVPSSQRGPRRLSAEGGDKALHKMGPGGGKAKALGGAGSGSKGSAGGGSKRRLSSEDSSLEPDLAEMSLDDSSLALGAEASTFGGFPESPPPCPLHGGSRGPSTFLPEPPDTYEEDGGVYFSEGPEPPTASVGPPGLLPGDVCTQDDLPSTDESGNGLPKTKEAAPAVGEEDDDYQAYYLNAQDGAGGEEEKAEGGAGEEHDLFAGLKPLEQESRMEVLFACAEALHAHGYSSEASRLTVELAQDLLANPPDLKGKKNKVSTSRQTWVATNTLSKAAFLLTVLSERPEHHNLAFRVGMFALELQRPPASTKALEVKLAYQESEVAALLKKIPLGPSEMSTMRCRAEELREGTLCDYRPVLPLMLASFIFDVLCAPVVSPTGSRPPSRNWNSETPGDEELGFEAAVAALGMKTTVSEAEHPLLCEGTRREKGDLALALMITYKDDQAKLKKKISRAWWRAPVVPATREAEVGELLEPRSLRLQ

SEQ ID NO: 1335 - protein, 657 aa, Artificial Sequence
  Synthetic polypeptide
ITGWWYSVRTSASHSSASGHTGRSNGQSEVAAHACASMCDEMVTLWRLAVLDPALSPQRRRELCTQLRQWQLKVIENVKRGQHKKTLERLFPGFRPAVEACYFNWEEAYPLPGVTYSGTDRKLALCWARALPSRPGASRSGGLEESRDRPRPLPTEPAVRPKEPGTKRKGLGEGVPSSQRGPRRLSAEGGDKALHKMGPGGGKAKALGGAGSGSKGSAGGGSKRRLSSEDSSLEPDLAEMSLDDSSLALGAEASTFGGFPESPPPCPLHGGSRGPSTFLPEPPDTYEEDGGVYFSEGPEPPTASVGPPGLLPGDVCTQDDLPSTDESGNGLPKTKEAAPAVGEEDDDYQAYYLNAQDGAGGEEEKAEGGAGEEHDLFAGLKPLEQESRMEVLFACAEALHAHGYSSEASRLTVELAQDLLANPPDLKVEPPPAKGKKNKVSTSRQTWVATNTLSKAAFLLTVLSERPEHHNLAFRVGMFALELQRPPASTKALEVKLAYQESEVAALLKKIPLGPSEMSTMRCRAEELREGTLCDYRPVLPLMLASFIFDVLCAPGSRPPSRNWNSETPGDEELGFEAAVAALGMKTTVSEAEHPLLCEGTRREKGDLALALMITYKDDQAKLKKKISRAWWRAPVVPATREAEVGELLEPRSLRLQ

SEQ ID NO: 1336 - skipped

SEQ ID NO: 1337 - protein, 3 aa, Artificial Sequence
  Synthetic polypeptide
RTI

SEQ ID NO: 1338 - protein, 37 aa, Artificial Sequence
  Synthetic polypeptide
WGRGREGRGRGWGGARPVCWAEATGTGESHGGTVCLC

SEQ ID NO: 1339 - protein, 105 aa, Artificial Sequence
  Synthetic polypeptide
MATTATCTRFTDDYQLFEELGKGAFSVVRRCVKKTSTQEYAAKIINTKKLSARDHQKLEREARICRLLKHPNIAPGGRAGSSSSQPHPWHVQPRLLRGSCPVDIV

SEQ ID NO: 1340 - protein, 40 aa, Artificial Sequence
  Synthetic polypeptide
RLLKHPNIAPGGRAGSSSSQPHPWHVQPRLLRGSCPVDIV

SEQ ID NO: 1341 - protein, 367 aa, Artificial Sequence
  Synthetic polypeptide
MVFHLRTRYEQANCDCLNGGTCVSNKYFSNIHWCNCPKKFGGQHCEIDKSKTCYEGNGHFYRGKASTDTMGRPCLPWNSATVLQQTYHAHRSDALQLGLGKHNYCRNPDNRRRPWCYVQVGLKLLVQECMVHDCADGKKPSSPPEELKFQCGQKTLRPRFKIIGGEFTTIENQPWFAAIYRRHRGGSVTYVCGGSLISPCWVISATHCFIDYPKKEDYIVYLGRSRLNSNTQGEMKFEVENLILHKDYSADTLAHHNDIALLKIRSKEGRCAQPSRTIQTICLPSMYNDPQFGTSCEITGFGKENSTDYLYPEQLKMTVVKLISHRECQQPHYYGSEVTTKMLCAADPQWKTDSCQPGVVVPACNPS

SEQ ID NO: 1342 - protein, 384 aa, Artificial Sequence
  Synthetic polypeptide
MRALLARLLLCVLVVSDSKGSNELHQVPSNCDCLNGGTCVSNKYFSNIHWCNCPKKFGGQHCEIDKSKTCYEGNGHFYRGKASTDTMGRPCLPWNSATVLQQTYHAHRSDALQLGLGKHNYCRNPDNRRRPWCYVQVGLKLLVQECMVHDCADGKKPSSPPEELKFQCGQKTLRPRFKIIGGEFTTIENQPWFAAIYRRHRGGSVTYVCGGSLISPCWVISATHCFIDYPKKEDYIVYLGRSRLNSNTQGEMKFEVENLILHKDYSADTLAHHNDIALLKIRSKEGRCAQPSRTIQTICLPSMYNDPQFGTSCEITGFGKENSTDYLYPEQLKMTVVKLISHRECQQPHYYGSEVTTKMLCAADPQWKTDSCQPGVVVPACNPS

SEQ ID NO: 1343 - protein, 348 aa, Artificial Sequence
  Synthetic polypeptide
MRALLARLLLCVLVVSDSKGSNELHQVPYKSKTCYEGNGHFYRGKASTDTMGRPCLPWNSATVLQQTYHAHRSDALQLGLGKHNYCRNPDNRRRPWCYVQVGLKLLVQECMVHDCADGKKPSSPPEELKFQCGQKTLRPRFKIIGGEFTTIENQPWFAAIYRRHRGGSVTYVCGGSLISPCWVISATHCFIDYPKKEDYIVYLGRSRLNSNTQGEMKFEVENLILHKDYSADTLAHHNDIALLKIRSKEGRCAQPSRTIQTICLPSMYNDPQFGTSCEITGFGKENSTDYLYPEQLKMTVVKLISHRECQQPHYYGSEVTTKMLCAADPQWKTDSCQPGVVVPACNPS

SEQ ID NO: 1344 - protein, 361 aa, Artificial Sequence
  Synthetic polypeptide
MVFHLRTRYEQANCDCLNGGTCVSNKYFSNIHWCNCPKKFGGQHCEIDKSKTCYEGNGHFYRGKASTDTMGRPCLPWNSATVLQQTYHAHRSDALQLGLGKHNYCRNPDNRRRPWCYVQVGLKLLVQECMVHDCADGKKPSSPPEELKFQCGQKTLRPRFKIIGGEFTTIENQPWFAAIYRRHRGGSVTYVCGGSLISPCWVISATHCFIDYPKKEDYIVYLGRSRLNSNTQGEMKFEVENLILHKDYSADTLAHHNDIALLKIRSKEGRCAQPSRTIQTICLPSMYNDPQFGTSCEITGFGKENSTDYLYPEQLKMTVVKLISHRECQQPHYYGSEVTTKMLCAADPQWKTDSCQEASLQ

SEQ ID NO: 1345 - protein, 378 aa, Artificial Sequence
  Synthetic polypeptide
MRALLARLLLCVLVVSDSKGSNELHQVPSNCDCLNGGTCVSNKYFSNIHWCNCPKKFGGQHCEIDKSKTCYEGNGHFYRGKASTDTMGRPCLPWNSATVLQQTYHAHRSDALQLGLGKHNYCRNPDNRRRPWCYVQVGLKLLVQECMVHDCADGKKPSSPPEELKFQCGQKTLRPRFKIIGGEFTTIENQPWFAAIYRRHRGGSVTYVCGGSLISPCWVISATHCFIDYPKKEDYIVYLGRSRLNSNTQGEMKFEVENLILHKDYSADTLAHHNDIALLKIRSKEGRCAQPSRTIQTICLPSMYNDPQFGTSCEITGFGKENSTDYLYPEQLKMTVVKLISHRECQQPHYYGSEVTTKMLCAADPQWKTDSCQEASLQ

SEQ ID NO: 1346 - protein, 342 aa, Artificial Sequence
  Synthetic polypeptide
MRALLARLLLCVLVVSDSKGSNELHQVPYKSKTCYEGNGHFYRGKASTDTMGRPCLPWNSATVLQQTYHAHRSDALQLGLGKHNYCRNPDNRRRPWCYVQVGLKLLVQECMVHDCADGKKPSSPPEELKFQCGQKTLRPRFKIIGGEFTTIENQPWFAAIYRRHRGGSVTYVCGGSLISPCWVISATHCFIDYPKKEDYIVYLGRSRLNSNTQGEMKFEVENLILHKDYSADTLAHHNDIALLKIRSKEGRCAQPSRTIQTICLPSMYNDPQFGTSCEITGFGKENSTDYLYPEQLKMTVVKLISHRECQQPHYYGSEVTTKMLCAADPQWKTDSCQEASLQ

SEQ ID NO: 1347 - protein, 107 aa, Artificial Sequence
  Synthetic polypeptide
MPVFHTRTIESILEPVAQQISHLVIMHEEGEVDGKAIPDLTAPVAAVQAAVSNLVRVGKETVQTTEDQILKRDMPPAFIKLLLEEILKNVLQTSPLIPDVSLKYKRE

SEQ ID NO: 1348 - protein, 133 aa, Artificial Sequence
  Synthetic polypeptide
MAAAEEEPKPKKLKVEAPQALRENILFGMGNPLLDISAVVDKDFLDKYSLKPNDQILAEDKHKELYLWPAPPASCACKAPDSVGREERFCQTFGKRDGLTSGKRLLLYFREDHLLFPSPLQLPSPLRAISTAQ

SEQ ID NO: 1349 - protein, 116 aa, Artificial Sequence
  Synthetic polypeptide
MTSVRENILFGMGNPLLDISAVVDKDFLDKYSLKPNDQILAEDKHKELYLWPAPPASCACKAPDSVGREERFCQTFGKRDGLTSGKRLLLYFREDHLLFPSPLQLPSPLRAISTAQ

SEQ ID NO: 1350 - protein, 280 aa, Artificial Sequence
  Synthetic polypeptide
MAAAEEEPKPKKLKVEAPQALRENILFGMGNPLLDISAVVDKDFLDKYSLKPNDQILAEDKHKELFDELVKKFKVEYHAGGSTQNSIKVAQWMIQQPHKAATFFGCIGIDKFGEILKRKAAEAHVDAHYYEQNEQPTGTCAACITGDNRSLIANLAAANCYKKEKHLDLEKNWMLVEKARVCYIAGFFLTVSPESVLKVAHHASENNRIFTLNLSAPFISQFYKESLMKVMPYVDILFGNETAQWLMPEILALWEATADGSLELRSLRPAWTTWQDLVSI

SEQ ID NO: 1351 - protein, 263 aa, Artificial Sequence
  Synthetic polypeptide
MTSVRENILFGMGNPLLDISAVVDKDFLDKYSLKPNDQILAEDKHKELFDELVKKFKVEYHAGGSTQNSIKVAQWMIQQPHKAATFFGCIGIDKFGEILKRKAAEAHVDAHYYEQNEQPTGTCAACITGDNRSLIANLAAANCYKKEKHLDLEKNWMLVEKARVCYIAGFFLTVSPESVLKVAHHASENNRIFTLNLSAPFISQFYKESLMKVMPYVDILFGNETAQWLMPEILALWEATADGSLELRSLRPAWTTWQDLVSI

SEQ ID NO: 1352 - protein, 245 aa, Artificial Sequence
  Synthetic polypeptide
MTSVRENILFGMGNPLLDISAVVDKDFLDKFDELVKKFKVEYHAGGSTQNSIKVAQWMIQQPHKAATFFGCIGIDKFGEILKRKAAEAHVDAHYYEQNEQPTGTCAACITGDNRSLIANLAAANCYKKEKHLDLEKNWMLVEKARVCYIAGFFLTVSPESVLKVAHHASENNRIFTLNLSAPFISQFYKESLMKVMPYVDILFGNETAQWLMPEILALWEATADGSLELRSLRPAWTTWQDLVSI

SEQ ID NO: 1353 - protein, 660 aa, Artificial Sequence
  Synthetic polypeptide
MKRLTCFFICFFLSEVSGFEIPINGLSEFVDYEDLVELAPGKFQLVAENRRYQRSLPGESEEMMEEVDQVTLYSYKVQSTITSRMATTMIQSKVVNNSPQPQNVVFDVQIPKGAFISNFSMTVDGKTFRSSIKEKTVGRALYAQARAKGKTAGLVRSSALDMENFRTEVNVLPGAKVQFELHYQEVKWRKLGSYEHRIYLQPGRLAKHLEVDVWVIEPQGLRFLHVPDTFEGHFDGVPVISKGQQKAHVSFKPTVAQQRICPNCRETAVDGELVVLYDVKREEKAGELEVFNGYFVHFFAPDNLDPIPKNILFVIDVSGSMWGVKMKQTVEAMKTILDDLRAEDHFSVIDFNQNIRTWRNDLISATKTQVADAKRYIEKIQPSGGTNINEALLRAIFILNEANNLGLLDPNSVSLIILVSDGDPTVGELKLSKIQKNVKENIQDNISLFSLGMGFDVDYDFLKRLSNENHGIAQRIYGNQDTSSQLKKFYNQVSTPLLRNVQFNYPHTSVTDVTQNNFHNYFGGSEIVVAGKFDPAKLDQIESVITATSANTQLVLETLAQMDDLQDFLSKDKHADPDFTRKLWAYLTINQLLAERSLAPTAAAKRRITRSILQMSLDHHIVTPLTSLVIENEAGDERMLADAPPQDPSCCSAGCDGGHL

SEQ ID NO: 1354 - protein, 649 aa, Artificial Sequence
  Synthetic polypeptide
MKRLTCFFICFFLSEVSGFEIPINGLSEFVDYEDLVELAPGKFQLVAENRRYQEEVDQVTLYSYKVQSTITSRMATTMIQSKVVNNSPQPQNVVFDVQIPKGAFISNFSMTVDGKTFRSSIKEKTVGRALYAQARAKGKTAGLVRSSALDMENFRTEVNVLPGAKVQFELHYQEVKWRKLGSYEHRIYLQPGRLAKHLEVDVWVIEPQGLRFLHVPDTFEGHFDGVPVISKGQQKAHVSFKPTVAQQRICPNCRETAVDGELVVLYDVKREEKAGELEVFNGYFVHFFAPDNLDPIPKNILFVIDVSGSMWGVKMKQTVEAMKTILDDLRAEDHFSVIDFNQNIRTWRNDLISATKTQVADAKRYIEKIQPSGGTNINEALLRAIFILNEANNLGLLDPNSVSLIILVSDGDPTVGELKLSKIQKNVKENIQDNISLFSLGMGFDVDYDFLKRLSNENHGIAQRIYGNQDTSSQLKKFYNQVSTPLLRNVQFNYPHTSVTDVTQNNFHNYFGGSEIVVAGKFDPAKLDQIESVITATSANTQLVLETLAQMDDLQDFLSKDKHADPDFTRKLWAYLTINQLLAERSLAPTAAAKRRITRSILQMSLDHHIVTPLTSLVIENEAGDERMLADAPPQDPSCCSAGCDGGHL

SEQ ID NO: 1355 - protein, 148 aa, Artificial Sequence
  Synthetic polypeptide
MEKYLSLSGNHSSNKRSLEGLSAFRSLEELILDNNQLGDDLVLPGLPRLHTLTLNKNRITDLENLLDHLAEVTPALEYLSLLGNVACPNELVSLEKDEEDYKRYRCFVLYKLPNLKFLDAQKVTRQEREEALVRGVFMKVVKPKVEAK

SEQ ID NO: 1356 - protein, 176 aa, Artificial Sequence
  Synthetic polypeptide
MEKYLSLSGNHSSNKRSLEGLSAFRSLEELILDNNQLGDDLVLPGLPRLHTLTLNKNRITDLENLLDHLAEVTPALEYLSLLGNVACPNELVSLEKDEEDYKRYRCFVLYKLPNLKFLDAQKVTRQEREEALVRGVFMKVVKPKASSEDVASSPERHYTPLPSASRELTSHQVLSF

SEQ ID NO: 1357 - protein, 33 aa, Artificial Sequence
  Synthetic polypeptide
MASSEDVASSPERHYTPLPSASRELTSHQVLSF

SEQ ID NO: 1358 - protein, 144 aa, Artificial Sequence
  Synthetic polypeptide
MNDTVTIRTRKFMTNRLLQRKQMVIDVLHPGKATVPKTEIREKLAKMYKTTPDVIFVFGFRTHFGGGKTTGFGMIYDSLDYAKKNEPKHRLARHGLYEKKKTSRKQRKERKNRMKKVRGTAKANFVAGFEDGRGGHEPRNIGSL

SEQ ID NO: 1359 - protein, 45 aa, Artificial Sequence
  Synthetic polypeptide
MATAAGATYFQRGSLFWFTVITLSFGYYTPQQRSETLSKKKERKK

SEQ ID NO: 1360 - protein, 18 aa, Artificial Sequence
  Synthetic polypeptide
GRLGSSQPTLCLGFSRGW

SEQ ID NO: 1361 - protein, 35 aa, Artificial Sequence
  Synthetic polypeptide
MHYYRYSNAKVSCWYKYLLFSYNIIFWAWRGGSHL

SEQ ID NO: 1362 - protein, 291 aa, Artificial Sequence
  Synthetic polypeptide
MRRCRWAALALGLLRLCLAQANFAPHFFDNGVGSTNGNMALFSLPEDTPVGSHVYTLNGTDPEGDPISYHISFDPSTRSVFSVDPTFGNITLVEELDREREDEIEAIISISDGLNLVAEKVVILVTDANDEAPRFIQEPYVALVPEDIPAGSIIFKVHAVDRDTGSGGSVTYFLQNLHSPFAVDRHSGVLRLQAGATLDYERSRTHYITVVAKDGGGRLHGADVVFSATTTVTVNVEDVQDMAPVFVGTPYYGYVYEDTLPGSEVLKVVAMDGDRGKPNRILYSLVNDTDD

SEQ ID NO: 1363 - protein, 50 aa, Artificial Sequence
  Synthetic polypeptide
MAPVFVGTPYYGYVYEDTLPGSEVLKVVAMDGDRGKPNRILYSLVNDTDD

SEQ ID NO: 1364 - protein, 289 aa, Artificial Sequence
  Synthetic polypeptide
MVHAEAFSRPLSRNEVVGLIFRLTIFGAVTYFTIKWMVDAIDPTRKQKVEAQKQAEKLMKQIGVKNVKLSEYEMSIAAHLVDPLNMHVTWSDIAGLDDVITDLKDTVILPIKKKHLFENSRLLQPPKGVLLYGPPGCGKTLIAKATAKEAGCRFINLQPSTLTDKWYGESQKLAAAVFSLAIKLQPSIIFIDEIDSFLRNRSSSDHEATAMMKAQFMSLWDGLDTDHSCQVIVMGATNRPQDLDSAIMRRMPTRFHINQPALKQREAILKLILKNENVCGKIVFHKIGP

SEQ ID NO: 1365 - protein, 201 aa, Artificial Sequence
  Synthetic polypeptide
MKQIGVKNVKLSEYEMSIAAHLVDPLNMHVTWSDIAGLDDVITDLKDTVILPIKKKHLFENSRLLQPPKGVLLYGPPGCGKTLIAKATAKEAGCRFINLQPSTLTDKWYGESQKLAAAVFSLAIKLQPSIIFIDEIDSFLRNRSSSDHEATAMMKAQFMSLWDGLDTDHSCQALKQREAILKLILKNENVCGKIVFHKIGP

SEQ ID NO: 1366 - protein, 74 aa, Artificial Sequence
  Synthetic polypeptide
MTAIIKEIVSRNKRRYQEDGFDLDLTYIYPNIIAMGFPAERLEGVYRNNIDDVVRFLDSKHKNHYKIYNLCHLE

SEQ ID NO: 1367 - protein, 93 aa, Artificial Sequence
  Synthetic polypeptide
MTAIIKEIVSRNKRRYQEDGFDLDLTYIYPNIIAMGFPAERLEGVYRNNIDDVVRFLDSKHKNHYKIYNLCAERHYDTAKFNCREDLSCHTKG

SEQ ID NO: 1368 - protein, 92 aa, Artificial Sequence
  Synthetic polypeptide
MTAIIKEIVSRNKRRYQEDGFDLDLTYIYPNIIAMGFPAERLEGVYRNNIDDVVRFLDSKHKNHYKIYNLCAERHYDTAKFNCRDLSCHTKG

SEQ ID NO: 1369 - protein, 112 aa, Artificial Sequence
  Synthetic polypeptide
MCEEEDSTALVCDNGSGLCKAGFAGDDAPRAVFPSIVGRPRHQGVMVGMGQKDSYVGDEAQSKRGILTLKYPIEHGIITNWDDMEKLETIILSKLSQGQKTKHRMFSLIGGN

SEQ ID NO: 1370 - protein, 265 aa, Artificial Sequence
  Synthetic polypeptide
MLKLVGGGGGQDWACSVAGTSLGGEEAAFEVARPGDQGKAGGGSPGWGCAGIPDSAPGAGVLQAGAVGPARGGQGAEEVGESAGGGEERRVRHPQAPALRLLNRKPQGGSGEIKTPENDLQRGRLSRGPRTAPPAPGMGDRSGQQERSVPHSPGAPVGTSAAAVNGLLHNGFHPPPVQPPHVCSRGPVGGSDAAPQRLPLLPELQPQPLLPQHDSPAKKCRLRRRMDSGRKNRPRLQLEGSVPQDESCLESHPYLIQMRLCTLNF

SEQ ID NO: 1371 - protein, 254 aa, Artificial Sequence
  Synthetic polypeptide
MLKLVGGGGGQDWACSVAGTSLGGEEAAFEVARPGDQGKAGGGSPGWGCAGIPDSAPGAGVLQAGAVGPARGGQGAEEVGESAGGGEERRVRHPQAPALRLLNRKPQGGSGEIKTPENDLQRGRLSRGPRTAPPAPGMGDRSGQQERSVPHSPGAPVGTSAAAVNGLLHNGFHPPPVQPPHVCSRGPVGGSDAAPQRLPLLPELQPQPLLPQHDSPAKKCRLRRRMDSGRKNRPPRRPSPDAVPRSWTSQPPEL

SEQ ID NO: 1372 - protein, 266 aa, Artificial Sequence
  Synthetic polypeptide
MLKLVGGGGGQDWACSVAGTSLGGEEAAFEVARPGDQGKAGGGSPGWGCAGIPDSAPGAGVLQAGAVGPARGGQGAEEVGESAGGGEERRVRHPQAPALRLLNRKPQGGSGEIKTPENDLQRGRLSRGPRTAPPAPGMGDRSGQQERSVPHSPGAPVGTSAAAVNGLLHNGFHPPPVQPPHVCSRGPVGGSDAAPQRLPLLPELQPQPLLPQHDSPAKKCRLRRRMDSGRKNRPPCSFAFLPWDDAARRPSPDAVPRSWTSQPPEL

SEQ ID NO: 1373 - protein, 1669 aa, Artificial Sequence
  Synthetic polypeptide
MESNFNQEGVPRPSYVFSADPIARPSEINFDGIKLDLSHEFSLVAPNTEANSFESKDYLQVCLRIRPFTQSEKELESEGCVHILDSQTVVLKEPQCILGRLSEKSSGQMAQKFSFSKVFGPATTQKEFFQGCIMQPVKDLLKGQSRLIFTYGLTNSGKTYTFQGTEENIGILPRTLNVLFDSLQERLYTKMNLKPHRSREYLRLSSEQEKEEIASKSALLRQIKEVTVHNDSDDTLYGSLTNSLNISEFEESIKDYEQANLNMANSIKFSVWVSFFEIYNEYIYDLFVPVSSKFQKRKMLRLSQDVKGYSFIKDLQWIQVSDSKEAYRLLKLGIKHQSVAFTKLNNASSRSHSIFTVKILQIEDSEMSRVIRVSELSLCDLAGSERTMKTQNEGERLRETGNINTSLLTLGKCINVLKNSEKSKFQQHVPFRESKLTHYFQSFFNGKGKICMIVNISQCYLAYDETLNVLKFSAIAQKVCVPDTLNSSQEKLFGPVKSSQDVSLDSNSNSKILNVKRATISWENSLEDLMEDEDLVEELENAEETQNVETKLLDEDLDKTLEENKAFISHEEKRKLLDLIEDLKKKLINEKKEKLTLEFKIREEVTQEFTQYWAQREADFKETLLQEREILEENAERRLAIFKDLVGKCDTREEAAKDICATKVETEETHNYVGFEDIIDSLQDNVADIKKQAEIAHLYIASLPDPQEATACLELKFNQIKAELAKTKGELIKTKEELKKRENESDSLIQELETSNKKIITQNQRIKELINIIDQKEDTINEFQNLKSHMENTFKCNDKADTSSLIINNKLICNETVEVPKDSKSKICSERKRVNENELQQDEPPAKKGSIHVSSAITEDQKKSEEVRPNIAEIEDIRVLQENNEGLRAFLLTIENELKNEKEEKAELNKQIVHFQQELSLSEKKNLTLSKEVQQIQSNYDIAIAELHVQKSKNQEQEEKIMKLSNEIETATRSITNNVSQIKLMHTKIDELRTLDSVSQISNIDLLNLRDLSNGSEEDNLPNTQLDLLGNDYLVSKQVKEYRIQEPNRENSFHSSIEAIWEECKEIVKASSKKSHQIEELEQQIEKLQAEVKGYKDENNRLKEKEHKNQDDLLKEKETLIQQLKEELQEKNVTLDVQIQHVVEGKRALSELTQGVTCYKAKIKELETILETQKVECSHSAKLEQDILEKESIILKLERNLKEFQEHLQDSVKNTKDLNVKELKLKEEITQLTNNLQDMKHLLQLKEEEEETNRQETEKLKEELSASSARTQNLKADLQRKEEDYADLKEKLTDAKKQIKQVQKEVSVMRDEDKLLRIKINELEKKKNQCSQELDMKQRTIQQLKEQLNNQKVEEAIQQYERACKDLNVKEKIIEDMRMTLEEQEQTQVEQDQVLEAKLEEVERLATELEKWKEKCNDLETKNNQRSNKEHENNTDVLGKLTNLQDELQESEQKYNADRKKWLEEKMMLITQAKEAENIRNKEMKKYAEDRERFFKQQNEMEILTAQLTEKDSDLQKWREERDQLVAALEIQLKALISSNVQKDNEIEQLKRIISETSKIETQIMDIKPKRISSADPDKLQTEPLSTSFEISRNKIEDGSVVLDSCEVSTENDQSTRFPKPELEIQFTPLQPNKMAVKHPGCTTPVTVKIPKARKRKSNEMEENWKKLL

SEQ ID NO: 1374 - protein, 1629 aa, Artificial Sequence
  Synthetic polypeptide
MESNFNQEGVPRPSYVFSADPIARPSEINFDGIKLDLSHEFSLVAPNTEANSFESKDYLQVCLRIRPFTQSEKELESEGCVHILDSQTVVLKEPQCILGRLSEKSSGQMAQKFSFSKVFGPATTQKEFFQGCIMQPVKDLLKGQSRLIFTYGLTNSGKTYTFQGTEENIGILPRTLNVLFDSLQERLYTKMNLKPHRSREYLRLSSEQEKEEIASKSALLRQIKEVTVHNDSDDTLYGSLTNSLNISEFEESIKDYEQANLNMANSIKFSVWVSFFEIYNEYIYDLFVPVSSKFQKRKMLRLSQDVKGYSFIKDLQWIQVSDSKEAYRLLKLGIKHQSVAFTKLNNASSRSHSIFTVKILQIEDSEMSRVIRVSELSLCDLAGSERTMKTQNEGERLRETGNINTSLLTLGKCINVLKNSEKSKFQQHVPFRESKLTHYFQSFFNGKGKICMIVNISQCYLAYDETLNVLKFSAIAQKVCVPDTLNSSQEKLFGPVKSSQDVSLDSNSNSKILNVKRATISWENSLEDLMEDEDLVEELENAEETQNVETKLLDEDLDKTLEENKAFISHEEKRKLLDLIEDLKKKLINEKKEKLTLEFKIREEVTQEFTQYWAQREADFKETLLQEREILEENAERRLAIFKDLVGKCDTREEAAKDICATKVETEEATACLELKFNQIKAELAKTKGELIKTKEELKKRENESDSLIQELETSNKKIITQNQRIKELINIIDQKEDTINEFQNLKSHMENTFKCNDKADTSSLIINNKLICNETVEVPKDSKSKICSERKRVNENELQQDEPPAKKGSIHVSSAITEDQKKSEEVRPNIAEIEDIRVLQENNEGLRAFLLTIENELKNEKEEKAELNKQIVHFQQELSLSEKKNLTLSKEVQQIQSNYDIAIAELHVQKSKNQEQEEKIMKLSNEIETATRSITNNVSQIKLMHTKIDELRTLDSVSQISNIDLLNLRDLSNGSEEDNLPNTQLDLLGNDYLVSKQVKEYRIQEPNRENSFHSSIEAIWEECKEIVKASSKKSHQIEELEQQIEKLQAEVKGYKDENNRLKEKEHKNQDDLLKEKETLIQQLKEELQEKNVTLDVQIQHVVEGKRALSELTQGVTCYKAKIKELETILETQKVECSHSAKLEQDILEKESIILKLERNLKEFQEHLQDSVKNTKDLNVKELKLKEEITQLTNNLQDMKHLLQLKEEEEETNRQETEKLKEELSASSARTQNLKADLQRKEEDYADLKEKLTDAKKQIKQVQKEVSVMRDEDKLLRIKINELEKKKNQCSQELDMKQRTIQQLKEQLNNQKVEEAIQQYERACKDLNVKEKIIEDMRMTLEEQEQTQVEQDQVLEAKLEEVERLATELEKWKEKCNDLETKNNQRSNKEHENNTDVLGKLTNLQDELQESEQKYNADRKKWLEEKMMLITQAKEAENIRNKEMKKYAEDRERFFKQQNEMEILTAQLTEKDSDLQKWREERDQLVAALEIQLKALISSNVQKDNEIEQLKRIISETSKIETQIMDIKPKRISSADPDKLQTEPLSTSFEISRNKIEDGSVVLDSCEVSTENDQSTRFPKPELEIQFTPLQPNKMAVKHPGCTTPVTVKIPKARKRKSNEMEENWKKLL

SEQ ID NO: 1375 - protein, 1699 aa, Artificial Sequence
  Synthetic polypeptide
MESNFNQEGVPRPSYVFSADPIARPSEINFDGIKLDLSHEFSLVAPNTEANSFESKDYLQVCLRIRPFTQSEKELESEGCVHILDSQTVVLKEPQCILGRLSEKSSGQMAQKFSFSKVFGPATTQKEFFQGCIMQPVKDLLKGQSRLIFTYGLTNSGKTYTFQGTEENIGILPRTLNVLFDSLQERLYTKMNLKPHRSREYLRLSSEQEKEEIASKSALLRQIKEVTVHNDSDDTLYGSLTNSLNISEFEESIKDYEQANLNMANSIKFSVWVSFFEIYNEYIYDLFVPVSSKFQKRKMLRLSQDVKGYSFIKDLQWIQVSDSKEAYRLLKLGIKHQSVAFTKLNNASSRSHSIFTVKILQIEDSEMSRVIRVSELSLCDLAGSERTMKTQNEGERLRETGNINTSLLTLGKCINVLKNSEKSKFQQHVPFRESKLTHYFQSFFNGKGKICMIVNISQCYLAYDETLNVLKFSAIAQKVCVPDTLNSSQEKLFGPVKSSQDVSLDSNSNSKILNVKRATISWENSLEDLMEDEDLVEELENAEETQNVETKLLDEDLDKTLEENKAFISHEEKRKLLDLIEDLKKKLINEKKEKLTLEFKIREEVTQEFTQYWAQREADFKETLLQEREILEENAERRLAIFKDLVGKCDTREEAAKDICATKVETEETHNYVGFEDIIDSLQDNVADIKKQAEIAHLYIASLPDPQEATACLELKFNQIKAELAKTKGELIKTKEELKKRENESDSLIQELETSNKKIITQNQRIKELINIIDQKEDTINEFQNLKSHMENTFKCNDKADTSSLIINNKLICNETVEVPKDSKSKICSERKRVNENELQQDEPPAKKGTTSAASSRRLRKLISKPVNRTRQTEGHSLVSIHVSSAITEDQKKSEEVRPNIAEIEDIRVLQENNEGLRAFLLTIENELKNEKEEKAELNKQIVHFQQELSLSEKKNLTLSKEVQQIQSNYDIAIAELHVQKSKNQEQEEKIMKLSNEIETATRSITNNVSQIKLMHTKIDELRTLDSVSQISNIDLLNLRDLSNGSEEDNLPNTQLDLLGNDYLVSKQVKEYRIQEPNRENSFHSSIEAIWEECKEIVKASSKKSHQIEELEQQIEKLQAEVKGYKDENNRLKEKEHKNQDDLLKEKETLIQQLKEELQEKNVTLDVQIQHVVEGKRALSELTQGVTCYKAKIKELETILETQKVECSHSAKLEQDILEKESIILKLERNLKEFQEHLQDSVKNTKDLNVKELKLKEEITQLTNNLQDMKHLLQLKEEEEETNRQETEKLKEELSASSARTQNLKADLQRKEEDYADLKEKLTDAKKQIKQVQKEVSVMRDEDKLLRIKINELEKKKNQCSQELDMKQRTIQQLKEQLNNQKVEEAIQQYERACKDLNVKEKIIEDMRMTLEEQEQTQVEQDQVLEAKLEEVERLATELEKWKEKCNDLETKNNQRSNKEHENNTDVLGKLTNLQDELQESEQKYNADRKKWLEEKMMLITQAKEAENIRNKEMKKYAEDRERFFKQQNEMEILTAQLTEKDSDLQKWREERDQLVAALEIQLKALISSNVQKDNEIEQLKRIISETSKIETQIMDIKPKRISSADPDKLQTEPLSTSFEISRNKIEDGSVVLDSCEVSTENDQSTRFPKPELEIQFTPLQPNKMAVKHPGCTTPVTVKIPKARKRKSNEMEENWKKLL

SEQ ID NO: 1376 - protein, 1723 aa, Artificial Sequence
  Synthetic polypeptide
MESNFNQEGVPRPSYVFSADPIARPSEINFDGIKLDLSHEFSLVAPNTEANSFESKDYLQVCLRIRPFTQSEKELESEGCVHILDSQTVVLKEPQCILGRLSEKSSGQMAQKFSFSKVFGPATTQKEFFQGCIMQPVKDLLKGQSRLIFTYGLTNSGKTYTFQGTEENIGILPRTLNVLFDSLQERLYTKMNLKPHRSREYLRLSSEQEKEEIASKSALLRQIKEVTVHNDSDDTLYGSLTNSLNISEFEESIKDYEQANLNMANSIKFSVWVSFFEIYNEYIYDLFVPVSSKFQKRKMLRLSQDVKGYSFIKDLQWIQVSDSKEAYRLLKLGIKHQSVAFTKLNNASSRSHSIFTVKILQIEDSEMSRVIRVSELSLCDLAGSERTMKTQNEGERLRETGNINTSLLTLGKCINVLKNSEKSKFQQHVPFRESKLTHYFQSFFNGKGKICMIVNISQCYLAYDETLNVLKFSAIAQKVCVPDTLNSSQEKLFGPVKSSQDVSLDSNSNSKILNVKRATISWENSLEDLMEDEDLVEELENAEETQNVETKLLDEDLDKTLEENKAFISHEEKRKLLDLIEDLKKKLINEKKEKLTLEFKIREEVTQEFTQYWAQREADFKETLLQEREILEENAERRLAIFKDLVGKCDTREEAAKDICATKVETEETHNYVGFEDIIDSLQDNVADIKKQAEIAHLYIASLPDPQEATACLELKFNQIKAELAKTKGELIKTKEELKKRENESDSLIQELETSNKKIITQNQRIKELINIIDQKEDTINEFQNLKSHMENTFKCNDKADTSSLIINNKLICNETVEVPKDSKSKICSERKRVNENELQQDEPPAKKGSIHVSSAITEDQKKSEEVRPNIAEIEDIRVLQENNEGLRAFLLTIENELKNEKEEKAELNKQIVHFQQELSLSEKKNLTLSKEVQQIQSNYDIAIAELHVQKSKNQEQEEKIMKLSNEIETATRSITNNVSQIKLMHTKIDELRTLDSVSQISNIDLLNLRDLSNGSEEDNLPNTQLDLLGNDYLVSKQVKEYRIQEPNRENSFHSSIEAIWEECKEIVKASSKKSHQIEELEQQIEKLQAEVKGYKDENNRLKEKEHKNQDDLLKEKETLIQQLKEELQEKNVTLDVQIQHVVEGKRALSELTQGVTCYKAKIKELETILETQKVECSHSAKLEQDILEKESIILKLERNLKEFQEHLQDSVKNTKDLNVKELKLKEEITQLTNNLQDMKHLLQLKEEEEETNRQETEKLKEELSASSARTQNLKADLQRKEEDYADLKEKLTDAKKQIKQVQKEVSVMRDEDKLLRIKINELEKKKNQCSQELDMKQRTIQQLKEQLNNQKVEEAIQQYERACKDLNVKEKIIEDMRMTLEEQEQTQVEQDQVLEAKLEEVERLATELEKWKEKCNDLETKNNQRSNKEHENNTDVLGKLTNLQDELQESEQKYNADRKKWLEEKMMLITQAKEAENIRNKEMKKYAEDRERFFKQQNEMEILTAQLTEKDSDLQKWREERDQLVAALEIQLKALISSNVQKDNEIEQLKRIISETSKIETQIMDIKPKRISSADPDKLQTEPLSTSFEISRNKIEDGSVVLDSCEVSTENDQSTRFPKPELEIQFTPLQPNKMAVKHPGCTTPVTVKIPKARKRKSNEMEEQSASPPPKECSSSPAMEQSWKENDFDKLREEGFRRSNYSELQEEIQTKGKEVENFEKNLD

SEQ ID NO: 1377 - protein, 1683 aa, Artificial Sequence
  Synthetic polypeptide
MESNFNQEGVPRPSYVFSADPIARPSEINFDGIKLDLSHEFSLVAPNTEANSFESKDYLQVCLRIRPFTQSEKELESEGCVHILDSQTVVLKEPQCILGRLSEKSSGQMAQKFSFSKVFGPATTQKEFFQGCIMQPVKDLLKGQSRLIFTYGLTNSGKTYTFQGTEENIGILPRTLNVLFDSLQERLYTKMNLKPHRSREYLRLSSEQEKEEIASKSALLRQIKEVTVHNDSDDTLYGSLTNSLNISEFEESIKDYEQANLNMANSIKFSVWVSFFEIYNEYIYDLFVPVSSKFQKRKMLRLSQDVKGYSFIKDLQWIQVSDSKEAYRLLKLGIKHQSVAFTKLNNASSRSHSIFTVKILQIEDSEMSRVIRVSELSLCDLAGSERTMKTQNEGERLRETGNINTSLLTLGKCINVLKNSEKSKFQQHVPFRESKLTHYFQSFFNGKGKICMIVNISQCYLAYDETLNVLKFSAIAQKVCVPDTLNSSQEKLFGPVKSSQDVSLDSNSNSKILNVKRATISWENSLEDLMEDEDLVEELENAEETQNVETKLLDEDLDKTLEENKAFISHEEKRKLLDLIEDLKKKLINEKKEKLTLEFKIREEVTQEFTQYWAQREADFKETLLQEREILEENAERRLAIFKDLVGKCDTREEAAKDICATKVETEEATACLELKFNQIKAELAKTKGELIKTKEELKKRENESDSLIQELETSNKKIITQNQRIKELINIIDQKEDTINEFQNLKSHMENTFKCNDKADTSSLIINNKLICNETVEVPKDSKSKICSERKRVNENELQQDEPPAKKGSIHVSSAITEDQKKSEEVRPNIAEIEDIRVLQENNEGLRAFLLTIENELKNEKEEKAELNKQIVHFQQELSLSEKKNLTLSKEVQQIQSNYDIAIAELHVQKSKNQEQEEKIMKLSNEIETATRSITNNVSQIKLMHTKIDELRTLDSVSQISNIDLLNLRDLSNGSEEDNLPNTQLDLLGNDYLVSKQVKEYRIQEPNRENSFHSSIEAIWEECKEIVKASSKKSHQIEELEQQIEKLQAEVKGYKDENNRLKEKEHKNQDDLLKEKETLIQQLKEELQEKNVTLDVQIQHVVEGKRALSELTQGVTCYKAKIKELETILETQKVECSHSAKLEQDILEKESIILKLERNLKEFQEHLQDSVKNTKDLNVKELKLKEEITQLTNNLQDMKHLLQLKEEEEETNRQETEKLKEELSASSARTQNLKADLQRKEEDYADLKEKLTDAKKQIKQVQKEVSVMRDEDKLLRIKINELEKKKNQCSQELDMKQRTIQQLKEQLNNQKVEEAIQQYERACKDLNVKEKIIEDMRMTLEEQEQTQVEQDQVLEAKLEEVERLATELEKWKEKCNDLETKNNQRSNKEHENNTDVLGKLTNLQDELQESEQKYNADRKKWLEEKMMLITQAKEAENIRNKEMKKYAEDRERFFKQQNEMEILTAQLTEKDSDLQKWREERDQLVAALEIQLKALISSNVQKDNEIEQLKRIISETSKIETQIMDIKPKRISSADPDKLQTEPLSTSFEISRNKIEDGSVVLDSCEVSTENDQSTRFPKPELEIQFTPLQPNKMAVKHPGCTTPVTVKIPKARKRKSNEMEEQSASPPPKECSSSPAMEQSWKENDFDKLREEGFRRSNYSELQEEIQTKGKEVENFEKNLD

SEQ ID NO: 1378 - protein, 1753 aa, Artificial Sequence
  Synthetic polypeptide
MESNFNQEGVPRPSYVFSADPIARPSEINFDGIKLDLSHEFSLVAPNTEANSFESKDYLQVCLRIRPFTQSEKELESEGCVHILDSQTVVLKEPQCILGRLSEKSSGQMAQKFSFSKVFGPATTQKEFFQGCIMQPVKDLLKGQSRLIFTYGLTNSGKTYTFQGTEENIGILPRTLNVLFDSLQERLYTKMNLKPHRSREYLRLSSEQEKEEIASKSALLRQIKEVTVHNDSDDTLYGSLTNSLNISEFEESIKDYEQANLNMANSIKFSVWVSFFEIYNEYIYDLFVPVSSKFQKRKMLRLSQDVKGYSFIKDLQWIQVSDSKEAYRLLKLGIKHQSVAFTKLNNASSRSHSIFTVKILQIEDSEMSRVIRVSELSLCDLAGSERTMKTQNEGERLRETGNINTSLLTLGKCINVLKNSEKSKFQQHVPFRESKLTHYFQSFFNGKGKICMIVNISQCYLAYDETLNVLKFSAIAQKVCVPDTLNSSQEKLFGPVKSSQDVSLDSNSNSKILNVKRATISWENSLEDLMEDEDLVEELENAEETQNVETKLLDEDLDKTLEENKAFISHEEKRKLLDLIEDLKKKLINEKKEKLTLEFKIREEVTQEFTQYWAQREADFKETLLQEREILEENAERRLAIFKDLVGKCDTREEAAKDICATKVETEETHNYVGFEDIIDSLQDNVADIKKQAEIAHLYIASLPDPQEATACLELKFNQIKAELAKTKGELIKTKEELKKRENESDSLIQELETSNKKIITQNQRIKELINIIDQKEDTINEFQNLKSHMENTFKCNDKADTSSLIINNKLICNETVEVPKDSKSKICSERKRVNENELQQDEPPAKKGTTSAASSRRLRKLISKPVNRTRQTEGHSLVSIHVSSAITEDQKKSEEVRPNIAEIEDIRVLQENNEGLRAFLLTIENELKNEKEEKAELNKQIVHFQQELSLSEKKNLTLSKEVQQIQSNYDIAIAELHVQKSKNQEQEEKIMKLSNEIETATRSITNNVSQIKLMHTKIDELRTLDSVSQISNIDLLNLRDLSNGSEEDNLPNTQLDLLGNDYLVSKQVKEYRIQEPNRENSFHSSIEAIWEECKEIVKASSKKSHQIEELEQQIEKLQAEVKGYKDENNRLKEKEHKNQDDLLKEKETLIQQLKEELQEKNVTLDVQIQHVVEGKRALSELTQGVTCYKAKIKELETILETQKVECSHSAKLEQDILEKESIILKLERNLKEFQEHLQDSVKNTKDLNVKELKLKEEITQLTNNLQDMKHLLQLKEEEEETNRQETEKLKEELSASSARTQNLKADLQRKEEDYADLKEKLTDAKKQIKQVQKEVSVMRDEDKLLRIKINELEKKKNQCSQELDMKQRTIQQLKEQLNNQKVEEAIQQYERACKDLNVKEKIIEDMRMTLEEQEQTQVEQDQVLEAKLEEVERLATELEKWKEKCNDLETKNNQRSNKEHENNTDVLGKLTNLQDELQESEQKYNADRKKWLEEKMMLITQAKEAENIRNKEMKKYAEDRERFFKQQNEMEILTAQLTEKDSDLQKWREERDQLVAALEIQLKALISSNVQKDNEIEQLKRIISETSKIETQIMDIKPKRISSADPDKLQTEPLSTSFEISRNKIEDGSVVLDSCEVSTENDQSTRFPKPELEIQFTPLQPNKMAVKHPGCTTPVTVKIPKARKRKSNEMEEQSASPPPKECSSSPAMEQSWKENDFDKLREEGFRRSNYSELQEEIQTKGKEVENFEKNLD

SEQ ID NO: 1379 - protein, 327 aa, Artificial Sequence
  Synthetic polypeptide
MAVFADLDLRAGSDLKALRGLVETAAHLGYSVVAINHIVDFKEKKQEIEKPVAVSELFTTLPIVQGKSRPIKILTRLTIIVSDPSHCNVLRATSSRARLYDVVAVFPKTEKLFHIACTHLDVDLVCITVTEKLPFYFKRPPINVAIDRGLAFELVYSPAIKDSTMRRYTISSALNLMQICKGKNVIISSAAERPLEIRGPYDVANLGLLFGLSESDAKAAVSTNCRAALLHGETRKTAFGIISTVKKPRPSEGDEDCLPASKKAKWSHSVTQAGVQWHNLGSLQPLPLGLKPSSHLSLPKDCPGLMRVTLPEDTWEVLSPLRLAHGQ

SEQ ID NO: 1380 - protein, 46 aa, Artificial Sequence
  Synthetic polypeptide
MATQRKHLVKDFNPYITCYICKGYLIKPTTVTECLHTFSGMSLSAA

SEQ ID NO: 1381 - protein, 280 aa, Artificial Sequence
  Synthetic polypeptide
MATQRKHLVKDFNPYITCYICKGYLIKPTTVTECLHTFCKTCIVQHFEDSNDCPRCGNQVHETNPLEMLRLDNTLEEIIFKLVPGLREQELERESEFWKKNKPQENGQDDTSKADKPKVDEEGDENEDDKDYHRSDPQIAICLDCLRNNGQSGDNVVKNWKKLKFIWNQKRARIAKSILSQKNKAGGITLPDFKVFYKATVTKTAWYWYQNRDIDQWNRTEPSEIMPHIYNYLIFDKPDKNKKWGKDFLFNKWCWENWLAICRKLKLDPFLTPYTKIKMD

SEQ ID NO: 1382 - protein, 903 aa, Artificial Sequence
  Synthetic polypeptide
MSGRRCAGGGAACASAAAEAVEPAARELFEACRNGDVERVKRLVTPEKVNSRDTAGRKSTPLHFAAGFGRKDVVEYLLQNGANVQARDDGGLIPLHNACSFGHAEVVNLLLRHGADPNARDNWNYTPLHEAAIKGKIDVCIVLLQHGAEPTIRNTDGRTALDLADPSAKAVLTGEYKKDELLESARSGNEEKMMALLTPLNVNCHASDGRKSTPLHLAAGYNRVKIVQLLLQHGADVHAKDKGDLVPLHNACSYGHYEVTELLVKHGACVNAMDLWQFTPLHEAASKNRVEVCSLLLSYGADPTLLNCHNKSAIDLAPTPQLKERLAYEFKGHSLLQAAREADVTRIKKHLSLEMVNFKHPQTHETALHCAAASPYPKRKQICELLLRKGANINEKTKEFLTPLHVASEKAHNDVVEVVVKHEAKVNALDNLGQTSLHRAAYCGHLQTCRLLLSYGCDPNIISLQGFTALQMGNENVQQLLQEGISLGNSEADRQLLEAAKAGDVETVKKLCTVQSVNCRDIEGRQSTPLHFAAGYNRVSVVEYLLQHGADVHAKDKGGLVPLHNACSYGHYEVAELLVKHGAVVNVADLWKFTPLHEAAAKGKYEICKLLLQHGADPTKKNRDGNTPLDLVKDGDTDIQDLLRGDAALLDAAKKGCLARVKKLSSPDNVNCRDTQGRHSTPLHLAAGYNNLEVAEYLLQHGADVNAQDKGGLIPLHNAASYGHVDVAALLIKYNACVNATDKWAFTPLHEAAQKGRTQLCALLLAHGADPTLKNQEGQTPLDLVSADDVSALLTAAMPPSALPSCYKPQVLNGVRSPGATADALSSGPSSPSSLSAASSLDNLSGSFSELSSVVSSSGTEGASSLEKKEVPGVDFSITQFVRNLGLEHLMDIFEREQPWQRE

SEQ ID NO: 1383 - protein, 395 aa, Artificial Sequence
  Synthetic polypeptide
MQDDLLMDKSKTQPQPQQQQRQQQQPQPESSVSEAPSTPLSSETPKPEENSAVPALSPAAAPPAPNGPDKMQMESPLLPGLSFHQPPQQPPPPQEPAAPGASLSPSFGSTWSTGTTNAVEDSFFQGITPVNGTMLFQNFPHHVNPVFGGTFSPQIGLAQTQHHQQPPPPAPAPQPAQPAQPPQAQPPQQRRSPASPSQAPYAQRSAAAAYGHQPIMTSKPSSSSAVAAAAAAAAASSASSSWNTHQSVNAAWSAPSNPWGGLQAGRDPRRAVGVGVGVGVGVPSPLNPISPLKKPFSSNVIAPPKFPRAAPLTSKSWMEDNAFRTDNGNNLLPFQDRSRPYDTFNLHSLENSLMDMIRTDHEPLKGRMGINFHHPGTDNIMALNKQQSLYDSTSV

SEQ ID NO: 1384 - protein, 418 aa, Artificial Sequence
  Synthetic polypeptide
MQDDLLMDKSKTQPQPQQQQRQQQQPQPESSVSEAPSTPLSSETPKPEENSAVPALSPAAAPPAPNGPDKMQMESPLLPGLSFHQPPQQPPPPQEPAAPGASLSPSFGSTWSTGTTNAVEDSFFQGITPVNGTMLFQNFPHHVNPVFGGTFSPQIGLAQTQHHQQPPPPAPAPQPAQPAQPPQAQPPQQRRSPASPSQAPYAQRSAAAAYGHQPIMTSKPSSSSAVAAAAAAAAASSASSSWNTHQSVNAAWSAPSNPWGGLQAGRDPRRAVGVGVGVGVGVPSPLNPISPLKKPFSSNVIAPPKFPRAAPLTSKSWMEDNAFRTDNGNNLLPFQDRSRPYDTFNLHSLENSLMDMIRTDHEPLKGKHYPPSGPPMSFADIMWRNHFAGRMGINFHHPGTDNIMALNKQQSLYDSTSV

SEQ ID NO: 1385 - protein, 58 aa, Artificial Sequence
  Synthetic polypeptide
MCCVGGAGSCSDTGKLGACRAMLEEETDQTYENVLAEIQSFELPVEATLSLSQSQRKM

SEQ ID NO: 1386 - protein, 37 aa, Artificial Sequence
  Synthetic polypeptide
MLEEETDQTYENVLAEIQSFELPVEATLSLSQSQRKM

SEQ ID NO: 1387 - protein, 707 aa, Artificial Sequence
  Synthetic polypeptide
MCCVGGAGSCSDTGKLGACRAMLEEETDQTYENVLAEIQSFELPVEATLRSVYDDQPNAHKKFMEKLDACIRNHDKEIEKMCNFHHQGFVDAITELLKVRTDAEKLKVQVTDTNRRFQDAGKEVIVHTEDIIRCRIQQRNITTVVEKLQLCLPVLEMYSKLKEQMSAKRYYSALKTMEQLENVYFPWVSQYRFCQLMIENLPKLREDIKEISMSDLKDFLESIRKHSDKIGETAMKQAQHQKTFSVSLQKQNKMKFGKNMYINRDRIPEERNETVLKHSLEEEDENEEEILTVQDLVDFSPVYRCLHIYSVLGDEETFENYYRKQRKKQARLVLQPQSNMHETVDGYRRYFTQIVGFFVVEDHILHVTQGLVTRAYTDELWNMALSKIIAVLRAHSSYCTDPDLVLELKNLTVIFADTLQGYGFPVNRLFDLLFEIRDQYNETLLKKWAGVFRDIFEEDNYSPIPVVNEEEYKIVISKFPFQDPDLEKQSFPKKFPMSQSVPHIYIQVKEFIYASLKFSESLHRSSTEIDDMLRKSTNLLLTRTLSSCLLNLIRKPHIGLTELVQIIINTTHLEQACKYLEDFITNITNISQETVHTTRLYGLSTFKDARHAAEGEIYTKLNQKIDEFVQLADYDWTMSEPDGRASGYLMDLINFLRSIFQVFTHLPEVRSASSRPPSHVRSEERLCLAAHRLRCGERLCPATPSGM

SEQ ID NO: 1388 - protein, 686 aa, Artificial Sequence
  Synthetic polypeptide
MLEEETDQTYENVLAEIQSFELPVEATLRSVYDDQPNAHKKFMEKLDACIRNHDKEIEKMCNFHHQGFVDAITELLKVRTDAEKLKVQVTDTNRRFQDAGKEVIVHTEDIIRCRIQQRNITTVVEKLQLCLPVLEMYSKLKEQMSAKRYYSALKTMEQLENVYFPWVSQYRFCQLMIENLPKLREDIKEISMSDLKDFLESIRKHSDKIGETAMKQAQHQKTFSVSLQKQNKMKFGKNMYINRDRIPEERNETVLKHSLEEEDENEEEILTVQDLVDFSPVYRCLHIYSVLGDEETFENYYRKQRKKQARLVLQPQSNMHETVDGYRRYFTQIVGFFVVEDHILHVTQGLVTRAYTDELWNMALSKIIAVLRAHSSYCTDPDLVLELKNLTVIFADTLQGYGFPVNRLFDLLFEIRDQYNETLLKKWAGVFRDIFEEDNYSPIPVVNEEEYKIVISKFPFQDPDLEKQSFPKKFPMSQSVPHIYIQVKEFIYASLKFSESLHRSSTEIDDMLRKSTNLLLTRTLSSCLLNLIRKPHIGLTELVQIIINTTHLEQACKYLEDFITNITNISQETVHTTRLYGLSTFKDARHAAEGEIYTKLNQKIDEFVQLADYDWTMSEPDGRASGYLMDLINFLRSIFQVFTHLPEVRSASSRPPSHVRSEERLCLAAHRLRCGERLCPATPSGM

SEQ ID NO: 1389 - protein, 588 aa, Artificial Sequence
  Synthetic polypeptide
MAENSESLGTVPEHERILQEIESTDTACVGPTLRSVYDDQPNAHKKFMEKLDACIRNHDKEIEKMCNFHHQGFVDAITELLKVRTDAEKLKVQVTDTNRRFQDAGKEVIVHTEDIIRCRIQQRNITTVVEKLQLCLPVLEMYSKLKEQMSAKRYYSALKTMEQLENVYFPWVSQYRFCQLMIENLPKLREDIKEISMSDLKDFLESIRKHSDKIGETAMKQAQHQKTFSVSLQKQNKMKFGKNMYINRDRIPEERNETVLKHSLEEEDENEEEGDEETFENYYRKQRKKQARLVLQPQSNMGYGFPVNRLFDLLFEIRDQYNETLLKKWAGVFRDIFEEDNYSPIPVVNEEEYKIVISKFPFQDPDLEKQSFPKKFPMSQSVPHIYIQVKEFIYASLKFSESLHRSSTEIDDMLRKSTNLLLTRTLSSCLLNLIRKPHIGLTELVQIIINTTHLEQACKYLEDFITNITNISQETVHTTRLYGLSTFKDARHAAEGEIYTKLNQKIDEFVQLADYDWTMSEPDGRASGYLMDLINFLRSIFQVFTHLPEVRSASSRPPSHVRSEERLCLAAHRLRCGERLCPATPSGM

SEQ ID NO: 1390 - protein, 691 aa, Artificial Sequence
  Synthetic polypeptide
MAENSESLGTVPEHERILQEIESTDTACVGPTLRSVYDDQPNAHKKFMEKLDACIRNHDKEIEKMCNFHHQGFVDAITELLKVRTDAEKLKVQVTDTNRRFQDAGKEVIVHTEDIIRCRIQQRNITTVVEKLQLCLPVLEMYSKLKEQMSAKRYYSALKTMEQLENVYFPWVSQYRFCQLMIENLPKLREDIKEISMSDLKDFLESIRKHSDKIGETAMKQAQHQKTFSVSLQKQNKMKFGKNMYINRDRIPEERNETVLKHSLEEEDENEEEILTVQDLVDFSPVYRCLHIYSVLGDEETFENYYRKQRKKQARLVLQPQSNMHETVDGYRRYFTQIVGFFVVEDHILHVTQGLVTRAYTDELWNMALSKIIAVLRAHSSYCTDPDLVLELKNLTVIFADTLQGYGFPVNRLFDLLFEIRDQYNETLLKKWAGVFRDIFEEDNYSPIPVVNEEEYKIVISKFPFQDPDLEKQSFPKKFPMSQSVPHIYIQVKEFIYASLKFSESLHRSSTEIDDMLRKSTNLLLTRTLSSCLLNLIRKPHIGLTELVQIIINTTHLEQACKYLEDFITNITNISQETVHTTRLYGLSTFKDARHAAEGEIYTKLNQKIDEFVQLADYDWTMSEPDGRASGYLMDLINFLRSIFQVFTHLPEVRSASSRPPSHVRSEERLCLAAHRLRCGERLCPATPSGM

SEQ ID NO: 1391 - protein, 368 aa, Artificial Sequence
  Synthetic polypeptide
MHETVDGYRRYFTQIVGFFVVEDHILHVTQGLVTRAYTDELWNMALSKIIAVLRAHSSYCTDPDLVLELKNLTVIFADTLQGYGFPVNRLFDLLFEIRDQYNETLLKKWAGVFRDIFEEDNYSPIPVVNEEEYKIVISKFPFQDPDLEKQSFPKKFPMSQSVPHIYIQVKEFIYASLKFSESLHRSSTEIDDMLRKSTNLLLTRTLSSCLLNLIRKPHIGLTELVQIIINTTHLEQACKYLEDFITNITNISQETVHTTRLYGLSTFKDARHAAEGEIYTKLNQKIDEFVQLADYDWTMSEPDGRASGYLMDLINFLRSIFQVFTHLPEVRSASSRPPSHVRSEERLCLAAHRLRCGERLCPATPSGM

SEQ ID NO: 1392 - protein, 684 aa, Artificial Sequence
  Synthetic polypeptide
MCCVGGAGSCSDTGKLGACRAMLEEETDQTYENVLAEIQSFELPVEATLRSVYDDQPNAHKKFMEKLDACIRNHDKEIEKMCNFHHQGFVDAITELLKVRTDAEKLKVQVTDTNRRFQDAGKEVIVHTEDIIRCRIQQRNITTVVEKLQLCLPVLEMYSKLKEQMSAKRYYSALKTMEQLENVYFPWVSQYRFCQLMIENLPKLREDIKEISMSDLKDFLESIRKHSDKIGETAMKQAQHQKTFSVSLQKQNKMKFGKNMYINRDRIPEERNETVLKHSLEEEDENEEEILTVQDLVDFSPVYRCLHIYSVLGDEETFENYYRKQRKKQARLVLQPQSNMHETVDGYRRYFTQIVGFFVVEDHILHVTQGLVTRAYTDELWNMALSKIIAVLRAHSSYCTDPDLVLELKNLTVIFADTLQGYGFPVNRLFDLLFEIRDQYNETLLKKWAGVFRDIFEEDNYSPIPVVNEEEYKIVISKFPFQDPDLEKQSFPKKFPMSQSVPHIYIQVKEFIYASLKFSESLHRSSTEIDDMLRKSTNLLLTRTLSSCLLNLIRKPHIGLTELVQIIINTTHLEQACKYLEDFITNITNISQETVHTTRLYGLSTFKDARHAAEGEIYTKLNQKIDEFVQLADYDWTMSEPDGRASGYLMDLINFLRSIFQVFTHLPVGRSPGVRSSRPAWPTW

SEQ ID NO: 1393 - protein, 663 aa, Artificial Sequence
  Synthetic polypeptide
MLEEETDQTYENVLAEIQSFELPVEATLRSVYDDQPNAHKKFMEKLDACIRNHDKEIEKMCNFHHQGFVDAITELLKVRTDAEKLKVQVTDTNRRFQDAGKEVIVHTEDIIRCRIQQRNITTVVEKLQLCLPVLEMYSKLKEQMSAKRYYSALKTMEQLENVYFPWVSQYRFCQLMIENLPKLREDIKEISMSDLKDFLESIRKHSDKIGETAMKQAQHQKTFSVSLQKQNKMKFGKNMYINRDRIPEERNETVLKHSLEEEDENEEEILTVQDLVDFSPVYRCLHIYSVLGDEETFENYYRKQRKKQARLVLQPQSNMHETVDGYRRYFTQIVGFFVVEDHILHVTQGLVTRAYTDELWNMALSKIIAVLRAHSSYCTDPDLVLELKNLTVIFADTLQGYGFPVNRLFDLLFEIRDQYNETLLKKWAGVFRDIFEEDNYSPIPVVNEEEYKIVISKFPFQDPDLEKQSFPKKFPMSQSVPHIYIQVKEFIYASLKFSESLHRSSTEIDDMLRKSTNLLLTRTLSSCLLNLIRKPHIGLTELVQIIINTTHLEQACKYLEDFITNITNISQETVHTTRLYGLSTFKDARHAAEGEIYTKLNQKIDEFVQLADYDWTMSEPDGRASGYLMDLINFLRSIFQVFTHLPVGRSPGVRSSRPAWPTW

SEQ ID NO: 1394 - protein, 565 aa, Artificial Sequence
  Synthetic polypeptide
MAENSESLGTVPEHERILQEIESTDTACVGPTLRSVYDDQPNAHKKFMEKLDACIRNHDKEIEKMCNFHHQGFVDAITELLKVRTDAEKLKVQVTDTNRRFQDAGKEVIVHTEDIIRCRIQQRNITTVVEKLQLCLPVLEMYSKLKEQMSAKRYYSALKTMEQLENVYFPWVSQYRFCQLMIENLPKLREDIKEISMSDLKDFLESIRKHSDKIGETAMKQAQHQKTFSVSLQKQNKMKFGKNMYINRDRIPEERNETVLKHSLEEEDENEEEGDEETFENYYRKQRKKQARLVLQPQSNMGYGFPVNRLFDLLFEIRDQYNETLLKKWAGVFRDIFEEDNYSPIPVVNEEEYKIVISKFPFQDPDLEKQSFPKKFPMSQSVPHIYIQVKEFIYASLKFSESLHRSSTEIDDMLRKSTNLLLTRTLSSCLLNLIRKPHIGLTELVQIIINTTHLEQACKYLEDFITNITNISQETVHTTRLYGLSTFKDARHAAEGEIYTKLNQKIDEFVQLADYDWTMSEPDGRASGYLMDLINFLRSIFQVFTHLPVGRSPGVRSSRPAWPTW

SEQ ID NO: 1395 - protein, 668 aa, Artificial Sequence
  Synthetic polypeptide
MAENSESLGTVPEHERILQEIESTDTACVGPTLRSVYDDQPNAHKKFMEKLDACIRNHDKEIEKMCNFHHQGFVDAITELLKVRTDAEKLKVQVTDTNRRFQDAGKEVIVHTEDIIRCRIQQRNITTVVEKLQLCLPVLEMYSKLKEQMSAKRYYSALKTMEQLENVYFPWVSQYRFCQLMIENLPKLREDIKEISMSDLKDFLESIRKHSDKIGETAMKQAQHQKTFSVSLQKQNKMKFGKNMYINRDRIPEERNETVLKHSLEEEDENEEEILTVQDLVDFSPVYRCLHIYSVLGDEETFENYYRKQRKKQARLVLQPQSNMHETVDGYRRYFTQIVGFFVVEDHILHVTQGLVTRAYTDELWNMALSKIIAVLRAHSSYCTDPDLVLELKNLTVIFADTLQGYGFPVNRLFDLLFEIRDQYNETLLKKWAGVFRDIFEEDNYSPIPVVNEEEYKIVISKFPFQDPDLEKQSFPKKFPMSQSVPHIYIQVKEFIYASLKFSESLHRSSTEIDDMLRKSTNLLLTRTLSSCLLNLIRKPHIGLTELVQIIINTTHLEQACKYLEDFITNITNISQETVHTTRLYGLSTFKDARHAAEGEIYTKLNQKIDEFVQLADYDWTMSEPDGRASGYLMDLINFLRSIFQVFTHLPVGRSPGVRSSRPAWPTW

SEQ ID NO: 1396 - protein, 345 aa, Artificial Sequence
  Synthetic polypeptide
MHETVDGYRRYFTQIVGFFVVEDHILHVTQGLVTRAYTDELWNMALSKIIAVLRAHSSYCTDPDLVLELKNLTVIFADTLQGYGFPVNRLFDLLFEIRDQYNETLLKKWAGVFRDIFEEDNYSPIPVVNEEEYKIVISKFPFQDPDLEKQSFPKKFPMSQSVPHIYIQVKEFIYASLKFSESLHRSSTEIDDMLRKSTNLLLTRTLSSCLLNLIRKPHIGLTELVQIIINTTHLEQACKYLEDFITNITNISQETVHTTRLYGLSTFKDARHAAEGEIYTKLNQKIDEFVQLADYDWTMSEPDGRASGYLMDLINFLRSIFQVFTHLPVGRSPGVRSSRPAWPTW

SEQ ID NO: 1397 - protein, 246 aa, Artificial Sequence
  Synthetic polypeptide
MLRVIVESASNIPKTKFGKPDPIVSVIFKDEKKKTKKVDNELNPVWNEILEFDLRGIPLDFSSSLGIIVKDFETIGQNKLIGTATVALKDLTGDQSRSLPYKLISLLNEKGQDTGATIDLVIGYDPPSAPHPNDLSGPSVPGMGGDGEEDEGDEDRLDNAVRGPGPKGPVGTVSEAQLARRLTKVKNSRRMLSNKPQDFQIRVRVIEGRQLSGNNIRPVVKVHVCGQTHRTRIKRGNNPFFDEEQK

SEQ ID NO: 1398 - protein, 436 aa, Artificial Sequence
  Synthetic polypeptide
MSSRSTKDLIKSKWGSKPSNSKSETTLEKLKGEIAHLKTSVDEITSGKGKLTDKERHRLLEKIRVLEAEKEKNAYQLTEKDKEIQRLRDQLKARYSTTTLLEQLEETTREGERREQVLKALSEEKDVLKQQLSAATSRIAELESKTNTLRLSQTVAPNCFNSSINNIHEMEIQLKDALEKNQQWLVYDQQREVYVKGLLAKIFELEKKTETAAHSLPQQTKKPESEGYLQEEKQKCYNDLLASAKKDLEVERQTITQLSFELSEFRRKYEETQKEVHNLNQLLYSQRRADVQHLEDDRHKTEKIQKLREENDIARGKLEEEKKRSEELLSQVQFLYTSLLKQQEEQTRVALLEQQMQACTLDFENEKLDRQHVQHQLHVILKELRKARNQITQLESLPGAVAYTCNPSTLGGRGGWISRGQEFETSLANMVKTHLY

SEQ ID NO: 1399 - protein, 155 aa, Artificial Sequence
  Synthetic polypeptide
MRPQDSTGVAELQEPGLPLTDDAPPGATEEPAAAEAAGAPDRGRCWLCLSSPCCSRTEPEAKKKAPCPGLGLFYTLLSAFLFSVGSLFVKKVQDVHAVEISAFRCVFQMLVVIPCLIYRNHIAVRKPGLHGEAHMKRPMWRGTEALTLGPICTTS

SEQ ID NO: 1400 - protein, 154 aa, Artificial Sequence
  Synthetic polypeptide
MRPQDSTGVAELQEPGLPLTDDAPPGATEEPAAAEAAGAPDRGRCWLCLSSPCCSRTEPAKKKAPCPGLGLFYTLLSAFLFSVGSLFVKKVQDVHAVEISAFRCVFQMLVVIPCLIYRNHIAVRKPGLHGEAHMKRPMWRGTEALTLGPICTTS

SEQ ID NO: 1401 - protein, 327 aa, Artificial Sequence
  Synthetic polypeptide
MDPFVVLVLCLSCLLLLSIWRQSSGRGKLPPGPTPLPVIGNILQIDIKDVSKSLTNLSKIYGPVFTLYFGLERMVVLHGYEVVKEALIDLGEEFSGRGHFPLAERANRGFGIVFSNGKRWKEIRRFSLMTLRNFGMGKRSIEDRVQEEARCLVEELRKTKASPCDPTFILGCAPCNVICSIIFQKRFDYKDQQFLNLMEKLNENIRIVSTPWIQICNNFPTIIDYFPGTHNKLLKNLAFMESDILEKVKEHQESMDINNPRDFIDCFLIKMEKEKQNQQSEFTIENLVITAADLLGAGTETTSTTLRYALLLLLKHPEVTEKYWRMC

SEQ ID NO: 1402 - protein, 436 aa, Artificial Sequence
  Synthetic polypeptide
MDPFVVLVLCLSCLLLLSIWRQSSGRGKLPPGPTPLPVIGNILQIDIKDVSKSLTNLSKIYGPVFTLYFGLERMVVLHGYEVVKEALIDLGEEFSGRGHFPLAERANRGFGIVFSNGKRWKEIRRFSLMTLRNFGMGKRSIEDRVQEEARCLVEELRKTKASPCDPTFILGCAPCNVICSIIFQKRFDYKDQQFLNLMEKLNENIRIVSTPWIQICNNFPTIIDYFPGTHNKLLKNLAFMESDILEKVKEHQESMDINNPRDFIDCFLIKMEKEKQNQQSEFTIENLVITAADLLGAGTETTSTTLRYALLLLLKHPEVTAKVQEEIERVVGRNRSPCMQDRGHMPYTDAVVHEVQRYIDLIPTSLPHAVTCDVKFRNYLIPKGTTILTSLTSVLHDNKEFPNPEMFDPRHFLDEGGNFKKSNYFMPFSAGSNQVQ

SEQ ID NO: 1403 - protein, 178 aa, Artificial Sequence
  Synthetic polypeptide
MTTQQIDLQGPGPWGFRLVGGKDFEQPLAISRVTPGSKAALANLCIGDVITAIDGENTSNMTHLEAQNRIKGCTDNLTLTVARSEHKVWSPLVTEEGKRHPYKMNLASEPQEVLHIGSAHNRSAMPFTASPASSTTARVITNQYNNPAGLYSSENISNFNNALESKTAASGVEANSRP

SEQ ID NO: 1404 - protein, 205 aa, Artificial Sequence
  Synthetic polypeptide
MTTQQIDLQGPGPWGFRLVGGKDFEQPLAISRVTPGSKAALANLCIGDVITAIDGENTSNMTHLEAQNRIKGCTDNLTLTVARSEHKVWSPLVTEEGKRHPYKMNLASEPQEVLHIGSAHNRSAMPFTASPASSTTARVITNQYNNPAGLYSSENISNFNNALESKTAASGVEANSRPLLRQCNGMCTEHSAQCLAPGRCSLNAN

SEQ ID NO: 1405 - protein, 202 aa, Artificial Sequence
  Synthetic polypeptide
MLSQVYRCGFQPFNQHLLPWVKCTTVFRSHCIQPSVIRHVRSWSNIPFITVPLSRTHGKSFAHRSELKHAKRIVVKLGSAVVTRGDECGLALGRLASIVEQVSVLQNQGREMMLVTSGAVAFGKQRLRHEILLSQSVRQALHSGQNQLKEMAIPVLEARACAAAGQSGLMALYEAMFTQYSICAAQQLDSGISEVLNKFFIE

SEQ ID NO: 1406 - protein, 64 aa, Artificial Sequence
  Synthetic polypeptide
MGVQVFGISPACTHSVLLPCKEGACFSFAFCHDCKFPEASPAMRNCESIKLLSFINYPVSGISS

SEQ ID NO: 1407 - protein, 29 aa, Artificial Sequence
  Synthetic polypeptide
MDKLNKITVPASQKLSCSLDPKHLRQFHL

SEQ ID NO: 1408 - protein, 58 aa, Artificial Sequence
  Synthetic polypeptide
MDKLNKITVPASQKLRSLDYLSLLPAVSSLSCKHPLNTYFPDTLSCSLDPKHLRQFHL

SEQ ID NO: 1409 - protein, 266 aa, Artificial Sequence
  Synthetic polypeptide
MGRSGKLPSGVSAKLKRWKKGHSSDSNPAICRHRQAARSRFFSRPSGRSDLTVDAVKLHNELQSGSLRLGKSEAPETPMEEEAELVLTEKSSGTFLSGLSDCTNVTFSKVQRFWESNSAAHKEICAVLAAVTEVIRSQGGKETETEYFAALMTTMEAVESPESLAAVAYLLNLVLKRVPSPVLIKKFSDTSKAFMDIMSAQASSGSTSVLRWVLSCLATLLRKQDLEAWGYPVTLQVYHGLLSFTVHPKPKLEGELPAVQCQFART

SEQ ID NO: 1410 - protein, 72 aa, Artificial Sequence
  Synthetic polypeptide
MDIMSAQASSGSTSVLRWVLSCLATLLRKQDLEAWGYPVTLQVYHGLLSFTVHPKPKLEGELPAVQCQFART

SEQ ID NO: 1411 - protein, 205 aa, Artificial Sequence
  Synthetic polypeptide
MGRSGKLPSGVSAKLKRWKKGHSSDSNPAICRHRQAARSRFFSRPSGRSDLTVDAVKLHNELQSGSLRLGKSEAPETPMEEEAELVLTEKSSGTFLSGLSDCTNVTFSKVQRFWESNSAAHKEICAVLAAVTEVIRSQGGKETETEYFAALVLSCLATLLRKQDLEAWGYPVTLQVYHGLLSFTVHPKPKLEGELPAVQCQFART

SEQ ID NO: 1412 - protein, 281 aa, Artificial Sequence
  Synthetic polypeptide
MGRSGKLPSGVSAKLKRWKKGHSSDSNPAICRHRQAARSRFFSRPSGRSDLTVDAVKLHNELQSGSLRLGKSEAPETPMEEEAELVLTEKSSGTFLSGLSDCTNVTFSKVQRFWESNSAAHKEICAVLAAVTEVIRSQGGKETETEYFAALMTTMEAVESPESLAAVAYLLNLVLKRVPSPVLIKKFSDTSKAFMDIMSAQASSGSTSVLRWVLSCLATLLRKQDLEAWGYPVTLQVYHGLLSFTVHPKPKQAEVAVSQDCTTALQPGQQNETPSQKKKKE

SEQ ID NO: 1413 - protein, 87 aa, Artificial Sequence
  Synthetic polypeptide
MDIMSAQASSGSTSVLRWVLSCLATLLRKQDLEAWGYPVTLQVYHGLLSFTVHPKPKQAEVAVSQDCTTALQPGQQNETPSQKKKKE

SEQ ID NO: 1414 - protein, 220 aa, Artificial Sequence
  Synthetic polypeptide
MGRSGKLPSGVSAKLKRWKKGHSSDSNPAICRHRQAARSRFFSRPSGRSDLTVDAVKLHNELQSGSLRLGKSEAPETPMEEEAELVLTEKSSGTFLSGLSDCTNVTFSKVQRFWESNSAAHKEICAVLAAVTEVIRSQGGKETETEYFAALVLSCLATLLRKQDLEAWGYPVTLQVYHGLLSFTVHPKPKQAEVAVSQDCTTALQPGQQNETPSQKKKKE

SEQ ID NO: 1415 - protein, 66 aa, Artificial Sequence
  Synthetic polypeptide
VAAVTERTSGNLSASSVKCDHKYRVPGSARDRSHYVDRAGLKLLASSSPPAATSQQHWNDRPPPGS

SEQ ID NO: 1416 - protein, 90 aa, Artificial Sequence
  Synthetic polypeptide
VAAVTERTSGNLSASSVKCDHKYRVPGSARDRSHYVDRAGLKLLASSSPPAATSQQHWNDRDLCSGVCLLTSPQLSYDPATSPSPRNTQE

SEQ ID NO: 1417 - protein, 59 aa, Artificial Sequence
  Synthetic polypeptide
VAAVTERTSGNLSASSVKCDHKYRVPGSARDLCSGVCLLTSPQLSYDPATSPSPRNTQE

SEQ ID NO: 1418 - protein, 13 aa, Artificial Sequence
  Synthetic polypeptide
VAAVTERTPPPGS

SEQ ID NO: 1419 - protein, 54 aa, Artificial Sequence
  Synthetic polypeptide
MAPPVRYCIPGERLCNLEEGSPGSGTYTRHGYIFSSLAGCLMKSSENGAHYVSI

SEQ ID NO: 1420 - protein, 31 aa, Artificial Sequence
  Synthetic polypeptide
QANVCVTWRRAARAAAPTPATATSFRRLPAV

SEQ ID NO: 1421 - protein, 15 aa, Artificial Sequence
  Synthetic polypeptide
VFILVLGQRQSWRHL

SEQ ID NO: 1422 - protein, 606 aa, Artificial Sequence
  Synthetic polypeptide
MQQESERCRVRARRPDMALYVPKARRGAVLLKTGDEEESCGSPNSVVKEKQKESSLSQKEVFKDKPEARRLNINPDRKEHNCREEKKSSTKLRMDTCLQKTNRVCSKRGTTESKEVLSQGQQQGAPNAGVITNAPLQRHFKPKKVECLEVETTDVTGHERILLSQACLEISEAQVPSKPFQNVEFCDFSRHEPDGEAFEDKDLEGRIETDTKVLEILYEFPRVFSSVMKPENMIVPIKLSSDSEIVQQSMQTSDGILNPSSGGITTTSVPGSPDGVFDQTCVDFEVESVGGIANSTGFILDQKDTDSIPATMGHISLSESTNDTVSPVMIRECEKNDSTADELHVKHEPPDTAVLAHETHRDSGFKNVGDITNKACMMDTTGMSCSDHVTVDSPYVVAVRIADETSINTRSFSKFVGMSADATPLHVARSGNDTEDFSNPSACSDIYGESISSHFTESTGKLIESLSDCASSLPIKKIAGSNYNTFLDSELSMLNGTKVLSDSAVGIDLGSTGDTTEALHELRTAEEFKTEEQDDSGSIEFGVSFPDRESSSMETSIEPKATETSHTEGITAIEESWESMFNDDGDCLDPRLLQEGILMHIKPENH

SEQ ID NO: 1423 - protein, 746 aa, Artificial Sequence
  Synthetic polypeptide
MPAVSKGDGMRGLAVFISDIRNCKSKEAEIKRINKELANIRSKFKGDKALDGYSKKKYVCKLLFIFLLGHDIDFGHMEAVNLLSSNRYTEKQIGYLFISVLVNSNSELIRLINNAIKNDLASRNPTFMGLALHCIASVGSREMAEAFAGEIPKVLVAGDTMDSVKQSAALCLLRLYRTSPDLVPMGDWTSRVVHLLNDQHLGVVTAATSLITTLAQKNPEEFKTSVSLAVSRLSRIVTSASTDLQDYTYYFVPAPWLSVKLLRLLQCYPPPEDPAVRGRLTECLETILNKAQEPPKSKKVQHSNAKNAVLFEAISLIIHHDSEPNLLVRACNQLGQFLQHRETNLRYLALESMCTLASSEFSHEAVKTHIETVINALKTERDVSVRQRAVDLLYAMCDRSNAPQIVAEMLSYLETADYSIREEIVLKVAILAEKYAVDYTWYVDTILNLIRIAGDYVSEEVWYRVIQIVINRDDVQGYAAKTVFEALQAPACHENLVKVGGYILGEFGNLIAGDPRSSPLIQFHLLHSKFHLCSVPTRALLLSTYIKFVNLFPEVKPTIQDVLRSDSQLRNADVELQQRAVEYLRLSTVASTDILATVLEEMPPFPERESSILAKLKKKKGPSTVTDLEDTKRDRSVDVNGGPEPAPASTSAVSTPSPSADLLGLGAAPPAPAGPPPSSGGSGLLVDVFSDSASVVAPLAPGSEDNFARFVCKNNGVLFENQLLQIGLKSEFRQNLGKIQECSIST

SEQ ID NO: 1424 - protein, 745 aa, Artificial Sequence
  Synthetic polypeptide
MPAVSKGDGMRGLAVFISDIRNCKSKEAEIKRINKELANIRSKFKGDKALDGYSKKKYVCKLLFIFLLGHDIDFGHMEAVNLLSSNRYTEKQIGYLFISVLVNSNSELIRLINNAIKNDLASRNPTFMGLALHCIASVGSREMAEAFAGEIPKVLVAGDTMDSVKQSAALCLLRLYRTSPDLVPMGDWTSRVVHLLNDQHLGVVTAATSLITTLAQKNPEEFKTSVSLAVSRLSRIVTSASTDLQDYTYYFVPAPWLSVKLLRLLQCYPPPDPAVRGRLTECLETILNKAQEPPKSKKVQHSNAKNAVLFEAISLIIHHDSEPNLLVRACNQLGQFLQHRETNLRYLALESMCTLASSEFSHEAVKTHIETVINALKTERDVSVRQRAVDLLYAMCDRSNAPQIVAEMLSYLETADYSIREEIVLKVAILAEKYAVDYTWYVDTILNLIRIAGDYVSEEVWYRVIQIVINRDDVQGYAAKTVFEALQAPACHENLVKVGGYILGEFGNLIAGDPRSSPLIQFHLLHSKFHLCSVPTRALLLSTYIKFVNLFPEVKPTIQDVLRSDSQLRNADVELQQRAVEYLRLSTVASTDILATVLEEMPPFPERESSILAKLKKKKGPSTVTDLEDTKRDRSVDVNGGPEPAPASTSAVSTPSPSADLLGLGAAPPAPAGPPPSSGGSGLLVDVFSDSASVVAPLAPGSEDNFARFVCKNNGVLFENQLLQIGLKSEFRQNLGKIQECSIST

SEQ ID NO: 1425 - protein, 991 aa, Artificial Sequence
  Synthetic polypeptide
MLAGRPGTRSAVGELGTESSDNLDRAPLGPRESGGHHRPGSYLDMKIHLEKNLEEERQILLQQQKICRNRARKYFVESNRRKKAFEEKRKEQEEKEHQIREQILQQRKQKFEEVTEKFQRAHVPLSQRRKAVSRKPVPPLEEALKQIQESNLKSEVNLPFSRRPTINWRAIDSALPSALSKNDHKHQKQLLSKINCEKEMNENMRATLATSKNVFQLKLEETQKLLEDQHLSNLQKFGDEVNQITNSETLSSIDSLEATEHEEIYLTLNKEHSTSIQRNTISLKPANMQSTNLSCFDEDKLAFSKTQHINNWLTNLDASNTQNVTAFSDILSKSNVLPSWEYFNSKEQNPSPLNGTVERATNTANNSVPFVSSPPMFVLDKKCEKTSETSTMRTTDSTSGAFKRERPLVTESPTFKFSKSQSTSDSLTQEVATFPDQEKYSELNQENGTTSIPTSCVPVATPLVLPSNIQSARPSAKNSIHIKEIDAVQCSDKLDELKDGKEEEIKYFNCNKEELPLFSDSFQDAYIPHNPDSKDEKQKLAETSSLSNVTSNYDFVGQHKKMKYNIHERNGVRFLKSILKKESKYEHGYLKALIINQSFKFGNQKAAAIRDSIELTKEKGAEIPKTIKKLRWFDETSNIENNAENSHSLKNKTGTTQQHSQQFHIQSGAGSNIISVSTCAVNSADTKKSREDSISENVTTLGGSGADHMPLNCFIPSGYNFAKHAWPASKKEESKIPVHDDSKTKQGKPQRGRAKIIRKPGSAKVQSGFICTNRKGAVIQPQSASKVNIFTQAQGKLIIPCPPPQSTSNIRSGKNIQVSQCQPVTPENPQNIITHNSFNSKHVLPTEHSLNQWNQESSSPLSNACSDLVTVIPSLPSYCSSECQTFAKINHSNGTQAVARQDATLYCTQRSPVCEESYPSVTLRTAEEESVPLWKRGPNVLHQNKRATGTVAHGCNPSTLGGQGTRIYLKLEVRDQPGQRDETLSLQKYKN

SEQ ID NO: 1426 - protein, 792 aa, Artificial Sequence
  Synthetic polypeptide
MNENMRATLATSKNVFQLKLEETQKLLEDQHLSNLQKFGDEVNQITNSETLSSIDSLEATEHEEIYLTLNKEHSTSIQRNTISLKPANMQSTNLSCFDEDKLAFSKTQHINNWLTNLDASNTQNVTAFSDILSKSNVLPSWEYFNSKEQNPSPLNGTVERATNTANNSVPFVSSPPMFVLDKKCEKTSETSTMRTTDSTSGAFKRERPLVTESPTFKFSKSQSTSDSLTQEVATFPDQEKYSELNQENGTTSIPTSCVPVATPLVLPSNIQSARPSAKNSIHIKEIDAVQCSDKLDELKDGKEEEIKYFNCNKEELPLFSDSFQDAYIPHNPDSKDEKQKLAETSSLSNVTSNYDFVGQHKKMKYNIHERNGVRFLKSILKKESKYEHGYLKALIINQSFKFGNQKAAAIRDSIELTKEKGAEIPKTIKKLRWFDETSNIENNAENSHSLKNKTGTTQQHSQQFHIQSGAGSNIISVSTCAVNSADTKKSREDSISENVTTLGGSGADHMPLNCFIPSGYNFAKHAWPASKKEESKIPVHDDSKTKQGKPQRGRAKIIRKPGSAKVQSGFICTNRKGAVIQPQSASKVNIFTQAQGKLIIPCPPPQSTSNIRSGKNIQVSQCQPVTPENPQNIITHNSFNSKHVLPTEHSLNQWNQESSSPLSNACSDLVTVIPSLPSYCSSECQTFAKINHSNGTQAVARQDATLYCTQRSPVCEESYPSVTLRTAEEESVPLWKRGPNVLHQNKRATGTVAHGCNPSTLGGQGTRIYLKLEVRDQPGQRDETLSLQKYKN

SEQ ID NO: 1427 - protein, 152 aa, Artificial Sequence
  Synthetic polypeptide
MATGELGDLGGYYFRFLPQKTFQSLSSKEITSRLRQWSMLGRIKAQAFGFDQTFQSYRKDDFVMAFFKDPNVIPNLKLLSDSSGQWIILGTEVKKIEAINVPCTQLSMSFFHRLYDEDIVRDSGHIVKCLDSFCDPFLISDELRRKYQMLLK

SEQ ID NO: 1428 - protein, 21 aa, Artificial Sequence
  Synthetic polypeptide
HFFIGYMMKILYETVDILLNV

SEQ ID NO: 1429 - protein, 228 aa, Artificial Sequence
  Synthetic polypeptide
MDPGQQPPPQPAPQGQGQPPSQPPQGQGPPSGPGQPAPAATQAAPQAPPAGHQIVHVRGDSETDLEALFNAVMNPKTANVPQTVPMRLRKLPDSFFKPPEPKSHSRQASTDAGTAGALTPQHVRAHSSPASLQLGAVSPGTLTPTGVVSGPAATPTAQHLRQSSFEIPDDVPLPAGWEMAKTSSGQRYFLKCLIAYSPPLDVVRPIGPTIVSYALSIVCLVCNRYLRM

SEQ ID NO: 1430 - protein, 50 aa, Artificial Sequence
  Synthetic polypeptide
MAKTSSGQRYFLKCLIAYSPPLDVVRPIGPTIVSYALSIVCLVCNRYLRM

SEQ ID NO: 1431 - protein, 375 aa, Artificial Sequence
  Synthetic polypeptide
MDPGQQPPPQPAPQGQGQPPSQPPQGQGPPSGPGQPAPAATQAAPQAPPAGHQIVHVRGDSETDLEALFNAVMNPKTANVPQTVPMRLRKLPDSFFKPPEPKSHSRQASTDAGTAGALTPQHVRAHSSPASLQLGAVSPGTLTPTGVVSGPAATPTAQHLRQSSFEIPDDVPLPAGWEMAKTSSGQRYFLNHIDQTTTWQDPRKAMLSQMNVTAPTSPPVQQNMMNSASGPLPDGWEQAMTQDGEIYYINHKNKTTSWLDPRLDPRFAMNQRISQSAPVKQPPPLAPQSPQGGVMGGSNSNQQQQMRLQQLQMEKERLRLKQQELLRQAMRNINPSTANSPKCQGRARWLTSVIPALLGGQGGWITRSRDRDHPG

SEQ ID NO: 1432 - protein, 197 aa, Artificial Sequence
  Synthetic polypeptide
MAKTSSGQRYFLNHIDQTTTWQDPRKAMLSQMNVTAPTSPPVQQNMMNSASGPLPDGWEQAMTQDGEIYYINHKNKTTSWLDPRLDPRFAMNQRISQSAPVKQPPPLAPQSPQGGVMGGSNSNQQQQMRLQQLQMEKERLRLKQQELLRQAMRNINPSTANSPKCQGRARWLTSVIPALLGGQGGWITRSRDRDHPG

SEQ ID NO: 1433 - protein, 8 aa, Artificial Sequence
  Synthetic polypeptide
IRTRPPLG

SEQ ID NO: 1434 - protein, 336 aa, Artificial Sequence
  Synthetic polypeptide
MHSFPPLLLLLFWGVVSHSFPATLETQEQDVDLVQKYLEKYYNLKNDGRQVEKRRNSGPVVEKLKQMQEFFGLKVTGKPDAETLKVMKQPRCGVPDVAQFVLTEGNPRWEQTHLTYRIENYTPDLPRADVDHAIEKAFQLWSNVTPLTFTKVSEGQADIMISFVRGDHRDNSPFDGPGGNLAHAFQPGPGIGGDAHFDEDERWTNNFREYNLHRVAAHELGHSLGLSHSTDIGALMYPSYTFSGDVQLAQDDIDGIQAIYGRSQNPVQPIGPQTPKACDSKLTFDAITTIRGEVMFFKDRLLKFIIMGVFQASEISKCYKPTLLWRAECYTFTSTP

SEQ ID NO: 1435 - protein, 1545 aa, Artificial Sequence
  Synthetic polypeptide
MANGTADVRKLFIFTTTQNYFGLMSELWDQPLLCNCLEINNFLDDGNQMLLRVQRSDAGISFSNTIEFGDTKDKVLVFFKLRPEVITDENLHDNILVSSMLESPISSLYQAVRQVFAPMLLKDQEWSRNFDPKLQNLLSELEAGLGIVLRRSDTNLTKLKFKEDDTRGILTPSDEFQFWIEQAHRGNKQISKERANYFKELFETIAREFYNLDSLSLLEVVDLVETTQDVVDDVWRQTEHDHYPESRMLHLLDIIGGSFGRFVQKKLGTLNLWEDPYYLVKESLKAGISICEQWVIVCNHLTGQVWQRYVPHPWKNEKYFPETLDKLGKRLEEVLAIRTIHEKFLYFLPASEEKIICLTRVFEPFTGLNPVQYNPYTEPLWKAAVSQYEKIIAPAEQKIAGKLKNYISEIQDSPQQLLQAFLKYKELVKRPTISKELMLERETLLARLVDSIKDFRLDFENRCRGIPGDASGPLSGKNLSEVVNSIVWVRQLELKVDDTIKIAEALLSDLPGFRCFHQSAKDLLDQLKLYEQEQFDDWSRDIQSGLSDSRSGLCIEASSRIMELDSNDGLLKVHYSDRLVILLREVRQLSALGFVIPAKIQQVANIAQKFCKQAIILKQVAHFYNSIDQQMIQSQRPMMLQSALAFEQIIKNSKAGSGGKSQITWDNPKELEGYIQKLQNAAERLATENRKLRKWHTTFCEKVVVLMNIDLLRQQQRWKDGLQELRTGLATVEAQGFQASDMHAWKQHWNHQLYKALEHQYQMGLEALNENLPEINIDLTYKQGRLQFRPPFEEIRAKYYREMKRFIGIPNQFKGVGEAGDESIFSIMIDRNASGFLTIFSKAEDLFRRLSAVLHQHKEWIVIGQVDMEALVEKHLFTVHDWEKNFKALKIKGKEVERLPSAVKVDCLNINCNPVKTVIDDLIQKLFDLLVLSLKKSIQAHLHEIDTFVTEAMEVLTIMPQSVEEIGDANLQYSKLQERKPEILPLFQEAEDKNRLLRTVAGGGLETISNLKAKWDKFELMMESHQLMIKDQIEVMKGNVKSRLQIYYQELEKFKARWDQLKPGDDVIETGQHNTLDKSAKLIKEKKIEFDDLEVTRKKLVDDCHHFRLEEPNFSLASSISKDIESCAQIWAFYEEFQQGFQEMANEDWITFRTKTYLFEEFLMNWHDRLRKVEEHSVMTVKLQSEVDKYKIVIPILKYVRGEHLSPDHWLDLFRLLGLPRGTSLEKLLFGDLLRVADTIVAKAADLKDLNSRAQGEVTIREALRELDLWGVGAVFTLIDYEDSQSRTMKLIKDWKDIVNQVGDNRCLLQSLKDSPYYKGFEDKVSIWERKLAELDEYLQNLNHIQRKWVYLEPIFGRGALPKEQTRFNRVDEDFRSIMTDIKKDNRVTTLTTHAGIRNSLLTILDQLQRCQKSLNEFLEEKRSAFPRFYFIGDDDLLEILGQSTNPSVIQSHLKKLFAGINSVCFDEKSKHITAMKSLEGEVVPFKNKVPLSNNVETWLNDLALEMKKTLEQLLKECVTTGRSSQGAVDPSLFPSQLTDKLLNF

SEQ ID NO: 1436 - protein, 3644 aa, Artificial Sequence
  Synthetic polypeptide
MANGTADVRKLFIFTTTQNYFGLMSELWDQPLLCNCLEINNFLDDGNQMLLRVQRSDAGISFSNTIEFGDTKDKVLVFFKLRPEVITDENLHDNILVSSMLESPISSLYQAVRQVFAPMLLKDQEWSRNFDPKLQNLLSELEAGLGIVLRRSDTNLTKLKFKEDDTRGILTPSDEFQFWIEQAHRGNKQISKERANYFKELFETIAREFYNLDSLSLLEVVDLVETTQDVVDDVWRQTEHDHYPESRMLHLLDIIGGSFGRFVQKKLGTLNLWEDPYYLVKESLKAGISICEQWVIVCNHLTGQVWQRYVPHPWKNEKYFPETLDKLGKRLEEVLAIRTIHEKFLYFLPASEEKIICLTRVFEPFTGLNPVQYNPYTEPLWKAAVSQYEKIIAPAEQKIAGKLKNYISEIQDSPQQLLQAFLKYKELVKRPTISKELMLERETLLARLVDSIKDFRLDFENRCRGIPGDASGPLSGKNLSEVVNSIVWVRQLELKVDDTIKIAEALLSDLPGFRCFHQSAKDLLDQLKLYEQEQFDDWSRDIQSGLSDSRSGLCIEASSRIMELDSNDGLLKVHYSDRLVILLREVRQLSALGFVIPAKIQQVANIAQKFCKQAIILKQVAHFYNSIDQQMIQSQRPMMLQSALAFEQIIKNSKAGSGGKSQITWDNPKELEGYIQKLQNAAERLATENRKLRKWHTTFCEKVVVLMNIDLLRQQQRWKDGLQELRTGLATVEAQGFQASDMHAWKQHWNHQLYKALEHQYQMGLEALNENLPEINIDLTYKQGRLQFRPPFEEIRAKYYREMKRFIGIPNQFKGVGEAGDESIFSIMIDRNASGFLTIFSKAEDLFRRLSAVLHQHKEWIVIGQVDMEALVEKHLFTVHDWEKNFKALKIKGKEVERLPSAVKVDCLNINCNPVKTVIDDLIQKLFDLLVLSLKKSIQAHLHEIDTFVTEAMEVLTIMPQSVEEIGDANLQYSKLQERKPEILPLFQEAEDKNRLLRTVAGGGLETISNLKAKWDKFELMMESHQLMIKDQIEVMKGNVKSRLQIYYQELEKFKARWDQLKPGDDVIETGQHNTLDKSAKLIKEKKIEFDDLEVTRKKLVDDCHHFRLEEPNFSLASSISKDIESCAQIWAFYEEFQQGFQEMANEDWITFRTKTYLFEEFLMNWHDRLRKVEEHSVMTVKLQSEVDKYKIVIPILKYVRGEHLSPDHWLDLFRLLGLPRGTSLEKLLFGDLLRVADTIVAKAADLKDLNSRAQGEVTIREALRELDLWGVGAVFTLIDYEDSQSRTMKLIKDWKDIVNQVGDNRCLLQSLKDSPYYKGFEDKVSIWERKLAELDEYLQNLNHIQRKWVYLEPIFGRGALPKEQTRFNRVDEDFRSIMTDIKKDNRVTTLTTHAGIRNSLLTILDQLQRCQKSLNEFLEEKRSAFPRFYFIGDDDLLEILGQSTNPSVIQSHLKKLFAGINSVCFDEKSKHITAMKSLEGEVVPFKNKVPLSNNVETWLNDLALEMKKTLEQLLKECVTTGRSSQGAVDPSLFPSQILCLAEQIKFTEDVENAIKDHSLHQIETQLVNKLEQYTNIDTSSEDPGNTESGILELKLKALILDIIHNIDVVKQLNQIQVHTTEDWAWKKQLRFYMKSDHTCCVQMVDSEFQYTYEYQGNASKLVYTPLTDKCYLTLTQAMKMGLGGNPYGPAGTGKTESVKALGGLLGRQVLVFNCDEGIDVKSMGRIFVGLVKCGAWGCFDEFNRLEESVLSAVSMQIQTIQDALKNHRTVCELLGKEVEVNSNSGIFITMNPAGKGYGGRQKLPDNLKQLFRPVAMSHPDNELIAEVILYSEGFKDAKVLSRKLVAIFNLSRELLTPQQHYDWGLRALKTVLRGSGNLLRQLNKSGTTQNANESHIVVQALRLNTMSKFTFTDCTRFDALIKDVFPGIELKEVEYDELSAALKQVFEEANYEIIPNQIKKALELYEQLCQRMGVVIVGPSGAGKSTLWRMLRAALCKTGKVVKQYTMNPKAMPRYQLLGHIDMDTREWSDGVLTNSARQVVREPQDVSSWIICDGDIDPEWIESLNSVLDDNRLLTMPSGERIQFGPNVNFVFETHDLSCASPATISRMGMIFLSDEETDLNSLIKSWLRNQPAEYRNNLENWIGDYFEKALQWVLKQNDYVVETSLVGTVMNGLSHLHGCRDHDEFIINLIRGLGGNLNMKSRLEFTKEVFHWARESPPDFHKPMDTYYDSTRGRLATYVLKKPEDLTADDFSNGLTLPVIQTPDMQRGLDYFKPWLSSDTKQPFILVGPEGCGKGMLLRYAFSQLRSTQIATVHCSAQTTSRHLLQKLSQTCMVISTNTGRVYRPKDCERLVLYLKDINLPKLDKWGTSTLVAFLQQVLTYQGFYDENLEWVGLENIQIVASMSAGGRLGRHKLTTRFTSIVRLCSIDYPEREQLQTIYGAYLEPVLHKNLKNHSIWGSSSKIYLLAGSMVQVYEQVRAKFTVDDYSHYFFTPCILTQWVLGLFRYDLEGGSSNHPLDYVLEIVAYEARRLFRDKIVGAKELHLFDIILTSVFQGDWGSDILDNMSDSFYVTWGARHNSGARAAPGQPLPPHGKPLGKLNSTDLKDVIKKGLIHYGRDNQNLDILLFHEVLEYMSRIDRVLSFPGGSLLLAGRSGVGRRTITSLVSHMHGAVLFSPKISRGYELKQFKNDLKHVLQLAGIEAQQVVLLLEDYQFVHPTFLEMINSLLSSGEVPGLYTLEELEPLLLPLKDQASQDGFFGPVFNYFTYRIQQNLHIVLIMDSANSNFMINCESNPALHKKCQVLWMEGWSNSSMKKIPEMLFSETGGGEKYNDKKRKEEKKKNSVDPDFLKSFLLIHESCKAYGATPSRYMTFLHVYSAISSSKKKELLKRQSHLQAGVSKLNEAKALVDELNRKAGEQSVLLKTKQDEADAALQMITVSMQDASEQKTELERLKHRIAEEVVKIEERKNKIDDELKEVQPLVNEAKLAVGNIKPESLSEIRSLRMPPDVIRDILEGVLRLMGIFDTSWVSMKSFLAKRGVREDIATFDARNISKEIRESVEELLFKNKGSFDPKNAKRASTAAAPLAAWVKANIQYSHVLERIHPLETEQAGLESNLKKTEDRKRKLEELLNSVGQKVSELKEKFQSRTSEAAKLEAEVSKAQETIKAAEVLINQLDREHKRWNAQVVEITEELATLPKRAQLAAAFITYLSAAPESLRKTCLEEWTKSAGLEKFDLRRFLCTESEQLIWKSEGLPSDDLSIENALVILQSRVCPFLIDPSSQATEWLKTHLKDSRLEVINQQDSNFITALELAVRFGKTLIIQEMDGVEPVLYPLLRRDLVAQGPRYVVQIGDKIIDYNEEFRLFLSTRNPNPFIPPDAASIVTEVNFTTTRSGLRGQLLALTIQHEKPDLEEQKTKLLQQEEDKKIQLAKLEESLLETLATSQGNILENKDLIESLNQTKASSALIQESLKESYKLQISLDQERDAYLPLAESASKMYFIISDLSKINNMYRFSLAAFLRLFQRALQNKQDSENTEQRIQSLISSLQHMVYEYICRCLFKADQLMFALHFVRGMHPELFQENEWDTFTGVVVGDMLRKADSQQKIRDQLPSWIDQERSWAVATLKVILMTSACLQQESH

SEQ ID NO: 1437 - protein, 3651 aa, Artificial Sequence
  Synthetic polypeptide
MANGTADVRKLFIFTTTQNYFGLMSELWDQPLLCNCLEINNFLDDGNQMLLRVQRSDAGISFSNTIEFGDTKDKVLVFFKLRPEVITDENLHDNILVSSMLESPISSLYQAVRQVFAPMLLKDQEWSRNFDPKLQNLLSELEAGLGIVLRRSDTNLTKLKFKEDDTRGILTPSDEFQFWIEQAHRGNKQISKERANYFKELFETIAREFYNLDSLSLLEVVDLVETTQDVVDDVWRQTEHDHYPESRMLHLLDIIGGSFGRFVQKKLGTLNLWEDPYYLVKESLKAGISICEQWVIVCNHLTGQVWQRYVPHPWKNEKYFPETLDKLGKRLEEVLAIRTIHEKFLYFLPASEEKIICLTRVFEPFTGLNPVQYNPYTEPLWKAAVSQYEKIIAPAEQKIAGKLKNYISEIQDSPQQLLQAFLKYKELVKRPTISKELMLERETLLARLVDSIKDFRLDFENRCRGIPGDASGPLSGKNLSEVVNSIVWVRQLELKVDDTIKIAEALLSDLPGFRCFHQSAKDLLDQLKLYEQEQFDDWSRDIQSGLSDSRSGLCIEASSRIMELDSNDGLLKVHYSDRLVILLREVRQLSALGFVIPAKIQQVANIAQKFCKQAIILKQVAHFYNSIDQQMIQSQRPMMLQSALAFEQIIKNSKAGSGGKSQITWDNPKELEGYIQKLQNAAERLATENRKLRKWHTTFCEKVVVLMNIDLLRQQQRWKDGLQELRTGLATVEAQGFQASDMHAWKQHWNHQLYKALEHQYQMGLEALNENLPEINIDLTYKQGRLQFRPPFEEIRAKYYREMKRFIGIPNQFKGVGEAGDESIFSIMIDRNASGFLTIFSKAEDLFRRLSAVLHQHKEWIVIGQVDMEALVEKHLFTVHDWEKNFKALKIKGKEVERLPSAVKVDCLNINCNPVKTVIDDLIQKLFDLLVLSLKKSIQAHLHEIDTFVTEAMEVLTIMPQSVEEIGDANLQYSKLQERKPEILPLFQEAEDKNRLLRTVAGGGLETISNLKAKWDKFELMMESHQLMIKDQIEVMKGNVKSRLQIYYQELEKFKARWDQLKPGDDVIETGQHNTLDKSAKLIKEKKIEFDDLEVTRKKLVDDCHHFRLEEPNFSLASSISKDIESCAQIWAFYEEFQQGFQEMANEDWITFRTKTYLFEEFLMNWHDRLRKVEEHSVMTVKLQSEVDKYKIVIPILKYVRGEHLSPDHWLDLFRLLGLPRGTSLEKLLFGDLLRVADTIVAKAADLKDLNSRAQGEVTIREALRELDLWGVGAVFTLIDYEDSQSRTMKLIKDWKDIVNQVGDNRCLLQSLKDSPYYKGFEDKVSIWERKLAELDEYLQNLNHIQRKWVYLEPIFGRGALPKEQTRFNRVDEDFRSIMTDIKKDNRVTTLTTHAGIRNSLLTILDQLQRCQKSLNEFLEEKRSAFPRFYFIGDDDLLEILGQSTNPSVIQSHLKKLFAGINSVCFDEKSKHITAMKSLEGEVVPFKNKVPLSNNVETWLNDLALEMKKTLEQLLKECVTTGRSSQGAVDPSLFPSQILCLAEQIKFTEDVENAIKDHSLHQIETQLVNKLEQYTNIDTSSEDPGNTESGILELKLKALILDIIHNIDVVKQLNQIQVHTTEDWAWKKQLRFYMKSDHTCCVQMVDSEFQYTYEYQGNASKLVYTPLTDKCYLTLTQAMKMGLGGNPYGPAGTGKTESVKALGGLLGRQVLVFNCDEGIDVKSMGRIFVGLVKCGAWGCFDEFNRLEESVLSAVSMQIQTIQDALKNHRTVCELLGKEVEVNSNSGIFITMNPAGKGYGGRQKLPDNLKQLFRPVAMSHPDNELIAEVILYSEGFKDAKVLSRKLVAIFNLSRELLTPQQHYDWGLRALKTVLRGSGNLLRQLNKSGTTQNANESHIVVQALRLNTMSKFTFTDCTRFDALIKDVFPGIELKEVEYDELSAALKQVFEEANYEIIPNQIKKALELYEQLCQRMGVVIVGPSGAGKSTLWRMLRAALCKTGKVVKQYTMNPKAMPRYQLLGHIDMDTREWSDGVLTNSARQVVREPQDVSSWIICDGDIDPEWIESLNSVLDDNRLLTMPSGERIQFGPNVNFVFETHDLSCASPATISRMGMIFLSDEETDLNSLIKSWLRNQPAEYRNNLENWIGDYFEKALQWVLKQNDYVVETSLVGTVMNGLSHLHGCRDHDEFIINLIRGLGGNLNMKSRLEFTKEVFHWARESPPDFHKPMDTYYDSTRGRLATYVLKKPEDLTADDFSNGLTLPVIQTPDMQRGLDYFKPWLSSDTKQPFILVGPEGCGKGMLLRYAFSQLRSTQIATVHCSAQTTSRHLLQKLSQTCMVISTNTGRVYRPKDCERLVLYLKDINLPKLDKWGTSTLVAFLQQVLTYQGFYDENLEWVGLENIQIVASMSAGGRLGRHKLTTRFTSIVRLCSIDYPEREQLQTIYGAYLEPVLHKNLKNHSIWGSSSKIYLLAGSMVQVYEQVRAKFTVDDYSHYFFTPCILTQWVLGLFRYDLEGGSSNHPLDYVLEIVAYEARRLFRDKIVGAKELHLFDIILTSVFQGDWGSDILDNMSDSFYVTWGARHNSGARAAPGQPLPPHGKPLGKLNSTDLKDVIKKGLIHYGRDNQNLDILLFHEVLEYMSRIDRVLSFPGGSLLLAGRSGVGRRTITSLVSHMHGAVLFSPKISRGYELKQFKNDLKHVLQLAGIEAQQVVLLLEDYQFVHPTFLEMINSLLSSGEVPGLYTLEELEPLLLPLKDQASQDGFFGPVFNYFTYRIQQNLHIVLIMDSANSNFMINCESNPALHKKCQVLWMEGWSNSSMKKIPEMLFSETGGGEKYNDKKRKEEKKKNSVDPDFLKSFLLIHESCKAYGATPSRYMTFLHVYSAISSSKKKELLKRQSHLQAGVSKLNEAKALVDELNRKAGEQSVLLKTKQDEADAALQMITVSMQDASEQKTELERLKHRIAEEVVKIEERKNKIDDELKEVQPLVNEAKLAVGNIKPESLSEIRSLRMPPDVIRDILEGVLRLMGIFDTSWVSMKSFLAKRGVREDIATFDARNISKEIRESVEELLFKNKGSFDPKNAKRASTAAAPLAAWVKANIQYSHVLERIHPLETEQAGLESNLKKTEDRKRKLEELLNSVGQKVSELKEKFQSRTSEAAKLEAEVSKAQETIKAAEVLINQLDREHKRWNAQVVEITEELATLPKRAQLAAAFITYLSAAPESLRKTCLEEWTKSAGLEKFDLRRFLCTESEQLIWKSEGLPSDDLSIENALVILQIIGLKSWSRVCPFLIDPSSQATEWLKTHLKDSRLEVINQQDSNFITALELAVRFGKTLIIQEMDGVEPVLYPLLRRDLVAQGPRYVVQIGDKIIDYNEEFRLFLSTRNPNPFIPPDAASIVTEVNFTTTRSGLRGQLLALTIQHEKPDLEEQKTKLLQQEEDKKIQLAKLEESLLETLATSQGNILENKDLIESLNQTKASSALIQESLKESYKLQISLDQERDAYLPLAESASKMYFIISDLSKINNMYRFSLAAFLRLFQRALQNKQDSENTEQRIQSLISSLQHMVYEYICRCLFKADQLMFALHFVRGMHPELFQENEWDTFTGVVVGDMLRKADSQQKIRDQLPSWIDQERSWAVATLKVILMTSACLQQESH

SEQ ID NO: 1438 - protein, 37 aa, Artificial Sequence
  Synthetic polypeptide
QKIRDQLPSWIDQERSWAVATLKVILMTSACLQQESH

SEQ ID NO: 1439 - protein, 88 aa, Artificial Sequence
  Synthetic polypeptide
MIRKLVAEKLNIPWNHIRLQRTAKGKPVLAKDSSNPYPNFNFNISHQGDYAVLAAEPELQVGIDIMKTSFPDSASTIKRVSRFSICRI

SEQ ID NO: 1440 - protein, 153 aa, Artificial Sequence
  Synthetic polypeptide
MVFPAKRFCLVPSMEGVRWAFSCGTWLPSRAEWLLAVRSIQPEEKERIGQFVFARDAKAAMAGRLMIRKLVAEKLNIPWNHIRLQRTAKGKPVLAKDSSNPYPNFNFNISHQGDYAVLAAEPELQVGIDIMKTSFPDSASTIKRVSRFSICRI

SEQ ID NO: 1441 - protein, 16 aa, Artificial Sequence
  Synthetic polypeptide
RVKRGWPEEERRITQF

SEQ ID NO: 1442 - protein, 63 aa, Artificial Sequence
  Synthetic polypeptide
MVKAPQSEERLARGGKENNSVLDRVSHCHPGWSAVVQPHLPGSSNSHASASQVAGITGEKASI

SEQ ID NO: 1443 - protein, 553 aa, Artificial Sequence
  Synthetic polypeptide
MATSMAAASGRFESAKSIEERKEQTRNARAEVLRQAKANFEKEERRKELKRLRGEDTWMLPDVNERIEQFSQEHSVKKKKKKDKHSKKAKKEKKKKSKKQKYEKNNESSDSSSSSEDEWVEAVPSQTPDKEKAWKVKDEKSGKDDTQIIKRDEWMTVDFMSVKTVSSSSLKAEKETMRKIEQEKNQALEQSKLMERELNPYWKDGGTGLPPEDCSVSSITKVSVVEDGGLSWLRKSYLRMKEQAEKQSRNFEDIVAERYGSMEIFQSKLEDAEKAASTKEDYRRERWRKPTYSDKAQNCQESRESDLVKYGNSSRDRYATTDTAKNSNNEKFIGDEKDKRPGSLETCRRESNPRQNQEFSFGNLRAKFLRPSDDEELSFHSKGRKFEPLSSSSALVAQGSLCSGFRKPTKNSEERLTSWSRSDGRGDKKHSNQKPSETSTDEHQHVPEDPREKSQDEVLRDDPPKKEHLRDTKSTFAGSPERESIHILSVDEKNKLGAKIIKAEMMGNMELAEQLKVQLEKANKFKETITQIPKKSGVEKSEWNTKLFTTMEI

SEQ ID NO: 1444 - protein, 434 aa, Artificial Sequence
  Synthetic polypeptide
VEAVPSQTPDKEKAWKVKDEKSGKDDTQIIKRDEWMTVDFMSVKTVSSSSLKAEKETMRKIEQEKNQALEQSKLMERELNPYWKDGGTGLPPEDCSVSSITKVSVVEDGGLSWLRKSYLRMKEQAEKQSRNFEDIVAERYGSMEIFQSKLEDAEKAASTKEDYRRERWRKPTYSDKAQNCQESRESDLVKYGNSSRDRYATTDTAKNSNNEKFIGDEKDKRPGSLETCRRESNPRQNQEFSFGNLRAKFLRPSDDEELSFHSKGRKFEPLSSSSALVAQGSLCSGFRKPTKNSEERLTSWSRSDGRGDKKHSNQKPSETSTDEHQHVPEDPREKSQDEVLRDDPPKKEHLRDTKSTFAGSPERESIHILSVDEKNKLGAKIIKAEMMGNMELAEQLKVQLEKANKFKETITQIPKKSGVEKSEWNTKLFTTMEI

SEQ ID NO: 1445 - protein, 46 aa, Artificial Sequence
  Synthetic polypeptide
MEADSPAGPGAPEPLAEGAAAEFSSLLRRIKGKLFTCLASPVNKTL

SEQ ID NO: 1446 - protein, 49 aa, Artificial Sequence
  Synthetic polypeptide
MATSNLLKNKGSLQFEDKWDFMRPIVLKLLRQESVTKQQWFDLFSQRLQ

SEQ ID NO: 1447 - protein, 261 aa, Artificial Sequence
  Synthetic polypeptide
MATSNLLKNKGSLQFEDKWDFMRPIVLKLLRQESVTKQQWFDLFSDVHAVCLWDDKGPAKIHQALKEDILEFIKQAQARVLSHQDDTALLKAYIVEWRKFFTQCDILPKPFCQLEITLMGKQGSNKKSNVEDSIVRKLMLDTWNESIFSNIKNRLQDSAMKLVHAERLGEAFDSQLVIGVRESYVNLCSNPEDKLQIYRDNFEKAYLDSTERFYRTQAPSYLQQNGVQNYMKYADAKLKEEEKRALRYLETRRECNSVEAG

SEQ ID NO: 1448 - protein, 15 aa, Artificial Sequence
  Synthetic polypeptide
MLLPSDVARLVLGQL

SEQ ID NO: 1449 - protein, 2763 aa, Artificial Sequence
  Synthetic polypeptide
MSLVLNDLLICCRQLEHDRATERKKEVEKFKRLIRDPETIKHLDRHSDSKQGKYLNWDAVFRFLQKYIQKETECLRIAKPNVSASTQASRQKKMQEISSLVKYFIKCANRRAPRLKCQELLNYIMDTVKDSSNGAIYGADCSNILLKDILSVRKYWCEISQQQWLELFSVYFRLYLKPSQDVHRVLVARIIHAVTKGCCSQTDGLNSKFLDFFSKAIQCARQEKSSSGLNHILAALTIFLKTLAVNFRIRVCELGDEILPTLLYIWTQHRLNDSLKEVIIELFQLQIYIHHPKGAKTQEKGAYESTKWRSILYNLYDLLVNEISHIGSRGKYSSGFRNIAVKENLIELMADICHQVFNEDTRSLEISQSYTTTQRESSDYSVPCKRKKIELGWEVIKDHLQKSQNDFDLVPWLQIATQLISKYPASLPNCELSPLLMILSQLLPQQRHGERTPYVLRCLTEVALCQDKRSNLESSQKSDLLKLWNKIWCITFRGISSEQIQAENFGLLGAIIQGSLVEVDREFWKLFTGSACRPSCPAVCCLTLALTTSIVPGTVKMGIEQNMCEVNRSFSLKESIMKWLLFYQLEGDLENSTEVPPILHSNFPHLVLEKILVSLTMKNCKAAMNFFQSVPECEHHQKDKEELSFSEVEELFLQTTFDKMDFLTIVRECGIEKHQSSIGFSVHQNLKESLDRCLLGLSEQLLNNYSSEITNSETLVRCSRLLVGVLGCYCYMGVIAEEEAYKSELFQKAKSLMQCAGESITLFKNKTNEEFRIGSLRNMMQLCTRCLSNCTKKSPNKIASGFFLRLLTSKLMNDIADICKSLASFIKKPFDRGEVESMEDDTNGNLMEVEDQSSMNLFNDYPDSSVSDANEPGESQSTIGAINPLAEEYLSKQDLLFLDMLKFLCLCVTTAQTNTVSFRAADIRRKLLMLIDSSTLEPTKSLHLHMYLMLLKELPGEEYPLPMEDVLELLKPLSNVCSLYRRDQDVCKTILNHVLHVVKNLGQSNMDSENTRDAQGQFLTVIGAFWHLTKERKYIFSVRMALVNCLKTLLEADPYSKWAILNVMGKDFPVNEVFTQFLADNHHQVRMLAAESINRLFQDTKGDSSRLLKALPLKLQQTAFENAYLKAQEGMREMSHSAENPETLDEIYNRKSVLLTLIAVVLSCSPICEKQALFALCKSVKENGLEPHLVKKVLEKVSETFGYRRLEDFMASHLDYLVLEWLNLQDTEYNLSSFPFILLNYTNIEDFYRSCYKVLIPHLVIRSHFDEVKSIANQIQEDWKSLLTDCFPKILVNILPYFAYEGTRDSGMAQQRETATKVYDMLKSENLLGKQIDHLFISNLPEIVVELLMTLHEPANSSASQSTDLCDFSGDLDPAPNPPHFPSHVIKATFAYISNCHKTKLKSILEILSKSPDSYQKILLAICEQAAETNNVYKKHRILKIYHLFVSLLLKDIKSGLGGAWAFVLRDVIYTLIHYINQRPSCIMDVSLRSFSLCCDLLSQVCQTAVTYCKDALENHLHVIVGTLIPLVYEQVEVQKQVLDLLKYLVIDNKDNENLYITIKLLDPFPDHVVFKDLRITQQKIKYSRGPFSLLEEINHFLSVSVYDALPLTRLEGLKDLRRQLELHKDQMVDIMRASQDNPQDGIMVKLVVNLLQLSKMAINHTGEKEVLEAVGSCLGEVGPIDFSTIAIQHSKDASYTKALKLFEDKELQWTFIMLTYLNNTLVEDCVKVRSAAVTCLKNILATKTGHSFWEIYKMTTDPMLAYLQPFRTSRKKFLEVPRFDKENPFEGLDDINLWIPLSENHDIWIKTLTCAFLDSGGTKCEILQLLKPMCEVKTDFCQTVLPYLIHDILLQDTNESWRNLLSTHVQGFFTSCLRHFSQTSRSTTPANLDSESEHFFRCCLDKKSQRTMLAVVDYMRRQKRPSSGTIFNDAFWLDLNYLEVAKVAQSCAAHFTALLYAEIYADKKSMDDQEKRSLAFEEGSQNTTISSLSEKSKEETGISLQDLLLEIYRSIGEPDSLYGCGGGKMLQPITRLRTYEHEAMWGKALVTYDLETAIPSSTRQAGIIQALQNLGLCHILSVYLKGLDYENKDWCPELEELHYQAAWRNMQWDHCTSVSKEVEGTSYHESLYNALQSLRDREFSTFYESLKYARVKEVEEMCKRSLESVYSLYPTLSRLQAIGELESIGELFSRSVTHRQLSEVYIKWQKHSQLLKDSDFSFQEPIMALRTVILEILMEKEMDNSQRECIKDILTKHLVELSILARTFKNTQLPERAIFQIKQYNSVSCGVSEWQLEEAQVFWAKKEQSLALSILKQMIKKLDASCAANNPSLKLTYTECLRVCGNWLAETCLENPAVIMQTYLEKAVEVAGNYDGESSDELRNGKMKAFLSLARFSDTQYQRIENYMKSSEFENKQALLKRAKEEVGLLREHKIQTNRYTVKVQRELELDELALRALKEDRKRFLCKAVENYINCLLSGEEHDMWVFRLCSLWLENSGVSEVNGMMKRDGMKIPTYKFLPLMYQLAARMGTKMMGGLGFHEVLNNLISRISMDHPHHTLFIILALANANRDEFLTKPEVARRSRITKNVPKQSSQLDEDRTEAANRIICTIRSRRPQMVRSVEALCDAYIILANLDATQWKTQRKGINIPADQPITKLKNLEDVVVPTMEIKVDHTGEYGNLVTIQSFKAEFRLAGGVNLPKIIDCVGSDGKERRQLVKGRDDLRQDAVMQQVFQMCNTLLQRNTETRKRKLTICTYKSLSYMGG

SEQ ID NO: 1450 - protein, 2756 aa, Artificial Sequence
  Synthetic polypeptide
MSLVLNDLLICCRQLEHDRATERKKEVEKFKRLIRDPETIKHLDRHSDSKQGKYLNWDAVFRFLQKYIQKETECLRIAKPNVSASTQASRQKKMQEISSLVKYFIKCANRRAPRLKCQELLNYIMDTVKDSSNGAIYGADCSNILLKDILSVRKYWCEISQQQWLELFSVYFRLYLKPSQDVHRVLVARIIHAVTKGCCSQTDGLNSKFLDFFSKAIQCARQEKSSSGLNHILAALTIFLKTLAVNFRIRVCELGDEILPTLLYIWTQHRLNDSLKEVIIELFQLQIYIHHPKGAKTQEKGAYESTKWRSILYNLYDLLVNEISHIGSRGKYSSGFRNIAVKENLIELMADICHQVFNEDTRSLEISQSYTTTQRESSDYSVPCKRKKIELGWEVIKDHLQKSQNDFDLVPWLQIATQLISKYPASLPNCELSPLLMILSQLLPQQRHGERTPYVLRCLTEVALCQDKRSNLESSQKSDLLKLWNKIWCITFRGISSEQIQAENFGLLGAIIQGSLVEVDREFWKLFTGSACRPSCPAVCCLTLALTTSIVPGTVKMGIEQNMCEVNRSFSLKESIMKWLLFYQLEGDLENSTEVPPILHSNFPHLVLEKILVSLTMKNCKAAMNFFQSVPECEHHQKDKEELSFSEVEELFLQTTFDKMDFLTIVRECGIEKHQSSIGFSVHQNLKESLDRCLLGLSEQLLNNYSSEITNSETLVRCSRLLVGVLGCYCYMGVIAEEEAYKSELFQKAKSLMQCAGESITLFKNKTNEEFRIGSLRNMMQLCTRCLSNCTKKSPNKIASGFFLRLLTSKLMNDIADICKSLASFIKKPFDRGEVESMEDDTNGNLMEVEDQSSMNLFNDYPDSSVSDANEPGESQSTIGAINPLAEEYLSKQDLLFLDMLKFLCLCVTTAQTNTVSFRAADIRRKLLMLIDSSTLEPTKSLHLHMYLMLLKELPGEEYPLPMEDVLELLKPLSNVCSLYRRDQDVCKTILNHVLHVVKNLGQSNMDSENTRDAQGQFLTVIGAFWHLTKERKYIFSVRMALVNCLKTLLEADPYSKWAILNVMGKDFPVNEVFTQFLADNHHQVRMLAAESINRLFQDTKGDSSRLLKALPLKLQQTAFENAYLKAQEGMREMSHSAENPETLDEIYNRKSVLLTLIAVVLSCSPICEKQALFALCKSVKENGLEPHLVKKVLEKVSETFGYRRLEDFMASHLDYLVLEWLNLQDTEYNLSSFPFILLNYTNIEDFYRSCYKVLIPHLVIRSHFDEVKSIANQIQEDWKSLLTDCFPKILVNILPYFAYEGTRDSGMAQQRETATKVYDMLKSENLLGKQIDHLFISNLPEIVVELLMTLHEPANSSASQSTDLCDFSGDLDPAPNPPHFPSHVIKATFAYISNCHKTKLKSILEILSKSPDSYQKILLAICEQAAETNNVYKKHRILKIYHLFVSLLLKDIKSGLGGAWAFVLRDVIYTLIHYINQRPSCIMDVSLRSFSLCCDLLSQVCQTAVTYCKDALENHLHVIVGTLIPLVYEQVEVQKQVLDLLKYLVIDNKDNENLYITIKLLDPFPDHVVFKDLRITQQKIKYSRGPFSLLEEINHFLSVSVYDALPLTRLEGLKDLRRQLELHKDQMVDIMRASQDNPQDGIMVKLVVNLLQLSKMAINHTGEKEVLEAVGSCLGEVGPIDFSTIAIQHSKDASYTKALKLFEDKELQWTFIMLTYLNNTLVEDCVKVRSAAVTCLKNILATKTGHSFWEIYKMTTDPMLAYLQPFRTSRKKFLEVPRFDKENPFEGLDDINLWIPLSENHDIWIKTLTCAFLDSGGTKCEILQLLKPMCEVKTDFCQTVLPYLIHDILLQDTNESWRNLLSTHVQGFFTSCLRHFSQTSRSTTPANLDSESEHFFRCCLDKKSQRTMLAVVDYMRRQKRPSSGTIFNDAFWLDLNYLEVAKVAQSCAAHFTALLYAEIYADKKSMDDQEKRSLAFEEGSQNTTISSLSEKSKEETGISLQDLLLEIYRSIGEPDSLYGCGGGKMLQPITRLRTYEHEAMWGKALVTYDLETAIPSSTRQAGIIQALQNLGLCHILSVYLKGLDYENKDWCPELEELHYQAAWRNMQWDHCTSVSKEVEGTSYHESLYNALQSLRDREFSTFYESLKYARVKEVEEMCKRSLESVYSLYPTLSRLQAIGELESIGELFSRSVTHRQLSEVYIKWQKHSQLLKDSDFSFQEPIMALRTVILEILMEKEMDNSQRECIKDILTKHLVELSILARTFKNTQLPERAIFQIKQYNSVSCGVSEWQLEEAQVFWAKKEQSLALSILKQMIKKLDASCAANNPSLKLTYTECLRVCGNWLAETCLENPAVIMQTYLEKAVEVAGNYDGESSDELRNGKMKAFLSLARFSDTQYQRIENYMKSSEFENKQALLKRAKEEVGLLREHKIQTNRYTVKVQRELELDELALRALKEDRKRFLCKAVENYINCLLSGEEHDMWVFRLCSLWLENSGVSEVNGMMKRDGMKIPTYKFLPLMYQLAARMGTKMMGGLGFHEVLNNLISRISMDHPHHTLFIILALANANRDEFLTKPEVARRSRITKNVPKQSSQLDEDRTEAANRIICTIRSRRPQMVRSVEALCDAYIILANLDATQWKTQRKGINIPADQPITKLKNLEDVVVPTMEIKVDHTGEYGNLVTIQSFKAEFRLAGGVNLPKIIDCVGSDGKERRQLVKGRDDLRQDAVMQQVFQMCNTLLQRNTETRKRKLTICTYK

SEQ ID NO: 1451 - protein, 676 aa, Artificial Sequence
  Synthetic polypeptide
MGKTANSPGSGARPDPVRSFNRWKKKHSHRQNKKKQLRKQLKKPEWQVERESISRLMQNYEKINVNEITRFSDFPLSKKTLKGLQEAQYRLVTEIQKQTIGLALQGKDVLGAAKTGSGKTLAFLVPVLEALYRLQWTSTDGLGVLIISPTRELAYQTFEVLRKVGKNHDFSAGLIIGGKDLKHEAERINNINILVCTPGRLLQHMDETVSFHATDLQMLVLDEADRILDMGFADTMNAVIENLPKKRQTLLFSATQTKSVKDLARLSLKNPEYVWVHEKAKYSTPATLEQNYIVCELQQKISVLYSFLRSHLKKKSIVFFSSCKEVQYLYRVFCRLRPGVSILALHGRQQQMRRMEVYNEFVRKRAAVLFATDIAARGLDFPAVNWVLQFDCPEDANTYIHRAGRTARYKEDGEALLILLPSEKAMVQQLLQKKVPVKEIKINPEKLIDVQKKLESILAQDQDLKERAQRCFVSYVRSVYLMKDKEVFDVSKLPIPEYALSLGLAVAPRVRFLQKMQKQPTKELVRSQADKVIEPRAPSLTNDEVEEFRAYFNEKMSILQKGGKRLEGTEHRQDNDTGNEEQEEEEDDEEEMEEKLAKAKGSQAPSLPNTSEAQKIKEVPTQFLDRDEEEEDADFLKVKRHNVFGLDLKDEKTLQPTQCEDNQDEDLYNDPLPLDE

SEQ ID NO: 1452 - protein, 264 aa, Artificial Sequence
  Synthetic polypeptide
MPGGGSQEYGVLCIQEYRKNSKVESSTRNNFMGLKDHLGHDLGHLYVESTDPQLSPAVPWSTVENPSMDTVNVGKDEKEASEENASSGDSEENTNSDHESEQLGSISVEPGLITKTHRQLCRSPCLEPHILKRNEILQDFKPEESQTTSKEAKKPPDVVREYQTKLEFALKLGYSEEQVQLVLNKLGTDALINDILGELVKLGNKSEADQTVSTINTITRETSSLESQRSESPMQEIVTDDGENLRPIVIDGSNVAMRQGVSHL

SEQ ID NO: 1453 - protein, 265 aa, Artificial Sequence
  Synthetic polypeptide
MSLYFPANEYGVLCIQEYRKNSKVESSTRNNFMGLKDHLGHDLGHLYVESTDPQLSPAVPWSTVENPSMDTVNVGKDEKEASEENASSGDSEENTNSDHESEQLGSISVEPGLITKTHRQLCRSPCLEPHILKRNEILQDFKPEESQTTSKEAKKPPDVVREYQTKLEFALKLGYSEEQVQLVLNKLGTDALINDILGELVKLGNKSEADQTVSTINTITRETSSLESQRSESPMQEIVTDDGENLRPIVIDGSNVAMRQGVSHL

SEQ ID NO: 1454 - protein, 233 aa, Artificial Sequence
  Synthetic polypeptide
MGLKDHLGHDLGHLYVESTDPQLSPAVPWSTVENPSMDTVNVGKDEKEASEENASSGDSEENTNSDHESEQLGSISVEPGLITKTHRQLCRSPCLEPHILKRNEILQDFKPEESQTTSKEAKKPPDVVREYQTKLEFALKLGYSEEQVQLVLNKLGTDALINDILGELVKLGNKSEADQTVSTINTITRETSSLESQRSESPMQEIVTDDGENLRPIVIDGSNVAMRQGVSHL

SEQ ID NO: 1455 - protein, 276 aa, Artificial Sequence
  Synthetic polypeptide
MPGGGSQEYGVLCIQEYRKNSKVESSTRNNFMGLKDHLGHDLGHLYVESTDPQLSPAVPWSTVENPSMDTVNVGKDEKEASEENASSGDSEENTNSDHESEQLGSISVEPGLITKTHRQLCRSPCLEPHILKRNEILQDFKPEESQTTSKEAKKPPDVVREYQTKLEFALKLGYSEEQVQLVLNKLGTDALINDILGELVKLGNKSEADQTVSTINTITRETSSLESQRSESPMQEIVTDDGENLRPIVIDGSNVAMRVSHTCNPNTSRGQDGRII

SEQ ID NO: 1456 - protein, 277 aa, Artificial Sequence
  Synthetic polypeptide
MSLYFPANEYGVLCIQEYRKNSKVESSTRNNFMGLKDHLGHDLGHLYVESTDPQLSPAVPWSTVENPSMDTVNVGKDEKEASEENASSGDSEENTNSDHESEQLGSISVEPGLITKTHRQLCRSPCLEPHILKRNEILQDFKPEESQTTSKEAKKPPDVVREYQTKLEFALKLGYSEEQVQLVLNKLGTDALINDILGELVKLGNKSEADQTVSTINTITRETSSLESQRSESPMQEIVTDDGENLRPIVIDGSNVAMRVSHTCNPNTSRGQDGRII

SEQ ID NO: 1457 - protein, 245 aa, Artificial Sequence
  Synthetic polypeptide
MGLKDHLGHDLGHLYVESTDPQLSPAVPWSTVENPSMDTVNVGKDEKEASEENASSGDSEENTNSDHESEQLGSISVEPGLITKTHRQLCRSPCLEPHILKRNEILQDFKPEESQTTSKEAKKPPDVVREYQTKLEFALKLGYSEEQVQLVLNKLGTDALINDILGELVKLGNKSEADQTVSTINTITRETSSLESQRSESPMQEIVTDDGENLRPIVIDGSNVAMRVSHTCNPNTSRGQDGRII

SEQ ID NO: 1458 - protein, 165 aa, Artificial Sequence
  Synthetic polypeptide
MPKPINVRVTTMDAELEFAIQPNTTGKQLFDQVVKTVGLREVWFFGLQYVDSKGYSTWLKLNKKVTQQDVKKENPLQFKFRAKFFPEDVSEELIQEITQRLFFLQVKEAILNDEIYCPPETAVLLASYAVQAKYGDYNKEIHKPGYLANDRLLPQRVNQPQIENM

SEQ ID NO: 1459 - protein, 133 aa, Artificial Sequence
  Synthetic polypeptide
MPKPINVRVTTMDAELEFAIQPNTTGKQLFDQVTQQDVKKENPLQFKFRAKFFPEDVSEELIQEITQRLFFLQVKEAILNDEIYCPPETAVLLASYAVQAKYGDYNKEIHKPGYLANDRLLPQRVNQPQIENM

SEQ ID NO: 1460 - protein, 154 aa, Artificial Sequence
  Synthetic polypeptide
MDAELEFAIQPNTTGKQLFDQVVKTVGLREVWFFGLQYVDSKGYSTWLKLNKKVTQQDVKKENPLQFKFRAKFFPEDVSEELIQEITQRLFFLQVKEAILNDEIYCPPETAVLLASYAVQAKYGDYNKEIHKPGYLANDRLLPQRVNQPQIENM

SEQ ID NO: 1461 - protein, 118 aa, Artificial Sequence
  Synthetic polypeptide
MAAAGGARLLRAASAVLGGPAGRWLHHAGSRAGSSGLLRNRGPGGSAEASRSLSVSARARSSSEDKITVHFINRDGETLTTKGKVGDSLLDVVVENNLDIDGFEQPLSCLTLGTLPMG

SEQ ID NO: 1462 - protein, 17 aa, Artificial Sequence
  Synthetic polypeptide
MYFFIRDALKPGIELGT

SEQ ID NO: 1463 - protein, 339 aa, Artificial Sequence
  Synthetic polypeptide
MRPGTALQAVLLAVLLVGLRAATGRLLSGQPVCRGGTQRPCYKVIYFHDTSRRLNFEEAKEACRRDGGQLVSIESEDEQKLIEKFIENLLPSDGDFWIGLRRREEKQSNSTACQDLYAWTDGSISQFRNWYVDEPSCGSEVCVVMYHQPSAPAGIGGPYMFQWNDDRCNMKNNFICKYSDEKPAVPSREAEGEETELTTPVLPEETQEEDAKKTFKESREAALNLAYILIPSIPLLLLLVVTTVVCWVWICRKRKREQPDPSTKKQHTIWPSPHQGNSPDLEVYNVIRKQSEADLAETRPDLKNISFRVCSGEATPDDMSCDYDNMAVNPSESGFVTLE

SEQ ID NO: 1464 - protein, 347 aa, Artificial Sequence
  Synthetic polypeptide
MRPGTALQAVLLAVLLVGLRAATGRLLSASDLDLRGGQPVCRGGTQRPCYKVIYFHDTSRRLNFEEAKEACRRDGGQLVSIESEDEQKLIEKFIENLLPSDGDFWIGLRRREEKQSNSTACQDLYAWTDGSISQFRNWYVDEPSCGSEVCVVMYHQPSAPAGIGGPYMFQWNDDRCNMKNNFICKYSDEKPAVPSREAEGEETELTTPVLPEETQEEDAKKTFKESREAALNLAYILIPSIPLLLLLVVTTVVCWVWICRKRKREQPDPSTKKQHTIWPSPHQGNSPDLEVYNVIRKQSEADLAETRPDLKNISFRVCSGEATPDDMSCDYDNMAVNPSESGFVTLE

SEQ ID NO: 1465 - protein, 194 aa, Artificial Sequence
  Synthetic polypeptide
MVTSGLGSGGVRRNKAIAQPARTFMLGLMAAYHNLEKPAVPSREAEGEETELTTPVLPEETQEEDAKKTFKESREAALNLAYILIPSIPLLLLLVVTTVVCWVWICRKRKREQPDPSTKKQHTIWPSPHQGNSPDLEVYNVIRKQSEADLAETRPDLKNISFRVCSGEATPDDMSCDYDNMAVNPSESGFVTLE

SEQ ID NO: 1466 - protein, 34 aa, Artificial Sequence
  Synthetic polypeptide
MSTEGGGRRCQAQVSRRISFSASHRLYRHSVMLN

SEQ ID NO: 1467 - protein, 180 aa, Artificial Sequence
  Synthetic polypeptide
MDADKEKDLQKFLKNVDEISNLIQEMNSDDPVVQQKAVLETEKRLLLMEEDQEEDECRTTLNKTMISPPQTAMKSAEEINSEAFLASVEKDAKERAKRRRENKVLADALKEKGNEAFAEGNYETAILRYSEGLEKLKDMKVLYTNRAQILPCFVPWRADLCGLAPWLPSPLASICIQPIK

SEQ ID NO: 1468 - protein, 155 aa, Artificial Sequence
  Synthetic polypeptide
MNSDDPVVQQKAVLETEKRLLLMEEDQEEDECRTTLNKTMISPPQTAMKSAEEINSEAFLASVEKDAKERAKRRRENKVLADALKEKGNEAFAEGNYETAILRYSEGLEKLKDMKVLYTNRAQILPCFVPWRADLCGLAPWLPSPLASICIQPIK

SEQ ID NO: 1469 - protein, 22 aa, Artificial Sequence
  Synthetic polypeptide
EGHESAVHQPSPDPSLLCALEG

SEQ ID NO: 1470 - protein, 523 aa, Artificial Sequence
  Synthetic polypeptide
MVCTRKTKTLVSTCVILSGMTNIICLLYVGWVTNYIASVYVRGQEPAPDKKLEEDKGDTLKIIERLDHLENVIKQHIQEAPAKPEEAEAEPFTDSSLFAHWGQELSPEGRRVALKQFQYYGYNAYLSDRLPLDRPLPDLRPSGCRNLSFPDSLPEVSIVFIFVNEALSVLLRSIHSAMERTPPHLLKEIILVDDNSSNEELKEKLTEYVDKVNSQKPGFIKVVRHSKQEGLIRSRVSGWRAATAPVVALFDAHVEFNVGWAEPVLTRIKENRKRIISPSFDNIKYDNFEIEEYPLAAQGFDWELWCRYLNPPKAWWKLENSTAPIRSPALIGCFIVDRQYFQEIGLLDEGMEVYGGENVELGIRVWQCGGSVEVLPCSRIAHIERAHKPYTEDLTAHVRRNALRVAEVWMDEFKSHVYMAWNIPQEDSGIDIGDITARKALRKQLQCKTFRWYLVSVYPEMRMYSDIIAYGVLQNSLKTDLCLDQGPDTENVPIMYICHGMTPQLLDLVILCELLHLMVFLHH

SEQ ID NO: 1471 - protein, 194 aa, Artificial Sequence
  Synthetic polypeptide
MHSFRLARLSSWRVHAGLVSHSAVRPHQGALVERIIPHPLYSAQNHDYDVALLRLQTALNFSDTVGAVCLPAKEQHFPKGSRCWVSGWGHTHPSHTYSSDMLQDTVVPLFSTQLCNSSCVYSGALTPRMLCAGYLDGRADACQGDSGGPLVCPDGDTWRLVGVVSWGRGCAEPNHPGVYAKVAEFLDWIHDTAQ

SEQ ID NO: 1472 - protein, 453 aa, Artificial Sequence
  Synthetic polypeptide
MSLMLDDQPPMEAQYAEEGPGPGIFRAEPGDQQHPISQAVCWRSMRRGCAVLGALGLLAGAGVGSWLLVLYLCPAASQPISGTLQDEEITLSCSEASAEEALLPALPKTVSFRINSEDFLLEAQVRDQPRWLLVCHEGWSPALGLQICWSLGHLRLTHHKGVNLTDIKLNSSQEFAQLSPRLGGFLEEAWQPRNNCTSGQVVSLRCSECGARPLASRIVGGQSVAPGRWPWQASVALGFRHTCGGSVLAPRWVVTAAHCMHSFRLARLSSWRVHAGLVSHSAVRPHQGALVERIIPHPLYSAQNHDYDVALLRLQTALNFSDTVGAVCLPAKEQHFPKGSRCWVSGWGHTHPSHTYSSDMLQDTVVPLFSTQLCNSSCVYSGALTPRMLCAGYLDGRADACQGDSGGPLVCPDGDTWRLVGVVSWGRGCAEPNHPGVYAKVAEFLDWIHDTAQ

SEQ ID NO: 1473 - protein, 409 aa, Artificial Sequence
  Synthetic polypeptide
MRRGCAVLGALGLLAGAGVGSWLLVLYLCPAASQPISGTLQDEEITLSCSEASAEEALLPALPKTVSFRINSEDFLLEAQVRDQPRWLLVCHEGWSPALGLQICWSLGHLRLTHHKGVNLTDIKLNSSQEFAQLSPRLGGFLEEAWQPRNNCTSGQVVSLRCSECGARPLASRIVGGQSVAPGRWPWQASVALGFRHTCGGSVLAPRWVVTAAHCMHSFRLARLSSWRVHAGLVSHSAVRPHQGALVERIIPHPLYSAQNHDYDVALLRLQTALNFSDTVGAVCLPAKEQHFPKGSRCWVSGWGHTHPSHTYSSDMLQDTVVPLFSTQLCNSSCVYSGALTPRMLCAGYLDGRADACQGDSGGPLVCPDGDTWRLVGVVSWGRGCAEPNHPGVYAKVAEFLDWIHDTAQ

SEQ ID NO: 1474 - protein, 444 aa, Artificial Sequence
  Synthetic polypeptide
MTGWGQWRAIILHSPDPPWGQPHMIDVSQAVCWRSMRRGCAVLGALGLLAGAGVGSWLLVLYLCPAASQPISGTLQDEEITLSCSEASAEEALLPALPKTVSFRINSEDFLLEAQVRDQPRWLLVCHEGWSPALGLQICWSLGHLRLTHHKGVNLTDIKLNSSQEFAQLSPRLGGFLEEAWQPRNNCTSGQVVSLRCSECGARPLASRIVGGQSVAPGRWPWQASVALGFRHTCGGSVLAPRWVVTAAHCMHSFRLARLSSWRVHAGLVSHSAVRPHQGALVERIIPHPLYSAQNHDYDVALLRLQTALNFSDTVGAVCLPAKEQHFPKGSRCWVSGWGHTHPSHTYSSDMLQDTVVPLFSTQLCNSSCVYSGALTPRMLCAGYLDGRADACQGDSGGPLVCPDGDTWRLVGVVSWGRGCAEPNHPGVYAKVAEFLDWIHDTAQ

SEQ ID NO: 1475 - protein, 384 aa, Artificial Sequence
  Synthetic polypeptide
MSLMLDDQPPMEAQYAEEGPGPGIFRAEPGDQQHPISQAVCWRSMRRGCAVLGALGLLAGAGVGSWLLVLYLCPAASQPISGTLQDEEITLSCSEASAEEALLPALPKTVSFRINSEDFLLEAQVRDQPRWLLVCHEGWSPALGLQICWSLGHLRLTHHKGVNLTDIKLNSSQEFAQLSPRLGGFLEEAWQPSFRLARLSSWRVHAGLVSHSAVRPHQGALVERIIPHPLYSAQNHDYDVALLRLQTALNFSDTVGAVCLPAKEQHFPKGSRCWVSGWGHTHPSHTYSSDMLQDTVVPLFSTQLCNSSCVYSGALTPRMLCAGYLDGRADACQGDSGGPLVCPDGDTWRLVGVVSWGRGCAEPNHPGVYAKVAEFLDWIHDTAQ

SEQ ID NO: 1476 - protein, 340 aa, Artificial Sequence
  Synthetic polypeptide
MRRGCAVLGALGLLAGAGVGSWLLVLYLCPAASQPISGTLQDEEITLSCSEASAEEALLPALPKTVSFRINSEDFLLEAQVRDQPRWLLVCHEGWSPALGLQICWSLGHLRLTHHKGVNLTDIKLNSSQEFAQLSPRLGGFLEEAWQPSFRLARLSSWRVHAGLVSHSAVRPHQGALVERIIPHPLYSAQNHDYDVALLRLQTALNFSDTVGAVCLPAKEQHFPKGSRCWVSGWGHTHPSHTYSSDMLQDTVVPLFSTQLCNSSCVYSGALTPRMLCAGYLDGRADACQGDSGGPLVCPDGDTWRLVGVVSWGRGCAEPNHPGVYAKVAEFLDWIHDTAQ

SEQ ID NO: 1477 - protein, 100 aa, Artificial Sequence
  Synthetic polypeptide
MASFVTEVLAHSGRLEKEDLGTRISRLTRRVEEIKGEVCNMISKKYSEFLPSMQSAQGLITQVDKLSEDIDLLKSRIESEGAMAHAYNLSTLGGQGGQIA

SEQ ID NO: 1478 - protein, 91 aa, Artificial Sequence
  Synthetic polypeptide
RSWRGCRGRDWGSRARGPPAASARAGVPSRPRCRVPCGRPAASPSPGLPRTHARPYRLLRDRPHHRQGQLRGGQAGHAPRHQGQGCYQDHR

SEQ ID NO: 1479 - protein, 154 aa, Artificial Sequence
  Synthetic polypeptide
MAAAAASGAGGAAGAGTGGAGPAGRLLPPPAPGSPAAPAAVSPAAGQPRPPAPASRGPMPARIGYYEIDRTIGKGNFAVVKRATHLVTKAKVAIKIIDKTQLDEENLKKIFREVQIMKMLCHPHIIRLYQVMETERMIYLVTEYASGGEIFASE

SEQ ID NO: 1480 - protein, 96 aa, Artificial Sequence
  Synthetic polypeptide
MPARIGYYEIDRTIGKGNFAVVKRATHLVTKAKVAIKIIDKTQLDEENLKKIFREVQIMKMLCHPHIIRLYQVMETERMIYLVTEYASGGEIFASE

SEQ ID NO: 1481 - protein, 106 aa, Artificial Sequence
  Synthetic polypeptide
RPPAPASRGPMPARIGYYEIDRTIGKGNFAVVKRATHLVTKAKVAIKIIDKTQLDEENLKKIFREVQIMKMLCHPHIIRLYQVMETERMIYLVTEYASGGEIFASE

SEQ ID NO: 1482 - skipped

SEQ ID NO: 1483 - protein, 91 aa, Artificial Sequence; identical to SEQ ID NO: 1478
  Synthetic polypeptide

SEQ ID NO: 1484 - protein, 156 aa, Artificial Sequence
  Synthetic polypeptide
MAAAAASGAGGAAGAGTGGAGPAGRLLPPPAPGSPAAPAAVSPAAGQPRPPAPASRGPMPARIGYYEIDRTIGKGNFAVVKRATHLVTKAKVAIKIIDKTQLDEENLKKIFREVQIMKMLCHPHIIRLYQVMETERMIYLVTEYASGGEIFVVKIK

SEQ ID NO: 1485 - protein, 98 aa, Artificial Sequence
  Synthetic polypeptide
MPARIGYYEIDRTIGKGNFAVVKRATHLVTKAKVAIKIIDKTQLDEENLKKIFREVQIMKMLCHPHIIRLYQVMETERMIYLVTEYASGGEIFVVKIK

SEQ ID NO: 1486 - protein, 108 aa, Artificial Sequence
  Synthetic polypeptide
RPPAPASRGPMPARIGYYEIDRTIGKGNFAVVKRATHLVTKAKVAIKIIDKTQLDEENLKKIFREVQIMKMLCHPHIIRLYQVMETERMIYLVTEYASGGEIFVVKIK

SEQ ID NO: 1487 - skipped

SEQ ID NO: 1488 - protein, 517 aa, Artificial Sequence
  Synthetic polypeptide
MPKGRQKVPHLDAPLGLPTCLWLELAGLFLLVPWVMGLAGTGGPDGQGTGGPSWAVHLESLEGDGEEETLEQQADALAQAAGLVNAGRIGELQGHYLFVQPAGHRPALEVEAIRQQVEAVLAGHEAVRWHSEQRLLRRAKRSVHFNDPKYPQQWHLNNRRSPGRDINVTGVWERNVTGRGVTVVVVDDGVEHTIQDIAPNYSPEGSYDLNSNDPDPMPHPDVENGNHHGTRCAGEIAAVPNNSFCAVGVAYGSRIAGIRVLDGPLTDSMEAVAFNKHYQINDIYSCSWGPDDDGKTVDGPHQLGKAALQHGVIAGRQGFGSIFVVASGNGGQHNDNCNYDGYANSIYTVTIGAVDEEGRMPFYAEECASMLAVTFSGGDKMLRSIVTTDWDLQKGTGCTEGHTGTSAAAPLAAGMIALMLQVRPCLTWRDVQHIIVFTATRYEDRRAEWVTNEAGFSHSHQHGFGLLNAWRLVNAAKIWTSVPYLASYVSPVLKENKAIPQSPRSLEVLWNASSSSA

SEQ ID NO: 1489 - protein, 158 aa, Artificial Sequence
  Synthetic polypeptide
MPFYAEECASMLAVTFSGGDKMLRSIVTTDWDLQKGTGCTEGHTGTSAAAPLAAGMIALMLQVRPCLTWRDVQHIIVFTATRYEDRRAEWVTNEAGFSHSHQHGFGLLNAWRLVNAAKIWTSVPYLASYVSPVLKENKAIPQSPRSLEVLWNASSSSA

SEQ ID NO: 1490 - protein, 374 aa, Artificial Sequence
  Synthetic polypeptide
MPKGRQKVPHLDAPLGLPTCLWLELAGLFLLVPWVMGLAGTGGPDGQGTGGPSWAVHLESLEGDGEEETLEQQADALAQAAGLVNAGRIGELQGHYLFVQPAGHRPALEVEAIRQQVEAVLAGHEAVRWHSEQRLLRRAKRSVHFNDPKYPQQWHLNNRRSPGRDINVTGVWERNVTGRGVTVVVVDDGVEHTIQDIAPNYSPEGSYDLNSNDPDPMPHPDVENGNHHGTRCAGEIAAVPNNSFCAVGVAYGSRIAGIRVLDGPLTDSMEAVAFNKHYQINDIYSCSWGPDDDGKTVDGPHQLGKAALQHGVIAGRQGFGSIFVVASGNGGQHNDNCNYDGYANSIYTVTIGSSRLGLRPFPYGPDAWHGCDPQ

SEQ ID NO: 1491 - protein, 719 aa, Artificial Sequence
  Synthetic polypeptide
MWLVTFLLLLDSLHKARPEDVGTSLYFVNDSLQQLPCTASGYPIPAIRWLKDGRPLPADSRWTKRITGLTISDLRTEDSGTYICEVTNTFGSAEATGILMVIDPLHVTLTPKKLKTGIGSTVILSCALTGSPEFTIRWYRNTELVLPDEAISIRGLSNETLLITSAQKSHSGAYQCFATRKAQTAQDFAIIALEDGTPRIVSSFSEKVVNPGEQFSLMCAAKGAPPPTVTWALDDEPIVRDGSHRTNQYTMSDGTTISHMNVTGPQIRDGGVYRCTARNLVGSAEYQARINVRGPPSIRAMRNITAVAGRDTLINCRVIGYPYYSIKWYKDALLLPDNHRQVVFENGTLKLTDVQKGMDEGEYLCSVLIQPQLSISQSVHVAVKVPPLIQPFEFPPASIGQLLYIPCVVSSGDMPIRITWRKDGQVIISGSGVTIESKEFMSSLQISSVSLKHNGNYTCIASNAAATVSRERQLIVRVPPRFVVQPNNQDGIYGKAGVLNCSVDGYPPPKVMWKHAKGSGNPQQYHPVPLTGRIQILPNSSLLIRHVLEEDIGYYLCQASNGVGTDISKSMFLTVKIPAMITSHPNTTIAIKGHAKELNCTARGERPIIIRWEKGDTVIDPDRVMRYAIATKDNGDEVVSTLKLKPADRGDSVFFSCHAINSYGEDRGLIQLTVQEPPDPPELEIREVKARSMNLRWTQRFDGNSIITGFDIEYKNKSG

SEQ ID NO: 1492 - protein, 989 aa, Artificial Sequence
  Synthetic polypeptide
MTGAGEPRREEPPPQPSAGLRSRESGAPSAGGWERAERGRGAAARPATGPPPRRIGPLYGMWLVTFLLLLDSLHKARPEDVGTSLYFVNDSLQQVTFSSSVGVVVPCPAAGSPSAALRWYLATGDDIYDVPHIRHVHANGTLQLYPFSPSAFNSFIHDNDYFCTAENAAGKIRSPNIRVKAVFREPYTVRVEDQRSMRGNVAVFKCLIPSSVQEYVSVVSWEKDTVSIIPEHRFFITYHGGLYISDVQKEDALSTYRCITKHKYSGETRQSNGARLSVTDPAESIPTILDGFHSQEVWAGHTVELPCTASGYPIPAIRWLKDGRPLPADSRWTKRITGLTISDLRTEDSGTYICEVTNTFGSAEATGILMVIDPLHVTLTPKKLKTGIGSTVILSCALTGSPEFTIRWYRNTELVLPDEAISIRGLSNETLLITSAQKSHSGAYQCFATRKAQTAQDFAIIALEDGTPRIVSSFSEKVVNPGEQFSLMCAAKGAPPPTVTWALDDEPIVRDGSHRTNQYTMSDGTTISHMNVTGPQIRDGGVYRCTARNLVGSAEYQARINVRGPPSIRAMRNITAVAGRDTLINCRVIGYPYYSIKWYKDALLLPDNHRQVVFENGTLKLTDVQKGMDEGEYLCSVLIQPQLSISQSVHVAVKVPPLIQPFEFPPASIGQLLYIPCVVSSGDMPIRITWRKDGQVIISGSGVTIESKEFMSSLQISSVSLKHNGNYTCIASNAAATVSRERQLIVRVPPRFVVQPNNQDGIYGKAGVLNCSVDGYPPPKVMWKHAKGSGNPQQYHPVPLTGRIQILPNSSLLIRHVLEEDIGYYLCQASNGVGTDISKSMFLTVKIPAMITSHPNTTIAIKGHAKELNCTARGERPIIIRWEKGDTVIDPDRVMRYAIATKDNGDEVVSTLKLKPADRGDSVFFSCHAINSYGEDRGLIQLTVQEPPDPPELEIREVKARSMNLRWTQRFDGNSIITGFDIEYKNKSG

SEQ ID NO: 1493 - protein, 26 aa, Artificial Sequence
  Synthetic polypeptide
MQQRGAAGSRGCALFPLLGVLFFQDS

SEQ ID NO: 1494 - protein, 197 aa, Artificial Sequence
  Synthetic polypeptide
MAHSCRWRFPARPGTTGGGGGGGRRGLGGAPRQRVPALLLPPGPPVGGGGPGAPPSPPAVAAAAAAAGSSGAGVPGGAAAASAASSSSASSSSSSSSSASSGPALLRVGPGFDAALQVSAAIGTNLRRFRAVFGESGGGGGSGELTTQIPCSWRTKGHIHDKKTEPFRLLAWSWCLNVPQLKRDEETLETVLRRLKR

SEQ ID NO: 1495 - protein, 114 aa, Artificial Sequence
  Synthetic polypeptide
ASSSSASSSSSSSSSASSGPALLRVGPGFDAALQVSAAIGTNLRRFRAVFGESGGGGGSGELTTQIPCSWRTKGHIHDKKTEPFRLLAWSWCLNVPQLKRDEETLETVLRRLKR

SEQ ID NO: 1496 - protein, 3614 aa, Artificial Sequence
  Synthetic polypeptide
MAHSCRWRFPARPGTTGGGGGGGRRGLGGAPRQRVPALLLPPGPPVGGGGPGAPPSPPAVAAAAAAAGSSGAGVPGGAAAASAASSSSASSSSSSSSSASSGPALLRVGPGFDAALQVSAAIGTNLRRFRAVFGESGGGGGSGEDEQFLGFGSDEEVRVRSPTRSPSVKTSPRKPRGRPRSGSDRNSAILSDPSVFSPLNKSETKSGDKIKKKDSKSIEKKRGRPPTFPGVKIKITHGKDISELPKGNKEDSLKKIKRTPSATFQQATKIKKLRAGKLSPLKSKFKTGKLQIGRKGVQIVRRRGRPPSTERIKTPSGLLINSELEKPQKVRKDKEGTPPLTKEDKTVVRQSPRRIKPVRIIPSSKRTDATIAKQLLQRAKKGAQKKIEKEAAQLQGRKVKTQVKNIRQFIMPVVSAISSRIIKTPRRFIEDEDYDPPIKIARLESTPNSRFSAPSCGSSEKSSAASQHSSQMSSDSSRSSSPSVDTSTDSQASEEIQVLPEERSDTPEVHPPLPISQSPENESNDRRSRRYSVSERSFGSRTTKKLSTLQSAPQQQTSSSPPPPLLTPPPPLQPASSISDHTPWLMPPTIPLASPFLPASTAPMQGKRKSILREPTFRWTSLKHSRSEPQYFSSAKYAKEGLIRKPIFDNFRPPPLTPEDVGFASGFSASGTAASARLFSPLHSGTRFDMHKRSPLLRAPRFTPSEAHSRIFESVTLPSNRTSAGTSSSGVSNRKRKRKVFSPIRSEPRSPSHSMRTRSGRLSSSELSPLTPPSSVSSSLSISVSPLATSALNPTFTFPSHSLTQSGESAEKNQRPRKQTSAPAEPFSSSSPTPLFPWFTPGSQTERGRNKDKAPEELSKDRDADKSVEKDKSRERDREREKENKRESRKEKRKKGSEIQSSSALYPVGRVSKEKVVGEDVATSSSAKKATGRKKSSSHDSGTDITSVTLGDTTAVKTKILIKKGRGNLEKTNLDLGPTAPSLEKEKTLCLSTPSSSTVKHSTSSIGSMLAQADKLPMTDKRVASLLKKAKAQLCKIEKSKSLKQTDQPKAQGQESDSSETSVRGPRIKHVCRRAAVALGRKRAVFPDDMPTLSALPWEEREKILSSMGNDDKSSIAGSEDAEPLAPPIKPIKPVTRNKAPQEPPVKKGRRSRRCGQCPGCQVPEDCGVCTNCLDKPKFGGRNIKKQCCKMRKCQNLQWMPSKAYLQKQAKAVKKKEKKSKTSEKKDSKESSVVKNVVDSSQKPTPSAREDPAPKKSSSEPPPRKPVEEKSEEGNVSAPGPESKQATTPASRKSSKQVSQPALVIPPQPPTTGPPRKEVPKTTPSEPKKKQPPPPESGPEQSKQKKVAPRPSIPVKQKPKEKEKPPPVNKQENAGTLNILSTLSNGNSSKQKIPADGVHRIRVDFKEDCEAENVWEMGGLGILTSVPITPRVVCFLCASSGHVEFVYCQVCCEPFHKFCLEENERPLEDQLENWCCRRCKFCHVCGRQHQATKQLLECNKCRNSYHPECLGPNYPTKPTKKKKVWICTKCVRCKSCGSTTPGKGWDAQWSHDFSLCHDCAKLFAKGNFCPLCDKCYDDDDYESKMMQCGKCDRWVHSKCENLSGTEDEMYEILSNLPESVAYTCVNCTERHPAEWRLALEKELQISLKQVLTALLNSRTTSHLLRYRQAAKPPDLNPETEESIPSRSSPEGPDPPVLTEVSKQDDQQPLDLEGVKRKMDQGNYTSVLEFSDDIVKIIQAAINSDGGQPEIKKANSMVKSFFIRQMERVFPWFSVKKSRFWEPNKVSSNSGMLPNAVLPPSLDHNYAQWQEREENSHTEQPPLMKKIIPAPKPKGPGEPDSPTPLHPPTPPILSTDRSREDSPELNPPPGIEDNRQCALCLTYGDDSANDAGRLLYIGQNEWTHVNCALWSAEVFEDDDGSLKNVHMAVIRGKQLRCEFCQKPGATVGCCLTSCTSNYHFMCSRAKNCVFLDDKKVYCQRHRDLIKGEVVPENGFEVFRRVFVDFEGISLRRKFLNGLEPENIHMMIGSMTIDCLGILNDLSDCEDKLFPIGYQCSRVYWSTTDARKRCVYTCKIVECRPPVVEPDINSTVEHDENRTIAHSPTSFTESSSKESQNTAEIISPPSPDRPPHSQTSGSCYYHVISKVPRIRTPSYSPTQRSPGCRPLPSAGSPTPTTHEIVTVGDPLLSSGLRSIGSRRHSTSSLSPQRSKLRIMSPMRTGNTYSRNNVSSVSTTGTATDLESSAKVVDHVLGPLNSSTSLGQNTSTSSNLQRTVVTVGNKNSHLDGSSSSEMKQSSASDLVSKSSSLKGEKTKVLSSKSSEGSAHNVAYPGIPKLAPQVHNTTSRELNVSKIGSFAEPSSVSFSSKEALSFPHLHLRGQRNDRDQHTDSTQSANSSPDEDTEVKTLKLSGMSNRSSIINEHMGSSSRDRRQKGKKSCKETFKEKHSSKSFLEPGQVTTGEEGNLKPEFMDEVLTPEYMGQRPCNNVSSDKIGDKGLSMPGVPKAPPMQVEGSAKELQAPRKRTVKVTLTPLKMENESQSKNALKESSPASPLQIESTSPTEPISASENPGDGPVAQPSPNNTSCQDSQSNNYQNLPVQDRNLMLPDGPKPQEDGSFKRRYPRRSARARSNMFFGLTPLYGVRSYGEEDIPFYSSSTGKKRGKRSAEGQVDGADDLSTSDEDDLYYYNFTRTVISSGGEERLASHNLFREEEQCDLPKISQLDGVDDGTESDTSVTATTRKSSQIPKRNGKENGTENLKIDRPEDAGEKEHVTKSSVGHKNEPKMDNCHSVSRVKTQGQDSLEAQLSSLESSRRVHTSTPSDKNLLDTYNTELLKSDSDNNNSDDCGNILPSDIMDFVLKNTPSMQALGESPESSSSELLNLGEGLGLDSNREKDMGLFEVFSQQLPTTEPVDSSVSSSISAEEQFELPLELPSDLSVLTTRSPTVPSQNPSRLAVISDSGEKRVTITEKSVASSESDPALLSPGVDPTPEGHMTPDHFIQGHMDADHISSPPCGSVEQGHGNNQDLTRNSSTPGLQVPVSPTVPIQNQKYVPNSTDSPGPSQISNAAVQTTPPHLKPATEKLIVVNQNMQPLYVLQTLPNGVTQKIQLTSSVSSTPSVMETNTSVLGPMGGGLTLTTGLNPSLPTSQSLFPSASKGLLPMSHHQHLHSFPAATQSSFPPNISNPPSGLLIGVQPPPDPQLLVSESSQRTDLSTTVATPSSGLKKRPISRLQTRKNKKLAPSSTPSNIAPSDVVSNMTLINFTPSQLPNHPSLLDLGSLNTSSHRTVPNIIKRSKSSIMYFEPAPLLPQSVGGTAATAAGTSTISQDTSHLTSGSVSGLASSSSVLNVVSMQTTTTPTSSASVPGHVTLTNPRLLGTPDIGSISNLLIKASQQSLGIQDQPVALPPSSGMFPQLGTSQTPSTAAITAASSICVLPSTQTTGITAASPSGEADEHYQLQHVNQLLASKTGIHSSQRDLDSASGPQVSNFTQTVDAPNSMGLEQNKALSSAVQASPTSPGGSPSSPSSGQRSASPSVPGPTKPKPKTKRFQLPLDKGNGKKHKVSHLRTSSSEAHIPDQETTSLTSGTGTPGAEAEQQDTASVEQSSQKECGQPAGPS

SEQ ID NO: 1497 - protein, 3611 aa, Artificial Sequence
  Synthetic polypeptide
MAHSCRWRFPARPGTTGGGGGGGRRGLGGAPRQRVPALLLPPGPPVGGGGPGAPPSPPAVAAAAAAAGSSGAGVPGGAAAASAASSSSASSSSSSSSSASSGPALLRVGPGFDAALQVSAAIGTNLRRFRAVFGESGGGGGSGEDEQFLGFGSDEEVRVRSPTRSPSVKTSPRKPRGRPRSGSDRNSAILSDPSVFSPLNKSETKSGDKIKKKDSKSIEKKRGRPPTFPGVKIKITHGKDISELPKGNKEDSLKKIKRTPSATFQQATKIKKLRAGKLSPLKSKFKTGKLQIGRKGVQIVRRRGRPPSTERIKTPSGLLINSELEKPQKVRKDKEGTPPLTKEDKTVVRQSPRRIKPVRIIPSSKRTDATIAKQLLQRAKKGAQKKIEKEAAQLQGRKVKTQVKNIRQFIMPVVSAISSRIIKTPRRFIEDEDYDPPIKIARLESTPNSRFSAPSCGSSEKSSAASQHSSQMSSDSSRSSSPSVDTSTDSQASEEIQVLPEERSDTPEVHPPLPISQSPENESNDRRSRRYSVSERSFGSRTTKKLSTLQSAPQQQTSSSPPPPLLTPPPPLQPASSISDHTPWLMPPTIPLASPFLPASTAPMQGKRKSILREPTFRWTSLKHSRSEPQYFSSAKYAKEGLIRKPIFDNFRPPPLTPEDVGFASGFSASGTAASARLFSPLHSGTRFDMHKRSPLLRAPRFTPSEAHSRIFESVTLPSNRTSAGTSSSGVSNRKRKRKVFSPIRSEPRSPSHSMRTRSGRLSSSELSPLTPPSSVSSSLSISVSPLATSALNPTFTFPSHSLTQSGESAEKNQRPRKQTSAPAEPFSSSSPTPLFPWFTPGSQTERGRNKDKAPEELSKDRDADKSVEKDKSRERDREREKENKRESRKEKRKKGSEIQSSSALYPVGRVSKEKVVGEDVATSSSAKKATGRKKSSSHDSGTDITSVTLGDTTAVKTKILIKKGRGNLEKTNLDLGPTAPSLEKEKTLCLSTPSSSTVKHSTSSIGSMLAQADKLPMTDKRVASLLKKAKAQLCKIEKSKSLKQTDQPKAQGQESDSSETSVRGPRIKHVCRRAAVALGRKRAVFPDDMPTLSALPWEEREKILSSMGNDDKSSIAGSEDAEPLAPPIKPIKPVTRNKAPQEPPVKKGRRSRRCGQCPGCQVPEDCGVCTNCLDKPKFGGRNIKKQCCKMRKCQNLQWMPSKAYLQKQAKAVKKKEKKSKTSEKKDSKESSVVKNVVDSSQKPTPSAREDPAPKKSSSEPPPRKPVEEKSEEGNVSAPGPESKQATTPASRKSSKQVSQPALVIPPQPPTTGPPRKEVPKTTPSEPKKKQPPPPESGPEQSKQKKVAPRPSIPVKQKPKEKEKPPPVNKQENAGTLNILSTLSNGNSSKQKIPADGVHRIRVDFKEDCEAENVWEMGGLGILTSVPITPRVVCFLCASSGHVEFVYCQVCCEPFHKFCLEENERPLEDQLENWCCRRCKFCHVCGRQHQATKQLLECNKCRNSYHPECLGPNYPTKPTKKKKVWICTKCVRCKSCGSTTPGKGWDAQWSHDFSLCHDCAKLFAKGNFCPLCDKCYDDDDYESKMMQCGKCDRWVHSKCENLSDEMYEILSNLPESVAYTCVNCTERHPAEWRLALEKELQISLKQVLTALLNSRTTSHLLRYRQAAKPPDLNPETEESIPSRSSPEGPDPPVLTEVSKQDDQQPLDLEGVKRKMDQGNYTSVLEFSDDIVKIIQAAINSDGGQPEIKKANSMVKSFFIRQMERVFPWFSVKKSRFWEPNKVSSNSGMLPNAVLPPSLDHNYAQWQEREENSHTEQPPLMKKIIPAPKPKGPGEPDSPTPLHPPTPPILSTDRSREDSPELNPPPGIEDNRQCALCLTYGDDSANDAGRLLYIGQNEWTHVNCALWSAEVFEDDDGSLKNVHMAVIRGKQLRCEFCQKPGATVGCCLTSCTSNYHFMCSRAKNCVFLDDKKVYCQRHRDLIKGEVVPENGFEVFRRVFVDFEGISLRRKFLNGLEPENIHMMIGSMTIDCLGILNDLSDCEDKLFPIGYQCSRVYWSTTDARKRCVYTCKIVECRPPVVEPDINSTVEHDENRTIAHSPTSFTESSSKESQNTAEIISPPSPDRPPHSQTSGSCYYHVISKVPRIRTPSYSPTQRSPGCRPLPSAGSPTPTTHEIVTVGDPLLSSGLRSIGSRRHSTSSLSPQRSKLRIMSPMRTGNTYSRNNVSSVSTTGTATDLESSAKVVDHVLGPLNSSTSLGQNTSTSSNLQRTVVTVGNKNSHLDGSSSSEMKQSSASDLVSKSSSLKGEKTKVLSSKSSEGSAHNVAYPGIPKLAPQVHNTTSRELNVSKIGSFAEPSSVSFSSKEALSFPHLHLRGQRNDRDQHTDSTQSANSSPDEDTEVKTLKLSGMSNRSSIINEHMGSSSRDRRQKGKKSCKETFKEKHSSKSFLEPGQVTTGEEGNLKPEFMDEVLTPEYMGQRPCNNVSSDKIGDKGLSMPGVPKAPPMQVEGSAKELQAPRKRTVKVTLTPLKMENESQSKNALKESSPASPLQIESTSPTEPISASENPGDGPVAQPSPNNTSCQDSQSNNYQNLPVQDRNLMLPDGPKPQEDGSFKRRYPRRSARARSNMFFGLTPLYGVRSYGEEDIPFYSSSTGKKRGKRSAEGQVDGADDLSTSDEDDLYYYNFTRTVISSGGEERLASHNLFREEEQCDLPKISQLDGVDDGTESDTSVTATTRKSSQIPKRNGKENGTENLKIDRPEDAGEKEHVTKSSVGHKNEPKMDNCHSVSRVKTQGQDSLEAQLSSLESSRRVHTSTPSDKNLLDTYNTELLKSDSDNNNSDDCGNILPSDIMDFVLKNTPSMQALGESPESSSSELLNLGEGLGLDSNREKDMGLFEVFSQQLPTTEPVDSSVSSSISAEEQFELPLELPSDLSVLTTRSPTVPSQNPSRLAVISDSGEKRVTITEKSVASSESDPALLSPGVDPTPEGHMTPDHFIQGHMDADHISSPPCGSVEQGHGNNQDLTRNSSTPGLQVPVSPTVPIQNQKYVPNSTDSPGPSQISNAAVQTTPPHLKPATEKLIVVNQNMQPLYVLQTLPNGVTQKIQLTSSVSSTPSVMETNTSVLGPMGGGLTLTTGLNPSLPTSQSLFPSASKGLLPMSHHQHLHSFPAATQSSFPPNISNPPSGLLIGVQPPPDPQLLVSESSQRTDLSTTVATPSSGLKKRPISRLQTRKNKKLAPSSTPSNIAPSDVVSNMTLINFTPSQLPNHPSLLDLGSLNTSSHRTVPNIIKRSKSSIMYFEPAPLLPQSVGGTAATAAGTSTISQDTSHLTSGSVSGLASSSSVLNVVSMQTTTTPTSSASVPGHVTLTNPRLLGTPDIGSISNLLIKASQQSLGIQDQPVALPPSSGMFPQLGTSQTPSTAAITAASSICVLPSTQTTGITAASPSGEADEHYQLQHVNQLLASKTGIHSSQRDLDSASGPQVSNFTQTVDAPNSMGLEQNKALSSAVQASPTSPGGSPSSPSSGQRSASPSVPGPTKPKPKTKRFQLPLDKGNGKKHKVSHLRTSSSEAHIPDQETTSLTSGTGTPGAEAEQQDTASVEQSSQKECGQPAGPS

SEQ ID NO: 1498 - protein, 3573 aa, Artificial Sequence
  Synthetic polypeptide
MAHSCRWRFPARPGTTGGGGGGGRRGLGGAPRQRVPALLLPPGPPVGGGGPGAPPSPPAVAAAAAAAGSSGAGVPGGAAAASAASSSSASSSSSSSSSASSGPALLRVGPGFDAALQVSAAIGTNLRRFRAVFGESGGGGGSGEDEQFLGFGSDEEVRVRSPTRSPSVKTSPRKPRGRPRSGSDRNSAILSDPSVFSPLNKSETKSGDKIKKKDSKSIEKKRGRPPTFPGVKIKITHGKDISELPKGNKEDSLKKIKRTPSATFQQATKIKKLRAGKLSPLKSKFKTGKLQIGRKGVQIVRRRGRPPSTERIKTPSGLLINSELEKPQKVRKDKEGTPPLTKEDKTVVRQSPRRIKPVRIIPSSKRTDATIAKQLLQRAKKGAQKKIEKEAAQLQGRKVKTQVKNIRQFIMPVVSAISSRIIKTPRRFIEDEDYDPPIKIARLESTPNSRFSAPSCGSSEKSSAASQHSSQMSSDSSRSSSPSVDTSTDSQASEEIQVLPEERSDTPEVHPPLPISQSPENESNDRRSRRYSVSERSFGSRTTKKLSTLQSAPQQQTSSSPPPPLLTPPPPLQPASSISDHTPWLMPPTIPLASPFLPASTAPMQGKRKSILREPTFRWTSLKHSRSEPQYFSSAKYAKEGLIRKPIFDNFRPPPLTPEDVGFASGFSASGTAASARLFSPLHSGTRFDMHKRSPLLRAPRFTPSEAHSRIFESVTLPSNRTSAGTSSSGVSNRKRKRKVFSPIRSEPRSPSHSMRTRSGRLSSSELSPLTPPSSVSSSLSISVSPLATSALNPTFTFPSHSLTQSGESAEKNQRPRKQTSAPAEPFSSSSPTPLFPWFTPGSQTERGRNKDKAPEELSKDRDADKSVEKDKSRERDREREKENKRESRKEKRKKGSEIQSSSALYPVGRVSKEKVVGEDVATSSSAKKATGRKKSSSHDSGTDITSVTLGDTTAVKTKILIKKGRGNLEKTNLDLGPTAPSLEKEKTLCLSTPSSSTVKHSTSSIGSMLAQADKLPMTDKRVASLLKKAKAQLCKIEKSKSLKQTDQPKAQGQESDSSETSVRGPRIKHVCRRAAVALGRKRAVFPDDMPTLSALPWEEREKILSSMGNDDKSSIAGSEDAEPLAPPIKPIKPVTRNKAPQEPPVKKGRRSRRCGQCPGCQVPEDCGVCTNCLDKPKFGGRNIKKQCCKMRKCQNLQWMPSKAYLQKQAKAVKKKEKKSKTSEKKDSKESSVVKNVVDSSQKPTPSAREDPAPKKSSSEPPPRKPVEEKSEEGNVSAPGPESKQATTPASRKSSKQVSQPALVIPPQPPTTGPPRKEVPKTTPSEPKKKQPPPPESGPEQSKQKKVAPRPSIPVKQKPKEKEKPPPVNKQENAGTLNILSTLSNGNSSKQKIPADGVHRIRVDFKFVYCQVCCEPFHKFCLEENERPLEDQLENWCCRRCKFCHVCGRQHQATKQLLECNKCRNSYHPECLGPNYPTKPTKKKKVWICTKCVRCKSCGSTTPGKGWDAQWSHDFSLCHDCAKLFAKGNFCPLCDKCYDDDDYESKMMQCGKCDRWVHSKCENLSDEMYEILSNLPESVAYTCVNCTERHPAEWRLALEKELQISLKQVLTALLNSRTTSHLLRYRQAAKPPDLNPETEESIPSRSSPEGPDPPVLTEVSKQDDQQPLDLEGVKRKMDQGNYTSVLEFSDDIVKIIQAAINSDGGQPEIKKANSMVKSFFIRQMERVFPWFSVKKSRFWEPNKVSSNSGMLPNAVLPPSLDHNYAQWQEREENSHTEQPPLMKKIIPAPKPKGPGEPDSPTPLHPPTPPILSTDRSREDSPELNPPPGIEDNRQCALCLTYGDDSANDAGRLLYIGQNEWTHVNCALWSAEVFEDDDGSLKNVHMAVIRGKQLRCEFCQKPGATVGCCLTSCTSNYHFMCSRAKNCVFLDDKKVYCQRHRDLIKGEVVPENGFEVFRRVFVDFEGISLRRKFLNGLEPENIHMMIGSMTIDCLGILNDLSDCEDKLFPIGYQCSRVYWSTTDARKRCVYTCKIVECRPPVVEPDINSTVEHDENRTIAHSPTSFTESSSKESQNTAEIISPPSPDRPPHSQTSGSCYYHVISKVPRIRTPSYSPTQRSPGCRPLPSAGSPTPTTHEIVTVGDPLLSSGLRSIGSRRHSTSSLSPQRSKLRIMSPMRTGNTYSRNNVSSVSTTGTATDLESSAKVVDHVLGPLNSSTSLGQNTSTSSNLQRTVVTVGNKNSHLDGSSSSEMKQSSASDLVSKSSSLKGEKTKVLSSKSSEGSAHNVAYPGIPKLAPQVHNTTSRELNVSKIGSFAEPSSVSFSSKEALSFPHLHLRGQRNDRDQHTDSTQSANSSPDEDTEVKTLKLSGMSNRSSIINEHMGSSSRDRRQKGKKSCKETFKEKHSSKSFLEPGQVTTGEEGNLKPEFMDEVLTPEYMGQRPCNNVSSDKIGDKGLSMPGVPKAPPMQVEGSAKELQAPRKRTVKVTLTPLKMENESQSKNALKESSPASPLQIESTSPTEPISASENPGDGPVAQPSPNNTSCQDSQSNNYQNLPVQDRNLMLPDGPKPQEDGSFKRRYPRRSARARSNMFFGLTPLYGVRSYGEEDIPFYSSSTGKKRGKRSAEGQVDGADDLSTSDEDDLYYYNFTRTVISSGGEERLASHNLFREEEQCDLPKISQLDGVDDGTESDTSVTATTRKSSQIPKRNGKENGTENLKIDRPEDAGEKEHVTKSSVGHKNEPKMDNCHSVSRVKTQGQDSLEAQLSSLESSRRVHTSTPSDKNLLDTYNTELLKSDSDNNNSDDCGNILPSDIMDFVLKNTPSMQALGESPESSSSELLNLGEGLGLDSNREKDMGLFEVFSQQLPTTEPVDSSVSSSISAEEQFELPLELPSDLSVLTTRSPTVPSQNPSRLAVISDSGEKRVTITEKSVASSESDPALLSPGVDPTPEGHMTPDHFIQGHMDADHISSPPCGSVEQGHGNNQDLTRNSSTPGLQVPVSPTVPIQNQKYVPNSTDSPGPSQISNAAVQTTPPHLKPATEKLIVVNQNMQPLYVLQTLPNGVTQKIQLTSSVSSTPSVMETNTSVLGPMGGGLTLTTGLNPSLPTSQSLFPSASKGLLPMSHHQHLHSFPAATQSSFPPNISNPPSGLLIGVQPPPDPQLLVSESSQRTDLSTTVATPSSGLKKRPISRLQTRKNKKLAPSSTPSNIAPSDVVSNMTLINFTPSQLPNHPSLLDLGSLNTSSHRTVPNIIKRSKSSIMYFEPAPLLPQSVGGTAATAAGTSTISQDTSHLTSGSVSGLASSSSVLNVVSMQTTTTPTSSASVPGHVTLTNPRLLGTPDIGSISNLLIKASQQSLGIQDQPVALPPSSGMFPQLGTSQTPSTAAITAASSICVLPSTQTTGITAASPSGEADEHYQLQHVNQLLASKTGIHSSQRDLDSASGPQVSNFTQTVDAPNSMGLEQNKALSSAVQASPTSPGGSPSSPSSGQRSASPSVPGPTKPKPKTKRFQLPLDKGNGKKHKVSHLRTSSSEAHIPDQETTSLTSGTGTPGAEAEQQDTASVEQSSQKECGQPAGPS

SEQ ID NO: 1499 - protein, 347 aa, Artificial Sequence
  Synthetic polypeptide
MIPEYCRALEENEISEHCFDLIFAFDEIVALGYRENVNLAQIRTFTEMDSHEEKVFRAVRETQEREAKAEMRRKAKELQQARRDAERQGKKAPGFGGFGSSAVSGGSTAAMITETIIETDKPKVAPAPARPSGPSKALKLGAKGKEVDNFVDKLKSEGETIMSSSMGKRTSEATKMHAPPINMESVHMKIEEKITLTCGRDGGLQNMELHGMIMLRISDDKYGRIRLHVENEDKKGVQLQTHPNVDKKLFTAESLIGLKNPEKSFPVNSDVGVLKWRLQTTEESFIPLTINCWPSESGNGCDVNIEYELQEDNLELNDVVITIPLPTGTKIGTIQRRLAWALCKADM

SEQ ID NO: 1500 - protein, 476 aa, Artificial Sequence
  Synthetic polypeptide
MAECNLVAILISSIDNPLDKNLDNGGNSCLDFRPLNSFSQPQVLLAAAVCTKAGKAIVSRQFVEMTRTRIEGLLAAFPKLMNTGKQHTFVETESVRYVYQPMEKLYMVLITTKNSNILEDLETLRLFSRVIPEYCRALEENEISEHCFDLIFAFDEIVALGYRENVNLAQIRTFTEMDSHEEKVFRAVRETQEREAKAEMRRKAKELQQARRDAERQGKKAPGFGGFGSSAVSGGSTAAMITETIIETDKPKVAPAPARPSGPSKALKLGAKGKEVDNFVDKLKSEGETIMSSSMGKRTSEATKMHAPPINMESVHMKIEEKITLTCGRDGGLQNMELHGMIMLRISDDKYGRIRLHVENEDKKGVQLQTHPNVDKKLFTAESLIGLKNPEKSFPVNSDVGVLKWRLQTTEESFIPLTINCWPSESGNGCDVNIEYELQEDNLELNDVVITIPLPTGTKIGTIQRRLAWALCKADM

SEQ ID NO: 1501 - protein, 435 aa, Artificial Sequence
  Synthetic polypeptide
MVLLAAAVCTKAGKAIVSRQFVEMTRTRIEGLLAAFPKLMNTGKQHTFVETESVRYVYQPMEKLYMVLITTKNSNILEDLETLRLFSRVIPEYCRALEENEISEHCFDLIFAFDEIVALGYRENVNLAQIRTFTEMDSHEEKVFRAVRETQEREAKAEMRRKAKELQQARRDAERQGKKAPGFGGFGSSAVSGGSTAAMITETIIETDKPKVAPAPARPSGPSKALKLGAKGKEVDNFVDKLKSEGETIMSSSMGKRTSEATKMHAPPINMESVHMKIEEKITLTCGRDGGLQNMELHGMIMLRISDDKYGRIRLHVENEDKKGVQLQTHPNVDKKLFTAESLIGLKNPEKSFPVNSDVGVLKWRLQTTEESFIPLTINCWPSESGNGCDVNIEYELQEDNLELNDVVITIPLPTGTKIGTIQRRLAWALCKADM

SEQ ID NO: 1502 - protein, 327 aa, Artificial Sequence
  Synthetic polypeptide
MIPEYCRALEENEISEHCFDLIFAFDEIVALGYRENVNLAQIRTFTEMDSHEEKVFRAVRETQEREAKAEMRRKAKELQQARRDAERQGKKAPGFGGFGSSAVSGGSTAAMITETIIETDKPKVAPAPARPSGPSKALKLGAKGKEVDNFVDKLKSEGETIMSSSMGKRTSEATKMHAPPINMESVHMKIEEKITLTCGRDGGLQNMELHGMIMLRISDDKYGRIRLHVENEDKKGVQLQTHPNVDKKLFTAESLIGLKNPEKSFPVNSDVGVLKWRLQTTEESFIPLTINCWPSESGNGCDVNIEYELQEDNLELNDVVITIPLPY

SEQ ID NO: 1503 - protein, 456 aa, Artificial Sequence
  Synthetic polypeptide
MAECNLVAILISSIDNPLDKNLDNGGNSCLDFRPLNSFSQPQVLLAAAVCTKAGKAIVSRQFVEMTRTRIEGLLAAFPKLMNTGKQHTFVETESVRYVYQPMEKLYMVLITTKNSNILEDLETLRLFSRVIPEYCRALEENEISEHCFDLIFAFDEIVALGYRENVNLAQIRTFTEMDSHEEKVFRAVRETQEREAKAEMRRKAKELQQARRDAERQGKKAPGFGGFGSSAVSGGSTAAMITETIIETDKPKVAPAPARPSGPSKALKLGAKGKEVDNFVDKLKSEGETIMSSSMGKRTSEATKMHAPPINMESVHMKIEEKITLTCGRDGGLQNMELHGMIMLRISDDKYGRIRLHVENEDKKGVQLQTHPNVDKKLFTAESLIGLKNPEKSFPVNSDVGVLKWRLQTTEESFIPLTINCWPSESGNGCDVNIEYELQEDNLELNDVVITIPLPY

SEQ ID NO: 1504 - protein, 415 aa, Artificial Sequence
  Synthetic polypeptide
MVLLAAAVCTKAGKAIVSRQFVEMTRTRIEGLLAAFPKLMNTGKQHTFVETESVRYVYQPMEKLYMVLITTKNSNILEDLETLRLFSRVIPEYCRALEENEISEHCFDLIFAFDEIVALGYRENVNLAQIRTFTEMDSHEEKVFRAVRETQEREAKAEMRRKAKELQQARRDAERQGKKAPGFGGFGSSAVSGGSTAAMITETIIETDKPKVAPAPARPSGPSKALKLGAKGKEVDNFVDKLKSEGETIMSSSMGKRTSEATKMHAPPINMESVHMKIEEKITLTCGRDGGLQNMELHGMIMLRISDDKYGRIRLHVENEDKKGVQLQTHPNVDKKLFTAESLIGLKNPEKSFPVNSDVGVLKWRLQTTEESFIPLTINCWPSESGNGCDVNIEYELQEDNLELNDVVITIPLPY

SEQ ID NO: 1505 - protein, 20 aa, Artificial Sequence
  Synthetic polypeptide
MNYPLTLEMDLENLEDLGRN

SEQ ID NO: 1506 - protein, 33 aa, Artificial Sequence
  Synthetic polypeptide
MNYPLTLEMDLENLEDLAQWLTPVIPALWEAKA

SEQ ID NO: 1507 - protein, 140 aa, Artificial Sequence
  Synthetic polypeptide
MAPAQRCPLCRQTFFCGRGHVYSRKHQRQLKEALERLLPQVEAARKAIRAAQVERYVPEHERCCWCLCCGCEVREHLSHGNLTVLYGGLLEHLASPEHKKATNKFWWENKAEVQMKEKFLVTPQDYARLGYVFINSVKMD

SEQ ID NO: 1508 - protein, 132 aa, Artificial Sequence
  Synthetic polypeptide
MAPAQRCPLCRQTFFCGRGHVYSRKHQRQLKEALERLLPQVEAARKAIRAAQVERYVPEHERCCWCLCCGCEVREHLSHGNLTVLYGGLLEHLASPEHKKATNKFWWENKAEVQMKEKFLVTPQDYARVKMD

SEQ ID NO: 1509 - protein, 148 aa, Artificial Sequence
  Synthetic polypeptide
MAPAQRCPLCRQTFFCGRGHVYSRKHQRQLKEALERLLPQVEAARKAIRAAQVERYVPEHERCCWCLCCGCEVREHLSHGNLTVLYGGLLEHLASPEHKKATNKFWWENKAEVQMKEKFLVTPQDYARTCVCTKEVEPVWQNVYKDSG

SEQ ID NO: 1510 - protein, 265 aa, Artificial Sequence
  Synthetic polypeptide
MAPAQRCPLCRQTFFCGRGHVYSRKHQRQLKEALERLLPQVEAARKAIRAAQVERYVPEHERCCWCLCCGCEVREHLSHGNLTVLYGGLLEHLASPEHKKATNKFWWENKAEVQMKEKFLVTPQDYARFKKSMVKGLDSYEEKEDKVIKEMAAQIREVEQSRQEVVRSVLEPQAVPDPEEGSSAPRSWKGMNSQVASSLQQPSNLDLPPAPELDWMETGPSLTFIGHQDIPGVGNIHSGKWINNGIVFQDEDRIIDTYDTDESQK

SEQ ID NO: 1511 - protein, 239 aa, Artificial Sequence
  Synthetic polypeptide
MAPAQRCPLCRQTFFCGRGHVYSRKHQRQLKEALERLLPQVEAARKAIRAAQVERYVPEHERCCWCLCCGCEVREHLSHGNLTVLYGGLLEHLASPEHKKATNKFWWENKAEVQMKEKFLVTPQDYARFKKSMVKGLDSYEEKEDKVIKEMAAQIREVEQSRQEVVRSVLEPQAVPDPEEGSSAPRSWKGMNSQVASSLQQPSNLDLPPAPELDWMETGPSLTFIGHQDIPGVGNIHSG

SEQ ID NO: 1512 - protein, 171 aa, Artificial Sequence
  Synthetic polypeptide
MSGNGNAAATAEENSPKMRVIRVGTRKSQLARIQTDSVVATLKASYPGLQFEIIAMSTTGDKILDTALSKIGEKSLFTKELEHALEKNEVDLVVHSLKDLPTVLPPGFTIGAICKRENPHDAVVFHPKFVGKTLETLPEKSVVGTSSLRRAAQLQRKFPHLEFRSIDVTLL

SEQ ID NO: 1513 - protein, 154 aa, Artificial Sequence
  Synthetic polypeptide
MRVIRVGTRKSQLARIQTDSVVATLKASYPGLQFEIIAMSTTGDKILDTALSKIGEKSLFTKELEHALEKNEVDLVVHSLKDLPTVLPPGFTIGAICKRENPHDAVVFHPKFVGKTLETLPEKSVVGTSSLRRAAQLQRKFPHLEFRSIDVTLL

SEQ ID NO: 1514 - protein, 145 aa, Artificial Sequence
  Synthetic polypeptide
MSGNGNAAATAEENSPKMRVIRVGTRKSQLARIQTDSVVATLKASYPGLQFEIIAMSTTGDKILDTALSKIGEKSLFTKELEHALEKNERENPHDAVVFHPKFVGKTLETLPEKSVVGTSSLRRAAQLQRKFPHLEFRSIDVTLL

SEQ ID NO: 1515 - protein, 153 aa, Artificial Sequence
  Synthetic polypeptide
MSGNGNAAATALARIQTDSVVATLKASYPGLQFEIIAMSTTGDKILDTALSKIGEKSLFTKELEHALEKNEVDLVVHSLKDLPTVLPPGFTIGAICKRENPHDAVVFHPKFVGKTLETLPEKSVVGTSSLRRAAQLQRKFPHLEFRSIDVTLL

SEQ ID NO: 1516 - protein, 667 aa, Artificial Sequence
  Synthetic polypeptide
MAGNVKKSSGAGGGSGSGGSGSGGLIGLMKDAFQPHHHHHHHLSPHPPGTVDKKMVEKCWKLMDKVVRLCQNPKLALKNSPPYILDLLPDTYQHLRTILSRYEGKMETLGENEYFRVFMENLMKKTKQTISLFKEGKERMYEENSQPRRNLTKLSLIFSHMLAELKGIFPSGLFQGDTFRITKADAAEFWRKAFGEKTIVPWKSFRQALHEVHPISSGLEAMALKSTIDLTCNDYISVFEFDIFTRLFQPWSSLLRNWNSLAVTHPGYMAFLTYDEVKARLQKFIHKPGSYIFRLSCTRLGQWAIGYVTADGNILQTIPHNKPLFQALIDGFREGFYLFPDGRNQNPDLTGLCEPTPQDHIKVTQEQYELYCEMGSTFQLCKICAENDKDVKIEPCGHLMCTSCLTSWQESEGQGCPFCRCEIKGTEPIVVDPFDPRGSGSLLRQGAEGAPSPNYDDDDDERADDTLFMMKELAGAKVERPPSPFSMAPQASLPPVPPRLDLLPQRVCVPSSASALGTASKAASGSLHKDKPLPVPPTLRDLPPPPPPDRPYSVGAESRPQRRPLPCTPGDCPSRDKLPPVPSSRLGDSWLPRPIPKVPVSAPSSSDPWTGRELTNRHSLPFSLPSQMEPRPDVPRLGSTFSLDTSMLLRRLRQEIHLNLEAEVAVS

SEQ ID NO: 1517 - protein, 232 aa, Artificial Sequence
  Synthetic polypeptide
MSLLLLLLLVSYYVGTLGTHTEIKRVAEEKVTLPCHHQLGLPEKDTLDIEWLLTDNEGNQKVVITYSSRHVYNNLTEEQKGRVAFASNFLAGDASLQIEPLKPSDEGRYTCKVKNSGRYVWSHVILKVLVRPSKPKCELEGELTEGSDLTLQCESSSGTEPIVYYWQRIREKEGEDERLPPKSRIDYNHPGRVLLQNLTMSYSGLYQCTAGNEAGKESCVVRVTVQYNPSRL

SEQ ID NO: 1518 - protein, 252 aa, Artificial Sequence
  Synthetic polypeptide
MSLLLLLLLVSYYVGTLGTHTEIKRVAEEKVTLPCHHQLGLPEKDTLDIEWLLTDNEGNQKVVITYSSRHVYNNLTEEQKGRVAFASNFLAGDASLQIEPLKPSDEGRYTCKVKNSGRYVWSHVILKVLVRPSKPKCELEGELTEGSDLTLQCESSSGTEPIVYYWQRIREKEGEDERLPPKSRIDYNHPGRVLLQNLTMSYSGLYQCTAGNEAGKESCVVRVTVQLRKLRPPANSHVNEPFQRQIIQHQSS

SEQ ID NO: 1519 - protein, 176 aa, Artificial Sequence
  Synthetic polypeptide
MLGIIPLPFGKPQPQSRRRPLRPPSASSASRPARGSLRRAMATSPQKSPSVPKSPTPKSPPSRKKDDSFLGKLGGTLARRKKAKEVSELQEEGMNAINLPLSPIPFELDPEDTMLEENEVRTMVDPNSRSDPKLQELMKVLIDWINDVLVGERIIVKDLAEDLYDGQVLQKLFAYP

SEQ ID NO: 1520 - protein, 136 aa, Artificial Sequence
  Synthetic polypeptide
MATSPQKSPSVPKSPTPKSPPSRKKDDSFLGKLGGTLARRKKAKEVSELQEEGMNAINLPLSPIPFELDPEDTMLEENEVRTMVDPNSRSDPKLQELMKVLIDWINDVLVGERIIVKDLAEDLYDGQVLQKLFAYP

SEQ ID NO: 1521 - protein, 83 aa, Artificial Sequence
  Synthetic polypeptide
MNAINLPLSPIPFELDPEDTMLEENEVRTMVDPNSRSDPKLQELMKVLIDWINDVLVGERIIVKDLAEDLYDGQVLQKLFAYP

SEQ ID NO: 1522 - protein, 100 aa, Artificial Sequence
  Synthetic polypeptide
MGCGALCPQVSELQEEGMNAINLPLSPIPFELDPEDTMLEENEVRTMVDPNSRSDPKLQELMKVLIDWINDVLVGERIIVKDLAEDLYDGQVLQKLFAYP

SEQ ID NO: 1523 - protein, 132 aa, Artificial Sequence
  Synthetic polypeptide
MADAAPQLGKRKRELDVEEAHAASTEEKEAGVGNGTCAPVRLPFSGFRLQKVLRESARDKIIFLHGKVNEASGDGDGEDAVVILEKTPFQVEQVAQLLTGSPELQLQFSNDIYSTYHLFPPRQLNEYCQPGL

SEQ ID NO: 1524 - protein, 156 aa, Artificial Sequence
  Synthetic polypeptide
MADAAPQLGKRKRELDVEEAHAASTEEKEAGVGNGTCAPVRLPFSGFRLQKVLRESARDKIIFLHGKVNEASGDGDGEDAVVILEKTPFQVEQVAQLLTGSPELQLQFSNDIYSTYHLFPPRQLNGDTLAMSGDILGCHNLGRVLLTSQQRPQGCS

SEQ ID NO: 1525 - protein, 279 aa, Artificial Sequence
  Synthetic polypeptide
MVSKSRWKLLAMLALVLVVMVWYSISREDSFYFPIPEKKEPCLQGEAESKASKLFGNYSRDQPIFLRLEDYFWVKTPSAYELPYGTKGSEDLLLRVLAITSSSIPKNIQSLRCRRCVVVGNGHRLRNSSLGDAINKYDVVIRLNNAPVAGYEGDVGSKTTMRLFYPESAHFDPKVENNPDTLLVLVAFKAMDFHWIETILSDKKRVRKGFWKQPPLIWDVNPKQIRILNPFFMEIAADKLLSLPMQQPRKIKQQEGSCLQARKRVPTKTHHDGTLISAI

SEQ ID NO: 1526 - protein, 283 aa, Artificial Sequence
  Synthetic polypeptide
MVSKSRWKLLAMLALVLVVMVWYSISREDRYIELFYFPIPEKKEPCLQGEAESKASKLFGNYSRDQPIFLRLEDYFWVKTPSAYELPYGTKGSEDLLLRVLAITSSSIPKNIQSLRCRRCVVVGNGHRLRNSSLGDAINKYDVVIRLNNAPVAGYEGDVGSKTTMRLFYPESAHFDPKVENNPDTLLVLVAFKAMDFHWIETILSDKKRVRKGFWKQPPLIWDVNPKQIRILNPFFMEIAADKLLSLPMQQPRKIKQQEGSCLQARKRVPTKTHHDGTLISAI

SEQ ID NO: 1527 - protein, 289 aa, Artificial Sequence
  Synthetic polypeptide
MVSKSRWKLLAMLALVLVVMVWYSISREDRYIELFYFPIPEKKEPCLQGEAESKASKLFGKLSPLCSYSRDQPIFLRLEDYFWVKTPSAYELPYGTKGSEDLLLRVLAITSSSIPKNIQSLRCRRCVVVGNGHRLRNSSLGDAINKYDVVIRLNNAPVAGYEGDVGSKTTMRLFYPESAHFDPKVENNPDTLLVLVAFKAMDFHWIETILSDKKRVRKGFWKQPPLIWDVNPKQIRILNPFFMEIAADKLLSLPMQQPRKIKQQEGSCLQARKRVPTKTHHDGTLISAI

SEQ ID NO: 1528 - protein, 272 aa, Artificial Sequence
  Synthetic polypeptide
MLALVLVVMVWYSISREDRYIELFYFPIPEKKEPCLQGEAESKASKLFGNYSRDQPIFLRLEDYFWVKTPSAYELPYGTKGSEDLLLRVLAITSSSIPKNIQSLRCRRCVVVGNGHRLRNSSLGDAINKYDVVIRLNNAPVAGYEGDVGSKTTMRLFYPESAHFDPKVENNPDTLLVLVAFKAMDFHWIETILSDKKRVRKGFWKQPPLIWDVNPKQIRILNPFFMEIAADKLLSLPMQQPRKIKQQEGSCLQARKRVPTKTHHDGTLISAI

SEQ ID NO: 1529 - protein, 282 aa, Artificial Sequence
  Synthetic polypeptide
MCPAGWKLLAMLALVLVVMVWYSISREDRYIELFYFPIPEKKEPCLQGEAESKASKLFGNYSRDQPIFLRLEDYFWVKTPSAYELPYGTKGSEDLLLRVLAITSSSIPKNIQSLRCRRCVVVGNGHRLRNSSLGDAINKYDVVIRLNNAPVAGYEGDVGSKTTMRLFYPESAHFDPKVENNPDTLLVLVAFKAMDFHWIETILSDKKRVRKGFWKQPPLIWDVNPKQIRILNPFFMEIAADKLLSLPMQQPRKIKQQEGSCLQARKRVPTKTHHDGTLISAI

SEQ ID NO: 1530 - protein, 278 aa, Artificial Sequence
  Synthetic polypeptide
MCPAGWKLLAMLALVLVVMVWYSISREDSFYFPIPEKKEPCLQGEAESKASKLFGNYSRDQPIFLRLEDYFWVKTPSAYELPYGTKGSEDLLLRVLAITSSSIPKNIQSLRCRRCVVVGNGHRLRNSSLGDAINKYDVVIRLNNAPVAGYEGDVGSKTTMRLFYPESAHFDPKVENNPDTLLVLVAFKAMDFHWIETILSDKKRVRKGFWKQPPLIWDVNPKQIRILNPFFMEIAADKLLSLPMQQPRKIKQQEGSCLQARKRVPTKTHHDGTLISAI

SEQ ID NO: 1531 - protein, 119 aa, Artificial Sequence
  Synthetic polypeptide
MRLFYPESAHFDPKVENNPDTLLVLVAFKAMDFHWIETILSDKKRVRKGFWKQPPLIWDVNPKQIRILNPFFMEIAADKLLSLPMQQPRKIKQQEGSCLQARKRVPTKTHHDGTLISAI

SEQ ID NO: 1532 - protein, 202 aa, Artificial Sequence [sequence omitted]

SEQ ID NO: 1533 - protein, 686 aa, Artificial Sequence
  Synthetic polypeptide
METESESSTLGDDSVFWLESEVIIQVTDCEEEEREEKFRKMKSSVHSEEDDFVPELHRNVHPRERPDWEETLSAMARGADVPEIPGDLTLKTCGSTASMKVKHVKKLPFTKGHFPKMAECAHFHYENVEFGSIQLSLSEEQNEVMKNGCESKELVYLVQIACQGKSWIVKRSYEDFRVLDKHLHLCIYDRRFSQLSELPRSDTLKDSPESVTQMLMAYLSRLSAIAGNKINCGPALTWMEIDNKGNHLLVHEESSINTPAVGAAHVIKRYTARAPDELTLEVGDIVSVIDMPPKVLSTWWRGKHGFQVGLFPGHCVELINQKVPQSVTNSVPKPVSKKHGKLITFLRTFMKSRPTKQKLKQRGILKERVFGCDLGEHLLNSGFEVPQVLQSCTAFIERYGIVDGIYRLSGVASNIQRLRHEFDSEHVPDLTKEPYVQDIHSVGSLCKLYFRELPNPLLTYQLYEKFSDAVSAATDEERLIKIHDVIQQLPPPHYRTLEFLMRHLSLLADYCSITNMHAKNLAIVWAPNLLRSKQIESACFSGTAAFMEVRIQSVVVEFILNHVDVLFSGRISMAMQEGAASLSRPKSLLVSSPSTKLLTLEEAQARTQAQVNSPIVTENKYIEVGEGPAALQGKFHTIIEFPLESQQHQHHLVIIARSAHCAVVQSHPRPAESETLGVGPSNWSFI

SEQ ID NO: 1534 - protein, 337 aa, Artificial Sequence
  Synthetic polypeptide
MKSRPTKQKLKQRGILKERVFGCDLGEHLLNSGFEVPQVLQSCTAFIERYGIVDGIYRLSGVASNIQRLRHEFDSEHVPDLTKEPYVQDIHSVGSLCKLYFRELPNPLLTYQLYEKFSDAVSAATDEERLIKIHDVIQQLPPPHYRTLEFLMRHLSLLADYCSITNMHAKNLAIVWAPNLLRSKQIESACFSGTAAFMEVRIQSVVVEFILNHVDVLFSGRISMAMQEGAASLSRPKSLLVSSPSTKLLTLEEAQARTQAQVNSPIVTENKYIEVGEGPAALQGKFHTIIEFPLESQQHQHHLVIIARSAHCAVVQSHPRPAESETLGVGPSNWSFI

SEQ ID NO: 1535 - protein, 612 aa, Artificial Sequence
  Synthetic polypeptide
MARGADVPEIPGDLTLKTCGSTASMKVKHVKKLPFTKGHFPKMAECAHFHYENVEFGSIQLSLSEEQNEVMKNGCESKELVYLVQIACQGKSWIVKRSYEDFRVLDKHLHLCIYDRRFSQLSELPRSDTLKDSPESVTQMLMAYLSRLSAIAGNKINCGPALTWMEIDNKGNHLLVHEESSINTPAVGAAHVIKRYTARAPDELTLEVGDIVSVIDMPPKVLSTWWRGKHGFQVGLFPGHCVELINQKVPQSVTNSVPKPVSKKHGKLITFLRTFMKSRPTKQKLKQRGILKERVFGCDLGEHLLNSGFEVPQVLQSCTAFIERYGIVDGIYRLSGVASNIQRLRHEFDSEHVPDLTKEPYVQDIHSVGSLCKLYFRELPNPLLTYQLYEKFSDAVSAATDEERLIKIHDVIQQLPPPHYRTLEFLMRHLSLLADYCSITNMHAKNLAIVWAPNLLRSKQIESACFSGTAAFMEVRIQSVVVEFILNHVDVLFSGRISMAMQEGAASLSRPKSLLVSSPSTKLLTLEEAQARTQAQVNSPIVTENKYIEVGEGPAALQGKFHTIIEFPLESQQHQHHLVIIARSAHCAVVQSHPRPAESETLGVGPSNWSFI

SEQ ID NO: 1536 - protein, 139 aa, Artificial Sequence
  Synthetic polypeptide
METESESSTLGDDSVFWLESEVIIQVTDCEEEEREEKFRKMKSSVHSEEDDFVPELHRNVHPRERPDWEETLSAMARGADVPEIPGDLTLKTCGSTASMKVKHVKKLPFTKGHFPKMAECAHFHYENVEFGSIQSFAAI

SEQ ID NO: 1537 - protein, 65 aa, Artificial Sequence
  Synthetic polypeptide
MARGADVPEIPGDLTLKTCGSTASMKVKHVKKLPFTKGHFPKMAECAHFHYENVEFGSIQSFAAI

SEQ ID NO: 1538 - protein, 113 aa, Artificial Sequence
  Synthetic polypeptide
MKSSVHSEEDDFVPELHRNVHPRERPDWEETLSAMARGADVPEIPGDLTLKTCGSTASMKVKHVKKSTTPGLMGCDNIHRLPFTKGHFPKMAECAHFHYENVEFGSIQSFAAI

SEQ ID NO: 1539 - protein, 377 aa, Artificial Sequence
  Synthetic polypeptide
MERMSDSADKPIDNDAEGVWSPDIEQSFQEALAIYPPCGRRKIILSDEGKMYGRNELIARYIKLRTGKTRTRKQVSSHIQVLARRKSRDFHSKLKDQTAKDKALQHMAAMSSAQIVSATAIHNKLGLPGIPRPTFPGAPGFWPGMIQTGQPGSSQDVKPFVQQAYPIQPAVTAPIPGFEPASAPAPSVPAWQGRSIGTTKLRLVEFSAFLEQQRDPDSYNKHLFVHIGHANHSYSDPLLESVDIRQIYDKFPEKKGGLKELFGKGPQNAFFLVKFWADLNCNIQDDAGAFYGVTSQYESSENMTVTCSTKVCSFGKQVVEKVETEYARFENGRFVYRINRSPMCEYMINFIHKLKHLPEKYMMNSVLENFTILLGRG

SEQ ID NO: 1540 - protein, 392 aa, Artificial Sequence
  Synthetic polypeptide
IEPSSWSGSESPAENMERMSDSADKPIDNDAEGVWSPDIEQSFQEALAIYPPCGRRKIILSDEGKMYGRNELIARYIKLRTGKTRTRKQVSSHIQVLARRKSRDFHSKLKDQTAKDKALQHMAAMSSAQIVSATAIHNKLGLPGIPRPTFPGAPGFWPGMIQTGQPGSSQDVKPFVQQAYPIQPAVTAPIPGFEPASAPAPSVPAWQGRSIGTTKLRLVEFSAFLEQQRDPDSYNKHLFVHIGHANHSYSDPLLESVDIRQIYDKFPEKKGGLKELFGKGPQNAFFLVKFWADLNCNIQDDAGAFYGVTSQYESSENMTVTCSTKVCSFGKQVVEKVETEYARFENGRFVYRINRSPMCEYMINFIHKLKHLPEKYMMNSVLENFTILLGRG

SEQ ID NO: 1541 - protein, 323 aa, Artificial Sequence
  Synthetic polypeptide
MERMSDSADKPIDNDAEGVWSPDIEQSFQEALAIYPPCGRRKIILSDEGKMYGRNELIARYIKLRTGKTRTRKQVSSHIQVLARRKSRDFHSKLKVTSMDQTAKDKALQHMAAMSSAQIVSATAIHNKLGLPGIPRPTFPGAPGFWPGMIQTGQPGSSQDVKPFVQQAYPIQPAVTAPIPGFEPASAPAPSVPAWQGRSIGTTKLRLVEFSAFLEQQRDPDSADLNCNIQDDAGAFYGVTSQYESSENMTVTCSTKVCSFGKQVVEKVETEYARFENGRFVYRINRSPMCEYMINFIHKLKHLPEKYMMNSVLENFTILLGRG

SEQ ID NO: 1542 - protein, 334 aa, Artificial Sequence
  Synthetic polypeptide
IEPSSWSGSESPAENMERMSDSADKPIDNDAEGVWSPDIEQSFQEALAIYPPCGRRKIILSDEGKMYGRNELIARYIKLRTGKTRTRKQVSSHIQVLARRKSRDFHSKLKDQTAKDKALQHMAAMSSAQIVSATAIHNKLGLPGIPRPTFPGAPGFWPGMIQTGQPGSSQDVKPFVQQAYPIQPAVTAPIPGFEPASAPAPSVPAWQGRSIGTTKLRLVEFSAFLEQQRDPDSADLNCNIQDDAGAFYGVTSQYESSENMTVTCSTKVCSFGKQVVEKVETEYARFENGRFVYRINRSPMCEYMINFIHKLKHLPEKYMMNSVLENFTILLGRG

SEQ ID NO: 1543 - protein, 296 aa, Artificial Sequence
  Synthetic polypeptide
MRYVLSWCVTVTFKDQTAKDKALQHMAAMSSAQIVSATAIHNKLGLPGIPRPTFPGAPGFWPGMIQTGQPGSSQDVKPFVQQAYPIQPAVTAPIPGFEPASAPAPSVPAWQGRSIGTTKLRLVEFSAFLEQQRDPDSYNKHLFVHIGHANHSYSDPLLESVDIRQIYDKFPEKKGGLKELFGKGPQNAFFLVKFWADLNCNIQDDAGAFYGVTSQYESSENMTVTCSTKVCSFGKQVVEKVETEYARFENGRFVYRINRSPMCEYMINFIHKLKHLPEKYMMNSVLENFTILLGRG

SEQ ID NO: 1544 - protein, 36 aa, Artificial Sequence
  Synthetic polypeptide
MAATGTAAAAATGRLLLLLLVGLTAPALALAGYIEG

SEQ ID NO: 1545 - protein, 212 aa, Artificial Sequence
  Synthetic polypeptide
MATTVSTQRGPVYIGELPQDFLRITPTQQQRQVQLDAQAAQQLQYGGAVGTVGRLNITVVQAKLAKNYGMTRMDPYCRLRLGYAVYETPTAHNGAKNPRWNKVIHCTVPPGVDSFYLEIFDERAFSMDDRIAWTHITIPESLRQGKVEDKWYSLSGRQGDDKEGMINLVMSYALLPAAMVMPPQPVVLMPTVYQQGVGYVPITVLGMSLSAV

SEQ ID NO: 1546 - protein, 143 aa, Artificial Sequence
  Synthetic polypeptide
MTRMDPYCRLRLGYAVYETPTAHNGAKNPRWNKVIHCTVPPGVDSFYLEIFDERAFSMDDRIAWTHITIPESLRQGKVEDKWYSLSGRQGDDKEGMINLVMSYALLPAAMVMPPQPVVLMPTVYQQGVGYVPITVLGMSLSAV

SEQ ID NO: 1547 - protein, 151 aa, Artificial Sequence
  Synthetic polypeptide
MATTVSTQRGPVYIGELPQDFLRITPTQQQRQVQLDAQAAQQLQYGGAVGTVGRLNITVVQRAFSMDDRIAWTHITIPESLRQGKVEDKWYSLSGRQGDDKEGMINLVMSYALLPAAMVMPPQPVVLMPTVYQQGVGYVPITVLGMSLSAV

SEQ ID NO: 1548 - protein, 184 aa, Artificial Sequence
  Synthetic polypeptide
MATTVQLDAQAAQQLQYGGAVGTVGRLNITVVQAKLAKNYGMTRMDPYCRLRLGYAVYETPTAHNGAKNPRWNKVIHCTVPPGVDSFYLEIFDERAFSMDDRIAWTHITIPESLRQGKVEDKWYSLSGRQGDDKEGMINLVMSYALLPAAMVMPPQPVVLMPTVYQQGVGYVPITVLGMSLSAV

SEQ ID NO: 1549 - protein, 162 aa, Artificial Sequence
  Synthetic polypeptide
MATTVSTQRGPAKLAKNYGMTRMDPYCRLRLGYAVYETPTAHNGAKNPRWNKVIHCTVPPGVDSFYLEIFDERAFSMDDRIAWTHITIPESLRQGKVEDKWYSLSGRQGDDKEGMINLVMSYALLPAAMVMPPQPVVLMPTVYQQGVGYVPITVLGMSLSAV

SEQ ID NO: 1550 - protein, 187 aa, Artificial Sequence
  Synthetic polypeptide
MGVCGYLFLPWKCLVVVSLRLLFLVPTGVPVRSGDATFPKAMDNVTVRQGESATLRCTIDDRVTRVAWLNRSTILYAGNDKWSIDPRVIILVNTPTQYSIMIQNVDVYDEGPYTCSVQTDNHPKTSRVHLIVQVPPQIMNISSDITVNEGSSVTLLCLAIGRPEPTVTWRHLSVKVILRAASCHAMP

SEQ ID NO: 1551 - protein, 180 aa, Artificial Sequence
  Synthetic polypeptide
MYHPAYWVVFSATTALLFIPGVPVRSGDATFPKAMDNVTVRQGESATLRCTIDDRVTRVAWLNRSTILYAGNDKWSIDPRVIILVNTPTQYSIMIQNVDVYDEGPYTCSVQTDNHPKTSRVHLIVQVPPQIMNISSDITVNEGSSVTLLCLAIGRPEPTVTWRHLSVKVILRAASCHAMP

SEQ ID NO: 1552 - protein, 146 aa, Artificial Sequence
  Synthetic polypeptide
MDNVTVRQGESATLRCTIDDRVTRVAWLNRSTILYAGNDKWSIDPRVIILVNTPTQYSIMIQNVDVYDEGPYTCSVQTDNHPKTSRVHLIVQVPPQIMNISSDITVNEGSSVTLLCLAIGRPEPTVTWRHLSVKVILRAASCHAMP

SEQ ID NO: 1553 - protein, 252 aa, Artificial Sequence
  Synthetic polypeptide
MTTWSLRRRPARTLGLLLLVVLGFLVLRRLDWSTLVPLRLRHRQLGLQAKGWNFMLEDSTFWIFGGSIHYFRVPREYWRDRLLKMKACGLNTLTTYVPWNLHEPERGKFDFSGNLDLEAFVLMAAEIGLWVILRPGPYICSEMDLGGLPSWLLQDPGMRLRTTYKGFTEAVDLYFDHLMSRVVPLQYKRGGPIIAVQVENEYGSYNKDPAYMPYVKKALEDRGIVELLLTSDNKDGLSKGIVQGVLLESLQA

SEQ ID NO: 1554 - protein, 40 aa, Artificial Sequence
  Synthetic polypeptide
DLRGLHPLFPCAQGVLEGPPAEDEGLWLEHPHHLCSVEPA

SEQ ID NO: 1555 - protein, 6 aa, Artificial Sequence
  Synthetic polypeptide
AYDFLF

SEQ ID NO: 1556 - protein, 143 aa, Artificial Sequence
  Synthetic polypeptide
MAAAGWRDGSGQEKYRLVVVGGGGVGKSALTIQFIQFFLFLQSYFVTDYDPTIEDSYTKQCVIDDRAARLDILDTAGQEEFGAMREQYMRTGEGFLLVFSVTDRGSFEEIYKFQRQILRVKDRDEFPMILIGNKADLDHQRQK

SEQ ID NO: 1557 - protein, 102 aa, Artificial Sequence
  Synthetic polypeptide
MSYFVTDYDPTIEDSYTKQCVIDDRAARLDILDTAGQEEFGAMREQYMRTGEGFLLVFSVTDRGSFEEIYKFQRQILRVKDRDEFPMILIGNKADLDHQRQK

SEQ ID NO: 1558 - protein, 60 aa, Artificial Sequence
  Synthetic polypeptide
MREQYMRTGEGFLLVFSVTDRGSFEEIYKFQRQILRVKDRDEFPMILIGNKADLDHQRQK

SEQ ID NO: 1559 - protein, 137 aa, Artificial Sequence
  Synthetic polypeptide
MAAAGWRDGSGQEKYRLVVVGGGGVGKSALTIQFIQSYFVTDYDPTIEDSYTKQCVIDDRAARLDILDTAGQEEFGAMREQYMRTGEGFLLVFSVTDRGSFEEIYKFQRQILRVKDRDEFPMILIGNKADLDHQRQK

SEQ ID NO: 1560 - protein, 118 aa, Artificial Sequence
  Synthetic polypeptide
MQESSIILQMFCFLSRESYFVTDYDPTIEDSYTKQCVIDDRAARLDILDTAGQEEFGAMREQYMRTGEGFLLVFSVTDRGSFEEIYKFQRQILRVKDRDEFPMILIGNKADLDHQRQK

SEQ ID NO: 1561 - protein, 480 aa, Artificial Sequence
  Synthetic polypeptide
MTAAENVCYTLINVPMDSEPPSEISLKNDLEKGDVKSKTEALKKVIIMILNGEKLPGLLMTIIRFVLPLQDHTIKKLLLVFWEIVPKTTPDGRLLHEMILVCDAYRKDLQHPNEFIRGSTLRFLCKLKEAELLEPLMPAIRACLEHRHSYVRRNAVLAIYTIYRNFEHLIPDAPELIHDFLVNEKDASCKRNAFMMLIHADQDRALDYLSTCIDQVQTFGDILQLVIVELIYKVCHANPSERARFIRCIYNLLQSSSPAVKYEAAGTLVTLSSAPTAIKAAAQCYIDLIIKESDNNVKLIVLDRLIELKEHPAHERVLQDLVMDILRVLSTPDLEVRKKTLQLALDLVSSRNVEELVIVLKKEVIKTNNVSEHEDTDKYRQLLVRTLHSCSVRFPDMAANVIPVLMEFLSDNNEAAAADVLEFVREAIQRFDNLRMLIVEKMLEVFHAIKSVNTLGGQGRRIAGCQELETSLGNMVRLCL

SEQ ID NO: 1562 - protein, 15 aa, Artificial Sequence
  Synthetic polypeptide
MQLSKVKNSSGEKIL

SEQ ID NO: 1563 - protein, 992 aa, Artificial Sequence
  Synthetic polypeptide
MRRDERDAKAMRSLQPPDGAGSPPESLRNGYVKSCVSPLRQDPPRGFFFHLCRFCNVELRPPPASPQQPRRCSPFCRARLSLGALAAFVLALLLGAEPESWAAGAAWLRTLLSVCSHSLSPLFSIACAFFFLTCFLTRTKRGPGPGRSCGSWWLLALPACCYLGDFLVWQWWSWPWGDGDAGSAAPHTPPEAAAGRLLLVLSCVGLLLTLAHPLRLRHCVLVLLLASFVWWVSFTSLGSLPSALRPLLSGLVGGAGCLLALGLDHFFQIREAPLHPRLSSAAEEKVPVIRPRRRSSCVSLGETAASYYGSCKIFRRPSLPCISREQMILWDWDLKQWYKPHYQNSGGGNGVDLSVLNEARNMVSDLLTDPSLPPQVISSLRSISSLMGAFSGSCRPKINPLTPFPGFYPCSEIEDPAEKGDRKLNKGLNRNSLPTPQLRRSSGTSGLLPVEQSSRWDRNNGKRPHQEFGISSQGCYLNGPFNSNLLTIPKQRSSSVSLTHHVGLRRAGVLSSLSPVNSSNHGPVSTGSLTNRSPIEFPDTADFLNKPSVILQRSLGNAPNTPDFYQQLRNSDSNLCNSCGHQMLKYVSTSESDGTDCCSGKSGEEENIFSKESFKLMETQQEEETEKKDSRKLFQEGDKWLTEEAQSEQQTNIEQEVSLDLILVEEYDSLIEKMSNWNFPIFELVEKMGEKSGRILSQVMYTLFQDTGLLEIFKIPTQQFMNYFRALENGYRDIPYHNRIHATDVLHAVWYLTTRPVPGLQQIHNGCGTGNETDSDGRINHGRIAYISSKSCSNPDESYGCLSSNIPALELMALYVAAAMHDYDHPGRTNAFLVATNAPQAVLYNDRSVLENHHAASAWNLYLSRPEYNFLLHLDHVEFKRFRFLVIEAILATDLKKHFDFLAEFNAKANDVNSNGIEWSNENDRLLVCQVCIKLADINGPAKVRDLHLKWTEGIVNEFYEQKPYKPEESGGQYSTFLRKRILNPEFHVQPN

SEQ ID NO: 1564 - protein, 941 aa, Artificial Sequence
  Synthetic polypeptide
MRRDERDAKAMRSLQPPDGAGSPPESLRNGYVKSCVSPLRQDPPRGFFFHLCRFCNVELRPPPASPQQPRRCSPFCRARLSLGALAAFVLALLLGAEPESWAAGAAWLRTLLSVCSHSLSPLFSIACAFFFLTCFLTRTKRGPGPGRSCGSWWLLALPACCYLGDFLVWQWWSWPWGDGDAGSAAPHTPPEAAAGRLLLVLSCVGLLLTLAHPLRLRHCVLVLLLASFVWWVSFTSLGSLPSALRPLLSGLVGGAGCLLALGLDHFFQIREAPLHPRLSSAAEEKVPVIRPRRRSSCVSLGETAASYYGSCKIFRRPSLPCISREQMILWDWDLKQWYKPHYQNSGGGNGVDLSVLNEARNMVSDLLTDPSLPPQGLNRNSLPTPQLRRSSGTSGLLPVEQSSRWDRNNGKRPHQEFGISSQGCYLNGPFNSNLLTIPKQRSSSVSLTHHVGLRRAGVLSSLSPVNSSNHGPVSTGSLTNRSPIEFPDTADFLNKPSVILQRSLGNAPNTPDFYQQLRNSDSNLCNSCGHQMLKYVSTSESDGTDCCSGKSGEEENIFSKESFKLMETQQEEETEKKDSRKLFQEGDKWLTEEAQSEQQTNIEQEVSLDLILVEEYDSLIEKMSNWNFPIFELVEKMGEKSGRILSQVMYTLFQDTGLLEIFKIPTQQFMNYFRALENGYRDIPYHNRIHATDVLHAVWYLTTRPVPGLQQIHNGCGTGNETDSDGRINHGRIAYISSKSCSNPDESYGCLSSNIPALELMALYVAAAMHDYDHPGRTNAFLVATNAPQAVLYNDRSVLENHHAASAWNLYLSRPEYNFLLHLDHVEFKRFRFLVIEAILATDLKKHFDFLAEFNAKANDVNSNGIEWSNENDRLLVCQVCIKLADINGPAKVRDLHLKWTEGIVNEFYEQKPYKPEESGGQYSTFLRKRILNPEFHVQPN

SEQ ID NO: 1565 - protein, 91 aa, Artificial Sequence
  Synthetic polypeptide
MSAARESHPHGVKRSASPDDDMGLSSFRKTSSKLPLSLHYGELYNYFIIDYSVVIIEIKCPINVMHLNHPETITSSLSVEKLSSTKLVPDA

SEQ ID NO: 1566 - protein, 104 aa, Artificial Sequence
  Synthetic polypeptide
MSAARESHPHGVKRSASPDDDLGSSNWEAADLGNEERKQKFLRLMGAGKKEHTGRLVIGDHKSTSHFRTAIQKSHETFKSASPHGDQTPCIKRQAFGVFQKKKS

SEQ ID NO: 1567 - protein, 76 aa, Artificial Sequence
  Synthetic polypeptide
MSAARESHPHGVKRSASPDDDKEHTGRLVIGDHKSTSHFRTAIQKSHETFKSASPHGDQTPCIKRQAFGVFQKKKS

SEQ ID NO: 1568 - protein, 60 aa, Artificial Sequence
  Synthetic polypeptide
MGAGKKEHTGRLVIGDHKSTSHFRTAIQKSHETFKSASPHGDQTPCIKRQAFGVFQKKKS

SEQ ID NO: 1569 - protein, 73 aa, Artificial Sequence
  Synthetic polypeptide
MSAARESHPHGVKRSASPDDDLGSSNWEAADLGNEERKQKFLRLMGAGKKEHTGRLVIGDHKSTSHFRTDGTV

SEQ ID NO: 1570 - protein, 45 aa, Artificial Sequence
  Synthetic polypeptide
MSAARESHPHGVKRSASPDDDKEHTGRLVIGDHKSTSHFRTDGTV

SEQ ID NO: 1571 - protein, 29 aa, Artificial Sequence
  Synthetic polypeptide
MGAGKKEHTGRLVIGDHKSTSHFRTDGTV

SEQ ID NO: 1572 - protein, 106 aa, Artificial Sequence
  Synthetic polypeptide
MAAATVGRDTLPEHWSYGVCRDGRVFFINDQLRCTTWLHPRTGEPVNSGHMIRSDLPRGWEEGFTEEGASYFIDHNQQTTAFRHPVTGQFSPENSEFILQEESLKS

SEQ ID NO: 1573 - protein, 117 aa, Artificial Sequence
  Synthetic polypeptide
MGRMHAPGKGLSQSALPYRRSVPTWLKLTSDDVKEQIYKLAKKGLTPSQIGVILRDSHGVAQVRFVTGNKILRILKSKGLAPDLPEDLYHLIKKAVAVRKHLERNRKNLEGQGERIA

SEQ ID NO: 1574 - protein, 322 aa, Artificial Sequence
  Synthetic polypeptide
MELLSPPLRDVDLTAPDGSLCSFATTDDFYDDPCFDSPDLRFFEDLDPRLMHVGALLKPEEHSHFPAAVHPAPGAREDEHVRAPSGHHQAGRCLLWACKACKRKTTNADRRKAATMRERRRLSKVNEAFETLKRCTSSNPNQRLPKVEILRNAIRYIEGLQALLRDQDAAPPGAAAAFYAPGPLPPGRGGEHYSGDSDASSPRSNCSDGMMDYSGPPSGARRRNCYEGAYYNEAPSEPRPGKSAAVSSLDCLSSIVERISTESPAAPALLLADVPSESPPRRQEAAAPSEGESSGDPTQSPDAAPQCPAGANPNPIYQKMIL

SEQ ID NO: 1575 - protein, 17 aa, Artificial Sequence
  Synthetic polypeptide
RCRRGVCLGKQQAWATG

SEQ ID NO: 1576 - protein, 369 aa, Artificial Sequence
  Synthetic polypeptide
MEREPSASEAAPAAAALFAWGANSYGQLGLGHKEDVLLPQQLNDFCKPRSVRRITGGGGHSAVVTDGGDLFVCGLNKDGQLGLGHTEDIPYFTPCKSLFGCPIQQVACGWDFTIMLTENGQVLSCGSNSFGQLGVPHGPRRCVVPQAIELHKEKVVCIAAGLRHAVAATASGIVFQWGTGLASCGRRLCPGQTLPLFFTAKEPSRVTGLENSKAMCVLAGSDHSASLTDAGEVYVWGSNKHGQLANEAAFLPVPQKIEAHCFQNEKVTAIWSGWTHLVAQTETGKMFTWGRADYGQLGRKLETYEGWKLEKQDSFLPCSRPPNSMPSSPHCLTGATEVSCGSEHNLAIIGETQWEVMESRRQVFPVLLL

SEQ ID NO: 1577 - skipped

SEQ ID NO: 1578 - protein, 144 aa, Artificial Sequence
  Synthetic polypeptide
MADWARAQSPGAVEEILDRENKRMADSLASKVTRLKSLALDIDRDAEDQNRYLDGMVFQDSQEGAHIRRETVSKSVCAEPWRHQRARDPAPTNFPLKCQKQRGASTSSGQHGGRVNLVFFIGDWQQTTVNLQPGSARGGASKTT

SEQ ID NO: 1579 - protein, 871 aa, Artificial Sequence
  Synthetic polypeptide
MYVSSEHKGRRVTALCWDTAILRVFVGDHAGKVSAIKLNTSKQAKAAAAFVMFPVQTITTVDSCVVQLDYLDGRLLISSLTRSFLCDTEREKFWKIGNKERDGEYGACFFPGRCSGGQQPLIYCARPGSRMWEVNFDGEVISTHQFKKLLSLPPLPVITLRSEPQYDHTAGSSQSLSFPKLLHLSEHCVLTWTERGIYIFIPQNVQVLLWSEVKDIQDVAVCRNELFCLHLNGKVSHLSLISVERCVERLLRRGLWNLAARTCCLFQNSVIASRARKTLTADKLEHLKSQLDHGTYNDLISQLEELILKFEPLDSACSSRRSSISSHESFSILDSGIYRIISSRRGSQSDEDSCSLHSQTLSEDERFKEFTSQQEEDLPDQCCGSHGNEDNVSHAPVMFETDKNETFLPFGIPLPFRSPSPLVSLQAVKESVSSFVRKTTEKIGTLHTSPDLKVRPELRGDEQSCEEDVSSDTCPKEEDTEEEKEVTSPPPEEDRFQELKVATAEAMTKLQDPLVLFESESLRMVLQEWLSHLEKTFAMKDFSGVSDTDNSSMKLNQDVLLVNESKKGILDEDNEKEKRDSLGNEESVDKTACECVRSPRESLDDLFQICSPCAIASGLRNDLAELTTLCLELNVLNSKIKSTSGHVDHTLQQYSPEILACQFLKKYFFLLNLKRAKESIKLSYSNSPSVWDTFIEGLKEMASSNPVYMEMEKGDLPTRLKLLDDEVPFDSPLLVVYATRLYEKFGESALRSLIKFFPSILPSDIIQLCHHHPAEFLAYLDSLVKSRPEDQRSSFLESLLQPESLRLDWLLLAVSLDAPPSTSTMDDEGYPRPHSHLLSWGYSQLILHLIKLPADFITKEKMTDICRSCGT

SEQ ID NO: 1580 - protein, 985 aa, Artificial Sequence
  Synthetic polypeptide
MAFVPVIPESYSHVLAEFESLDPLLSALRLDSSRLKCTSIAVSRKWLALGSSGGGLHLIQKEGWKHRLFLSHREGAISQVACCLHDDDYVAVATSQGLVVVWELNQERRGKPEQMYVSSEHKGRRVTALCWDTAILRVFVGDHAGKVSAIKLNTSKQAKAAAAFVMFPVQTITTVDSCVVQLDYLDGRLLISSLTRSFLCDTEREKFWKIGNKERDGEYGACFFPGRCSGGQQPLIYCARPGSRMWEVNFDGEVISTHQFKKLLSLPPLPVITLRSEPQYDHTAGSSQSLSFPKLLHLSEHCVLTWTERGIYIFIPQNVQVLLWSEVKDIQDVAVCRNELFCLHLNGKVSHLSLISVERCVERLLRRGLWNLAARTCCLFQNSVIASRARKTLTADKLEHLKSQLDHGTYNDLISQLEELILKFEPLDSACSSRRSSISSHESFSILDSGIYRIISSRRGSQSDEDSCSLHSQTLSEDERFKEFTSQQEEDLPDQCCGSHGNEDNVSHAPVMFETDKNETFLPFGIPLPFRSPSPLVSLQAVKESVSSFVRKTTEKIGTLHTSPDLKVRPELRGDEQSCEEDVSSDTCPKEEDTEEEKEVTSPPPEEDRFQELKVATAEAMTKLQDPLVLFESESLRMVLQEWLSHLEKTFAMKDFSGVSDTDNSSMKLNQDVLLVNESKKGILDEDNEKEKRDSLGNEESVDKTACECVRSPRESLDDLFQICSPCAIASGLRNDLAELTTLCLELNVLNSKIKSTSGHVDHTLQQYSPEILACQFLKKYFFLLNLKRAKESIKLSYSNSPSVWDTFIEGLKEMASSNPVYMEMEKGDLPTRLKLLDDEVPFDSPLLVVYATRLYEKFGESALRSLIKFFPSILPSDIIQLCHHHPAEFLAYLDSLVKSRPEDQRSSFLESLLQPESLRLDWLLLAVSLDAPPSTSTMDDEGYPRPHSHLLSWGYSQLILHLIKLPADFITKEKMTDICRSCGT

SEQ ID NO: 1581 - protein, 92 aa, Artificial Sequence
  Synthetic polypeptide
MKIGDFFPQLSLRSSFLESLLQPESLRLDWLLLAVSLDAPPSTSTMDDEGYPRPHSHLLSWGYSQLILHLIKLPADFITKEKMTDICRSCGT

SEQ ID NO: 1582 - protein, 361 aa, Artificial Sequence
  Synthetic polypeptide
MATSSEEVLLIVKKVRQKKQDGALYLMAERIAWAPEGKDRFTISHMYADIKCQKISPEGKAKIQLQLVLHAGDTTNFHFSNESTAVKERDAVKDLLQQLLPKFKRKANKELEEKNRMLQEDPVLFQLYKDLVVSQVISAEEFWANRLNVNATDSSSTSNHKQDVGISAAFLADVRPQTDGCNGLRYNLTSDIIESIFRTYPAVKMKYAENVPHNMTEKEFWTRFFQSHYFHRDRLNTGSKDLFAECAKIDEKGLKTMVSLGVKNPLLDLTALEDKPLDEGYGISSVPSASNSKSIKENSNAAIIKRFNHHSAMVLAAGLRKQEAQNEQTSEPSNMDGNSGDADCFQPAVKRKLARHGDVRL

SEQ ID NO: 1583 - protein, 245 aa, Artificial Sequence
  Synthetic polypeptide
MLQEDPVLFQLYKDLVVSQVISAEEFWANRLNVNATDSSSTSNHKQDVGISAAFLADVRPQTDGCNGLRYNLTSDIIESIFRTYPAVKMKYAENVPHNMTEKEFWTRFFQSHYFHRDRLNTGSKDLFAECAKIDEKGLKTMVSLGVKNPLLDLTALEDKPLDEGYGISSVPSASNSKSIKENSNAAIIKRFNHHSAMVLAAGLRKQEAQNEQTSEPSNMDGNSGDADCFQPAVKRKLARHGDVRL

SEQ ID NO: 1584 - protein, 157 aa, Artificial Sequence
  Synthetic polypeptide
MKYAENVPHNMTEKEFWTRFFQSHYFHRDRLNTGSKDLFAECAKIDEKGLKTMVSLGVKNPLLDLTALEDKPLDEGYGISSVPSASNSKSIKENSNAAIIKRFNHHSAMVLAAGLRKQEAQNEQTSEPSNMDGNSGDADCFQPAVKRKLARHGDVRL

SEQ ID NO: 1585 - protein, 49 aa, Artificial Sequence
  Synthetic polypeptide
MVLAAGLRKQEAQNEQTSEPSNMDGNSGDADCFQPAVKRKLARHGDVRL

SEQ ID NO: 1586 - protein, 446 aa, Artificial Sequence
  Synthetic polypeptide
MATSSEEVLLIVKKVRQKKQDGALYLMAERIAWAPEGKDRFTISHMYADIKCQKISPEGKAKIQLQLVLHAGDTTNFHFSNESTAVKERDAVKDLLQQLLPKFKRKANKELEEKNRMLQEDPVLFQLYKDLVVSQVISAEEFWANRLNVNATDSSSTSNHKQDVGISAAFLADVRPQTDGCNGLRYNLTSDIIESIFRTYPAVKMKYAENVPHNMTEKEFWTRFFQSHYFHRDRLNTGSKDLFAECAKIDEKGLKTMVSLGVKNPLLDLTALEDKPLDEGYGISSVPSASNSKSIKENSNAAIIKRFNHHSAMVLAAGLRKQEAQNEQTSEPSNMDGNSGDADCFQPAVKRAKLQESIEYEDLGKNNSVKTIALNLKKSDRYYHGPTPIQSLQYATSQDIINSFQSIRQEMEAYTPKLTQWLTPVIPILWEAEVGGSREVRSSRPA

SEQ ID NO: 1587 - protein, 330 aa, Artificial Sequence
  Synthetic polypeptide
MLQEDPVLFQLYKDLVVSQVISAEEFWANRLNVNATDSSSTSNHKQDVGISAAFLADVRPQTDGCNGLRYNLTSDIIESIFRTYPAVKMKYAENVPHNMTEKEFWTRFFQSHYFHRDRLNTGSKDLFAECAKIDEKGLKTMVSLGVKNPLLDLTALEDKPLDEGYGISSVPSASNSKSIKENSNAAIIKRFNHHSAMVLAAGLRKQEAQNEQTSEPSNMDGNSGDADCFQPAVKRAKLQESIEYEDLGKNNSVKTIALNLKKSDRYYHGPTPIQSLQYATSQDIINSFQSIRQEMEAYTPKLTQWLTPVIPILWEAEVGGSREVRSSRPA

SEQ ID NO: 1588 - protein, 134 aa, Artificial Sequence
  Synthetic polypeptide
MVLAAGLRKQEAQNEQTSEPSNMDGNSGDADCFQPAVKRAKLQESIEYEDLGKNNSVKTIALNLKKSDRYYHGPTPIQSLQYATSQDIINSFQSIRQEMEAYTPKLTQWLTPVIPILWEAEVGGSREVRSSRPA

SEQ ID NO: 1589 - protein, 36 aa, Artificial Sequence
  Synthetic polypeptide
MEAYTPKLTQWLTPVIPILWEAEVGGSREVRSSRPA

SEQ ID NO: 1590 - protein, 202 aa, Artificial Sequence
  Synthetic polypeptide
MSTVKEQLIEKLIEDDENSQCKITIVGTGAVGMACAISILLKDLADELALVDVALDKLKGEMMDLQHGSLFFSTSKITSGKDYSVSANSRIVIVTAGARQQEGETRLALVQRNVAIMKSIIPAIVHYSPDCKILVVSNPVDILTYIVWKISGLPVTRVIGSGCNLDSARFRYLIGEKLGVHPTSCHGWIIGEHGDSSAFFYD

SEQ ID NO: 1591 - protein, 188 aa, Artificial Sequence
  Synthetic polypeptide
MSTVKEQLIEKLIEDDENSQCKITIVGTGAVGMACAISILLKDLADELALVDVALDKLKGEMMDLQHGSLFFSTSKITSGKAGARQQEGETRLALVQRNVAIMKSIIPAIVHYSPDCKILVVSNPVDILTYIVWKISGLPVTRVIGSGCNLDSARFRYLIGEKLGVHPTSCHGWIIGEHGDSSAFFYD

SEQ ID NO: 1592 - protein, 144 aa, Artificial Sequence
  Synthetic polypeptide
MSTVKEQLIEKLIEDDENSQCKITIVGTGAVGMACAISILLKDLADELALVDVALDKLKGEMMDLQHGSLFFSTSKITSGKVDILTYIVWKISGLPVTRVIGSGCNLDSARFRYLIGEKLGVHPTSCHGWIIGEHGDSSAFFYD

SEQ ID NO: 1593 - protein, 387 aa, Artificial Sequence
  Synthetic polypeptide
MEFDCEGLRRLLGKYKFRDLTVEELRNVNVFFPHFKYSMDTYVFKDSSQKDLLNFTGTIPVMYQGNTYNIPIRFWILDSHPFAPPICFLKPTANMGILVGKHVDAQGRIYLPYLQNWSHPKSVIVGLIKEMIAKFQEELPMYSLSSSDEARQVDLLAYIAKITEGVSDTNSKSWANHENKTVNKITVVGGGELGIACTLAISAKGIADRLVLLDLSEGTKGATMDLEIFNLPNVEISKDLSASAHSKVVIFTVNSLGSSQSYLDVVQSNVDMFRALVPALGHYSQHSVLLVASQPVEIMTYVTWKLSTFPANRVIGIGCNLDSQRLQYIITNVLKAQTSGKEVWVIGEQGEDKVLTWSGQEEVVSHTSQVQLSNRRLKWEDQLSPGV

SEQ ID NO: 1594 - protein, 349 aa, Artificial Sequence
  Synthetic polypeptide
MDTYVFKDSSQKDLLNFTGTIPVMYQGNTYNIPIRFWILDSHPFAPPICFLKPTANMGILVGKHVDAQGRIYLPYLQNWSHPKSVIVGLIKEMIAKFQEELPMYSLSSSDEARQVDLLAYIAKITEGVSDTNSKSWANHENKTVNKITVVGGGELGIACTLAISAKGIADRLVLLDLSEGTKGATMDLEIFNLPNVEISKDLSASAHSKVVIFTVNSLGSSQSYLDVVQSNVDMFRALVPALGHYSQHSVLLVASQPVEIMTYVTWKLSTFPANRVIGIGCNLDSQRLQYIITNVLKAQTSGKEVWVIGEQGEDKVLTWSGQEEVVSHTSQVQLSNRRLKWEDQLSPGV

SEQ ID NO: 1595 - protein, 365 aa, Artificial Sequence
  Synthetic polypeptide
MEFDCEGLRRLLGKYKFRDLTVEELRNVNVFFPHFKYSMDTYGNTYNIPIRFWILDSHPFAPPICFLKPTANMGILVGKHVDAQGRIYLPYLQNWSHPKSVIVGLIKEMIAKFQEELPMYSLSSSDEARQVDLLAYIAKITEGVSDTNSKSWANHENKTVNKITVVGGGELGIACTLAISAKGIADRLVLLDLSEGTKGATMDLEIFNLPNVEISKDLSASAHSKVVIFTVNSLGSSQSYLDVVQSNVDMFRALVPALGHYSQHSVLLVASQPVEIMTYVTWKLSTFPANRVIGIGCNLDSQRLQYIITNVLKAQTSGKEVWVIGEQGEDKVLTWSGQEEVVSHTSQVQLSNRRLKWEDQLSPGV

SEQ ID NO: 1596 - protein, 47 aa, Artificial Sequence
  Synthetic polypeptide
MEFDCEGLRRLLGKLLGRLRQENCLNPGNGGYSELRSRHCTPAWATR

SEQ ID NO: 1597 - protein, 10 aa, Artificial Sequence
  Synthetic polypeptide
MEGPGLGSQP

SEQ ID NO: 1598 - protein, 13 aa, Artificial Sequence
  Synthetic polypeptide
MEGPGLGSQHHSQ

SEQ ID NO: 1599 - protein, 204 aa, Artificial Sequence
  Synthetic polypeptide
MESVSESSQQQKRKPVIHGLEDQKRIYTDWANHYLAKSGHKRLIRDLQQDVTDGVLLAQIIQVVANEKIEDINGCPKNRSQMIENIDACLNFLAAKGINIQGLSAEEIRNGNLKAILGLFFSLSRYKQQQQQPQKQHLSSPLPPAVSQVAGAPSQCQAGTPQQQVPVTPQAPCQPHQPAPHQQSKAQAEMQSRSTEILEPANMH

SEQ ID NO: 1600 - protein, 268 aa, Artificial Sequence
  Synthetic polypeptide
MPAILVASKMKSGLPKPVHSAAPILHVPPARAGPQPCYLKLGSKVEVSKTTYPSQIPLKSQVLQGLQEPAGEGLPLRKSGSVENGFDTQIYTDWANHYLAKSGHKRLIRDLQQDVTDGVLLAQIIQVVANEKIEDINGCPKNRSQMIENIDACLNFLAAKGINIQGLSAEEIRNGNLKAILGLFFSLSRYKQQQQQPQKQHLSSPLPPAVSQVAGAPSQCQAGTPQQQVPVTPQAPCQPHQPAPHQQSKAQAEMQSRSTEILEPANMH

SEQ ID NO: 1601 - protein, 197 aa, Artificial Sequence
  Synthetic polypeptide
MSVMLWRWEQNNTTMKLQIYTDWANHYLAKSGHKRLIRDLQQDVTDGVLLAQIIQVVANEKIEDINGCPKNRSQMIENIDACLNFLAAKGINIQGLSAEEIRNGNLKAILGLFFSLSRYKQQQQQPQKQHLSSPLPPAVSQVAGAPSQCQAGTPQQQVPVTPQAPCQPHQPAPHQQSKAQAEMQSRSTEILEPANMH

SEQ ID NO: 1602 - protein, 199 aa, Artificial Sequence
  Synthetic polypeptide
MAIDLYCGLACLWGIHEPRQIYTDWANHYLAKSGHKRLIRDLQQDVTDGVLLAQIIQVVANEKIEDINGCPKNRSQMIENIDACLNFLAAKGINIQGLSAEEIRNGNLKAILGLFFSLSRYKQQQQQPQKQHLSSPLPPAVSQVAGAPSQCQAGTPQQQVPVTPQAPCQPHQPAPHQQSKAQAEMQSRSTEILEPANMH

SEQ ID NO: 1603 - protein, 1777 aa, Artificial Sequence
  Synthetic polypeptide
MESVSESSQQQKRKPVIHGLEDQKRIYTDWANHYLAKSGHKRLIRDLQQDVTDGVLLAQIIQVVANEKIEDINGCPKNRSQMIENIDACLNFLAAKGINIQGLSAEEIRNGNLKAILGLFFSLSRYKQQQQQPQKQHLSSPLPPAVSQVAGAPSQCQAGTPQQQVPVTPQAPCQPHQPAPHQQSKAQAEMQSRLPGPTARVSAAGSEAKTRGGSTTANNRRSQSFNNYDKSKPVTSPPPPPSSHEKEPLASSASSHPGMSDNAPASLESGSSSTPTNCSTSSAIPQPGAATKPWRSKSLSVKHSATVSMLSVKPPGPEAPRPTPEAMKPAPNNQKSMLEKLKLFNSKGGSKAGEGPGSRDTSCERLETLPSFEESEELEAASRMLTTVGPASSSPKIALKGIAQRTFSRALTNKKSSLKGNEKEKEKQQREKDKEKSKDLAKRASVTERLDLKEEPKEDPSGAAVPEMPKKSSKIASFIPKGGKLNSAKKEPMAPSHSGIPKPGMKSMPGKSPSAPAPSKEGERSRSGKLSSGLPQQKPQLDGRHSSSSSSLASSEGKGPGGTTLNHSISSQTVSGSVGTTQTTGSNTVSVQLPQPQQQYNHPNTATVAPFLYRSQTDTEGNVTAESSSTGVSVEPSHFTKTGQPALEELTGEDPEARRLRTVKNIADLRQNLEETMSSLRGTQVTHSTLETTFDTNVTTEMSGRSILSLTGRPTPLSWRLGQSSPRLQAGDAPSMGNGYPPRANASRFINTESGRYVYSAPLRRQLASRGSSVCHVDVSDKAGDEMDLEGISMDAPGYMSDGDVLSKNIRTDDITSGYMTDGGLGLYTRRLNRLPDGMAVVRETLQRNTSLGLGDADSWDDSSSVSSGISDTIDNLSTDDINTSSSISSYANTPASSRKNLDVQTDAEKHSQVERNSLWSGDDVKKSDGGSDSGIKMEPGSKWRRNPSDVSDESDKSTSGKKNPVISQTGSWRRGMTAQVGITMPRTKPSAPAGALKTPGTGKTDDAKVSEKGRLSPKASQVKRSPSDAGRSSGDESKKPLPSSSRTPTANANSFGFKKQSGSAAGLAMITASGVTVTSRSATLGKIPKSSALVSRSAGRKSSMDGAQNQDDGYLALSSRTNLQYRSLPRPSKSNSRNGAGNRSSTSSIDSNISSKSAGLPVPKLREPSKTALGSSLPGLVNQTDKEKGISSDNESVASCNSVKVNPAAQPVSSPAQTSLQPGAKYPDVASPTLRRLFGGKPTKQVPIATAENMKNSVVISNPHATMTQQGNLDSPSGSGVLSSGSSSPLYSKNVDLNQSPLASSPSSAHSAPSNSLTWGTNASSSSAVSKDGLGFQSVSSLHTSCESIDISLSSGGVPSHNSSTGLIASSKDDSLTPFVRTNSVKTTLSESPLSSPAASPKFCRSTLPRKQDSDPHLDRNTLPKKGLRYTPTSQLRTQEDAKEWLRSHSAGGLQDTAANSPFSSGSSVTSPSGTRFNFSQLASPTTVTQMSLSNPTMLRTHSLSNADGQYDPYTDSRFRNSSMSLDEKSRTMSRSGSFRDGFEEVHGSSLSLVSSTSSVYSTPEEKCQSEIRKLRRELDASQEKVSALTTQLTANAHLVAAFEQSLGNMTIRLQSLTMTAEQKDSELNELRKTIELLKKQNAAAQAAINGVINTPELNCKGNGTAQSADLRIRRQHSSDSVSSINSATSHSSVGSNIESDSKKKKRKNWLRSSFKQAFGKKKSPKSASSHSDIEEMTDSSLPSSPKLPHNGSTGSTPLLRNSHSNSLSTVEAPWR

SEQ ID NO: 1604 - protein, 1844 aa, Artificial Sequence
  Synthetic polypeptide
MPAILVASKMKSGLPKPVHSAAPILHVPPARAGPQPCYLKLGSKVEVSKTTYPSQIPLKSQVLQGLQEPAGEGLPLRKSGSVENGFDTQIYTDWANHYLAKSGHKRLIRDLQQDVTDGVLLAQIIQVVANEKIEDINGCPKNRSQMIENIDACLNFLAAKGINIQGLSAEEIRNGNLKAILGLFFSLSRYKQQQQQPQKQHLSSPLPPAVSQVAGAPSQCQAGTPQQQVPVTPQAPCQPHQPAPHQQSKAQAEMQSRLPGPTARVSAAGSEAKTRGGSTTANNRRSQSFNNYDKSKPVTSPPPPPSSHEKEPLASSASSHPGMSDNAPASLESGSSSTPTNCSTSSAIPQPGAATKPWRSKSLSVKHSATVSMLSVKPPGPEAPRPTPEAMKPAPNNQKSMLEKLKLFNSKGGSKAGEGPGSRDTSCERLETLPSFEESEELEAASRMLTTVGPASSSPKIALKGIAQRTFSRALTNKKSSLKGNEKEKEKQQREKDKEKSKDLAKRASVTERLDLKEEPKEDPSGAAVPEMPKKSSKIASFIPKGGKLNSAKKEPMAPSHSGIPKPGMKSMPGKSPSAPAPSKEGERSRSGKLSSGLPQQKPQLDGRHSSSSSSLASSEGKGPGGTTLNHSISSQTVSGSVGTTQTTGSNTVSVQLPQPQQQYNHPNTATVAPFLYRSQTDTEGNVTAESSSTGVSVEPSHFTKTGQPALEELTGEDPEARRLRTVKNIADLRQNLEETMSSLRGTQVTHSTLETTFDTNVTTEMSGRSILSLTGRPTPLSWRLGQSSPRLQAGDAPSMGNGYPPRANASRFINTESGRYVYSAPLRRQLASRGSSVCHVDVSDKAGDEMDLEGISMDAPGYMSDGDVLSKNIRTDDITSGYMTDGGLGLYTRRLNRLPDGMAVVRETLQRNTSLGLGDADSWDDSSSVSSGISDTIDNLSTDDINTSSSISSYANTPASSRKNLDVQTDAEKHSQVERNSLWSGDDVKKSDGGSDSGIKMEPGSKWRRNPSDVSDESDKSTSGKKNPVISQTGSWRRGMTAQVGITMPRTKPSAPAGALKTPGTGKTDDAKVSEKGRLSPKASQVKRSPSDAGRSSGDESKKPLPSSSRTPTANANSFGFKKQSGSAAGLAMITASGVTVTSRSATLGKIPKSSALVSRSAGRKSSMDGAQNQDDGYLALSSRTNLQYRSLPRPSKSNSRNGAGNRSSTSSIDSNISSKSAGLPVPKLREPSKTALGSSLPGLVNQTDKEKGISSDNESVASCNSVKVNPAAQPVSSPAQTSLQPGAKYPDVASPTLRRLFGGKPTKQVPIATAENMKNSVVISNPHATMTQQGNLDSPSGSGVLSSGSSSPLYSKNVDLNQSPLASSPSSAHSAPSNSLTWGTNASSSSAVSKDGLGFQSVSSLHTSCESIDISLSSGGVPSHNSSTGLIASSKDDSLTPFVRTNSVKTTLSESPLSSPAASPKFCRSTLPRKQDSDPHLDRNTLPKKGLRYTPTSQLRTQEDAKEWLRSHSAGGLQDTAANSPFSSGSSVTSPSGTRFNFSQLASPTTVTQMSLSNPTMLRTHSLSNADGQYDPYTDSRFRNSSMSLDEKSRTMSRSGSFRDGFEEVHGSSLSLVSSTSSVYSTPEEKCQSEIRKLRRELDASQEKVSALTTQLTANAHLVAAFEQSLGNMTIRLQSLTMTAEQKDSELNELRKTIELLKKQNAAAQAAINGVINTPELNCKGNGTAQSADLRIRRQHSSDSVSSINSATSHSSVGSNIESDSKKKKRKNWVNELRSSFKQAFGKKKSPKSASSHSDIEEMTDSSLPSSPKLPHNGSTGSTPLLRNSHSNSLSTVEAPWR

SEQ ID NO: 1605 - protein, 1841 aa, Artificial Sequence
  Synthetic polypeptide
MPAILVASKMKSGLPKPVHSAAPILHVPPARAGPQPCYLKLGSKVEVSKTTYPSQIPLKSQVLQGLQEPAGEGLPLRKSGSVENGFDTQIYTDWANHYLAKSGHKRLIRDLQQDVTDGVLLAQIIQVVANEKIEDINGCPKNRSQMIENIDACLNFLAAKGINIQGLSAEEIRNGNLKAILGLFFSLSRYKQQQQQPQKQHLSSPLPPAVSQVAGAPSQCQAGTPQQQVPVTPQAPCQPHQPAPHQQSKAQAEMQSRLPGPTARVSAAGSEAKTRGGSTTANNRRSQSFNNYDKSKPVTSPPPPPSSHEKEPLASSASSHPGMSDNAPASLESGSSSTPTNCSTSSAIPQPGAATKPWRSKSLSVKHSATVSMLSVKPPGPEAPRPTPEAMKPAPNNQKSMLEKLKLFNSKGGSKAGEGPGSRDTSCERLETLPSFEESEELEAASRMLTTVGPASSSPKIALKGIAQRTFSRALTNKKSSLKGNEKEKEKQQREKDKEKSKDLAKRASVTERLDLKEEPKEDPSGAAVPEMPKKSSKIASFIPKGGKLNSAKKEPMAPSHSGIPKPGMKSMPGKSPSAPAPSKEGERSRSGKLSSGLPQQKPQLDGRHSSSSSSLASSEGKGPGGTTLNHSISSQTVSGSVGTTQTTGSNTVSVQLPQPQQQYNHPNTATVAPFLYRSQTDTEGNVTAESSSTGVSVEPSHFTKTGQPALEELTGEDPEARRLRTVKNIADLRQNLEETMSSLRGTQVTHSTLETTFDTNVTTEMSGRSILSLTGRPTPLSWRLGQSSPRLQAGDAPSMGNGYPPRANASRFINTESGRYVYSAPLRRQLASRGSSVCHVDVSDKAGDEMDLEGISMDAPGYMSDGDVLSKNIRTDDITSGYMTDGGLGLYTRRLNRLPDGMAVVRETLQRNTSLGLGDADSWDDSSSVSSGISDTIDNLSTDDINTSSSISSYANTPASSRKNLDVQTDAEKHSQVERNSLWSGDDVKKSDGGSDSGIKMEPGSKWRRNPSDVSDESDKSTSGKKNPVISQTGSWRRGMTAQVGITMPRTKPSAPAGALKTPGTGKTDDAKVSEKGRLSPKASQVKRSPSDAGRSSGDESKKPLPSSSRTPTANANSFGFKKQSGSAAGLAMITASGVTVTSRSATLGKIPKSSALVSRSAGRKSSMDGAQNQDDGYLALSSRTNLQYRSLPRPSKSNSRNGAGNRSSTSSIDSNISSKSAGLPVPKLREPSKTALGSSLPGLVNQTDKEKGISSDNESVASCNSVKVNPAAQPVSSPAQTSLQPGAKYPDVASPTLRRLFGGKPTKQVPIATAENMKNSVVISNPHATMTQQGNLDSPSGSGVLSSGSSSPLYSKNVDLNQSPLASSPSSAHSAPSNSLTWGTNASSSSAVSKDGLGFQSVSSLHTSCESIDISLSSGGVPSHNSSTGLIASSKDDSLTPFVRTNSVKTTLSESPLSSPAASPKFCRSTLPRKQDSDPHLDRNTLPKKGLRYTPTSQLRTQEDAKEWLRSHSAGGLQDTAANSPFSSGSSVTSPSGTRFNFSQLASPTTVTQMSLSNPTMLRTHSLSNADGQYDPYTDSRFRNSSMSLDEKSRTMSRSGSFRDGFEEVHGSSLSLVSSTSSVYSTPEEKCQSEIRKLRRELDASQEKVSALTTQLTANAHLVAAFEQSLGNMTIRLQSLTMTAEQKDSELNELRKTIELLKKQNAAAQAAINGVINTPELNCKGNGTAQSADLRIRRQHSSDSVSSINSATSHSSVGSNIESDSKKKKRKNWLRSSFKQAFGKKKSPKSASSHSDIEEMTDSSLPSSPKLPHNGSTGSTPLLRNSHSNSLSTVEAPWR

SEQ ID NO: 1606 - protein, 1900 aa, Artificial Sequence
  Synthetic polypeptide
MPAILVASKMKSGLPKPVHSAAPILHVPPARAGPQPCYLKLGSKVEVSKTTYPSQIPLKSQVLQGLQEPAGEGLPLRKSGSVENGFDTQIYTDWANHYLAKSGHKRLIRDLQQDVTDGVLLAQIIQVVANEKIEDINGCPKNRSQMIENIDACLNFLAAKGINIQGLSAEEIRNGNLKAILGLFFSLSRYKQQQQQPQKQHLSSPLPPAVSQVAGAPSQCQAGTPQQQVPVTPQAPCQPHQPAPHQQSKAQAEMQSSASSKDSSQSKIIRFTLGQKKISRLPGPTARVSAAGSEAKTRGGSTTANNRRSQSFNNYDKSKPVTSPPPPPSSHEKEPLASSASSHPGMSDNAPASLESGSSSTPTNCSTSSAIPQPGAATKPWRSKSLSVKHSATVSMLSVKPPGPEAPRPTPEAMKPAPNNQKSMLEKLKLFNSKGGSKAGEGPGSRDTSCERLETLPSFEESEELEAASRMLTTVGPASSSPKIALKGIAQRTFSRALTNKKSSLKGNEKEKEKQQREKDKEKSKDLAKRASVTERLDLKEEPKEDPSGAAVPEMPKKSSKIASFIPKGGKLNSAKKEPMAPSHSGIPKPGMKSMPGKSPSAPAPSKEGERSRSGKLSSGLPQQKPQLDGRHSSSSSSLASSEGKGPGGTTLNHSISSQTVSGSVGTTQTTGSNTVSVQLPQPQQQYNHPNTATVAPFLYRSQTDTEGNVTAESSSTGVSVEPSHFTKTGQPALEELTGEDPEARRLRTVKNIADLRQNLEETMSSLRGTQVTHSTLETTFDTNVTTEMSGRSILSLTGRPTPLSWRLGQSSPRLQAGDAPSMGNGYPPRANASRFINTESGRYVYSAPLRRQLASRGSSVCHVDVSDKAGDEMDLEGISMDAPGYMSDGDVLSKNIRTDDITSGYMTDGGLGLYTRRLNRLPDGMAVVRETLQRNTSLGLGDADSWDDSSSVSSGISDTIDNLSTDDINTSSSISSYANTPASSRKNLDVQTDAEKHSQVERNSLWSGDDVKKSDGGSDSGIKMEPGSKWRRNPSDVSDESDKSTSGKKNPVISQTGSWRRGMTAQVGITMPRTKPSAPAGALKTPGTGKTDDAKVSEKGRLSPKASQVKRSPSDAGRSSGDESKKPLPSSSRTPTANANSFGFKKQSGSAAGLAMITASGVTVTSRSATLGKIPKSSALVSRSAGRKSSMDGAQNQDDGYLALSSRTNLQYRSLPRPSKSNSRNGAGNRSSTSSIDSNISSKSAGLPVPKLREPSKTALGSSLPGLVNQTDKEKGISSDNESVASCNSVKVNPAAQPVSSPAQTSLQPGAKYPDVASPTLRRLFGGKPTKQVPIATAENMKNSVVISNPHATMTQQGNLDSPSGSGVLSSGSSSPLYSKNVDLNQSPLASSPSSAHSAPSNSLTWGTNASSSSAVSKDGLGFQSVSSLHTSCESIDISLSSGGVPSHNSSTGLIASSKDDSLTPFVRTNSVKTTLSESPLSSPAASPKFCRSTLPRKQDSDPHLDRNTLPKKGLRYTPTSQLRTQEDAKEWLRSHSAGGLQDTAANSPFSSGSSVTSPSGTRFNFSQLASPTTVTQMSLSNPTMLRTHSLSNADGQYDPYTDSRFRNSSMSLDEKSRTMSRSGSFRDGFEEESWEKSSVDNFVSRLHSSLHFSLPLFHHARYELVHGSSLSLVSSTSSVYSTPEEKCQSEIRKLRRELDASQEKVSALTTQLTANAHLVAAFEQSLGNMTIRLQSLTMTAEQKDSELNELRKTIELLKKQNAAAQAAINGVINTPELNCKGNGTAQSADLRIRRQHSSDSVSSINSATSHSSVGSNIESDSKKKKRKNWVNELRSSFKQAFGKKKSPKSASSHSDIEEMTDSSLPSSPKLPHNGSTGSTPLLRNSHSNSLSTVEAPWR

SEQ ID NO: 1607 - protein, 1829 aa, Artificial Sequence
  Synthetic polypeptide
MSVMLWRWEQNNTTMKLQIYTDWANHYLAKSGHKRLIRDLQQDVTDGVLLAQIIQVVANEKIEDINGCPKNRSQMIENIDACLNFLAAKGINIQGLSAEEIRNGNLKAILGLFFSLSRYKQQQQQPQKQHLSSPLPPAVSQVAGAPSQCQAGTPQQQVPVTPQAPCQPHQPAPHQQSKAQAEMQSSASSKDSSQSKIIRFTLGQKKISRLPGPTARVSAAGSEAKTRGGSTTANNRRSQSFNNYDKSKPVTSPPPPPSSHEKEPLASSASSHPGMSDNAPASLESGSSSTPTNCSTSSAIPQPGAATKPWRSKSLSVKHSATVSMLSVKPPGPEAPRPTPEAMKPAPNNQKSMLEKLKLFNSKGGSKAGEGPGSRDTSCERLETLPSFEESEELEAASRMLTTVGPASSSPKIALKGIAQRTFSRALTNKKSSLKGNEKEKEKQQREKDKEKSKDLAKRASVTERLDLKEEPKEDPSGAAVPEMPKKSSKIASFIPKGGKLNSAKKEPMAPSHSGIPKPGMKSMPGKSPSAPAPSKEGERSRSGKLSSGLPQQKPQLDGRHSSSSSSLASSEGKGPGGTTLNHSISSQTVSGSVGTTQTTGSNTVSVQLPQPQQQYNHPNTATVAPFLYRSQTDTEGNVTAESSSTGVSVEPSHFTKTGQPALEELTGEDPEARRLRTVKNIADLRQNLEETMSSLRGTQVTHSTLETTFDTNVTTEMSGRSILSLTGRPTPLSWRLGQSSPRLQAGDAPSMGNGYPPRANASRFINTESGRYVYSAPLRRQLASRGSSVCHVDVSDKAGDEMDLEGISMDAPGYMSDGDVLSKNIRTDDITSGYMTDGGLGLYTRRLNRLPDGMAVVRETLQRNTSLGLGDADSWDDSSSVSSGISDTIDNLSTDDINTSSSISSYANTPASSRKNLDVQTDAEKHSQVERNSLWSGDDVKKSDGGSDSGIKMEPGSKWRRNPSDVSDESDKSTSGKKNPVISQTGSWRRGMTAQVGITMPRTKPSAPAGALKTPGTGKTDDAKVSEKGRLSPKASQVKRSPSDAGRSSGDESKKPLPSSSRTPTANANSFGFKKQSGSAAGLAMITASGVTVTSRSATLGKIPKSSALVSRSAGRKSSMDGAQNQDDGYLALSSRTNLQYRSLPRPSKSNSRNGAGNRSSTSSIDSNISSKSAGLPVPKLREPSKTALGSSLPGLVNQTDKEKGISSDNESVASCNSVKVNPAAQPVSSPAQTSLQPGAKYPDVASPTLRRLFGGKPTKQVPIATAENMKNSVVISNPHATMTQQGNLDSPSGSGVLSSGSSSPLYSKNVDLNQSPLASSPSSAHSAPSNSLTWGTNASSSSAVSKDGLGFQSVSSLHTSCESIDISLSSGGVPSHNSSTGLIASSKDDSLTPFVRTNSVKTTLSESPLSSPAASPKFCRSTLPRKQDSDPHLDRNTLPKKGLRYTPTSQLRTQEDAKEWLRSHSAGGLQDTAANSPFSSGSSVTSPSGTRFNFSQLASPTTVTQMSLSNPTMLRTHSLSNADGQYDPYTDSRFRNSSMSLDEKSRTMSRSGSFRDGFEEESWEKSSVDNFVSRLHSSLHFSLPLFHHARYELVHGSSLSLVSSTSSVYSTPEEKCQSEIRKLRRELDASQEKVSALTTQLTANAHLVAAFEQSLGNMTIRLQSLTMTAEQKDSELNELRKTIELLKKQNAAAQAAINGVINTPELNCKGNGTAQSADLRIRRQHSSDSVSSINSATSHSSVGSNIESDSKKKKRKNWVNELRSSFKQAFGKKKSPKSASSHSDIEEMTDSSLPSSPKLPHNGSTGSTPLLRNSHSNSLSTVEAPWR

SEQ ID NO: 1608 - protein, 1831 aa, Artificial Sequence
  Synthetic polypeptide
MAIDLYCGLACLWGIHEPRQIYTDWANHYLAKSGHKRLIRDLQQDVTDGVLLAQIIQVVANEKIEDINGCPKNRSQMIENIDACLNFLAAKGINIQGLSAEEIRNGNLKAILGLFFSLSRYKQQQQQPQKQHLSSPLPPAVSQVAGAPSQCQAGTPQQQVPVTPQAPCQPHQPAPHQQSKAQAEMQSSASSKDSSQSKIIRFTLGQKKISRLPGPTARVSAAGSEAKTRGGSTTANNRRSQSFNNYDKSKPVTSPPPPPSSHEKEPLASSASSHPGMSDNAPASLESGSSSTPTNCSTSSAIPQPGAATKPWRSKSLSVKHSATVSMLSVKPPGPEAPRPTPEAMKPAPNNQKSMLEKLKLFNSKGGSKAGEGPGSRDTSCERLETLPSFEESEELEAASRMLTTVGPASSSPKIALKGIAQRTFSRALTNKKSSLKGNEKEKEKQQREKDKEKSKDLAKRASVTERLDLKEEPKEDPSGAAVPEMPKKSSKIASFIPKGGKLNSAKKEPMAPSHSGIPKPGMKSMPGKSPSAPAPSKEGERSRSGKLSSGLPQQKPQLDGRHSSSSSSLASSEGKGPGGTTLNHSISSQTVSGSVGTTQTTGSNTVSVQLPQPQQQYNHPNTATVAPFLYRSQTDTEGNVTAESSSTGVSVEPSHFTKTGQPALEELTGEDPEARRLRTVKNIADLRQNLEETMSSLRGTQVTHSTLETTFDTNVTTEMSGRSILSLTGRPTPLSWRLGQSSPRLQAGDAPSMGNGYPPRANASRFINTESGRYVYSAPLRRQLASRGSSVCHVDVSDKAGDEMDLEGISMDAPGYMSDGDVLSKNIRTDDITSGYMTDGGLGLYTRRLNRLPDGMAVVRETLQRNTSLGLGDADSWDDSSSVSSGISDTIDNLSTDDINTSSSISSYANTPASSRKNLDVQTDAEKHSQVERNSLWSGDDVKKSDGGSDSGIKMEPGSKWRRNPSDVSDESDKSTSGKKNPVISQTGSWRRGMTAQVGITMPRTKPSAPAGALKTPGTGKTDDAKVSEKGRLSPKASQVKRSPSDAGRSSGDESKKPLPSSSRTPTANANSFGFKKQSGSAAGLAMITASGVTVTSRSATLGKIPKSSALVSRSAGRKSSMDGAQNQDDGYLALSSRTNLQYRSLPRPSKSNSRNGAGNRSSTSSIDSNISSKSAGLPVPKLREPSKTALGSSLPGLVNQTDKEKGISSDNESVASCNSVKVNPAAQPVSSPAQTSLQPGAKYPDVASPTLRRLFGGKPTKQVPIATAENMKNSVVISNPHATMTQQGNLDSPSGSGVLSSGSSSPLYSKNVDLNQSPLASSPSSAHSAPSNSLTWGTNASSSSAVSKDGLGFQSVSSLHTSCESIDISLSSGGVPSHNSSTGLIASSKDDSLTPFVRTNSVKTTLSESPLSSPAASPKFCRSTLPRKQDSDPHLDRNTLPKKGLRYTPTSQLRTQEDAKEWLRSHSAGGLQDTAANSPFSSGSSVTSPSGTRFNFSQLASPTTVTQMSLSNPTMLRTHSLSNADGQYDPYTDSRFRNSSMSLDEKSRTMSRSGSFRDGFEEESWEKSSVDNFVSRLHSSLHFSLPLFHHARYELVHGSSLSLVSSTSSVYSTPEEKCQSEIRKLRRELDASQEKVSALTTQLTANAHLVAAFEQSLGNMTIRLQSLTMTAEQKDSELNELRKTIELLKKQNAAAQAAINGVINTPELNCKGNGTAQSADLRIRRQHSSDSVSSINSATSHSSVGSNIESDSKKKKRKNWVNELRSSFKQAFGKKKSPKSASSHSDIEEMTDSSLPSSPKLPHNGSTGSTPLLRNSHSNSLSTVEAPWR

SEQ ID NO: 1609 - protein, 905 aa, Artificial Sequence
  Synthetic polypeptide
MLWPRNLTSWDDSSSVSSGISDTIDNLSTDDINTSSSISSYANTPASSRKNLDVQTDAEKHSQVERNSLWSGDDVKKSDGGSDSGIKMEPGSKWRRNPSDVSDESDKSTSGKKNPVISQTGSWRRGMTAQVGITMPRTKPSAPAGALKTPGTGKTDDAKVSEKGRLSPKASQVKRSPSDAGRSSGDESKKPLPSSSRTPTANANSFGFKKQSGSAAGLAMITASGVTVTSRSATLGKIPKSSALVSRSAGRKSSMDGAQNQDDGYLALSSRTNLQYRSLPRPSKSNSRNGAGNRSSTSSIDSNISSKSAGLPVPKLREPSKTALGSSLPGLVNQTDKEKGISSDNESVASCNSVKVNPAAQPVSSPAQTSLQPGAKYPDVASPTLRRLFGGKPTKQVPIATAENMKNSVVISNPHATMTQQGNLDSPSGSGVLSSGSSSPLYSKNVDLNQSPLASSPSSAHSAPSNSLTWGTNASSSSAVSKDGLGFQSVSSLHTSCESIDISLSSGGVPSHNSSTGLIASSKDDSLTPFVRTNSVKTTLSESDPHLDRNTLPKKGLRYTPTSQLRTQEDAKEWLRSHSAGGLQDTAANSPFSSGSSVTSPSGTRFNFSQLASPTTVTQMSLSNPTMLRTHSLSNADGQYDPYTDSRFRNSSMSLDEKSRTMSRSGSFRDGFEEVHGSSLSLVSSTSSVYSTPEEKCQSEIRKLRRELDASQEKVSALTTQLTANAHLVAAFEQSLGNMTIRLQSLTMTAEQKDSELNELRKTIELLKKQNAAAQAAINGVINTPELNCKGNGTAQSADLRIRRQHSSDSVSSINSATSHSSVGSNIESDSKKKKRKNWLRSSFKQAFGKKKSPKSASSHSDIEEMTDSSLPSSPKLPHNGSTGSTPLLRNSHSNSLSTVEAPWR

SEQ ID NO: 1610 - protein, 2373 aa, Artificial Sequence
  Synthetic polypeptide
MESVSESSQQQKRKPVIHGLEDQKRIYTDWANHYLAKSGHKRLIRDLQQDVTDGVLLAQIIQVVANEKIEDINGCPKNRSQMIENIDACLNFLAAKGINIQGLSAEEIRNGNLKAILGLFFSLSRYKQQQQQPQKQHLSSPLPPAVSQVAGAPSQCQAGTPQQQVPVTPQAPCQPHQPAPHQQSKAQAEMQSRLPGPTARVSAAGSEAKTRGGSTTANNRRSQSFNNYDKSKPVTSPPPPPSSHEKEPLASSASSHPGMSDNAPASLESGSSSTPTNCSTSSAIPQPGAATKPWRSKSLSVKHSATVSMLSVKPPGPEAPRPTPEAMKPAPNNQKSMLEKLKLFNSKGGSKAGEGPGSRDTSCERLETLPSFEESEELEAASRMLTTVGPASSSPKIALKGIAQRTFSRALTNKKSSLKGNEKEKEKQQREKDKEKSKDLAKRASVTERLDLKEEPKEDPSGAAVPEMPKKSSKIASFIPKGGKLNSAKKEPMAPSHSGIPKPGMKSMPGKSPSAPAPSKEGERSRSGKLSSGLPQQKPQLDGRHSSSSSSLASSEGKGPGGTTLNHSISSQTVSGSVGTTQTTGSNTVSVQLPQPQQQYNHPNTATVAPFLYRSQTDTEGNVTAESSSTGVSVEPSHFTKTGQPALEELTGEDPEARRLRTVKNIADLRQNLEETMSSLRGTQVTHSTLETTFDTNVTTEMSGRSILSLTGRPTPLSWRLGQSSPRLQAGDAPSMGNGYPPRANASRFINTESGRYVYSAPLRRQLASRGSSVCHVDVSDKAGDEMDLEGISMDAPGYMSDGDVLSKNIRTDDITSGYMTDGGLGLYTRRLNRLPDGMAVVRETLQRNTSLGLGDADSWDDSSSVSSGISDTIDNLSTDDINTSSSISSYANTPASSRKNLDVQTDAEKHSQVERNSLWSGDDVKKSDGGSDSGIKMEPGSKWRRNPSDVSDESDKSTSGKKNPVISQTGSWRRGMTAQVGITMPRTKPSAPAGALKTPGTGKTDDAKVSEKGRLSPKASQVKRSPSDAGRSSGDESKKPLPSSSRTPTANANSFGFKKQSGSAAGLAMITASGVTVTSRSATLGKIPKSSALVSRSAGRKSSMDGAQNQDDGYLALSSRTNLQYRSLPRPSKSNSRNGAGNRSSTSSIDSNISSKSAGLPVPKLREPSKTALGSSLPGLVNQTDKEKGISSDNESVASCNSVKVNPAAQPVSSPAQTSLQPGAKYPDVASPTLRRLFGGKPTKQVPIATAENMKNSVVISNPHATMTQQGNLDSPSGSGVLSSGSSSPLYSKNVDLNQSPLASSPSSAHSAPSNSLTWGTNASSSSAVSKDGLGFQSVSSLHTSCESIDISLSSGGVPSHNSSTGLIASSKDDSLTPFVRTNSVKTTLSESPLSSPAASPKFCRSTLPRKQDSDPHLDRNTLPKKGLRYTPTSQLRTQEDAKEWLRSHSAGGLQDTAANSPFSSGSSVTSPSGTRFNFSQLASPTTVTQMSLSNPTMLRTHSLSNADGQYDPYTDSRFRNSSMSLDEKSRTMSRSGSFRDGFEEVHGSSLSLVSSTSSVYSTPEEKCQSEIRKLRRELDASQEKVSALTTQLTANAHLVAAFEQSLGNMTIRLQSLTMTAEQKDSELNELRKTIELLKKQNAAAQAAINGVINTPELNCKGNGTAQSADLRIRRQHSSDSVSSINSATSHSSVGSNIESDSKKKKRKNWLRSSFKQAFGKKKSPKSASSHSDIEEMTDSSLPSSPKLPHNGSTGSTPLLRNSHSNSLISECMDSEAETVMQLRNELRDKEMKLTDIRLEALSSAHQLDQLREAMNRMQSEIEKLKAENDRLKSESQGSGCSRAPSQVSISASPRQSMGLSQHSLNLTESTSLDMLLDDTGECSARKEGGRHVKIVVSFQEEMKWKEDSRPHLFLIGCIGVSGKTKWDVLDGVVRRLFKEYIIHVDPVSQLGLNSDSVLGYSIGEIKRSNTSETPELLPCGYLVGENTTISVTVKGLAENSLDSLVFESLIPKPILQRYVSLLIEHRRIILSGPSGTGKTYLANRLSEYIVLREGRELTDGVIATFNVDHKSSKELRQYLSNLADQCNSENNAVDMPLVIILDNLHHVSSLGEIFNGLLNCKYHKCPYIIGTMNQATSSTPNLQLHHNFRWVLCANHTEPVKGFLGRFLRRKLMETEISGRVRNMELVKIIDWIPKVWHHLNRFLEAHSSSDVTIGPRLFLSCPIDVDGSRVWFTDLWNYSIIPYLLEAVREGLQLYGRRAPWEDPAKWVMDTYPWAASPQQHEWPPLLQLRPEDVGFDGYSMPREGSTSKQMPPSDAEGDPLIKKQIKMSLTTTEYCGRDPSQYRETRKINYEDWKRKKFNSLYSQVTLCI

SEQ ID NO: 1611 - protein, 2440 aa, Artificial Sequence
  Synthetic polypeptide
MPAILVASKMKSGLPKPVHSAAPILHVPPARAGPQPCYLKLGSKVEVSKTTYPSQIPLKSQVLQGLQEPAGEGLPLRKSGSVENGFDTQIYTDWANHYLAKSGHKRLIRDLQQDVTDGVLLAQIIQVVANEKIEDINGCPKNRSQMIENIDACLNFLAAKGINIQGLSAEEIRNGNLKAILGLFFSLSRYKQQQQQPQKQHLSSPLPPAVSQVAGAPSQCQAGTPQQQVPVTPQAPCQPHQPAPHQQSKAQAEMQSRLPGPTARVSAAGSEAKTRGGSTTANNRRSQSFNNYDKSKPVTSPPPPPSSHEKEPLASSASSHPGMSDNAPASLESGSSSTPTNCSTSSAIPQPGAATKPWRSKSLSVKHSATVSMLSVKPPGPEAPRPTPEAMKPAPNNQKSMLEKLKLFNSKGGSKAGEGPGSRDTSCERLETLPSFEESEELEAASRMLTTVGPASSSPKIALKGIAQRTFSRALTNKKSSLKGNEKEKEKQQREKDKEKSKDLAKRASVTERLDLKEEPKEDPSGAAVPEMPKKSSKIASFIPKGGKLNSAKKEPMAPSHSGIPKPGMKSMPGKSPSAPAPSKEGERSRSGKLSSGLPQQKPQLDGRHSSSSSSLASSEGKGPGGTTLNHSISSQTVSGSVGTTQTTGSNTVSVQLPQPQQQYNHPNTATVAPFLYRSQTDTEGNVTAESSSTGVSVEPSHFTKTGQPALEELTGEDPEARRLRTVKNIADLRQNLEETMSSLRGTQVTHSTLETTFDTNVTTEMSGRSILSLTGRPTPLSWRLGQSSPRLQAGDAPSMGNGYPPRANASRFINTESGRYVYSAPLRRQLASRGSSVCHVDVSDKAGDEMDLEGISMDAPGYMSDGDVLSKNIRTDDITSGYMTDGGLGLYTRRLNRLPDGMAVVRETLQRNTSLGLGDADSWDDSSSVSSGISDTIDNLSTDDINTSSSISSYANTPASSRKNLDVQTDAEKHSQVERNSLWSGDDVKKSDGGSDSGIKMEPGSKWRRNPSDVSDESDKSTSGKKNPVISQTGSWRRGMTAQVGITMPRTKPSAPAGALKTPGTGKTDDAKVSEKGRLSPKASQVKRSPSDAGRSSGDESKKPLPSSSRTPTANANSFGFKKQSGSAAGLAMITASGVTVTSRSATLGKIPKSSALVSRSAGRKSSMDGAQNQDDGYLALSSRTNLQYRSLPRPSKSNSRNGAGNRSSTSSIDSNISSKSAGLPVPKLREPSKTALGSSLPGLVNQTDKEKGISSDNESVASCNSVKVNPAAQPVSSPAQTSLQPGAKYPDVASPTLRRLFGGKPTKQVPIATAENMKNSVVISNPHATMTQQGNLDSPSGSGVLSSGSSSPLYSKNVDLNQSPLASSPSSAHSAPSNSLTWGTNASSSSAVSKDGLGFQSVSSLHTSCESIDISLSSGGVPSHNSSTGLIASSKDDSLTPFVRTNSVKTTLSESPLSSPAASPKFCRSTLPRKQDSDPHLDRNTLPKKGLRYTPTSQLRTQEDAKEWLRSHSAGGLQDTAANSPFSSGSSVTSPSGTRFNFSQLASPTTVTQMSLSNPTMLRTHSLSNADGQYDPYTDSRFRNSSMSLDEKSRTMSRSGSFRDGFEEVHGSSLSLVSSTSSVYSTPEEKCQSEIRKLRRELDASQEKVSALTTQLTANAHLVAAFEQSLGNMTIRLQSLTMTAEQKDSELNELRKTIELLKKQNAAAQAAINGVINTPELNCKGNGTAQSADLRIRRQHSSDSVSSINSATSHSSVGSNIESDSKKKKRKNWVNELRSSFKQAFGKKKSPKSASSHSDIEEMTDSSLPSSPKLPHNGSTGSTPLLRNSHSNSLISECMDSEAETVMQLRNELRDKEMKLTDIRLEALSSAHQLDQLREAMNRMQSEIEKLKAENDRLKSESQGSGCSRAPSQVSISASPRQSMGLSQHSLNLTESTSLDMLLDDTGECSARKEGGRHVKIVVSFQEEMKWKEDSRPHLFLIGCIGVSGKTKWDVLDGVVRRLFKEYIIHVDPVSQLGLNSDSVLGYSIGEIKRSNTSETPELLPCGYLVGENTTISVTVKGLAENSLDSLVFESLIPKPILQRYVSLLIEHRRIILSGPSGTGKTYLANRLSEYIVLREGRELTDGVIATFNVDHKSSKELRQYLSNLADQCNSENNAVDMPLVIILDNLHHVSSLGEIFNGLLNCKYHKCPYIIGTMNQATSSTPNLQLHHNFRWVLCANHTEPVKGFLGRFLRRKLMETEISGRVRNMELVKIIDWIPKVWHHLNRFLEAHSSSDVTIGPRLFLSCPIDVDGSRVWFTDLWNYSIIPYLLEAVREGLQLYGRRAPWEDPAKWVMDTYPWAASPQQHEWPPLLQLRPEDVGFDGYSMPREGSTSKQMPPSDAEGDPLIKKQIKMSLTTTEYCGRDPSQYRETRKINYEDWKRKKFNSLYSQVTLCI

SEQ ID NO: 1612 - protein, 2437 aa, Artificial Sequence
  Synthetic polypeptide
MPAILVASKMKSGLPKPVHSAAPILHVPPARAGPQPCYLKLGSKVEVSKTTYPSQIPLKSQVLQGLQEPAGEGLPLRKSGSVENGFDTQIYTDWANHYLAKSGHKRLIRDLQQDVTDGVLLAQIIQVVANEKIEDINGCPKNRSQMIENIDACLNFLAAKGINIQGLSAEEIRNGNLKAILGLFFSLSRYKQQQQQPQKQHLSSPLPPAVSQVAGAPSQCQAGTPQQQVPVTPQAPCQPHQPAPHQQSKAQAEMQSRLPGPTARVSAAGSEAKTRGGSTTANNRRSQSFNNYDKSKPVTSPPPPPSSHEKEPLASSASSHPGMSDNAPASLESGSSSTPTNCSTSSAIPQPGAATKPWRSKSLSVKHSATVSMLSVKPPGPEAPRPTPEAMKPAPNNQKSMLEKLKLFNSKGGSKAGEGPGSRDTSCERLETLPSFEESEELEAASRMLTTVGPASSSPKIALKGIAQRTFSRALTNKKSSLKGNEKEKEKQQREKDKEKSKDLAKRASVTERLDLKEEPKEDPSGAAVPEMPKKSSKIASFIPKGGKLNSAKKEPMAPSHSGIPKPGMKSMPGKSPSAPAPSKEGERSRSGKLSSGLPQQKPQLDGRHSSSSSSLASSEGKGPGGTTLNHSISSQTVSGSVGTTQTTGSNTVSVQLPQPQQQYNHPNTATVAPFLYRSQTDTEGNVTAESSSTGVSVEPSHFTKTGQPALEELTGEDPEARRLRTVKNIADLRQNLEETMSSLRGTQVTHSTLETTFDTNVTTEMSGRSILSLTGRPTPLSWRLGQSSPRLQAGDAPSMGNGYPPRANASRFINTESGRYVYSAPLRRQLASRGSSVCHVDVSDKAGDEMDLEGISMDAPGYMSDGDVLSKNIRTDDITSGYMTDGGLGLYTRRLNRLPDGMAVVRETLQRNTSLGLGDADSWDDSSSVSSGISDTIDNLSTDDINTSSSISSYANTPASSRKNLDVQTDAEKHSQVERNSLWSGDDVKKSDGGSDSGIKMEPGSKWRRNPSDVSDESDKSTSGKKNPVISQTGSWRRGMTAQVGITMPRTKPSAPAGALKTPGTGKTDDAKVSEKGRLSPKASQVKRSPSDAGRSSGDESKKPLPSSSRTPTANANSFGFKKQSGSAAGLAMITASGVTVTSRSATLGKIPKSSALVSRSAGRKSSMDGAQNQDDGYLALSSRTNLQYRSLPRPSKSNSRNGAGNRSSTSSIDSNISSKSAGLPVPKLREPSKTALGSSLPGLVNQTDKEKGISSDNESVASCNSVKVNPAAQPVSSPAQTSLQPGAKYPDVASPTLRRLFGGKPTKQVPIATAENMKNSVVISNPHATMTQQGNLDSPSGSGVLSSGSSSPLYSKNVDLNQSPLASSPSSAHSAPSNSLTWGTNASSSSAVSKDGLGFQSVSSLHTSCESIDISLSSGGVPSHNSSTGLIASSKDDSLTPFVRTNSVKTTLSESPLSSPAASPKFCRSTLPRKQDSDPHLDRNTLPKKGLRYTPTSQLRTQEDAKEWLRSHSAGGLQDTAANSPFSSGSSVTSPSGTRFNFSQLASPTTVTQMSLSNPTMLRTHSLSNADGQYDPYTDSRFRNSSMSLDEKSRTMSRSGSFRDGFEEVHGSSLSLVSSTSSVYSTPEEKCQSEIRKLRRELDASQEKVSALTTQLTANAHLVAAFEQSLGNMTIRLQSLTMTAEQKDSELNELRKTIELLKKQNAAAQAAINGVINTPELNCKGNGTAQSADLRIRRQHSSDSVSSINSATSHSSVGSNIESDSKKKKRKNWLRSSFKQAFGKKKSPKSASSHSDIEEMTDSSLPSSPKLPHNGSTGSTPLLRNSHSNSLISECMDSEAETVMQLRNELRDKEMKLTDIRLEALSSAHQLDQLREAMNRMQSEIEKLKAENDRLKSESQGSGCSRAPSQVSISASPRQSMGLSQHSLNLTESTSLDMLLDDTGECSARKEGGRHVKIVVSFQEEMKWKEDSRPHLFLIGCIGVSGKTKWDVLDGVVRRLFKEYIIHVDPVSQLGLNSDSVLGYSIGEIKRSNTSETPELLPCGYLVGENTTISVTVKGLAENSLDSLVFESLIPKPILQRYVSLLIEHRRIILSGPSGTGKTYLANRLSEYIVLREGRELTDGVIATFNVDHKSSKELRQYLSNLADQCNSENNAVDMPLVIILDNLHHVSSLGEIFNGLLNCKYHKCPYIIGTMNQATSSTPNLQLHHNFRWVLCANHTEPVKGFLGRFLRRKLMETEISGRVRNMELVKIIDWIPKVWHHLNRFLEAHSSSDVTIGPRLFLSCPIDVDGSRVWFTDLWNYSIIPYLLEAVREGLQLYGRRAPWEDPAKWVMDTYPWAASPQQHEWPPLLQLRPEDVGFDGYSMPREGSTSKQMPPSDAEGDPLIKKQIKMSLTTTEYCGRDPSQYRETRKINYEDWKRKKFNSLYSQVTLCI

SEQ ID NO: 1613 - protein, 2496 aa, Artificial Sequence
  Synthetic polypeptide
MPAILVASKMKSGLPKPVHSAAPILHVPPARAGPQPCYLKLGSKVEVSKTTYPSQIPLKSQVLQGLQEPAGEGLPLRKSGSVENGFDTQIYTDWANHYLAKSGHKRLIRDLQQDVTDGVLLAQIIQVVANEKIEDINGCPKNRSQMIENIDACLNFLAAKGINIQGLSAEEIRNGNLKAILGLFFSLSRYKQQQQQPQKQHLSSPLPPAVSQVAGAPSQCQAGTPQQQVPVTPQAPCQPHQPAPHQQSKAQAEMQSSASSKDSSQSKIIRFTLGQKKISRLPGPTARVSAAGSEAKTRGGSTTANNRRSQSFNNYDKSKPVTSPPPPPSSHEKEPLASSASSHPGMSDNAPASLESGSSSTPTNCSTSSAIPQPGAATKPWRSKSLSVKHSATVSMLSVKPPGPEAPRPTPEAMKPAPNNQKSMLEKLKLFNSKGGSKAGEGPGSRDTSCERLETLPSFEESEELEAASRMLTTVGPASSSPKIALKGIAQRTFSRALTNKKSSLKGNEKEKEKQQREKDKEKSKDLAKRASVTERLDLKEEPKEDPSGAAVPEMPKKSSKIASFIPKGGKLNSAKKEPMAPSHSGIPKPGMKSMPGKSPSAPAPSKEGERSRSGKLSSGLPQQKPQLDGRHSSSSSSLASSEGKGPGGTTLNHSISSQTVSGSVGTTQTTGSNTVSVQLPQPQQQYNHPNTATVAPFLYRSQTDTEGNVTAESSSTGVSVEPSHFTKTGQPALEELTGEDPEARRLRTVKNIADLRQNLEETMSSLRGTQVTHSTLETTFDTNVTTEMSGRSILSLTGRPTPLSWRLGQSSPRLQAGDAPSMGNGYPPRANASRFINTESGRYVYSAPLRRQLASRGSSVCHVDVSDKAGDEMDLEGISMDAPGYMSDGDVLSKNIRTDDITSGYMTDGGLGLYTRRLNRLPDGMAVVRETLQRNTSLGLGDADSWDDSSSVSSGISDTIDNLSTDDINTSSSISSYANTPASSRKNLDVQTDAEKHSQVERNSLWSGDDVKKSDGGSDSGIKMEPGSKWRRNPSDVSDESDKSTSGKKNPVISQTGSWRRGMTAQVGITMPRTKPSAPAGALKTPGTGKTDDAKVSEKGRLSPKASQVKRSPSDAGRSSGDESKKPLPSSSRTPTANANSFGFKKQSGSAAGLAMITASGVTVTSRSATLGKIPKSSALVSRSAGRKSSMDGAQNQDDGYLALSSRTNLQYRSLPRPSKSNSRNGAGNRSSTSSIDSNISSKSAGLPVPKLREPSKTALGSSLPGLVNQTDKEKGISSDNESVASCNSVKVNPAAQPVSSPAQTSLQPGAKYPDVASPTLRRLFGGKPTKQVPIATAENMKNSVVISNPHATMTQQGNLDSPSGSGVLSSGSSSPLYSKNVDLNQSPLASSPSSAHSAPSNSLTWGTNASSSSAVSKDGLGFQSVSSLHTSCESIDISLSSGGVPSHNSSTGLIASSKDDSLTPFVRTNSVKTTLSESPLSSPAASPKFCRSTLPRKQDSDPHLDRNTLPKKGLRYTPTSQLRTQEDAKEWLRSHSAGGLQDTAANSPFSSGSSVTSPSGTRFNFSQLASPTTVTQMSLSNPTMLRTHSLSNADGQYDPYTDSRFRNSSMSLDEKSRTMSRSGSFRDGFEEESWEKSSVDNFVSRLHSSLHFSLPLFHHARYELVHGSSLSLVSSTSSVYSTPEEKCQSEIRKLRRELDASQEKVSALTTQLTANAHLVAAFEQSLGNMTIRLQSLTMTAEQKDSELNELRKTIELLKKQNAAAQAAINGVINTPELNCKGNGTAQSADLRIRRQHSSDSVSSINSATSHSSVGSNIESDSKKKKRKNWVNELRSSFKQAFGKKKSPKSASSHSDIEEMTDSSLPSSPKLPHNGSTGSTPLLRNSHSNSLISECMDSEAETVMQLRNELRDKEMKLTDIRLEALSSAHQLDQLREAMNRMQSEIEKLKAENDRLKSESQGSGCSRAPSQVSISASPRQSMGLSQHSLNLTESTSLDMLLDDTGECSARKEGGRHVKIVVSFQEEMKWKEDSRPHLFLIGCIGVSGKTKWDVLDGVVRRLFKEYIIHVDPVSQLGLNSDSVLGYSIGEIKRSNTSETPELLPCGYLVGENTTISVTVKGLAENSLDSLVFESLIPKPILQRYVSLLIEHRRIILSGPSGTGKTYLANRLSEYIVLREGRELTDGVIATFNVDHKSSKELRQYLSNLADQCNSENNAVDMPLVIILDNLHHVSSLGEIFNGLLNCKYHKCPYIIGTMNQATSSTPNLQLHHNFRWVLCANHTEPVKGFLGRFLRRKLMETEISGRVRNMELVKIIDWIPKVWHHLNRFLEAHSSSDVTIGPRLFLSCPIDVDGSRVWFTDLWNYSIIPYLLEAVREGLQLYGRRAPWEDPAKWVMDTYPWAASPQQHEWPPLLQLRPEDVGFDGYSMPREGSTSKQMPPSDAEGDPLIKKQIKMSLTTTEYCGRDPSQYRETRKINYEDWKRKKFNSLYSQVTLCI

SEQ ID NO: 1614 - protein, 2425 aa, Artificial Sequence
  Synthetic polypeptide
MSVMLWRWEQNNTTMKLQIYTDWANHYLAKSGHKRLIRDLQQDVTDGVLLAQIIQVVANEKIEDINGCPKNRSQMIENIDACLNFLAAKGINIQGLSAEEIRNGNLKAILGLFFSLSRYKQQQQQPQKQHLSSPLPPAVSQVAGAPSQCQAGTPQQQVPVTPQAPCQPHQPAPHQQSKAQAEMQSSASSKDSSQSKIIRFTLGQKKISRLPGPTARVSAAGSEAKTRGGSTTANNRRSQSFNNYDKSKPVTSPPPPPSSHEKEPLASSASSHPGMSDNAPASLESGSSSTPTNCSTSSAIPQPGAATKPWRSKSLSVKHSATVSMLSVKPPGPEAPRPTPEAMKPAPNNQKSMLEKLKLFNSKGGSKAGEGPGSRDTSCERLETLPSFEESEELEAASRMLTTVGPASSSPKIALKGIAQRTFSRALTNKKSSLKGNEKEKEKQQREKDKEKSKDLAKRASVTERLDLKEEPKEDPSGAAVPEMPKKSSKIASFIPKGGKLNSAKKEPMAPSHSGIPKPGMKSMPGKSPSAPAPSKEGERSRSGKLSSGLPQQKPQLDGRHSSSSSSLASSEGKGPGGTTLNHSISSQTVSGSVGTTQTTGSNTVSVQLPQPQQQYNHPNTATVAPFLYRSQTDTEGNVTAESSSTGVSVEPSHFTKTGQPALEELTGEDPEARRLRTVKNIADLRQNLEETMSSLRGTQVTHSTLETTFDTNVTTEMSGRSILSLTGRPTPLSWRLGQSSPRLQAGDAPSMGNGYPPRANASRFINTESGRYVYSAPLRRQLASRGSSVCHVDVSDKAGDEMDLEGISMDAPGYMSDGDVLSKNIRTDDITSGYMTDGGLGLYTRRLNRLPDGMAVVRETLQRNTSLGLGDADSWDDSSSVSSGISDTIDNLSTDDINTSSSISSYANTPASSRKNLDVQTDAEKHSQVERNSLWSGDDVKKSDGGSDSGIKMEPGSKWRRNPSDVSDESDKSTSGKKNPVISQTGSWRRGMTAQVGITMPRTKPSAPAGALKTPGTGKTDDAKVSEKGRLSPKASQVKRSPSDAGRSSGDESKKPLPSSSRTPTANANSFGFKKQSGSAAGLAMITASGVTVTSRSATLGKIPKSSALVSRSAGRKSSMDGAQNQDDGYLALSSRTNLQYRSLPRPSKSNSRNGAGNRSSTSSIDSNISSKSAGLPVPKLREPSKTALGSSLPGLVNQTDKEKGISSDNESVASCNSVKVNPAAQPVSSPAQTSLQPGAKYPDVASPTLRRLFGGKPTKQVPIATAENMKNSVVISNPHATMTQQGNLDSPSGSGVLSSGSSSPLYSKNVDLNQSPLASSPSSAHSAPSNSLTWGTNASSSSAVSKDGLGFQSVSSLHTSCESIDISLSSGGVPSHNSSTGLIASSKDDSLTPFVRTNSVKTTLSESPLSSPAASPKFCRSTLPRKQDSDPHLDRNTLPKKGLRYTPTSQLRTQEDAKEWLRSHSAGGLQDTAANSPFSSGSSVTSPSGTRFNFSQLASPTTVTQMSLSNPTMLRTHSLSNADGQYDPYTDSRFRNSSMSLDEKSRTMSRSGSFRDGFEEESWEKSSVDNFVSRLHSSLHFSLPLFHHARYELVHGSSLSLVSSTSSVYSTPEEKCQSEIRKLRRELDASQEKVSALTTQLTANAHLVAAFEQSLGNMTIRLQSLTMTAEQKDSELNELRKTIELLKKQNAAAQAAINGVINTPELNCKGNGTAQSADLRIRRQHSSDSVSSINSATSHSSVGSNIESDSKKKKRKNWVNELRSSFKQAFGKKKSPKSASSHSDIEEMTDSSLPSSPKLPHNGSTGSTPLLRNSHSNSLISECMDSEAETVMQLRNELRDKEMKLTDIRLEALSSAHQLDQLREAMNRMQSEIEKLKAENDRLKSESQGSGCSRAPSQVSISASPRQSMGLSQHSLNLTESTSLDMLLDDTGECSARKEGGRHVKIVVSFQEEMKWKEDSRPHLFLIGCIGVSGKTKWDVLDGVVRRLFKEYIIHVDPVSQLGLNSDSVLGYSIGEIKRSNTSETPELLPCGYLVGENTTISVTVKGLAENSLDSLVFESLIPKPILQRYVSLLIEHRRIILSGPSGTGKTYLANRLSEYIVLREGRELTDGVIATFNVDHKSSKELRQYLSNLADQCNSENNAVDMPLVIILDNLHHVSSLGEIFNGLLNCKYHKCPYIIGTMNQATSSTPNLQLHHNFRWVLCANHTEPVKGFLGRFLRRKLMETEISGRVRNMELVKIIDWIPKVWHHLNRFLEAHSSSDVTIGPRLFLSCPIDVDGSRVWFTDLWNYSIIPYLLEAVREGLQLYGRRAPWEDPAKWVMDTYPWAASPQQHEWPPLLQLRPEDVGFDGYSMPREGSTSKQMPPSDAEGDPLIKKQIKMSLTTTEYCGRDPSQYRETRKINYEDWKRKKFNSLYSQVTLCI

SEQ ID NO: 1615 - protein, 2427 aa, Artificial Sequence
  Synthetic polypeptide
MAIDLYCGLACLWGIHEPRQIYTDWANHYLAKSGHKRLIRDLQQDVTDGVLLAQIIQVVANEKIEDINGCPKNRSQMIENIDACLNFLAAKGINIQGLSAEEIRNGNLKAILGLFFSLSRYKQQQQQPQKQHLSSPLPPAVSQVAGAPSQCQAGTPQQQVPVTPQAPCQPHQPAPHQQSKAQAEMQSSASSKDSSQSKIIRFTLGQKKISRLPGPTARVSAAGSEAKTRGGSTTANNRRSQSFNNYDKSKPVTSPPPPPSSHEKEPLASSASSHPGMSDNAPASLESGSSSTPTNCSTSSAIPQPGAATKPWRSKSLSVKHSATVSMLSVKPPGPEAPRPTPEAMKPAPNNQKSMLEKLKLFNSKGGSKAGEGPGSRDTSCERLETLPSFEESEELEAASRMLTTVGPASSSPKIALKGIAQRTFSRALTNKKSSLKGNEKEKEKQQREKDKEKSKDLAKRASVTERLDLKEEPKEDPSGAAVPEMPKKSSKIASFIPKGGKLNSAKKEPMAPSHSGIPKPGMKSMPGKSPSAPAPSKEGERSRSGKLSSGLPQQKPQLDGRHSSSSSSLASSEGKGPGGTTLNHSISSQTVSGSVGTTQTTGSNTVSVQLPQPQQQYNHPNTATVAPFLYRSQTDTEGNVTAESSSTGVSVEPSHFTKTGQPALEELTGEDPEARRLRTVKNIADLRQNLEETMSSLRGTQVTHSTLETTFDTNVTTEMSGRSILSLTGRPTPLSWRLGQSSPRLQAGDAPSMGNGYPPRANASRFINTESGRYVYSAPLRRQLASRGSSVCHVDVSDKAGDEMDLEGISMDAPGYMSDGDVLSKNIRTDDITSGYMTDGGLGLYTRRLNRLPDGMAVVRETLQRNTSLGLGDADSWDDSSSVSSGISDTIDNLSTDDINTSSSISSYANTPASSRKNLDVQTDAEKHSQVERNSLWSGDDVKKSDGGSDSGIKMEPGSKWRRNPSDVSDESDKSTSGKKNPVISQTGSWRRGMTAQVGITMPRTKPSAPAGALKTPGTGKTDDAKVSEKGRLSPKASQVKRSPSDAGRSSGDESKKPLPSSSRTPTANANSFGFKKQSGSAAGLAMITASGVTVTSRSATLGKIPKSSALVSRSAGRKSSMDGAQNQDDGYLALSSRTNLQYRSLPRPSKSNSRNGAGNRSSTSSIDSNISSKSAGLPVPKLREPSKTALGSSLPGLVNQTDKEKGISSDNESVASCNSVKVNPAAQPVSSPAQTSLQPGAKYPDVASPTLRRLFGGKPTKQVPIATAENMKNSVVISNPHATMTQQGNLDSPSGSGVLSSGSSSPLYSKNVDLNQSPLASSPSSAHSAPSNSLTWGTNASSSSAVSKDGLGFQSVSSLHTSCESIDISLSSGGVPSHNSSTGLIASSKDDSLTPFVRTNSVKTTLSESPLSSPAASPKFCRSTLPRKQDSDPHLDRNTLPKKGLRYTPTSQLRTQEDAKEWLRSHSAGGLQDTAANSPFSSGSSVTSPSGTRFNFSQLASPTTVTQMSLSNPTMLRTHSLSNADGQYDPYTDSRFRNSSMSLDEKSRTMSRSGSFRDGFEEESWEKSSVDNFVSRLHSSLHFSLPLFHHARYELVHGSSLSLVSSTSSVYSTPEEKCQSEIRKLRRELDASQEKVSALTTQLTANAHLVAAFEQSLGNMTIRLQSLTMTAEQKDSELNELRKTIELLKKQNAAAQAAINGVINTPELNCKGNGTAQSADLRIRRQHSSDSVSSINSATSHSSVGSNIESDSKKKKRKNWVNELRSSFKQAFGKKKSPKSASSHSDIEEMTDSSLPSSPKLPHNGSTGSTPLLRNSHSNSLISECMDSEAETVMQLRNELRDKEMKLTDIRLEALSSAHQLDQLREAMNRMQSEIEKLKAENDRLKSESQGSGCSRAPSQVSISASPRQSMGLSQHSLNLTESTSLDMLLDDTGECSARKEGGRHVKIVVSFQEEMKWKEDSRPHLFLIGCIGVSGKTKWDVLDGVVRRLFKEYIIHVDPVSQLGLNSDSVLGYSIGEIKRSNTSETPELLPCGYLVGENTTISVTVKGLAENSLDSLVFESLIPKPILQRYVSLLIEHRRIILSGPSGTGKTYLANRLSEYIVLREGRELTDGVIATFNVDHKSSKELRQYLSNLADQCNSENNAVDMPLVIILDNLHHVSSLGEIFNGLLNCKYHKCPYIIGTMNQATSSTPNLQLHHNFRWVLCANHTEPVKGFLGRFLRRKLMETEISGRVRNMELVKIIDWIPKVWHHLNRFLEAHSSSDVTIGPRLFLSCPIDVDGSRVWFTDLWNYSIIPYLLEAVREGLQLYGRRAPWEDPAKWVMDTYPWAASPQQHEWPPLLQLRPEDVGFDGYSMPREGSTSKQMPPSDAEGDPLIKKQIKMSLTTTEYCGRDPSQYRETRKINYEDWKRKKFNSLYSQVTLCI

SEQ ID NO: 1616 - protein, 1501 aa, Artificial Sequence
  Synthetic polypeptide
MLWPRNLTSWDDSSSVSSGISDTIDNLSTDDINTSSSISSYANTPASSRKNLDVQTDAEKHSQVERNSLWSGDDVKKSDGGSDSGIKMEPGSKWRRNPSDVSDESDKSTSGKKNPVISQTGSWRRGMTAQVGITMPRTKPSAPAGALKTPGTGKTDDAKVSEKGRLSPKASQVKRSPSDAGRSSGDESKKPLPSSSRTPTANANSFGFKKQSGSAAGLAMITASGVTVTSRSATLGKIPKSSALVSRSAGRKSSMDGAQNQDDGYLALSSRTNLQYRSLPRPSKSNSRNGAGNRSSTSSIDSNISSKSAGLPVPKLREPSKTALGSSLPGLVNQTDKEKGISSDNESVASCNSVKVNPAAQPVSSPAQTSLQPGAKYPDVASPTLRRLFGGKPTKQVPIATAENMKNSVVISNPHATMTQQGNLDSPSGSGVLSSGSSSPLYSKNVDLNQSPLASSPSSAHSAPSNSLTWGTNASSSSAVSKDGLGFQSVSSLHTSCESIDISLSSGGVPSHNSSTGLIASSKDDSLTPFVRTNSVKTTLSESDPHLDRNTLPKKGLRYTPTSQLRTQEDAKEWLRSHSAGGLQDTAANSPFSSGSSVTSPSGTRFNFSQLASPTTVTQMSLSNPTMLRTHSLSNADGQYDPYTDSRFRNSSMSLDEKSRTMSRSGSFRDGFEEVHGSSLSLVSSTSSVYSTPEEKCQSEIRKLRRELDASQEKVSALTTQLTANAHLVAAFEQSLGNMTIRLQSLTMTAEQKDSELNELRKTIELLKKQNAAAQAAINGVINTPELNCKGNGTAQSADLRIRRQHSSDSVSSINSATSHSSVGSNIESDSKKKKRKNWLRSSFKQAFGKKKSPKSASSHSDIEEMTDSSLPSSPKLPHNGSTGSTPLLRNSHSNSLISECMDSEAETVMQLRNELRDKEMKLTDIRLEALSSAHQLDQLREAMNRMQSEIEKLKAENDRLKSESQGSGCSRAPSQVSISASPRQSMGLSQHSLNLTESTSLDMLLDDTGECSARKEGGRHVKIVVSFQEEMKWKEDSRPHLFLIGCIGVSGKTKWDVLDGVVRRLFKEYIIHVDPVSQLGLNSDSVLGYSIGEIKRSNTSETPELLPCGYLVGENTTISVTVKGLAENSLDSLVFESLIPKPILQRYVSLLIEHRRIILSGPSGTGKTYLANRLSEYIVLREGRELTDGVIATFNVDHKSSKELRQYLSNLADQCNSENNAVDMPLVIILDNLHHVSSLGEIFNGLLNCKYHKCPYIIGTMNQATSSTPNLQLHHNFRWVLCANHTEPVKGFLGRFLRRKLMETEISGRVRNMELVKIIDWIPKVWHHLNRFLEAHSSSDVTIGPRLFLSCPIDVDGSRVWFTDLWNYSIIPYLLEAVREGLQLYGRRAPWEDPAKWVMDTYPWAASPQQHEWPPLLQLRPEDVGFDGYSMPREGSTSKQMPPSDAEGDPLIKKQIKMSLTTTEYCGRDPSQYRETRKINYEDWKRKKFNSLYSQVTLCI

SEQ ID NO: 1617 - protein, 29 aa, Artificial Sequence
  Synthetic polypeptide
MGRTWCGMWRRRRPGRRSCMKTQREGSHL

SEQ ID NO: 1618 - protein, 37 aa, Artificial Sequence
  Synthetic polypeptide
MASFLVWPLRTALRGGKSWAGPGVGCGGDGARGGGAV

SEQ ID NO: 1619 - protein, 21 aa, Artificial Sequence
  Synthetic polypeptide
MGRTWCGMWRRRRPGRRRTAV

SEQ ID NO: 1620 - protein, 96 aa, Artificial Sequence
  Synthetic polypeptide
MASFLVWPLRTALRGGKSWAGPGVGCGGDGARGGGGQLYEDTERRQPSVSQEESPHQDWNQQHLDIGLPASRTARNKHLLFTCPACSASLWQIGAN

SEQ ID NO: 1621 - protein, 505 aa, Artificial Sequence
  Synthetic polypeptide
MAAASSPPRAERKRWGWGRLPGARRGSAGLAKKCPFSLELAEGGPAGGALYAPIAPGAPGPAPPASPAAPAAPPVASDLGPRPPVSLDPRVSIYSTRRPVLARTHVQGRVYNFLERPTGWKCFVYHFAVFLIVLVCLIFSVLSTIEQYAALATGTLFWMEIVLVVFFGTEYVVRLWSAGCRSKYVGLWGRLRFARKPISIIDLIVVVASMVVLCVGSKGQVFATSAIRGIRFLQILRMLHVDRQGGTWRLLGSVVFIHRQELITTLYIGFLGLIFSSYFVYLAEKDAVNESGRVEFGSYADALWWGVVTVTTIGYGDKVPQTWVGKTIASCFSVFAISFFALPAGILGSGFALKVQQKQRQKHFNRQIPAAASLIQTAWRCYAAENPDSSTWKIYIRKAPRSHTLLSPSPKPKKSVVVKKKKFKLDKDNGVTPGEKMLTVPHITCDPPEERRLDHFSVDGYDSSGHKKTTVHEPESESSPDAESASALTLDFQACKIAKNKFLCL

SEQ ID NO: 1622 - protein, 378 aa, Artificial Sequence
  Synthetic polypeptide
MDFLIVLVCLIFSVLSTIEQYAALATGTLFWMEIVLVVFFGTEYVVRLWSAGCRSKYVGLWGRLRFARKPISIIDLIVVVASMVVLCVGSKGQVFATSAIRGIRFLQILRMLHVDRQGGTWRLLGSVVFIHRQELITTLYIGFLGLIFSSYFVYLAEKDAVNESGRVEFGSYADALWWGVVTVTTIGYGDKVPQTWVGKTIASCFSVFAISFFALPAGILGSGFALKVQQKQRQKHFNRQIPAAASLIQTAWRCYAAENPDSSTWKIYIRKAPRSHTLLSPSPKPKKSVVVKKKKFKLDKDNGVTPGEKMLTVPHITCDPPEERRLDHFSVDGYDSSGHKKTTVHEPESESSPDAESASALTLDFQACKIAKNKFLCL

SEQ ID NO: 1623 - protein, 249 aa, Artificial Sequence
  Synthetic polypeptide
MLRYPYFCRMYKECLSCWLESGIPNLGVWPNRIHTTAEKYREYEAREQTDQTQAQELHRSQDRDFETMAKLHIPVMVDEVVHCLSPQKGQIFLDMTFGSGGHTKAILQKESDIVLYALDRDPTAYALAEHLSELYPKQIRAMLGQFSQAEALLMKAGVQPGTFDGVLMDLGCSSMQLDTPERGFSLRKDGPLDMRMDGGRSTGTCIYPKNIRGGEACQENRFSNCSGTQHLPHHQNPAACQHRCSEWIS

SEQ ID NO: 1624 - protein, 266 aa, Artificial Sequence
  Synthetic polypeptide
MLRYPYFCRMYKECLSCWLESGIPNLGVWPNRIHTTAEKYREYEAREQTDQTQAQELHRSQDRDFETMAKLHIPVMVDEVVHCLSPQKGQIFLDMTFGSGGHTKAILQKESDIVLYALDRDPTAYALAEHLSELYPKQIRAMLGQFSQAEALLMKAGVQPGTFDGVLMDLGCSSMQLDTPERGFSLRKDGPLDMRMDGGRYPDMPTAADVVNALDQQALASILRTYGEEKHAKKIASAIVQARSIYPITRTQQLASIVAVSGSHEI

SEQ ID NO: 1625 - protein, 87 aa, Artificial Sequence
  Synthetic polypeptide
MQGARAPRDQGRSPGRMSALGRSSVILLTYVLAATELTCLFMQFSIVPTLLKRRPLCSQQTHEKMLIITGHQRNASQNHNEIPSHTS

SEQ ID NO: 1626 - protein, 52 aa, Artificial Sequence
  Synthetic polypeptide
MQGARAPRDQGRSPGRMSALGRSSVILLTYVLAATELTCLFMQFSIVPPTDT

SEQ ID NO: 1627 - protein, 108 aa, Artificial Sequence
  Synthetic polypeptide
MTLELGGKVTIECAKNNFQAQLEFKLKPFFGGSTSINQISGKITSGEEVLASLSGHWDRDVFIKEEGSGSSALFWTPSGEVRRQRLRQHTVPLEEQTELESERQSRRG

SEQ ID NO: 1628 - protein, 654 aa, Artificial Sequence
  Synthetic polypeptide
MKEEAFLRRRFSLCPPSSTPQKVDPRKLTRNLLLSGDNELYPLSPGKDMEPNGPSLPRDEGPPTPSSATKVPPAEYRLCNGSDKECVSPTARVTKKETLKAQKENYRQEKKRATRQLLSALTDPSVVIMADSLKIRGTLKSWTKLWCVLKPGVLLIYKTPKVGQWVGTVLLHCCELIERPSKKDGFCFKLFHPLDQSVWAVKGPKGESVGSITQPLPSSYLIFRAASESDGRCWLDALELALRCSSLLRLGTCKPGRDGEPGTSPDASPSSLCGLPASATVHPDQDLFPLNGSSLENDAFSDKSERENPEESDTETQDHSRKTESGSDQSETPGAPVRRGTTYVEQVQEELGELGEASQVETVSEENKSLMWTLLKQLRPGMDLSRVVLPTFVLEPRSFLNKLSDYYYHADLLSRAAVEEDAYSRMKLVLRWYLSGFYKKPKGIKKPYNPILGETFRCCWFHPQTDSRTFYIAEQVSHHPPVSAFHVSNRKDGFCISGSITAKSRFYGNSLSALLDGKATLTFLNRAEDYTLTMPYAHCKGILYGTMTLELGGKVTIECAKNNFQAQLEFKLKPFFGGSTSINQISGKITSGEEVLASLSGHWDRDVFIKEEGSGSSALFWTPSGEVRRQRLRQHTVPLEEQTELESERQSRRG

SEQ ID NO: 1629 - protein, 586 aa, Artificial Sequence
  Synthetic polypeptide
MKEEAFLRRRFSLCPPSSTPQKVDPRKLTRNLLLSGDNELYPLSPGKDMEPNGPSLPRDEGPPTPSSATKVPPAEYRLCNGSDKECVSPTARVTKKETLKAQKENYRQEKKRATRQLLSALTDPSVVIMADSLKGPKGESVGSITQPLPSSYLIFRAASESDGRCWLDALELALRCSSLLRLGTCKPGRDGEPGTSPDASPSSLCGLPASATVHPDQDLFPLNGSSLENDAFSDKSERENPEESDTETQDHSRKTESGSDQSETPGAPVRRGTTYVEQVQEELGELGEASQVETVSEENKSLMWTLLKQLRPGMDLSRVVLPTFVLEPRSFLNKLSDYYYHADLLSRAAVEEDAYSRMKLVLRWYLSGFYKKPKGIKKPYNPILGETFRCCWFHPQTDSRTFYIAEQVSHHPPVSAFHVSNRKDGFCISGSITAKSRFYGNSLSALLDGKATLTFLNRAEDYTLTMPYAHCKGILYGTMTLELGGKVTIECAKNNFQAQLEFKLKPFFGGSTSINQISGKITSGEEVLASLSGHWDRDVFIKEEGSGSSALFWTPSGEVRRQRLRQHTVPLEEQTELESERQSRRG

SEQ ID NO: 1630 - protein, 207 aa, Artificial Sequence
  Synthetic polypeptide
YNPILGETFRCCWFHPQTDSRTFYIAEQVSHHPPVSAFHVSNRKDGFCISGSITAKSRFYGNSLSALLDGKATLTFLNRAEDYTLTMPYAHCKGILYGTMTLELGGKVTIECAKNNFQAQLEFKLKPFFGGSTSINQISGKITSGEEVLASLSGHWDRDVFIKEEGSGSSALFWTPSGEVRRQRLRQHTVPLEEQTELESERQSRRG

SEQ ID NO: 1631 - protein, 565 aa, Artificial Sequence
  Synthetic polypeptide
MEPNGPSLPRDEGPPTPSSATKVPPAEYRLCNGSDKECVSPTARVTKKETLKAQKENYRQEKKRATRQLLSALTDPSVVIMADSLKIRGTLKSWTKLWCVLKPGVLLIYKTPKGPKGESVGSITQPLPSSYLIFRAASESDGRCWLDALELALRCSSLLRLGTCKPGRDGEPGTSPDASPSSLCGLPASATVHPDQDLFPLNGSSLENDAFSDKSERENPEESDTETQDHSRKTESGSDQSETPGAPVRRGTTYVEQVQEELGELGEASQVETVSEENKSLMWTLLKQLRPGMDLSRVVLPTFVLEPRSFLNKLSDYYYHADLLSRAAVEEDAYSRMKLVLRWYLSGFYKKPKGIKKPYNPILGETFRCCWFHPQTDSRTFYIAEQVSHHPPVSAFHVSNRKDGFCISGSITAKSRFYGNSLSALLDGKATLTFLNRAEDYTLTMPYAHCKGILYGTMTLELGGKVTIECAKNNFQAQLEFKLKPFFGGSTSINQISGKITSGEEVLASLSGHWDRDVFIKEEGSGSSALFWTPSGEVRRQRLRQHTVPLEEQTELESERQSRRG

SEQ ID NO: 1632 - protein, 285 aa, Artificial Sequence
  Synthetic polypeptide
MCVPHRQGHQEGDSQGAEGELPAGEEPRSFLNKLSDYYYHADLLSRAAVEEDAYSRMKLVLRWYLSGFYKKPKGIKKPYNPILGETFRCCWFHPQTDSRTFYIAEQVSHHPPVSAFHVSNRKDGFCISGSITAKSRFYGNSLSALLDGKATLTFLNRAEDYTLTMPYAHCKGILYGTMTLELGGKVTIECAKNNFQAQLEFKLKPFFGGSTSINQISGKITSGEEVLASLSGHWDRDVFIKEEGSGSSALFWTPSGEVRRQRLRQHTVPLEEQTELESERQSRRG

SEQ ID NO: 1633 - protein, 61 aa, Artificial Sequence
  Synthetic polypeptide
MMAVEQMPKKDWYSILGADPSANISDLKQKYQKLILMIQHNPPLQRMQRAWCHLGSRDTGL

SEQ ID NO: 1634 - protein, 60 aa, Artificial Sequence
  Synthetic polypeptide
MAVEQMPKKDWYSILGADPSANISDLKQKYQKLILMIQHNPPLQRMQRAWCHLGSRDTGL

SEQ ID NO: 1635 - protein, 7 aa, Artificial Sequence
  Synthetic polypeptide
HLQIYQT

SEQ ID NO: 1636 - protein, 390 aa, Artificial Sequence
  Synthetic polypeptide
MAAVATCGSVAASTGSAVATASKSNVTSFQRRGPRASVTNDSGPRLVSIAGTRPSVRNGQLLVSTGLPALDQLLGGGLAVGTVLLIEEDKYNIYSPLLFKYFLAEGIVNGHTLLVASAKEDPANILQELPAPLLDDKCKKEFDEDVYNHKTPESNIKMKIAWRYQLLPKMEIGPVSSSRFGHYYDASKRMPQELIEASNWHGFFLPEKISSTLKVEPCSLTPGYTKLLQFIQNIIYEEGFDGSNPQKKQRNILRIGIQNLGSPLWGDDICCAENGGNSHSLTKFLYVLRGLLRTSLSACIITMPTHLIQNKAIIARVTTLSDVVVGLESFIGSERETNPLYKDYHGLIHIRQIPRLNNLICDESDVKDLAFKLKRKLFTIECITKLRSYD

SEQ ID NO: 1637 - protein, 391 aa, Artificial Sequence
  Synthetic polypeptide
MAAVATCGSVAASTGSAVATASKSNVTSFQRRGPRASVTNDSGPRLVSIAGTRPSVRNGQLLVSTGLPALDQLLGGGLAVGTVLLIEEDKYNIYSPLLFKYFLAEGIVNGHTLLVASAKEDPANILQELPAPLLDDKCKKEFDEDVYNHKTPESNIKMKIAWRYQLLPKMEQIGPVSSSRFGHYYDASKRMPQELIEASNWHGFFLPEKISSTLKVEPCSLTPGYTKLLQFIQNIIYEEGFDGSNPQKKQRNILRIGIQNLGSPLWGDDICCAENGGNSHSLTKFLYVLRGLLRTSLSACIITMPTHLIQNKAIIARVTTLSDVVVGLESFIGSERETNPLYKDYHGLIHIRQIPRLNNLICDESDVKDLAFKLKRKLFTIECITKLRSYD

SEQ ID NO: 1638 - protein, 22 aa, Artificial Sequence
  Synthetic polypeptide
MSVPAFIDISEEDQAEHGGSRL

SEQ ID NO: 1639 - protein, 208 aa, Artificial Sequence
  Synthetic polypeptide
MSVPAFIDISEEDQAAELRAYLKSKGAEISEENSEGGLHVDLAQIIEACDVCLKEDDKDVESVMNSVVSLLLILEPDKQEALIESLCEKLVKFREGERPSLRLQLLSNLFHGMDKNTPVRYTVYCSLIKVAASCGAIQYIPTELDQVRKWISDWNLTTEKKHTLLRLLYEALVDCKKSDAASKVMVELLGSYTEDNASQARVDAHRLL

SEQ ID NO: 1640 - protein, 76 aa, Artificial Sequence
  Synthetic polypeptide
MSVPAFIDISEEDQVRKWISDWNLTTEKKHTLLRLLYEALVDCKKSDAASKVMVELLGSYTEDNASQARVDAHRLL

SEQ ID NO: 1641 - protein, 145 aa, Artificial Sequence
  Synthetic polypeptide
MNSVVSLLLILEPDKQEALIESLCEKLVKFREGERPSLRLQLLSNLFHGMDKNTPVRYTVYCSLIKVAASCGAIQYIPTELDQVRKWISDWNLTTEKKHTLLRLLYEALVDCKKSDAASKVMVELLGSYTEDNASQARVDAHRLL

SEQ ID NO: 1642 - protein, 49 aa, Artificial Sequence
  Synthetic polypeptide
KKHTLLRLLYEALVDCKKSDAASKVMVELLGSYTEDNASQARVDAHRLL

SEQ ID NO: 1643 - protein, 44 aa, Artificial Sequence
  Synthetic polypeptide
NLPRILPSPWSNRGLKGDKKQPMCQRTQYHLRYSQQQQLPSHCF

SEQ ID NO: 1644 - protein, 1238 aa, Artificial Sequence
  Synthetic polypeptide
MDHTASQNAQDLIGIPHLGVSGSSTKWHSELSPTEGPHSAGSSTPGFLSPMAELSHPSPPPPALGSLLQLPDGSPSWSMLEVASGPASTQQIKAGVPGRVHNGVSLPTFKNTETATHEAEPPLFQTAESGAIEMTSRKLASATANDSANPLHLSAAPENSRGPALSAEHTSSLVPSLHITTLGQEQAILSGAVPASPSTGTADFPSILTFLQPTENHASPSPVPEMPTLPAEGSDGSPPATRDLLLSSKVPNLLSTSWTFPRWKKDSVTAILGKNEEANVTIPLQAFPRKEVLSLHTVNGFVSDFSTGSVSSPIITAPRTNPLPSGPPLPSILSIQATQTVFPSLGFSSTKPEAYAAAVDHSGLPASASKQVRASPSSMDVYDSLTIGDMKKPATTDVFWSSLSAETGSLSTESIISGLQQQTNYDLNGHTISTTSWETHLAPTAPPNGLTSAADAIKSQDFKDTAGHSVTAEGFSIQDLVLGTSIEQPVQQSDMTMVGSHIDLWPTSNNNHSRDFQTAEVAYYSPTTRHSVSHPQLQLPNQPAHPLLLTSPGPTSTGSLQEMLSDGTDTGSEISSDINSSPERNASTPFQNILGYHSAAESSISTSVFPRTSSRVLRASQHPKKWTADTVSSKVQPTAAAAVTLFLRKSSPPALSAALVAKGTSSSPLAVASGPAKSSSMTTLAKNVTNKAASGPKRTPGAVHTAFPFTPTYMYARTGHTTSTHTAMQGNMDTASGLLSTTYLPRKPQAMHTGLPNPTNLEMPRASTPRPLTVTAALTSITASVKATRLPPLRAENTDAVLPAASAAVVTTGKMASNLECQMSSKLLVKTVLFLTQRRVQISESLKFSIAKGLTQALRKAFHQNDVSAHVDILEYSHNVTVGYYATKGKLVYLPAVVIEMLGVYGVSNVTADLKQHTPHLQSVAVLASPWNPQPAGYFQLKTVLQFVSQADNIQSCKFAQTMEQRLQKAFQDAERKVLNTKSNLTIQIVSTSNASQAVTLVYVVGNQSTFLNGTVASSLLSQLSAELVGFYLTYPPLTIAEPLEYPNLDISETTRDYWVITVLQGVDNSLVGLHNQSFARVMEQRLAQLFMMSQQQGRRFKRATTLGSYTVQMVKMQRVPGPKDPAELTYYTLYNGKPLLGTAAAKILSTIDSQRMALTLHHVVLLQADPVVKNPPNNLWIIAAVLAPIAVVTVIIIIITAVLCRKNKNDFKPDTMINLPQRAKATQSVIFCYNSPN

SEQ ID NO: 1645 - protein, 1244 aa, Artificial Sequence
  Synthetic polypeptide
MDHTASQNAQDLIGIPHLGVSGSSTKWHSELSPTEGPHSAGSSTPGFLSPMAELSHPSPPPPALGSLLQLPDGSPSWSMLEVASGPASTQQIKAGVPGRVHNGVSLPTFKNTETATHEAEPPLFQTAESGAIEMTSRKLASATANDSANPLHLSAAPENSRGPALSAEHTSSLVPSLHITTLGQEQAILSGAVPASPSTGTADFPSILTFLQPTENHASPSPVPEMPTLPAEGSDGSPPATRDLLLSSKVPNLLSTSWTFPRWKKDSVTAILGKNEEANVTIPLQAFPRKEVLSLHTVNGFVSDFSTGSVSSPIITAPRTNPLPSGPPLPSILSIQATQTVFPSLGFSSTKPEAYAAAVDHSGLPASASKQVRASPSSMDVYDSLTIGDMKKPATTDVFWSSLSAETGSLSTESIISGLQQQTNYDLNGHTISTTSWETHLAPTAPPNGLTSAADAIKSQDFKDTAGHSVTAEGFSIQDLVLGTSIEQPVQQSDMTMVGSHIDLWPTSNNNHSRDFQTAEVAYYSPTTRHSVSHPQLQLPNQPAHPLLLTSPGPTSTGSLQEMLSDGTDTGSEISSDINSSPERNASTPFQNILGYHSAAESSISTSVFPRTSSRVLRASQHPKKWTGAATNAADTVSSKVQPTAAAAVTLFLRKSSPPALSAALVAKGTSSSPLAVASGPAKSSSMTTLAKNVTNKAASGPKRTPGAVHTAFPFTPTYMYARTGHTTSTHTAMQGNMDTASGLLSTTYLPRKPQAMHTGLPNPTNLEMPRASTPRPLTVTAALTSITASVKATRLPPLRAENTDAVLPAASAAVVTTGKMASNLECQMSSKLLVKTVLFLTQRRVQISESLKFSIAKGLTQALRKAFHQNDVSAHVDILEYSHNVTVGYYATKGKLVYLPAVVIEMLGVYGVSNVTADLKQHTPHLQSVAVLASPWNPQPAGYFQLKTVLQFVSQADNIQSCKFAQTMEQRLQKAFQDAERKVLNTKSNLTIQIVSTSNASQAVTLVYVVGNQSTFLNGTVASSLLSQLSAELVGFYLTYPPLTIAEPLEYPNLDISETTRDYWVITVLQGVDNSLVGLHNQSFARVMEQRLAQLFMMSQQQGRRFKRATTLGSYTVQMVKMQRVPGPKDPAELTYYTLYNGKPLLGTAAAKILSTIDSQRMALTLHHVVLLQADPVVKNPPNNLWIIAAVLAPIAVVTVIIIIITAVLCRKNKNDFKPDTMINLPQRAKATQSVIFCYNSPN

SEQ ID NO: 1646 - protein, 366 aa, Artificial Sequence
  Synthetic polypeptide
MVLSLKEGAREEDLDAVEAQIGCKLPDDYRCSYRIHNGQKLVVPGLLGSMALSNHYRSEDLLDVDTAAGGFQQRQGLKYCLPLTFCIHTGLSQYIAVEAAEGRNKNEVFYQCPDQMARNPAAIDMFIIGATFTDWFTSYVKNVVSGGFPIIRDQIFRYVHDPECVATTGDITVSVSTSFLPELSSVHPPHYFFTYRIRIEMSKDALPEKACQLDSRYWRITNAKGDVEEVQGPGVVGEFPIISPGRVYEYTSCTTFSTTSGYMEGYYTFHFLYFKDKIFNVAIPRFHMACPTFRVSIARLPRVLSFSPGTCVFDTLSHHVRSPATMKPSCRRDHVETSHRDRGRHPGAPAVSDSRYLDHPARVPDM

SEQ ID NO: 1647 - protein, 479 aa, Artificial Sequence
  Synthetic polypeptide
MAAMETETAPLTLESLPTDPLLLILSFLDYRDLINCCYVSRRLSQLSSHDPLWRRHCKKYWLISEEEKTQKNQCWKSLFIDTYSDVGRYIDHYAAIKKAWDDLKKYLEPRCPRMVLSLKEGAREEDLDAVEAQIGCKLPDDYRCSYRIHNGQKLVVPGLLGSMALSNHYRSEDLLDVDTAAGGFQQRQGLKYCLPLTFCIHTGLSQYIAVEAAEGRNKNEVFYQCPDQMARNPAAIDMFIIGATFTDWFTSYVKNVVSGGFPIIRDQIFRYVHDPECVATTGDITVSVSTSFLPELSSVHPPHYFFTYRIRIEMSKDALPEKACQLDSRYWRITNAKGDVEEVQGPGVVGEFPIISPGRVYEYTSCTTFSTTSGYMEGYYTFHFLYFKDKIFNVAIPRFHMACPTFRVSIARLPRVLSFSPGTCVFDTLSHHVRSPATMKPSCRRDHVETSHRDRGRHPGAPAVSDSRYLDHPARVPDM

SEQ ID NO: 1648 - protein, 474 aa, Artificial Sequence
  Synthetic polypeptide
MAAMETETAPLTLESLPTDPLLLILSFLDYRDLINRRLSQLSSHDPLWRRHCKKYWLISEEEKTQKNQCWKSLFIDTYSDVGRYIDHYAAIKKAWDDLKKYLEPRCPRMVLSLKEGAREEDLDAVEAQIGCKLPDDYRCSYRIHNGQKLVVPGLLGSMALSNHYRSEDLLDVDTAAGGFQQRQGLKYCLPLTFCIHTGLSQYIAVEAAEGRNKNEVFYQCPDQMARNPAAIDMFIIGATFTDWFTSYVKNVVSGGFPIIRDQIFRYVHDPECVATTGDITVSVSTSFLPELSSVHPPHYFFTYRIRIEMSKDALPEKACQLDSRYWRITNAKGDVEEVQGPGVVGEFPIISPGRVYEYTSCTTFSTTSGYMEGYYTFHFLYFKDKIFNVAIPRFHMACPTFRVSIARLPRVLSFSPGTCVFDTLSHHVRSPATMKPSCRRDHVETSHRDRGRHPGAPAVSDSRYLDHPARVPDM

SEQ ID NO: 1649 - protein, 166 aa, Artificial Sequence
  Synthetic polypeptide
MSKDALPEKACQLDSRYWRITNAKGDVEEVQGPGVVGEFPIISPGRVYEYTSCTTFSTTSGYMEGYYTFHFLYFKDKIFNVAIPRFHMACPTFRVSIARLPRVLSFSPGTCVFDTLSHHVRSPATMKPSCRRDHVETSHRDRGRHPGAPAVSDSRYLDHPARVPDM

SEQ ID NO: 1650 - protein, 307 aa, Artificial Sequence
  Synthetic polypeptide
MQSGGAEGSPGAGRTGRGPGSGKAPPAEISSGAPDFPGGDPIKILMPSLSPTMEEGNIVKWLKKEGEAVSAGDALCEIETDKAVVTLDASDDGILAKIVVEEGSKNIRLGSLIGLIVEEGEDWKHVEIPKDVGPPPPVSKPSEPRPSPEPQISIPVKKEHIPGTLRFRLSPAARNILEKHSLDASQGTATGPRGIFTKEDALKLVQLKQTGKITESRPTPAPTATPTAPSPLQATAGPSYPRPVIPPVSTPGQPNAVGTFTEIPASNIRRVIAKRLTESKSTVPHAYATADCDLGAVLKVRQDLVKG

SEQ ID NO: 1651 - protein, 322 aa, Artificial Sequence
  Synthetic polypeptide
MAASWRLGCDPRLLRYLVGFPGRRSVGLVKGALGWSVSRGANWRWFHSTQWLRGDPIKILMPSLSPTMEEGNIVKWLKKEGEAVSAGDALCEIETDKAVVTLDASDDGILAKIVVEEGSKNIRLGSLIGLIVEEGEDWKHVEIPKDVGPPPPVSKPSEPRPSPEPQISIPVKKEHIPGTLRFRLSPAARNILEKHSLDASQGTATGPRGIFTKEDALKLVQLKQTGKITESRPTPAPTATPTAPSPLQATAGPSYPRPVIPPVSTPGQPNAVGTFTEIPASNIRRVIAKRLTESKSTVPHAYATADCDLGAVLKVRQDLVKG

SEQ ID NO: 1652 - protein, 419 aa, Artificial Sequence
  Synthetic polypeptide
MQSGGAEGSPGAGRTGRGPGSGKAPPAEISSGAPDFPGGDPIKILMPSLSPTMEEGNIVKWLKKEGEAVSAGDALCEIETDKAVVTLDASDDGILAKIVVEEGSKNIRLGSLIGLIVEEGEDWKHVEIPKDVGPPPPVSKPSEPRPSPEPQISIPVKKEHIPGTLRFRLSPAARNILEKHSLDASQGTATGPRGIFTKEDALKLVQLKQTGKITESRPTPAPTATPTAPSPLQATAGPSYPRPVIPPVSTPGQPNAVGTFTEIPASNIRRVIAKRLTESKSTVPHAYATADCDLGAVLKVRQDLVKDDIKVSVNDFIIKAAAVTLKQMPDVNVSWDGEGPKQLPFIDISVAVATDKGLLTPIIKDAAAKGIQEIADSVKLLGRLRNKNHLNPGGRGCSEPRLRHRTPAWQQNETPSQKR

SEQ ID NO: 1653 - protein, 434 aa, Artificial Sequence
  Synthetic polypeptide
MAASWRLGCDPRLLRYLVGFPGRRSVGLVKGALGWSVSRGANWRWFHSTQWLRGDPIKILMPSLSPTMEEGNIVKWLKKEGEAVSAGDALCEIETDKAVVTLDASDDGILAKIVVEEGSKNIRLGSLIGLIVEEGEDWKHVEIPKDVGPPPPVSKPSEPRPSPEPQISIPVKKEHIPGTLRFRLSPAARNILEKHSLDASQGTATGPRGIFTKEDALKLVQLKQTGKITESRPTPAPTATPTAPSPLQATAGPSYPRPVIPPVSTPGQPNAVGTFTEIPASNIRRVIAKRLTESKSTVPHAYATADCDLGAVLKVRQDLVKDDIKVSVNDFIIKAAAVTLKQMPDVNVSWDGEGPKQLPFIDISVAVATDKGLLTPIIKDAAAKGIQEIADSVKLLGRLRNKNHLNPGGRGCSEPRLRHRTPAWQQNETPSQKR

SEQ ID NO: 1654 - protein, 207 aa, Artificial Sequence
  Synthetic polypeptide
MAASWRLGCDPRLLRYLVGFPGRRSVGLVKGALGWSVSRGANWRWFHSTQWLRGDPIKILMPSLSPTMEEGNIVKWLKKEGEAVSAGDALCEIETDKAVVTLDASDDGILAKIVQMPDVNVSWDGEGPKQLPFIDISVAVATDKGLLTPIIKDAAAKGIQEIADSVKLLGRLRNKNHLNPGGRGCSEPRLRHRTPAWQQNETPSQKR

SEQ ID NO: 1655 - protein, 15 aa, Artificial Sequence
  Synthetic polypeptide
IICLFRDIGMTLKYQ

SEQ ID NO: 1656 - protein, 250 aa, Artificial Sequence
  Synthetic polypeptide
MASGVGAAFEELPHDGTCDECEPDEAPGAEEVCRECGFCYCRRHAEAHRQKFLSHHLAEYVHGSQAWTPPADGEGAGKEEAEVKVEQEREIESEAGEESESEEESESEEESETEEESEDESDEESEEDSEEEMEDEQESEAEEDNQEEGESEAEGETEAESEFDPEIEMEAERVAKRKCPDHGLDLSTYCQEDRQLICVLCPVIGAHQGHQLSTLDEAFEELRSKDSGGLKAAMIELVERLKFKSSDPKL

SEQ ID NO: 1657 - protein, 129 aa, Artificial Sequence
  Synthetic polypeptide
MWLLGPLCLLLSSAAAKAKSKCGPTFFPCASGIHCIIGRFRCNGFEDCPDGSDEENCTANPLLCSTARYHCKNGLCIDKSFICDGQNNCQDNSDEESCESSQGSEERLCLAAHRLRCGERLCPAAPSGM

SEQ ID NO: 1658 - protein, 178 aa, Artificial Sequence
  Synthetic polypeptide
MWLLGPLCLLLSSAAESQLLPGNNFTNECNIPGNFMCSNGRCIPGAWQCDGLPDCFDKSDEKECPKAKSKCGPTFFPCASGIHCIIGRFRCNGFEDCPDGSDEENCTANPLLCSTARYHCKNGLCIDKSFICDGQNNCQDNSDEESCESSQGSEERLCLAAHRLRCGERLCPAAPSGM

SEQ ID NO: 1659 - protein, 109 aa, Artificial Sequence
  Synthetic polypeptide
MSLLNCENSCGSSQSESDCCVAMASSCSAVTKDDSVGGTASTGNLSSSFMEEIQGYDVEFDPPLESKYECPICLMALREAVQTPCGHRFCKACIIKSIRLFSIQQREWT

SEQ ID NO: 1660 - protein, 789 aa, Artificial Sequence
  Synthetic polypeptide
MHVIKRDGRQERVMFDKITSRIQKLCYGLNMDFVDPAQITMKVIQGLYSGVTTVELDTLAAETAATLTTKHPDYAILAARIAVSNLHKETKKVFSDVMEDLYNYINPHNGKHSPMVAKSTLDIVLANKDRLNSAIIYDRDFSYNYFGFKTLERSYLLKINGKVAERPQHMLMRVSVGIHKEDIDAAIETYNLLSERWFTHASPTLFNAGTNRPQLSSCFLLSMKDDSIEGIYDTLKQCALISKSAGGIGVAVSCIRATGSYIAGTNGNSNGLVPMLRVYNNTARYVDQGGNKRPGAFAIYLEPWHLDIFEFLDLKKNTGKEEQRARDLFFALWIPDLFMKRVETNQDWSLMCPNECPGLDEVWGEEFEKLYASYEKQGRVRKVVKAQQLWYAIIESQTETGTPYMLYKDSCNRKSNQQNLGTIKCSNLCTEIVEYTSKDEVAVCNLASLALNMYVTSEHTYDFKKLAEVTKVVVRNLNKIIDINYYPVPEACLSNKRHRPIGIGVQGLADAFILMRYPFESAEAQLLNKQIFETIYYGALEASCDLAKEQGPYETYEGSPVSKGILQYDMWNVTPTDLWDWKVLKEKIAKYGIRNSLLIAPMPTASTAQILGNNESIEPYTSNIYTRRVLSGEFQIVNPHLLKDLTERGLWHEEMKNQIIACNGSIQSIPEIPDDLKQLYKTVWEISQKTVLKMAAERGAFIDQSQSLNIHIAEPNYGKLTSMHFYGWKQGLKTGMYYLRTRPAANPIQFTLNKEKLKDKEKDDTARRPSPDAEQMPAPCLWTSQPPEL

SEQ ID NO: 1661 - protein, 692 aa, Artificial Sequence
  Synthetic polypeptide
MEDLYNYINPHNGKHSPMVAKSTLDIVLANKDRLNSAIIYDRDFSYNYFGFKTLERSYLLKINGKVAERPQHMLMRVSVGIHKEDIDAAIETYNLLSERWFTHASPTLFNAGTNRPQLSSCFLLSMKDDSIEGIYDTLKQCALISKSAGGIGVAVSCIRATGSYIAGTNGNSNGLVPMLRVYNNTARYVDQGGNKRPGAFAIYLEPWHLDIFEFLDLKKNTGKEEQRARDLFFALWIPDLFMKRVETNQDWSLMCPNECPGLDEVWGEEFEKLYASYEKQGRVRKVVKAQQLWYAIIESQTETGTPYMLYKDSCNRKSNQQNLGTIKCSNLCTEIVEYTSKDEVAVCNLASLALNMYVTSEHTYDFKKLAEVTKVVVRNLNKIIDINYYPVPEACLSNKRHRPIGIGVQGLADAFILMRYPFESAEAQLLNKQIFETIYYGALEASCDLAKEQGPYETYEGSPVSKGILQYDMWNVTPTDLWDWKVLKEKIAKYGIRNSLLIAPMPTASTAQILGNNESIEPYTSNIYTRRVLSGEFQIVNPHLLKDLTERGLWHEEMKNQIIACNGSIQSIPEIPDDLKQLYKTVWEISQKTVLKMAAERGAFIDQSQSLNIHIAEPNYGKLTSMHFYGWKQGLKTGMYYLRTRPAANPIQFTLNKEKLKDKEKDDTARRPSPDAEQMPAPCLWTSQPPEL

SEQ ID NO: 1662 - protein, 567 aa, Artificial Sequence
  Synthetic polypeptide
MKDDSIEGIYDTLKQCALISKSAGGIGVAVSCIRATGSYIAGTNGNSNGLVPMLRVYNNTARYVDQGGNKRPGAFAIYLEPWHLDIFEFLDLKKNTGKEEQRARDLFFALWIPDLFMKRVETNQDWSLMCPNECPGLDEVWGEEFEKLYASYEKQGRVRKVVKAQQLWYAIIESQTETGTPYMLYKDSCNRKSNQQNLGTIKCSNLCTEIVEYTSKDEVAVCNLASLALNMYVTSEHTYDFKKLAEVTKVVVRNLNKIIDINYYPVPEACLSNKRHRPIGIGVQGLADAFILMRYPFESAEAQLLNKQIFETIYYGALEASCDLAKEQGPYETYEGSPVSKGILQYDMWNVTPTDLWDWKVLKEKIAKYGIRNSLLIAPMPTASTAQILGNNESIEPYTSNIYTRRVLSGEFQIVNPHLLKDLTERGLWHEEMKNQIIACNGSIQSIPEIPDDLKQLYKTVWEISQKTVLKMAAERGAFIDQSQSLNIHIAEPNYGKLTSMHFYGWKQGLKTGMYYLRTRPAANPIQFTLNKEKLKDKEKDDTARRPSPDAEQMPAPCLWTSQPPEL

SEQ ID NO: 1663 - protein, 451 aa, Artificial Sequence
  Synthetic polypeptide
MKRVETNQDWSLMCPNECPGLDEVWGEEFEKLYASYEKQGRVRKVVKAQQLWYAIIESQTETGTPYMLYKDSCNRKSNQQNLGTIKCSNLCTEIVEYTSKDEVAVCNLASLALNMYVTSEHTYDFKKLAEVTKVVVRNLNKIIDINYYPVPEACLSNKRHRPIGIGVQGLADAFILMRYPFESAEAQLLNKQIFETIYYGALEASCDLAKEQGPYETYEGSPVSKGILQYDMWNVTPTDLWDWKVLKEKIAKYGIRNSLLIAPMPTASTAQILGNNESIEPYTSNIYTRRVLSGEFQIVNPHLLKDLTERGLWHEEMKNQIIACNGSIQSIPEIPDDLKQLYKTVWEISQKTVLKMAAERGAFIDQSQSLNIHIAEPNYGKLTSMHFYGWKQGLKTGMYYLRTRPAANPIQFTLNKEKLKDKEKDDTARRPSPDAEQMPAPCLWTSQPPEL

SEQ ID NO: 1664 - protein, 474 aa, Artificial Sequence
  Synthetic polypeptide
MQGEESLRILVEPEGDSFPLMEISTCETEASEQWDYVLVAQRHTQRDPRQARQQQFLEELRRKGFHIKVIRDQKQVFFGIRADNSVFGLYRTFLLEPEGPAPHAELAAPTTIPVTTSLRIRIVNFVVMNNKTSAGETFEDLMKDGVFEARFPLHKGEGRLKKTWARWRHMFREQPVDEIRNYFGEKVALYFVWLGWYTYMLVPAALTGLLVFLSGFSLFEASQISKEICEAHDILMCPLGDHSRRYQRLSETCTFAKLTHLFDNDGTVVFAIFMALWATVFLEIWKRQRARVVLHWDLYVWDEEQEEMALQLINCPDYKLRPYQHSYLRSTVILVLTLLMICLMIGMAHVLVVYRVLASALFSSSAVPFLEEQVTTAVVVTGALVHYVTIIIMTKINRCVALKLCDFEMPRTFSERESRFTIRFFTLQFFTHFSSLIYIAFILGSQAWWCEPVVPATREAEAQESLEPRRQRLQ

SEQ ID NO: 1665 - protein, 413 aa, Artificial Sequence
  Synthetic polypeptide
MQGEESLRILVEPEGDSFPLMEISTCETEASEQWDYVLVAQRHTQRDPRQARQQQFLEELRRKGFHIKVIRDQKQVFFGIRADNSVFGLYRTFLLEPEGPAPHAELAAPTTIPVTTSLRIRIVNFVVMNNKTSAGETFEDLMKDGVFEARFPLHKGEGRLKKTWARWRHMFREQPVDEIRNYFGEKVALYFVWLGWYTYMLVPAALTGLLVFLSGFSLFEASQISKEICEAHDILMCPLGDHSRRYQRLSETCTFAKLTHLFDNDGTVVFAIFMALWATVFLEIWKRQRARVVLHWDLYVWDEEQEEMALQLINCPDYKLRPYQHSYLRSTVILVLTLLMICLMIGMAHVLVVYRVLASALFSSSAVPFLEEQVTTAVVVTGALVHYVTIIIMTKINRCVALKLCDFGAVAYA

SEQ ID NO: 1666 - protein, 444 aa, Artificial Sequence
  Synthetic polypeptide
MQGEESLRILVEPEGDSFPLMEISTCETEASEQWDYVLVAQRHTQRDPRQARQQQFLEELRRKGFHIKVIRDQKQVFFGIRADNSVFGLYRTFLLEPEGPAPHAELAAPTTIPVTTSLRIRIVNFVVMNNKTSAGETFEDLMKDGVFEARFPLHKGEGRLKKTWARWRHMFREQPVDEIRNYFGEKVALYFVWLGWYTYMLVPAALTGLLVFLSGFSLFEASQISKEICEAHDILMCPLGDHSRRYQRLSETCTFAKLTHLFDNDGTVVFAIFMALWATVFLEIWKRQRARVVLHWDLYVWDEEQEEMALQLINCPDYKLRPYQHSYLRSTVILVLTLLMICLMIGMAHVLVVYRVLASALFSSSAVPFLEEQVTTAVVVTGALVHYVTIIIMTKINRCSGLCLKSQHFGRLRQADHLRSGVQDQTGQHEETPSLLARRGGVSL

SEQ ID NO: 1667 - protein, 242 aa, Artificial Sequence
  Synthetic polypeptide
MKQRWRENGIGKHKDAYQVILDGVKGGTKEKRLAAQFIPKFFKHFPELADSAINAQLDLCEDEDVSIRRQAIKELPQFATGENLPRVADILTQLLQTDDSAEFNLVNNALLSIFKMDAKGTLGGLFSQILQGEDIVRERAIKFLSTKLKTLPDEVLTKEVEELILTESKKVLEDVTGEEFVLFMKILSGLKSLQTVSGRQQLVELVAEQADLEQTFNPSDPDCVDRLLQCTRQAVPLFSDIV

SEQ ID NO: 1668 - protein, 253 aa, Artificial Sequence
  Synthetic polypeptide
MPTVEELYRNYGILADATEQVGQHKDAYQVILDGVKGGTKEKRLAAQFIPKFFKHFPELADSAINAQLDLCEDEDVSIRRQAIKELPQFATGENLPRVADILTQLLQTDDSAEFNLVNNALLSIFKMDAKGTLGGLFSQILQGEDIVRERAIKFLSTKLKTLPDEVLTKEVEELILTESKKVLEDVTGEEFVLFMKILSGLKSLQTVSGRQQLVELVAEQADLEQTFNPSDPDCVDRLLQCTRQAVPLFSDIV

SEQ ID NO: 1669 - protein, 199 aa, Artificial Sequence
  Synthetic polypeptide
MPTVEELYRNYGILADATEQVGQIRRQAIKELPQFATGENLPRVADILTQLLQTDDSAEFNLVNNALLSIFKMDAKGTLGGLFSQILQGEDIVRERAIKFLSTKLKTLPDEVLTKEVEELILTESKKVLEDVTGEEFVLFMKILSGLKSLQTVSGRQQLVELVAEQADLEQTFNPSDPDCVDRLLQCTRQAVPLFSDIV

SEQ ID NO: 1670 - protein, 103 aa, Artificial Sequence
  Synthetic polypeptide
AIKFLSTKLKTLPDEVLTKEVEELILTESKKVLEDVTGEEFVLFMKILSGLKSLQTVSGRQQLVELVAEQADLEQTFNPSDPDCVDRLLQCTRQAVPLFSDIV

SEQ ID NO: 1671 - protein, 290 aa, Artificial Sequence
  Synthetic polypeptide
MKQRWRENGIGKHKDAYQVILDGVKGGTKEKRLAAQFIPKFFKHFPELADSAINAQLDLCEDEDVSIRRQAIKELPQFATGENLPRVADILTQLLQTDDSAEFNLVNNALLSIFKMDAKGTLGGLFSQILQGEDIVRERAIKFLSTKLKTLPDEVLTKEVEELILTESKKVLEDVTGEEFVLFMKILSGLKSLQTVSGRQQLVELVAEQADLEQTFNPSDPDCVDRLLQCTRQAVPLFSKNVHSTRFVTYFCEQVLPNLGTLTTPVEGLDIQLENLAQNLILNQAPNSDY

SEQ ID NO: 1672 - protein, 301 aa, Artificial Sequence
  Synthetic polypeptide
MPTVEELYRNYGILADATEQVGQHKDAYQVILDGVKGGTKEKRLAAQFIPKFFKHFPELADSAINAQLDLCEDEDVSIRRQAIKELPQFATGENLPRVADILTQLLQTDDSAEFNLVNNALLSIFKMDAKGTLGGLFSQILQGEDIVRERAIKFLSTKLKTLPDEVLTKEVEELILTESKKVLEDVTGEEFVLFMKILSGLKSLQTVSGRQQLVELVAEQADLEQTFNPSDPDCVDRLLQCTRQAVPLFSKNVHSTRFVTYFCEQVLPNLGTLTTPVEGLDIQLENLAQNLILNQAPNSDY

SEQ ID NO: 1673 - protein, 247 aa, Artificial Sequence
  Synthetic polypeptide
MPTVEELYRNYGILADATEQVGQIRRQAIKELPQFATGENLPRVADILTQLLQTDDSAEFNLVNNALLSIFKMDAKGTLGGLFSQILQGEDIVRERAIKFLSTKLKTLPDEVLTKEVEELILTESKKVLEDVTGEEFVLFMKILSGLKSLQTVSGRQQLVELVAEQADLEQTFNPSDPDCVDRLLQCTRQAVPLFSKNVHSTRFVTYFCEQVLPNLGTLTTPVEGLDIQLENLAQNLILNQAPNSDY

SEQ ID NO: 1674 - protein, 110 aa, Artificial Sequence
  Synthetic polypeptide
MESALPAAGFLYWVGAGTVAYLALRISYSLFTALRVWGVGNEAGVGPGLGEWAVVTGSTDGIGKSYAEELLRRLRQENRLNPGGGGCSEPRSHRGTPAWVTEQDSVSKKK

SEQ ID NO: 1675 - protein, 158 aa, Artificial Sequence
  Synthetic polypeptide
MEEKRRRARVQGAWAAPVKSQAIAQPATTAKSHLHQKPGQTWKNKEHHLSDREFVFKEPQQVVRRAPEPRVIDREGVYEISLSPTGVSRVCLYPGFVDVKEADWILEQLCQDVPWKQRTGIREDITYQQPRLTAWYGELPYTYSRITMEPNPHIPYCN

SEQ ID NO: 1676 - protein, 157 aa, Artificial Sequence
  Synthetic polypeptide
MEEKRRRARVQGAWAAPVKSQAIAQPATTAKSHLHQKPGQTWKNKEHHLSDREFVFKEPQQVVRRAPEPRVIEEGVYEISLSPTGVSRVCLYPGFVDVKEADWILEQLCQDVPWKQRTGIREDITYQQPRLTAWYGELPYTYSRITMEPNPHIPYCN

SEQ ID NO: 1677 - protein, 102 aa, Artificial Sequence
  Synthetic polypeptide
MRRGERRDAGGPRPESPVPAGRASLEEPPDGPSAGQATGPGEGRRSTESEVYDDGTNTFFWRAHTLTVLFILTCTLGYVTLLEETPQDTAYNTKRSSETRRV

SEQ ID NO: 1678 - protein, 1653 aa, Artificial Sequence
  Synthetic polypeptide
MGDDSEWLKLPVDQKCEHKLWKARLSGYEEALKIFQKIKDEKSPEWSKFLGLIKKFVTDSNAVVQLKGLEAALVYVENAHVAGKTTGEVVSGVVSKVFNQPKAKAKELGIEICLMYIEIEKGEAVQEELLKGLDNKNPKIIVACIETLRKALSEFGSKIILLKPIIKVLPKLFESREKAVRDEAKLIAVEIYRWIRDALRPPLQNINSVQLKELEEEWVKLPTSAPRPTRFLRSQQELEAKLEQQQSAGGDAEGGGDDGDEVPQIDAYELLEAVEILSKLPKDFYDKIEAKKWQERKEALESVEVLIKNPKLEAGDYADLVKALKKVVGKDTNVMLVALAAKCLTGLAVGLRKKFGQYAGHVVPTILEKFKEKKPQVVQALQEAIDAIFLTTTLQNISEDVLAVMDNKNPTIKQQTSLFIARSFRHCTASTLPKSLLKPFCAALLKHINDSAPEVRDAAFEALGTALKVVGEKAVNPFLADVDKLKLDKIKECSEKVELIHGKKAGLAADKKEFKPLPGRTAASGAAGDKDTKDISAPKPGPLKKAPAAKAGGPPKKGKPAAPGGAGNTGTKNKKGLETKEIVEPELSIEVCEEKASAVLPPTCIQLLDSSNWKERLACMEEFQKAVELMDRTEMPCQALVRMLAKKPGWKETNFQVMQMKLHIVALIAQKGNFSKTSAQVVLDGLVDKIGDVKCGNNAKEAMTAIAEACMLPWTAEQVVSMAFSQKNPKNQSETLNWLSNAIKEFGFSGLNVKAFISNVKTALAATNPAVRTAAITLLGVMYLYVGPSLRMFFEDEKPALLSQIDAEFEKMQGQSPPAPTRGISKHSTSGTDEGEDGDEPDDGSNDVVDLLPRTEISDKITSELVSKIGDKNWKIRKEGLDEVAGIINDAKFIQPNIGELPTALKGRLNDSNKILVQQTLNILQQLAVAMGPNIKQHVKNLGIPIITVLGDSKNNVRAAALATVNAWAEQTGMKEWLEGEDLSEELKKENPFLRQELLGWLAEKLPTLRSTPTDLILCVPHLYSCLEDRNGDVRKKAQDALPFFMMHLGYEKMAKATGKLKPTSKDQVLAMLEKAKVNMPAKPAPPTKATSKPMGGSAPAKFQPASAPAEDCISSSTEPKPDPKKAKAPGLSSKAKSAQGKKMPSKTSLKEDEDKSGPIFIVVPNGKEQRMKDEKGLKVLKWNFTTPRDEYIEQLKTQMSSCVAKWLQDEMFHSDFQHHNKALAVMVDHLESEKEGVIGCLDLILKWLTLRFFDTNTSVLMKALEYLKLLFTLLSEEEYHLTENEASSFIPYLVVKVGEPKDVIRKDVRAILNRMCLVYPASKMFPFIMEGTKSKNSKQRAECLEELGCLVESYGMNVCQPTPGKALKEIAVHIGDRDNAVRNAALNTIVTVYNVHGDQVFKLIGNLSEKDMSMLEERIKRSAKRPSAAPIKQVEEKPQRAQNISSNANMLRKGPAEDMSSKLNQARSMSGHPEAAQMVRREFQLDLDEIENDNGTVRCEMPELVQHKLDDIFEPVLIPEPKIRAVSPHFDDMHSNTASTINFIISQVASGDINTSIQALTQIDEVLRQEDKAEAMSGHIDQFLIATFMQLRLIYNTHMADEKLEKDEIIKLYSCIIGNMISPGAVAHACNPSTSGGQGRWITKSGDRDHPG

SEQ ID NO: 1679 - protein, 5 aa, Artificial Sequence
  Synthetic polypeptide
TQGTS

SEQ ID NO: 1680 - protein, 217 aa, Artificial Sequence
  Synthetic polypeptide
ISSNANMLRKGPAEDMSSKLKIMYRTYRIQARSMSGHPEAAQMVRREFQLDLDEIENDNGTVRCEMPELVQHKLDDIFEPVLIPEPKIRAVSPHFDDMHSNTASTINFIISQVASGDINTSIQALTQIDEVLRQEDKAEAMSGHIDQFLIATFMQLRLIYNTHMADEKLEKDEIIKLYSCIIGNMISPGAVAHACNPSTSGGQGRWITKSGDRDHPG

SEQ ID NO: 1681 - protein, 284 aa, Artificial Sequence
  Synthetic polypeptide
MRRQWGALLLGALLCAHGLASSPECACGRSHFTCAVSALGECTCIPAQWQCDGDNDCGDHSDEDGCILPTCSPLDFHCDNGKCIRRSWVCDGDNDCEDDSDEQDCPPRECEEDEFPCQNGYCIRSLWHCDGDNDCGDNSDEQCDMRKCSDKEFRCSDGSCIAEHWYCDGDTDCKDGSDEENCPSAVPAPPCNLEEFQCAYGRCILDIYHCDGDDDCGDWSDESDCSSHQPCRSGEFMCDSGLCINAGWRCDGDADCDDQSDERNCTTREAEAGESLEPRRQRLQ

SEQ ID NO: 1682 - protein, 273 aa, Artificial Sequence
  Synthetic polypeptide
MRRQWGALLLGALLCAHGLASSPECACGRSHFTCAVSALGECTCIPAQWQCDGDNDCGDHSDEDGCILPTCSPLDFHCDNGKCIRRSWVCDGDNDCEDDSDEQDCPPRECEEDEFPCQNGYCIRSLWHCDGDNDCGDNSDEQCDMRKCSDKEFRCSDGSCIAEHWYCDGDTDCKDGSDEENCPSAVPAPPCNLEEFQCAYGRCILDIYHCDGDDDCGDWSDESDCSSHQPCRSGEFMCDSGLCINAGWRCDGDADCDDQSDERNCTGCGGACL

SEQ ID NO: 1683 - protein, 252 aa, Artificial Sequence
  Synthetic polypeptide
MPGCPCPGCGMAGPRLLFLTALALELLERAGGSQPALRSRGTATACRLDNKESESWGALLSGERLDTWICSLLGSLMVGLSGVFPLLVIPLEMGTMLRSEAGAWRLKQLLSFALGGLLGNVFLHLLPEAWAYTCSASPGGEGQSLQQQQQLGLWVIAGILTFLALEKMFLDSKEEGTSQAPNKDPTAAAAALNGGHCLAQPAAEPGLGAVVRSIKVSGYLNLLANTIDNFTHGLAVAASFLVSKKAFADLLI

SEQ ID NO: 1684 - protein, 216 aa, Artificial Sequence
  Synthetic polypeptide
MPGCPCPGCGMAGPRLLFLTALALELLERAGGSQPALRSRGTATACRLDNKESESWGALLSGERLDTWICSLLGSLMVGLSGVFPLLVIPLEMGTMLRSEAGAWRLKQLLSFALGGLLGNVFLHLLPEAWAYTCSASPGGEGQSLQQQQQLGLWVIAGILTFLALEKMFLDSKEEGTSQVSGYLNLLANTIDNFTHGLAVAASFLVSKKAFADLLI

SEQ ID NO: 1685 - protein, 282 aa, Artificial Sequence
  Synthetic polypeptide
MPGCPCPGCGMAGPRLLFLTALALELLERAGGSQPALRSRGTATACRLDNKESESWGALLSGERLDTWICSLLGSLMVGLSGVFPLLVIPLEMGTMLRSEAGAWRLKQLLSFALGGLLGNVFLHLLPEAWAYTCSASPGGEGQSLQQQQQLGLWVIAGILTFLALEKMFLDSKEEGTSQAPNKDPTAAAAALNGGHCLAQPAAEPGLGAVVRSIKVSGYLNLLANTIDNFTHGLAVAASFLVSKKLREGRFLVPFSHCCISSGQHSAHPEPAQSRVNLCGMS

SEQ ID NO: 1686 - protein, 246 aa, Artificial Sequence
  Synthetic polypeptide
MPGCPCPGCGMAGPRLLFLTALALELLERAGGSQPALRSRGTATACRLDNKESESWGALLSGERLDTWICSLLGSLMVGLSGVFPLLVIPLEMGTMLRSEAGAWRLKQLLSFALGGLLGNVFLHLLPEAWAYTCSASPGGEGQSLQQQQQLGLWVIAGILTFLALEKMFLDSKEEGTSQVSGYLNLLANTIDNFTHGLAVAASFLVSKKLREGRFLVPFSHCCISSGQHSAHPEPAQSRVNLCGMS

SEQ ID NO: 1687 - protein, 271 aa, Artificial Sequence
  Synthetic polypeptide
MPGCPCPGCGMAGPRLLFLTALALELLERAGGSQPALRSRGTATACRLDNKESESWGALLSGERLDTWICSLLGSLMVGLSGVFPLLVIPLEMGTMLRSEAGAWRLKQLLSFALGGLLGNVFLHLLPEAWAYTCSASPGGEGQSLQQQQQLGLWVIAGILTFLALEKMFLDSKEEGTSQAPNKDPTAAAAALNGGHCLAQPAAEPGLGAVVRSIKVSGYLNLLANTIDNFTHGLAVAASFLVSKKSLLYFQWPTQCPPRASSEQSKPLWNE

SEQ ID NO: 1688 - protein, 235 aa, Artificial Sequence
  Synthetic polypeptide
MPGCPCPGCGMAGPRLLFLTALALELLERAGGSQPALRSRGTATACRLDNKESESWGALLSGERLDTWICSLLGSLMVGLSGVFPLLVIPLEMGTMLRSEAGAWRLKQLLSFALGGLLGNVFLHLLPEAWAYTCSASPGGEGQSLQQQQQLGLWVIAGILTFLALEKMFLDSKEEGTSQVSGYLNLLANTIDNFTHGLAVAASFLVSKKSLLYFQWPTQCPPRASSEQSKPLWNE

SEQ ID NO: 1689 - protein, 265 aa, Artificial Sequence
  Synthetic polypeptide
MPGCPCPGCGMAGPRLLFLTALALELLERAGGSQPALRSRGTATACRLDNKESESWGALLSGERLDTWICSLLGSLMVGLSGVFPLLVIPLEMGTMLRSEAGAWRLKQLLSFALGGLLGNVFLHLLPEAWAYTCSASPGGEGQSLQQQQQLGLWVIAGILTFLALEKMFLDSKEEGTSQAPNKDPTAAAAALNGGHCLAQPAAEPGLGAVVRSIKVSGYLNLLANTIDNFTHGLAVAASFLVSKKWPTQCPPRASSEQSKPLWNE

SEQ ID NO: 1690 - protein, 229 aa, Artificial Sequence
  Synthetic polypeptide
MPGCPCPGCGMAGPRLLFLTALALELLERAGGSQPALRSRGTATACRLDNKESESWGALLSGERLDTWICSLLGSLMVGLSGVFPLLVIPLEMGTMLRSEAGAWRLKQLLSFALGGLLGNVFLHLLPEAWAYTCSASPGGEGQSLQQQQQLGLWVIAGILTFLALEKMFLDSKEEGTSQVSGYLNLLANTIDNFTHGLAVAASFLVSKKWPTQCPPRASSEQSKPLWNE

SEQ ID NO: 1691 - protein, 440 aa, Artificial Sequence
  Synthetic polypeptide
MGQDQTKQQIEKGLQLYQSNQTEKALQVWTKVLEKSSDLMGRFRVLGCLVTAHSEMGRYKEMLKFAVVQIDTARELEDADFLLESYLNLARSNEKLCEFHKTISYCKTCLGLPGTRAGAQLGGQVSLSMGNAFLGLSVFQKALESFEKALRYAHNNDDAMLECRVCCSLGSFYAQVKDYEKALFFPCKAAELVNNYGKGWSLKYRAMSQYHMAVAYRLLGRLGSAMECCEESMKIALQHGDRPLQALCLLCFADIHRSRGDLETAFPRYDSAMSIMTEIGNRLGQVQALLGVAKCWVARKALDKALDAIERAQDLAEEVGNKLSQLKLHCLSESIYRSKGLQRELRAHVVRFHECVEETELYCGLCGESIGEKNSRLQALPCSHIFHLRRGASRLSRKHFGRPRRADHLSPGVQDHLGQHGETPSLLKIQKLPRHGGGSL

SEQ ID NO: 1692 - protein, 381 aa, Artificial Sequence
  Synthetic polypeptide
MGQDQTKQQIEKGLQLYQSNQTEKALQVWTKVLEKSSDLMGRFRVLGCLVTAHSEMGRYKEMLKFAVVQIDTARELEDADFLLESYLNLARSNEKLCEFHKTISYCKTCLGLPGTRAGAQLGGQVSLSMGNAFLGLSVFQKALESFEKALRYAHNNDDAMLECRVCCSLGSFYAQVKDYEKALFFPCKAAELVNNYGKGWSLKYRAMSQYHMAVAYRLLGRLGSAMECCEESMKIALQHGDRPLQALCLLCFADIHRSRGDLELSQLKLHCLSESIYRSKGLQRELRAHVVRFHECVEETELYCGLCGESIGEKNSRLQALPCSHIFHLRRGASRLSRKHFGRPRRADHLSPGVQDHLGQHGETPSLLKIQKLPRHGGGSL

SEQ ID NO: 1693 - protein, 355 aa, Artificial Sequence
  Synthetic polypeptide
MGQDQTKQQIEKGLQLYQSNQTEKALQVWTKVLEKSSDLMGRFRVLGCLVTAHSEMGRYKEMLKFAVVQIDTARELEDADFLLESYLNLARSNEKLCEFHKTISYCKTCLGLPGTRAGAQLGGQVSLSMGNAFLGLSVFQKALESFEKALRYAHNNDDAMLECRVCCSLGSFYAQVKESMKIALQHGDRPLQALCLLCFADIHRSRGDLETAFPRYDSAMSIMTEIGNRLGQVQALLGVAKCWVARKALDKVRSGLSHSLQPSQHSPLGASRLAAQAALSEREHLPQQRAAAGTAGARCEVPRVRGGDGALLRPVRRVHRREEQPAAGPTLLPHLPPQAWCLTSVSQALWEAEAG

SEQ ID NO: 1694 - protein, 310 aa, Artificial Sequence
  Synthetic polypeptide
MGKKSRAVPGRRPILQLSPPGPRGSTPGRDPEPEPDTEPDSTAAVPSQPAPSAATTTTTAVTAAAASDDSPSEDEQEAVQEVPRVVQNPPKPVMTTRPTAVKATGGLCLLGAYADSDDDDNDVSEKLAQSKETNGNQSTDIDSTLANFLAEIDAITAPQPAAPVGASAPPPTPPRPEPKEAATSTLSSSTSNGTDSTQTSGWQYDTQCSLAGVGIEMGDWQEVWDENTGCYYYWNTQTNEVTWELPQYLATQVQGLQHYQPSSVPGAETSFVVNTDIYSKEKTISVSSSKSGPVIAKREVKKAQHGGSRL

SEQ ID NO: 1695 - protein, 180 aa, Artificial Sequence
  Synthetic polypeptide
MGKKSRAVPGRRPILQLSPPGPRGSTPGRDPEPEPDTEPDSTAAVPSQPAPSAATTTTTAVTAAAASDDSPSEDEQEAVQEVPRVVQNPPKPVMTTRPTAVKATALFTIAKTWNQPECPSMIDWIKKMWHIYTIEYYAAIKKDEFMSFVGTWMKLETIILSKLSQGQKTKHHIFSLIGRN

SEQ ID NO: 1696 - protein, 191 aa, Artificial Sequence
  Synthetic polypeptide
MGHFTEEDKATITSLWGKVNVEDAGGETLGRLLVVYPWTQRFFDSFGNLSSASAIMGNPKVKAHGKKVLTSLGDATKHLDDLKGTFAQLSELHCDKLHVDPENFKLLGNVLVTVLAIHFGKEFTPEVQASWQKMKQRDKPFLFPPGEDTVRSPPSAIQEENPDHESAFRNVRKNSVVEATQSFVFCYSTLH

SEQ ID NO: 1697 - protein, 183 aa, Artificial Sequence
  Synthetic polypeptide
MGHFTEEDKATITSLWGKVNVEDAGGETLGRLLVVYPWTQRFFDSFGNLSSASAIMGNPKVKAHGKKVLTSLGDATKHLDDLKGTFAQLSELHCDKLHVDPENFKLLGNVLVTVLAIHFGKEFTPEKQRDKPFLFPPGEDTVRSPPSAIQEENPDHESAFRNVRKNSVVEATQSFVFCYSTLH

SEQ ID NO: 1698 - protein, 162 aa, Artificial Sequence
  Synthetic polypeptide
MGHFTEEDKATITSLWGKVNVEDAGGETLGRLLVVYPWTQRFFDSFGNLSSASAIMGNPKVKAHGKKVLTSLGDATKHLDDLKGTFAQLSELHCDKLHVDPENFKKQRDKPFLFPPGEDTVRSPPSAIQEENPDHESAFRNVRKNSVVEATQSFVFCYSTLH

SEQ ID NO: 1699 - protein, 173 aa, Artificial Sequence
  Synthetic polypeptide
MVVLGEMKRKVLPLHFLPFMRLLVVYPWTQRFFDSFGNLSSASAIMGNPKVKAHGKKVLTSLGDAIKHLDDLKGTFAQLSELHCDKLHVDPENFKLLGNVLVTVLAIHFGKEFTPEKQRDKPFLFPPGEDTVRSPPSAIQEENPDHESAFRNVRKNSVVEATQSFVFCYSTLH

SEQ ID NO: 1700 - protein, 183 aa, Artificial Sequence
  Synthetic polypeptide
MGHFTEEDKATITSLWGKVNVEDAGGETLGRLLVVYPWTQRFFDSFGNLSSASAIMGNPKVKAHGKKVLTSLGDAIKHLDDLKGTFAQLSELHCDKLHVDPENFKLLGNVLVTVLAIHFGKEFTPEKQRDKPFLFPPGEDTVRSPPSAIQEENPDHESAFRNVRKNSVVEATQSFVFCYSTLH

SEQ ID NO: 1701 - protein, 152 aa, Artificial Sequence
  Synthetic polypeptide
MVVLGEMKRKVLPLHFLPFMRLLVVYPWTQRFFDSFGNLSSASAIMGNPKVKAHGKKVLTSLGDAIKHLDDLKGTFAQLSELHCDKLHVDPENFKKQRDKPFLFPPGEDTVRSPPSAIQEENPDHESAFRNVRKNSVVEATQSFVFCYSTLH

SEQ ID NO: 1702 - protein, 162 aa, Artificial Sequence
  Synthetic polypeptide
MGHFTEEDKATITSLWGKVNVEDAGGETLGRLLVVYPWTQRFFDSFGNLSSASAIMGNPKVKAHGKKVLTSLGDAIKHLDDLKGTFAQLSELHCDKLHVDPENFKKQRDKPFLFPPGEDTVRSPPSAIQEENPDHESAFRNVRKNSVVEATQSFVFCYSTLH

SEQ ID NO: 1703 - protein, 132 aa, Artificial Sequence
  Synthetic polypeptide
MAGQGLPLHVATLLTGLLECLGFAGVLFGWPSLVFVFKNEDYFKDLCGPDAGPIGNATGQADCKAQDERFSLIFTLGSFMNNFMTFPTGYIFDRFKTTVARLIAIFFYTTATLIIAFTSAVAHSCNPSTLGG

SEQ ID NO: 1704 - protein, 145 aa, Artificial Sequence
  Synthetic polypeptide
MAGQGLPLHVATLLTGLLECLGFAGVLFGWPSLVFVFKNEDYFKDLCGPDAGPIGNATGQAGRLGCMGDLFSTPDCKAQDERFSLIFTLGSFMNNFMTFPTGYIFDRFKTTVARLIAIFFYTTATLIIAFTSAVAHSCNPSTLGG

SEQ ID NO: 1705 - protein, 79 aa, Artificial Sequence
  Synthetic polypeptide
MGDLFSTPDCKAQDERFSLIFTLGSFMNNFMTFPTGYIFDRFKTTVARLIAIFFYTTATLIIAFTSAVAHSCNPSTLGG

SEQ ID NO: 1706 - protein, 30 aa, Artificial Sequence
  Synthetic polypeptide
MFLFVLANFSMATFMDPGIFPRGLAWWLTS

SEQ ID NO: 1707 - protein, 83 aa, Artificial Sequence
  Synthetic polypeptide
MPAESGKRFKPSKYVPVSAAAIFLVGATTLFFAFTCPGLSLYVSPAVPIYNAIMFLFVLANFSMATFMDPGIFPRGLAWWLTS

SEQ ID NO: 1708 - protein, 9 aa, Artificial Sequence
  Synthetic polypeptide
RGLAWWLTS

SEQ ID NO: 1709 - protein, 62 aa, Artificial Sequence
  Synthetic polypeptide
MAVLAPLIALVYSVPRLSRWLAQPYYLLSALLSAAFLLVRKLPPLCHGLPTQREDGQGGSCL

SEQ ID NO: 1710 - protein, 67 aa, Artificial Sequence
  Synthetic polypeptide
MAVLAPLIALVYSVPRLSRWLAQPYYLLSALLSAAFLLVRKLPPLCHGLPTQREDGNPCDFDWVLQM

SEQ ID NO: 1711 - protein, 84 aa, Artificial Sequence
  Synthetic polypeptide
MAVLAPLIALVYSVPRLSRWLAQPYYLLSALLSAAFLLVRKLPPLCHGLPTQREDGNPCDFDWPGTVAHAYNLSTLGGRSRWIT

SEQ ID NO: 1712 - protein, 120 aa, Artificial Sequence
  Synthetic polypeptide
MAVLAPLIALVYSVPRLSRWLAQPYYLLSALLSAAFLLVRKLPPLCHGLPTQREDGNPCDFDWGRVAHACNPSTLGGRGGQITRPRDQDHPGQRGETPSLLKIQKPGVVVGTCSPSYSGG

SEQ ID NO: 1713 - protein, 261 aa, Artificial Sequence
  Synthetic polypeptide
MEELDALLEELERSTLQDSDEYSNPAPLPLDQHSRKETNLDETSEILSIQDNTSPLPAQLVYTTNIQELNVYSEAQEPKESPPPSKTSAAAQLDELMAHLTEMQAKVAVRADAGKKHLPDKQDHKASLDSMLGGLEQELQDLGIATVPKGHCASCQKPIAGKVIHALGQSWHPEHFVCTHCKEEIGSSPFFERSGLAYCPNDYHQLFSPRCAYCAAPILDKVLTAMNQTWHPEHFFCSHCGEVFGAEGDCHNHLNLQQASS

SEQ ID NO: 1714 - protein, 266 aa, Artificial Sequence
  Synthetic polypeptide
MSTLLISSSDALLEELERSTLQDSDEYSNPAPLPLDQHSRKETNLDETSEILSIQDNTSPLPAQLVYTTNIQELNVYSEAQEPKESPPPSKTSAAAQLDELMAHLTEMQAKVAVRADAGKKHLPDKQDHKASLDSMLGGLEQELQDLGIATVPKGHCASCQKPIAGKVIHALGQSWHPEHFVCTHCKEEIGSSPFFERSGLAYCPNDYHQLFSPRCAYCAAPILDKVLTAMNQTWHPEHFFCSHCGEVFGAEGDCHNHLNLQQASS

SEQ ID NO: 1715 - protein, 241 aa, Artificial Sequence
  Synthetic polypeptide
MPYWRNWNAPPFRTVMNIPTQLLFPWISIPERRLTLMRLRRSFLFRITQVPCREAQEPKESPPPSKTSAAAQLDELMAHLTEMQAKVAVRADAGKKHLPDKQDHKASLDSMLGGLEQELQDLGIATVPKGHCASCQKPIAGKVIHALGQSWHPEHFVCTHCKEEIGSSPFFERSGLAYCPNDYHQLFSPRCAYCAAPILDKVLTAMNQTWHPEHFFCSHCGEVFGAEGDCHNHLNLQQASS

SEQ ID NO: 1716 - protein, 65 aa, Artificial Sequence
  Synthetic polypeptide
MEELDALLEELERSTLQDSDEYSNPAPLPLDQHSRKETNLDETSEILSIQDNTSPLPGRCSGSGL

SEQ ID NO: 1717 - protein, 70 aa, Artificial Sequence
  Synthetic polypeptide
MSTLLISSSDALLEELERSTLQDSDEYSNPAPLPLDQHSRKETNLDETSEILSIQDNTSPLPGRCSGSGL

SEQ ID NO: 1718 - protein, 68 aa, Artificial Sequence
  Synthetic polypeptide
MPYWRNWNAPPFRTVMNIPTQLLFPWISIPERRLTLMRLRRSFLFRITQVPCRAGAVAQACNFSTLEG

SEQ ID NO: 1719 - protein, 46 aa, Artificial Sequence
  Synthetic polypeptide
MNSMKTEENKSFSAMEDDQRTRPEVSKESTIGLRLVSLSSWREEMG

SEQ ID NO: 1720 - protein, 201 aa, Artificial Sequence
  Synthetic polypeptide
MDEFFSEIEETRLNIDKISEHVEEAKKLYSIILSAPIPEPKTKDDLEQLTTEIKKRANNVRNKLKSMEKHIEEDEVRSSADLRIRKSQHSVLSRKFVEVMTKYNEAQVDFRERSKGRIQRQLEITGKKTTDEELEEMLESGNPAIFTSGIIDSQISKQALSEIEGRHKDIVRLESSIKELHDMFMDIAMLVENQAKINSRF

SEQ ID NO: 1721 - protein, 232 aa, Artificial Sequence
  Synthetic polypeptide
MKDRLEQLKAKQLTQDDDTDAVEIAIDNTAFMDEFFSEIEETRLNIDKISEHVEEAKKLYSIILSAPIPEPKTKDDLEQLTTEIKKRANNVRNKLKSMEKHIEEDEVRSSADLRIRKSQHSVLSRKFVEVMTKYNEAQVDFRERSKGRIQRQLEITGKKTTDEELEEMLESGNPAIFTSGIIDSQISKQALSEIEGRHKDIVRLESSIKELHDMFMDIAMLVENQAKINSRF

SEQ ID NO: 1722 - protein, 135 aa, Artificial Sequence
  Synthetic polypeptide
MEKHIEEDEVRSSADLRIRKSQHSVLSRKFVEVMTKYNEAQVDFRERSKGRIQRQLEITGKKTTDEELEEMLESGNPAIFTSGIIDSQISKQALSEIEGRHKDIVRLESSIKELHDMFMDIAMLVENQAKINSRF

SEQ ID NO: 1723 - protein, 184 aa, Artificial Sequence
  Synthetic polypeptide
ISEHVEEAKKLYSIILSAPIPEPKTKDDLEQLTTEIKKRANNVRNKLKSMEKHIEEDEVRSSADLRIRKSQHSVLSRKFVEVMTKYNEAQVDFRERSKGRIQRQLEITGKKTTDEELEEMLESGNPAIFTSGIIDSQISKQALSEIEGRHKDIVRLESSIKELHDMFMDIAMLVENQAKINSRF

SEQ ID NO: 1724 - protein, 19 aa, Artificial Sequence
  Synthetic polypeptide
MFMDIAMLVENQAKINSRF

SEQ ID NO: 1725 - protein, 239 aa, Artificial Sequence
  Synthetic polypeptide
MDEFFSEIEETRLNIDKISEHVEEAKKLYSIILSAPIPEPKTKDDLEQLTTEIKKRANNVRNKLKSMEKHIEEDEVRSSADLRIRKSQHSVLSRKFVEVMTKYNEAQVDFRERSKGRIQRQLEITGKKTTDEELEEMLESGNPAIFTSGIIDSQISKQALSEIEGRHKDIVRLESSIKELHDMFMDIAMLVENQGEMLDNIELNVMHTVDHVEKARDETKKAVKYQSQARKAGCGGSHL

SEQ ID NO: 1726 - protein, 270 aa, Artificial Sequence
  Synthetic polypeptide
MKDRLEQLKAKQLTQDDDTDAVEIAIDNTAFMDEFFSEIEETRLNIDKISEHVEEAKKLYSIILSAPIPEPKTKDDLEQLTTEIKKRANNVRNKLKSMEKHIEEDEVRSSADLRIRKSQHSVLSRKFVEVMTKYNEAQVDFRERSKGRIQRQLEITGKKTTDEELEEMLESGNPAIFTSGIIDSQISKQALSEIEGRHKDIVRLESSIKELHDMFMDIAMLVENQGEMLDNIELNVMHTVDHVEKARDETKKAVKYQSQARKAGCGGSHL

SEQ ID NO: 1727 - protein, 57 aa, Artificial Sequence
  Synthetic polypeptide
MFMDIAMLVENQGEMLDNIELNVMHTVDHVEKARDETKKAVKYQSQARKAGCGGSHL

SEQ ID NO: 1728 - protein, 93 aa, Artificial Sequence
  Synthetic polypeptide
MASHEVDNAELGSASAHGTPGSEAGPEELNTSVYQPIDGSPDYQKAKLQVLGQEQPLLSLFFLSLFNVKRMRMKTFMIIYFHLMNSKYIFSFL

SEQ ID NO: 1729 - protein, 87 aa, Artificial Sequence
  Synthetic polypeptide
MASHEVDNAELGSASAHGTPGSEAGPEELNTSVYQPIDGSPDYQKAKLQVLGFCSSGTLSVVAGIKPTRTWNISSMEGGGQKSFFGH

SEQ ID NO: 1730 - protein, 133 aa, Artificial Sequence
  Synthetic polypeptide
MASHEVDNAELGSASAHGTPGSEAGPEELNTSVYQPIDGSPDYQKAKLQVLGAIQILNAAMILALGVFLGSLQYPYHFQKHFFFFTFYTGYPIWGAVFFCSSGTLSVVAGIKPTRTWNISSMEGGGQKSFFGH

SEQ ID NO: 1731 - protein, 99 aa, Artificial Sequence
  Synthetic polypeptide
MNIASATIALVGTAFLSLNIAVNIQSLRSCHSSSESPDLCNYMGSISNHFSFLPSCEEGHICFPFCHHCKFPEAFPAMWNCESIKPPSFINCPVSGSSL

SEQ ID NO: 1732 - protein, 176 aa, Artificial Sequence
  Synthetic polypeptide
MASHEVDNAELGSASAHGTPGSEAGPEELNTSVYQPIDGSPDYQKAKLQVLGFCSSGTLSVVAGIKPTRTWIQNSFGMNIASATIALVGTAFLSLNIAVNIQSLRSCHSSSESPDLCNYMGSISNHFSFLPSCEEGHICFPFCHHCKFPEAFPAMWNCESIKPPSFINCPVSGSSL

SEQ ID NO: 1733 - protein, 222 aa, Artificial Sequence
  Synthetic polypeptide
MASHEVDNAELGSASAHGTPGSEAGPEELNTSVYQPIDGSPDYQKAKLQVLGAIQILNAAMILALGVFLGSLQYPYHFQKHFFFFTFYTGYPIWGAVFFCSSGTLSVVAGIKPTRTWIQNSFGMNIASATIALVGTAFLSLNIAVNIQSLRSCHSSSESPDLCNYMGSISNHFSFLPSCEEGHICFPFCHHCKFPEAFPAMWNCESIKPPSFINCPVSGSSL

SEQ ID NO: 1734 - protein, 512 aa, Artificial Sequence
  Synthetic polypeptide
MSLICSISNEVPEHPCVSPVSNHVYERRLIEKYIAENGTDPINNQPLSEEQLIDIKVAHPIRPKPPSATSIPAILKALQDEWDAVMLHSFTLRQQLQTTRQELSHALYQHDAACRVIARLTKEVTAAREALATLKPQAGLIVPQAVPSSQPSVVGAGEPMDLGELVGMTPEIIQKLQDKATVLTTERKKRGKTVPEELVKPEELSKYRQVASHVGLHSASIPGILALDLCPSDTNKILTGGADKNVVVFDKSSEQILATLKGHTKKVTSVVFHPSQDLVFSASPDATIRIWSVPNASCVQVVRAHESAVTGLSLHATGDYLLSSSDDQYWAFSDIQTGRVLTKVTDETSGCSLTCAQFHPDGLIFGTGTMDSQIKIWDLKERTNVANFPGHSGPITSIAFSENGYYLATAADDSSVKLWDLRKLKNFKTLQLDNNFEVKSLIFDQSGTYLALGGTDVQIYICKQWTEILHFTDFPISLDTTILKLGQLITVLWPLGVQVKESVPCLLLKIQS

SEQ ID NO: 1735 - protein, 127 aa, Artificial Sequence
  Synthetic polypeptide
YWAFSDIQTGRVLTKVTDETSGCSLTCAQFHPDGLIFGTGTMDSQIKIWDLKVKSLIFDQSGTYLALGGTDVQIYICKQWTEILHFTDFPISLDTTILKLGQLITVLWPLGVQVKESVPCLLLKIQS

SEQ ID NO: 1736 - protein, 106 aa, Artificial Sequence
  Synthetic polypeptide
MLQTSNYSLVLSLQFLLLSYDLFVNSFSELLQKTPVIQLVLFIIQDIAVLFNIIIIFLMFFNTFVFQAGLVNLLFHKFKGTIILTAVYFALSISLHVWVMGFDSWV

SEQ ID NO: 1737 - protein, 48 aa, Artificial Sequence
  Synthetic polypeptide
MFFNTFVFQAGLVNLLFHKFKGTIILTAVYFALSISLHVWVMGFDSWV

SEQ ID NO: 1738 - protein, 108 aa, Artificial Sequence
  Synthetic polypeptide
MLQTSNYSLVLSLQFLLLSYDLFVNSFSELLQKTPVIQLVLFIIQDIAVLFNIIIIFLMFFNTFVFQAGLVNLLFHKFKGTIILTAVYFALSISLHVWVMFGPNSNFS

SEQ ID NO: 1739 - protein, 50 aa, Artificial Sequence
  Synthetic polypeptide
MFFNTFVFQAGLVNLLFHKFKGTIILTAVYFALSISLHVWVMFGPNSNFS

SEQ ID NO: 1740 - protein, 129 aa, Artificial Sequence
  Synthetic polypeptide
MLQTSNYSLVLSLQFLLLSYDLFVNSFSELLQKTPVIQLVLFIIQDIAVLFNIIIIFLMFFNTFVFQAGLVNLLFHKFKGTIILTAVYFALSISLHVWVMNLRWKNSNSFIWTDGLQMLFVFQRLVTGL

SEQ ID NO: 1741 - protein, 71 aa, Artificial Sequence
  Synthetic polypeptide
MFFNTFVFQAGLVNLLFHKFKGTIILTAVYFALSISLHVWVMNLRWKNSNSFIWTDGLQMLFVFQRLVTGL

SEQ ID NO: 1742 - protein, 134 aa, Artificial Sequence
  Synthetic polypeptide
MLQTSNYSLVLSLQFLLLSYDLFVNSFSELLQKTPVIQLVLFIIQDIAVLFNIIIIFLMFFNTFVFQAGLVNLLFHKFKGTIILTAVYFALSISLHVWVMNLRWKNSNSFIWTDGLQMLFVFQRLESRKLLSYL

SEQ ID NO: 1743 - protein, 76 aa, Artificial Sequence
  Synthetic polypeptide
MFFNTFVFQAGLVNLLFHKFKGTIILTAVYFALSISLHVWVMNLRWKNSNSFIWTDGLQMLFVFQRLESRKLLSYL

SEQ ID NO: 1744 - protein, 130 aa, Artificial Sequence
  Synthetic polypeptide
MLQTSNYSLVLSLQFLLLSYDLFVNSFSELLQKTPVIQLVLFIIQDIAVLFNIIIIFLMFFNTFVFQAGLVNLLFHKFKGTIILTAVYFALSISLHVWVMNLRWKNSNSFIWTDGLQMLFVFQRLVWTEF

SEQ ID NO: 1745 - protein, 72 aa, Artificial Sequence
  Synthetic polypeptide
MFFNTFVFQAGLVNLLFHKFKGTIILTAVYFALSISLHVWVMNLRWKNSNSFIWTDGLQMLFVFQRLVWTEF

SEQ ID NO: 1746 - protein, 129 aa, Artificial Sequence
  Synthetic polypeptide
MLQTSNYSLVLSLQFLLLSYDLFVNSFSELLQKTPVIQLVLFIIQDIAVLFNIIIIFLMFFNTFVFQAGLVNLLFHKFKGTIILTAVYFALSISLHVWVMNLRWKNSNSFIWTDGLQMLFVFQRLVTEN

SEQ ID NO: 1747 - protein, 71 aa, Artificial Sequence
  Synthetic polypeptide
MFFNTFVFQAGLVNLLFHKFKGTIILTAVYFALSISLHVWVMNLRWKNSNSFIWTDGLQMLFVFQRLVTEN

SEQ ID NO: 1748 - protein, 1634 aa, Artificial Sequence
  Synthetic polypeptide
MDDDSLDELVARSPGPDGHPQVGPADPAGDFEESSVGSSGDSGDDSDSEHGDGTDGEDEGASEEEDLEDRSGSEDSEDDGETLLEVAGTQGKLEAAGSFNSDDDAESCPICLNAFRDQAVGTPENCAHYFCLDCIVEWSKNANSCPVDRTLFKCICIRAQFGGKILRKIPVENTKASEEEEDPTFCEVCGRSDREDRLLLCDGCDAGYHMECLDPPLQEVPVDEWFCPECAAPGVVLAADAGPVSEEEVSLLLADVVPTTSRLRPRAGRTRAIARTRQSERVRATVNRNRISTARRVQHTPGRLGSSLLDEAIEAVATGLSTAVYQRPLTPRTPARRKRKTRRRKKVPGRKKTPSGPSAKSKSSATRSKKRQHRVKKRRGKKVKSEATTRSRIARTLGLRRPVHSSCIPSVLKPVEPSLGLLRADIGAASLSLFGDPYELDPFDSSEELSANPLSPLSAKRRALSRSALQSHQPVARPVSVGLSRRRLPAAVPEPDLEEEPVPDLLGSILSGQSLLMLGSSDVIIHRDGSLSAKRAAPVSFQRNSGSLSRGEEGFKGCLQPRALPSGSPAQGPSGNRPQSTGLSCQGRSRTPARTAGAPVRLDLPAAPGAVQARNLSNGSVPGFRQSHSPWFNGTNKHTLPLASAASKISSRDSKPPCRSVVPGPPLKPAPRRTDISELPRIPKIRRDDGGGRRDAAPAHGQSIEIPSACISRLTGREGTGQPGRGTRAESEASSRVPREPGVHTGSSRPPAPSSHGSLAPLGPSRGKGVGSTFESFRINIPGNMAHSSQLSSPGFCNTFRPVDDKEQRKENPSPLFSIKKTKQLRSEVYDPSDPTGSDSSAPGSSPERSGPGLLPSEITRTISINSPKAQTVQAVRCVTSYTVESIFGTEPEPPLGPSSAMSKLRGAVAAEGASDTEREEPTESQGLAARLRRPSPPEPWDEEDGASCSTFFGSEERTVTCVTVVEPEAPPSPDVLQAATHRVVELRPPSRSRSTSSSRSRKKAKRKRVSREHGRTRSGTRSESRDRSSRSASPSVGEERPRRQRSKAKSRRSSSDRSSSRERAKRKKAKDKSREHRRGPWGHSRRTSRSRSGSPGSSSYEHYESRKKKKRRSASRPRGRECSPTSSLERLCRHKHQRERSHERPDRKESVAWPRDRRKRRSRSPSSEHRAREHRRPRSREKWPQTRSHSPERKGAVREASPAPLAQGEPGREDLPTRLPALGEAHVSPEVATADKAPLQAPPVLEVAAECEPDDLDLDYGDSVEAGHVFDDFSSDAVFIQLDDMSSPPSPESTDSSPERDFPLKPALPPASLAVAAIQREVSLMHDEDPSQPPPLPEGTQEPHLLRPDAAEKAEAPSSPDVAPAGKEDSPSASGRVQEAARPEEVVSQTPLLRSRALVKRVTWNLQESESSAPAEDRAPRAPLHRPQKPREGAWDMEDVAPTGVRQVFSELPFPSHVLPEPGFPDTDPSQVYSPGLPPAPAQPSSIPPCALVSQPTVQFILQGSLPLVGCGAAQTLAPVPAALTPASEPASQATAASNSEEKTPAPRLAAEKTKKEEYMKKLHMQERAVEEVKLAIKPFYQKREVTKEEYKDILRKAVQKICHSKSGEINPVKVANLVKAYRSGCGDVHTHR

SEQ ID NO: 1749 - protein, 1632 aa, Artificial Sequence
  Synthetic polypeptide
MDDDSLDELVARSPGPDGHPQVGPADPAGDFESSVGSSGDSGDDSDSEHGDGTDGEDEGASEEEDLEDRSGSEDSEDDGETLLEVAGTQGKLEAAGSFNSDDDAESCPICLNAFRDQAVGTPENCAHYFCLDCIVEWSKNANSCPVDRTLFKCICIRAQFGGKILRKIPVENTKASEEEEDPTFCEVCGRSDREDRLLLCDGCDAGYHMECLDPPLQEVPVDEWFCPECAAPGVVLAADAGPVSEEEVSLLLADVVPTTSRLRPRAGRTRAIARTRQSERVRATVNRNRISTARRVQHTPGRLGSSLLDEAIEAVATGLSTAVYQRPLTPRTPARRKRKTRRRKKVPGRKKTPSGPSAKSKSSATRSKKRQHRVKKRRGKKVKSEATTRSRIARTLGLRRPVHSSCIPSVLKPVEPSLGLLRADIGAASLSLFGDPYELDPFDSEELSANPLSPLSAKRRALSRSALQSHQPVARPVSVGLSRRRLPAAVPEPDLEEEPVPDLLGSILSGQSLLMLGSSDVIIHRDGSLSAKRAAPVSFQRNSGSLSRGEEGFKGCLQPRALPSGSPAQGPSGNRPQSTGLSCQGRSRTPARTAGAPVRLDLPAAPGAVQARNLSNGSVPGFRQSHSPWFNGTNKHTLPLASAASKISSRDSKPPCRSVVPGPPLKPAPRRTDISELPRIPKIRRDDGGGRRDAAPAHGQSIEIPSACISRLTGREGTGQPGRGTRAESEASSRVPREPGVHTGSSRPPAPSSHGSLAPLGPSRGKGVGSTFESFRINIPGNMAHSSQLSSPGFCNTFRPVDDKEQRKENPSPLFSIKKTKQLRSEVYDPSDPTGSDSSAPGSSPERSGPGLLPSEITRTISINSPKAQTVQAVRCVTSYTVESIFGTEPEPPLGPSSAMSKLRGAVAAEGASDTEREEPTESQGLAARLRRPSPPEPWDEEDGASCSTFFGSEERTVTCVTVVEPEAPPSPDVLQAATHRVVELRPPSRSRSTSSSRSRKKAKRKRVSREHGRTRSGTRSESRDRSSRSASPSVGEERPRRQRSKAKSRRSSSDRSSSRERAKRKKAKDKSREHRRGPWGHSRRTSRSRSGSPGSSSYEHYESRKKKKRRSASRPRGRECSPTSSLERLCRHKHQRERSHERPDRKESVAWPRDRRKRRSRSPSSEHRAREHRRPRSREKWPQTRSHSPERKGAVREASPAPLAQGEPGREDLPTRLPALGEAHVSPEVATADKAPLQAPPVLEVAAECEPDDLDLDYGDSVEAGHVFDDFSSDAVFIQLDDMSSPPSPESTDSSPERDFPLKPALPPASLAVAAIQREVSLMHDEDPSQPPPLPEGTQEPHLLRPDAAEKAEAPSSPDVAPAGKEDSPSASGRVQEAARPEEVVSQTPLLRSRALVKRVTWNLQESESSAPAEDRAPRAPLHRPQKPREGAWDMEDVAPTGVRQVFSELPFPSHVLPEPGFPDTDPSQVYSPGLPPAPAQPSSIPPCALVSQPTVQFILQGSLPLVGCGAAQTLAPVPAALTPASEPASQATAASNSEEKTPAPRLAAEKTKKEEYMKKLHMQERAVEEVKLAIKPFYQKREVTKEEYKDILRKAVQKICHSKSGEINPVKVANLVKAYRSGCGDVHTHR

SEQ ID NO: 1750 - protein, 1633 aa, Artificial Sequence
  Synthetic polypeptide
MDDDSLDELVARSPGPDGHPQVGPADPAGDFEESSVGSSGDSGDDSDSEHGDGTDGEDEGASEEEDLEDRSGSEDSEDDGETLLEVAGTQGKLEAAGSFNSDDDAESCPICLNAFRDQAVGTPENCAHYFCLDCIVEWSKNANSCPVDRTLFKCICIRAQFGGKILRKIPVENTKASEEEEDPTFCEVCGRSDREDRLLLCDGCDAGYHMECLDPPLQEVPVDEWFCPECAAPGVVLAADAGPVSEEEVSLLLADVVPTTSRLRPRAGRTRAIARTRQSERVRATVNRNRISTARRVQHTPGRLGSSLLDEAIEAVATGLSTAVYQRPLTPRTPARRKRKTRRRKKVPGRKKTPSGPSAKSKSSATRSKKRQHRVKKRRGKKVKSEATTRSRIARTLGLRRPVHSSCIPSVLKPVEPSLGLLRADIGAASLSLFGDPYELDPFDSEELSANPLSPLSAKRRALSRSALQSHQPVARPVSVGLSRRRLPAAVPEPDLEEEPVPDLLGSILSGQSLLMLGSSDVIIHRDGSLSAKRAAPVSFQRNSGSLSRGEEGFKGCLQPRALPSGSPAQGPSGNRPQSTGLSCQGRSRTPARTAGAPVRLDLPAAPGAVQARNLSNGSVPGFRQSHSPWFNGTNKHTLPLASAASKISSRDSKPPCRSVVPGPPLKPAPRRTDISELPRIPKIRRDDGGGRRDAAPAHGQSIEIPSACISRLTGREGTGQPGRGTRAESEASSRVPREPGVHTGSSRPPAPSSHGSLAPLGPSRGKGVGSTFESFRINIPGNMAHSSQLSSPGFCNTFRPVDDKEQRKENPSPLFSIKKTKQLRSEVYDPSDPTGSDSSAPGSSPERSGPGLLPSEITRTISINSPKAQTVQAVRCVTSYTVESIFGTEPEPPLGPSSAMSKLRGAVAAEGASDTEREEPTESQGLAARLRRPSPPEPWDEEDGASCSTFFGSEERTVTCVTVVEPEAPPSPDVLQAATHRVVELRPPSRSRSTSSSRSRKKAKRKRVSREHGRTRSGTRSESRDRSSRSASPSVGEERPRRQRSKAKSRRSSSDRSSSRERAKRKKAKDKSREHRRGPWGHSRRTSRSRSGSPGSSSYEHYESRKKKKRRSASRPRGRECSPTSSLERLCRHKHQRERSHERPDRKESVAWPRDRRKRRSRSPSSEHRAREHRRPRSREKWPQTRSHSPERKGAVREASPAPLAQGEPGREDLPTRLPALGEAHVSPEVATADKAPLQAPPVLEVAAECEPDDLDLDYGDSVEAGHVFDDFSSDAVFIQLDDMSSPPSPESTDSSPERDFPLKPALPPASLAVAAIQREVSLMHDEDPSQPPPLPEGTQEPHLLRPDAAEKAEAPSSPDVAPAGKEDSPSASGRVQEAARPEEVVSQTPLLRSRALVKRVTWNLQESESSAPAEDRAPRAPLHRPQKPREGAWDMEDVAPTGVRQVFSELPFPSHVLPEPGFPDTDPSQVYSPGLPPAPAQPSSIPPCALVSQPTVQFILQGSLPLVGCGAAQTLAPVPAALTPASEPASQATAASNSEEKTPAPRLAAEKTKKEEYMKKLHMQERAVEEVKLAIKPFYQKREVTKEEYKDILRKAVQKICHSKSGEINPVKVANLVKAYRSGCGDVHTHR

SEQ ID NO: 1751 - protein, 1630 aa, Artificial Sequence
  Synthetic polypeptide
MDDDSLDELVARSPGPDGHPQVGPADPAESSVGSSGDSGDDSDSEHGDGTDGEDEGASEEEDLEDRSGSEDSEDDGETLLEVAGTQGKLEAAGSFNSDDDAESCPICLNAFRDQAVGTPENCAHYFCLDCIVEWSKNANSCPVDRTLFKCICIRAQFGGKILRKIPVENTKASEEEEDPTFCEVCGRSDREDRLLLCDGCDAGYHMECLDPPLQEVPVDEWFCPECAAPGVVLAADAGPVSEEEVSLLLADVVPTTSRLRPRAGRTRAIARTRQSERVRATVNRNRISTARRVQHTPGRLGSSLLDEAIEAVATGLSTAVYQRPLTPRTPARRKRKTRRRKKVPGRKKTPSGPSAKSKSSATRSKKRQHRVKKRRGKKVKSEATTRSRIARTLGLRRPVHSSCIPSVLKPVEPSLGLLRADIGAASLSLFGDPYELDPFDSSEELSANPLSPLSAKRRALSRSALQSHQPVARPVSVGLSRRRLPAAVPEPDLEEEPVPDLLGSILSGQSLLMLGSSDVIIHRDGSLSAKRAAPVSFQRNSGSLSRGEEGFKGCLQPRALPSGSPAQGPSGNRPQSTGLSCQGRSRTPARTAGAPVRLDLPAAPGAVQARNLSNGSVPGFRQSHSPWFNGTNKHTLPLASAASKISSRDSKPPCRSVVPGPPLKPAPRRTDISELPRIPKIRRDDGGGRRDAAPAHGQSIEIPSACISRLTGREGTGQPGRGTRAESEASSRVPREPGVHTGSSRPPAPSSHGSLAPLGPSRGKGVGSTFESFRINIPGNMAHSSQLSSPGFCNTFRPVDDKEQRKENPSPLFSIKKTKQLRSEVYDPSDPTGSDSSAPGSSPERSGPGLLPSEITRTISINSPKAQTVQAVRCVTSYTVESIFGTEPEPPLGPSSAMSKLRGAVAAEGASDTEREEPTESQGLAARLRRPSPPEPWDEEDGASCSTFFGSEERTVTCVTVVEPEAPPSPDVLQAATHRVVELRPPSRSRSTSSSRSRKKAKRKRVSREHGRTRSGTRSESRDRSSRSASPSVGEERPRRQRSKAKSRRSSSDRSSSRERAKRKKAKDKSREHRRGPWGHSRRTSRSRSGSPGSSSYEHYESRKKKKRRSASRPRGRECSPTSSLERLCRHKHQRERSHERPDRKESVAWPRDRRKRRSRSPSSEHRAREHRRPRSREKWPQTRSHSPERKGAVREASPAPLAQGEPGREDLPTRLPALGEAHVSPEVATADKAPLQAPPVLEVAAECEPDDLDLDYGDSVEAGHVFDDFSSDAVFIQLDDMSSPPSPESTDSSPERDFPLKPALPPASLAVAAIQREVSLMHDEDPSQPPPLPEGTQEPHLLRPDAAEKAEAPSSPDVAPAGKEDSPSASGRVQEAARPEEVVSQTPLLRSRALVKRVTWNLQESESSAPAEDRAPRAPLHRPQKPREGAWDMEDVAPTGVRQVFSELPFPSHVLPEPGFPDTDPSQVYSPGLPPAPAQPSSIPPCALVSQPTVQFILQGSLPLVGCGAAQTLAPVPAALTPASEPASQATAASNSEEKTPAPRLAAEKTKKEEYMKKLHMQERAVEEVKLAIKPFYQKREVTKEEYKDILRKAVQKICHSKSGEINPVKVANLVKAYRSGCGDVHTHR

SEQ ID NO: 1752 - protein, 132 aa, Artificial Sequence
  Synthetic polypeptide
MAVSTVFSTSSLMLALSRHSLLSPLLSVTSFRRFYRGDSPTDSQKDMIEIPLPPWQERTDESIETKRARLLYESRKRGMLENCILLSLFAKEHLQHMTEKQLNLYDRLINEPSNDWDIYYWATDSPGNTGSS

SEQ ID NO: 1753 - protein, 120 aa, Artificial Sequence
  Synthetic polypeptide
MLALSRHSLLSPLLSVTSFRRFYRGDSPTDSQKDMIEIPLPPWQERTDESIETKRARLLYESRKRGMLENCILLSLFAKEHLQHMTEKQLNLYDRLINEPSNDWDIYYWATDSPGNTGSS

SEQ ID NO: 1754 - protein, 178 aa, Artificial Sequence
  Synthetic polypeptide
MAVSTVFSTSSLMLALSRHSLLSPLLSVTSFRRFYRGDSPTDSQKDMIEIPLPPWQERTDESIETKRARLLYESRKRGMLENCILLSLFAKEHLQHMTEKQLNLYDRLINEPSNDWDIYYWATGTGEKVLYKKMAHSEVELNRFAWEHWLFLSLKPAGLETRTTSALSVLKPLDLLWN

SEQ ID NO: 1755 - protein, 222 aa, Artificial Sequence
  Synthetic polypeptide
MYRDPEAASPGAPSRDVLLVSAIITVSLSVTVVLCGLCHWCQRKLGKRYKNSLETVGTPDSGRGRSEKKAIKLPAGGKAVNTAPVPGQTPHDESDRRTEPRSSVSDLVNSLTSEMLMLSPGSEEDEAHEGCSRENLGRIQFSVGYNFQESTLTVKIMKAQELPAKDFSGTSDPFVKIYLLPDKKHKLETKVKRKNLNPHWNETFLFEAGSLGKYFKPSEPHL

SEQ ID NO: 1756 - protein, 297 aa, Artificial Sequence
  Synthetic polypeptide
MYRDPEAASPGAPSRDVLLVSAIITVSLSVTVVLCGLCHWCQRKLGKRYKNSLETVGTPDSGRGRSEKKAINGTLLSGAKVAAAAGLAVEREGRLGEKPAPVPPPGEDALRSGGAAPSEPGSGGKAGRGRWRTVQSHLAAGKLNLSKLPAGGKAVNTAPVPGQTPHDESDRRTEPRSSVSDLVNSLTSEMLMLSPGSEEDEAHEGCSRENLGRIQFSVGYNFQESTLTVKIMKAQELPAKDFSGTSDPFVKIYLLPDKKHKLETKVKRKNLNPHWNETFLFEAGSLGKYFKPSEPHL

SEQ ID NO: 1757 - protein, 505 aa, Artificial Sequence
  Synthetic polypeptide
MYRDPEAASPGAPSRDVLLVSAIITVSLSVTVVLCGLCHWCQRKLGKRYKNSLETVGTPDSGRGRSEKKAINDLDRDFWNNNESTVQQKWSSYPPKEFILNISPYAPYGDPRLSLNGTLLSGAKVAAAAGLAVEREGRLGEKPAPVPPPGEDALRSGGAAPSEPGSGGKAGRGRWRTVQSHLAAGKLNLSNFEDSTLSTATTLESIPSSTGEPKCQRPRTLMRQQSLQQPLSQHQRGRQPSQPTTSQSLGQLQAHMASAPGPNPRAYGRGQARQGTSAGSKYRAAGGRSRSNPGSWDHVVGQIRNRGLDMKSFLEGRMVVLSLVLGLSEQDDFANIPDLQNPGTQQNQNAQGDKRLPAGGKAVNTAPVPGQTPHDESDRRTEPRSSVSDLVNSLTSEMLMLSPGSEEDEAHEGCSRENLGRIQFSVGYNFQESTLTVKIMKAQELPAKDFSGTSDPFVKIYLLPDKKHKLETKVKRKNLNPHWNETFLFEAGSLGKYFKPSEPHL

SEQ ID NO: 1758 - protein, 266 aa, Artificial Sequence
  Synthetic polypeptide
MYRDPEAASPGAPSRDVLLVSAIITVSLSVTVVLCGLCHWCQRKLGKRYKNSLETVGTPDSGRGRSEKKAINDLDRDFWNNNESTVQQKWSSYPPKEFILNISPYAPYGDPRLSLKLPAGGKAVNTAPVPGQTPHDESDRRTEPRSSVSDLVNSLTSEMLMLSPGSEEDEAHEGCSRENLGRIQFSVGYNFQESTLTVKIMKAQELPAKDFSGTSDPFVKIYLLPDKKHKLETKVKRKNLNPHWNETFLFEAGSLGKYFKPSEPHL

SEQ ID NO: 1759 - protein, 430 aa, Artificial Sequence
  Synthetic polypeptide
MYRDPEAASPGAPSRDVLLVSAIITVSLSVTVVLCGLCHWCQRKLGKRYKNSLETVGTPDSGRGRSEKKAINDLDRDFWNNNESTVQQKWSSYPPKEFILNISPYAPYGDPRLSLNFEDSTLSTATTLESIPSSTGEPKCQRPRTLMRQQSLQQPLSQHQRGRQPSQPTTSQSLGQLQAHMASAPGPNPRAYGRGQARQGTSAGSKYRAAGGRSRSNPGSWDHVVGQIRNRGLDMKSFLEGRMVVLSLVLGLSEQDDFANIPDLQNPGTQQNQNAQGDKRLPAGGKAVNTAPVPGQTPHDESDRRTEPRSSVSDLVNSLTSEMLMLSPGSEEDEAHEGCSRENLGRIQFSVGYNFQESTLTVKIMKAQELPAKDFSGTSDPFVKIYLLPDKKHKLETKVKRKNLNPHWNETFLFEAGSLGKYFKPSEPHL

SEQ ID NO: 1760 - protein, 341 aa, Artificial Sequence
  Synthetic polypeptide
MYRDPEAASPGAPSRDVLLVSAIITVSLSVTVVLCGLCHWCQRKLGKRYKNSLETVGTPDSGRGRSEKKAINDLDRDFWNNNESTVQQKWSSYPPKEFILNISPYAPYGDPRLSLNGTLLSGAKVAAAAGLAVEREGRLGEKPAPVPPPGEDALRSGGAAPSEPGSGGKAGRGRWRTVQSHLAAGKLNLSKLPAGGKAVNTAPVPGQTPHDESDRRTEPRSSVSDLVNSLTSEMLMLSPGSEEDEAHEGCSRENLGRIQFSVGYNFQESTLTVKIMKAQELPAKDFSGTSDPFVKIYLLPDKKHKLETKVKRKNLNPHWNETFLFEAGSLGKYFKPSEPHL

SEQ ID NO: 1761 - protein, 118 aa, Artificial Sequence
  Synthetic polypeptide
MPGIVVFRRRWSVGSDDLVLPAIFLFLLHTTWFVILSVVLFGLVYNPHEACSLNLVDHGRGYLGILLSCMIAEMAIIWLSMRGGILYTEPRDSMQYVLYVRLGTEAGESLEPRRQRLQ

SEQ ID NO: 1762 - protein, 309 aa, Artificial Sequence
  Synthetic polypeptide
MGTRAARPAGLPCGAENPARRRLALGARQQIHSWSPRTPSTRLTAPAGPARGVARPAMAPDPVAAETAAQGPTPRYFTWDEVAQRSGCEERWLVIDRKVYNISEFTRRHPGGSRVISHYAGQDATDPFVAFHINKGLVKKYMNSLLIGELSPEQPSFEPTKNKELTDEFRELRATVERMGLMKANHVFFLLYLLHILLLDGAAWLTLWVFGTSFLPFLLCAVLLSAVQAQAGWLQHDFGHLSVFSTSKWNHLLHHFVIGHLKGAPASWWNHMHFQHHAKPNCFRKDPDINMHPFFFALGKILSVEVAVS

SEQ ID NO: 1763 - protein, 168 aa, Artificial Sequence
  Synthetic polypeptide
MNSLLIGELSPEQPSFEPTKNKELTDEFRELRATVERMGLMKANHVFFLLYLLHILLLDGAAWLTLWVFGTSFLPFLLCAVLLSAVQAQAGWLQHDFGHLSVFSTSKWNHLLHHFVIGHLKGAPASWWNHMHFQHHAKPNCFRKDPDINMHPFFFALGKILSVEVAVS

SEQ ID NO: 1764 - protein, 38 aa, Artificial Sequence
  Synthetic polypeptide
MHFQHHAKPNCFRKDPDINMHPFFFALGKILSVEVAVS

SEQ ID NO: 1765 - protein, 97 aa, Artificial Sequence
  Synthetic polypeptide
MKLLMVLMLAALSQHCYAGSGCPLLENVISKTINPQVSKTEYKELLQEFIDDNATTNAIDELKECFLNQTDETLSNVEVFMSEEAFLLSYLQLVAIK

SEQ ID NO: 1766 - protein, 37 aa, Artificial Sequence
  Synthetic polypeptide
MAALRRMLHLPSLMMGTCRPFAGRGGQIAWPRSSRPT

SEQ ID NO: 1767 - protein, 143 aa, Artificial Sequence
  Synthetic polypeptide
MEKRLQEAQLYKEEGNQRYREGKYRDAVSRYHRALLQLRGLDPSLPSPLPNLGPQGPALTPEQENILHTTQTDCYNNLAACLLQMEPVNYERVREYSQKVLERQPDNAKALYRAGVAFFHLQDYDQARHYLLAAVNRQPKGWA

SEQ ID NO: 1768 - protein, 41 aa, Artificial Sequence
  Synthetic polypeptide
RQPDNAKALYRAGVAFFHLQDYDQARHYLLAAVNRQPKGWA

SEQ ID NO: 1769 - protein, 50 aa, Artificial Sequence
  Synthetic polypeptide
MELQPPEASIAVVSIPRQLPGSHSEAGVQGLSAGDDSETSMANMVKTLLY

SEQ ID NO: 1770 - protein, 213 aa, Artificial Sequence
  Synthetic polypeptide
MDPEVTLLLQCPGGGLPQEQIQAELSPAHDRRPLPGGDEAITAIWETRLKAQPWLFDAPKFRLHSATLAPIGSRGPQLLLRLGLTSYRDFLGTNWSSSAAWLRQQGATDWGDTQAYLADPLGVGAALATADDFLVFLRRSRQVAEAPGLVDVPGGHPEPQALCPGGSPQHQDLAGQLVVHELFSSVLQEICDEALWRAPVIPATQEAEAGESL

SEQ ID NO: 1771 - protein, 244 aa, Artificial Sequence
  Synthetic polypeptide
MDPEVTLLLQCPGGGLPQEQIQAELSPAHDRRPLPGGDEAITAIWETRLKAQPWLFDAPKFRLHSATLAPIGSRGPQLLLRLGLTSYRDFLGTNWSSSAAWLRQQGATDWGDTQAYLADPLGVGAALATADDFLVFLRRSRQVAEAPGLVDVPGGHPEPQLDLWLSVRERTPDSGSLTLLHCATSDPQGQQALCPGGSPQHQDLAGQLVVHELFSSVLQEICDEALWRAPVIPATQEAEAGESL

SEQ ID NO: 1772 - protein, 817 aa, Artificial Sequence
  Synthetic polypeptide
MASGSRWRPTPPPLLLLLLLALAARADGLEFGGGPGQWARYARWAGAASSGELSFSLRTNATRALLLYLDDGGDCDFLELLLVDGRLRLRFTLSCAEPATLQLDTPVADDRWHMVLLTRDARRTALAVDGEARAAEVRSKRREMQVASDLFVGGIPPDVRLSALTLSTVKYEPPFRGLLANLKLGERPPALLGSQGLRGATADPLCAPARNPCANGGLCTVLAPGEVGCDCSHTGFGGKFCSEEEHPMEGPAHLTLNSEVGSLLFSEGGAGRGGAGDVHQPTKGKEEFVATFKGNEFFCYDLSHNPIQSSTDEITLAFRTLQRNGLMLHTGKSADYVNLSLKSGAVWLVINLGSGAFEALVEPVNGKFNDNAWHDVRVTRNLRQHAGIGHAMVNKLHYLVTISVDGILTTTGYTQEDYTMLGSDDFFYIGGSPNTADLPGSPVSNNFMGCLKDVVYKNNDFKLELSRLAKEGDPKMKLQGDLSFRCEDVAALDPVTFESPEAFVALPRWSAKRTGSISLDFRTTEPNGLLLFSQGRRAGGGAGSHSSAQRADYFAMELLDGHLYLLLDMGSGGIKLRASSRKVNDGEWCHVDFQRDGRKGSISVNSRSTPFLATGDSEILDLESELYLGGLPEGGRVDLPLPPEVWTAALRAGYVGCVRDLFIDGRSRDLRGLAEAQGAVGVAPFCSRETLKQCASAPCRNGGVCREGWNRFICDCIGTGFLGRVCEREATVLSYDGSMYMKIMLPNAMHTEAEDVSLRFMSQRAYGLMMATTSRESADTLRLELDGGQMKLTVNLDKNLHSAYVCGGFEAQMEEWE

SEQ ID NO: 1773 - protein, 786 aa, Artificial Sequence
  Synthetic polypeptide
MASGSRWRPTPPPLLLLLLLALAARADGLEFGGGPGQWARYARWAGAASSGELSFSLRTNATRALLLYLDDGGDCDFLELLLVDGRLRLRFTLSCAEPATLQLDTPVADDRWHMVLLTRDARRTALAVDGEARAAEVRSKRREMQVASDLFVGGIPPDVRLSALTLSTVKYEPPFRGLLANLKLGERPPALLGSQGLRGATADPLCAPARNPCANGGLCTVLAPGEVGCDCSHTGFGGKFCSEEEHPMEGPAHLTLNSEGKEEFVATFKGNEFFCYDLSHNPIQSSTDEITLAFRTLQRNGLMLHTGKSADYVNLSLKSGAVWLVINLGSGAFEALVEPVNGKFNDNAWHDVRVTRNLRQHAGIGHAMVTISVDGILTTTGYTQEDYTMLGSDDFFYIGGSPNTADLPGSPVSNNFMGCLKDVVYKNNDFKLELSRLAKEGDPKMKLQGDLSFRCEDVAALDPVTFESPEAFVALPRWSAKRTGSISLDFRTTEPNGLLLFSQGRRAGGGAGSHSSAQRADYFAMELLDGHLYLLLDMGSGGIKLRASSRKVNDGEWCHVDFQRDGRKGSISVNSRSTPFLATGDSEILDLESELYLGGLPEGGRVDLPLPPEVWTAALRAGYVGCVRDLFIDGRSRDLRGLAEAQGAVGVAPFCSRETLKQCASAPCRNGGVCREGWNRFICDCIGTGFLGRVCEREATVLSYDGSMYMKIMLPNAMHTEAEDVSLRFMSQRAYGLMMATTSRESADTLRLELDGGQMKLTVNLDKNLHSAYVCGGFEAQMEEWE

SEQ ID NO: 1774 - protein, 810 aa, Artificial Sequence
  Synthetic polypeptide
MASGSRWRPTPPPLLLLLLLALAARADGLEFGGGPGQWARYARWAGAASSGELSFSLRTNATRALLLYLDDGGDCDFLELLLVDGRLRLRFTLSCAEPATLQLDTPVADDRWHMVLLTRDARRTALAVDGEARAAEVRSKRREMQVASDLFVGGIPPDVRLSALTLSTVKYEPPFRGLLANLKLGERPPALLGSQGLRGATADPLCAPARNPCANGGLCTVLAPGEVGCDCSHTGFGGKFCSEEEHPMEGPAHLTLNSEVGSLLFSEGGAGRGGAGDVHQPTKGKEEFVATFKGNEFFCYDLSHNPIQSSTDEITLAFRTLQRNGLMLHTGKSADYVNLSLKSGAVWLVINLGSGAFEALVEPVNGKFNDNAWHDVRVTRNLRQHAGIGHAMVTISVDGILTTTGYTQEDYTMLGSDDFFYIGGSPNTADLPGSPVSNNFMGCLKDVVYKNNDFKLELSRLAKEGDPKMKLQGDLSFRCEDVAALDPVTFESPEAFVALPRWSAKRTGSISLDFRTTEPNGLLLFSQGRRAGGGAGSHSSAQRADYFAMELLDGHLYLLLDMGSGGIKLRASSRKVNDGEWCHVDFQRDGRKGSISVNSRSTPFLATGDSEILDLESELYLGGLPEGGRVDLPLPPEVWTAALRAGYVGCVRDLFIDGRSRDLRGLAEAQGAVGVAPFCSRETLKQCASAPCRNGGVCREGWNRFICDCIGTGFLGRVCEREATVLSYDGSMYMKIMLPNAMHTEAEDVSLRFMSQRAYGLMMATTSRESADTLRLELDGGQMKLTVNLDKNLHSAYVCGGFEAQMEEWE

SEQ ID NO: 1775 - protein, 125 aa, Artificial Sequence
  Synthetic polypeptide
MAGTLDLDKGCTVEELLRGCIEAFDDSGKVRDPQLVRMFLMMHPWYIPSSQLAAKLLHIYQQSRKDNSNSLQVKTCHLVRYWISAFPAEFDLNPELAEQIKELKALLDQEGNRRHSSLIDIDSVA

SEQ ID NO: 1776 - protein, 180 aa, Artificial Sequence
  Synthetic polypeptide
METKLPPASTPTSPSSPGLSPVPPPDKVDGFSRRSLRRARPRRSHSSSQFRYQSNQQELTPLPLLKDVPASELHELLSRKLAQCGVMFDFLDCVADLKGKEVKRAALNELVECVGSTRGVLIEPVYPDIIRMTSQLLALFSPLDCTCLEGRDVSHSPLGSQPLAQGLHELGVQVMIAQGM

SEQ ID NO: 1777 - protein, 94 aa, Artificial Sequence
  Synthetic polypeptide
MFDFLDCVADLKGKEVKRAALNELVECVGSTRGVLIEPVYPDIIRMTSQLLALFSPLDCTCLEGRDVSHSPLGSQPLAQGLHELGVQVMIAQGM

SEQ ID NO: 1778 - protein, 593 aa, Artificial Sequence
  Synthetic polypeptide
MAKREDSPGPEVQPMDKQFLVCSICLDRYQCPKVLPCLHTFCERCLQNYIPAQSLTLSCPVCRQTSILPEQGVSALQNNFFISSLMEAMQQAPDGAHDPEDPHPLSVVAGRPLSCPNHEGKTMEFYCEACETAMCGECRAGEHREHGTVLLRDVVEQHKAALQRQLEAVRGRLPQLSAAIALVGGISQQLQERKAEALAQISAAFEDLEQALQQRKQALVSDLETICGAKQKVLQSQLDTLRQGQEHIGSSCSFAEQALRLGSAPEVLLVRKHMRERLAALAAQAFPERPHENAQLELVLEVDGLRRSVLNLGALLTTSATAHETVATGEGLRQALVGQPASLTVTTKDKDGRLVRTGSAELRAEITGPDGTRLPVPVVDHKNGTYELVYTARTEGELLLSVLLYGQPVRGSPFRVRALRPGDLPPSPDDVKRRVKSPGGPGSHVRQKAVRRPSSMYSTGGKRKDNPIEDELVFRVGSRGREKGEFTNLQGVSAASSGRIVVADSNNQCIQSATKSHEPTSYICLESICVPPANFLGPSHHHFSTGILQQPLTGQLACSLDFSLQPECSFLKAKLILSLLCLEMLRNSSLHPG

SEQ ID NO: 1779 - protein, 474 aa, Artificial Sequence
  Synthetic polypeptide
MKTMEFYCEACETAMCGECRAGEHREHGTVLLRDVVEQHKAALQRQLEAVRGRLPQLSAAIALVGGISQQLQERKAEALAQISAAFEDLEQALQQRKQALVSDLETICGAKQKVLQSQLDTLRQGQEHIGSSCSFAEQALRLGSAPEVLLVRKHMRERLAALAAQAFPERPHENAQLELVLEVDGLRRSVLNLGALLTTSATAHETVATGEGLRQALVGQPASLTVTTKDKDGRLVRTGSAELRAEITGPDGTRLPVPVVDHKNGTYELVYTARTEGELLLSVLLYGQPVRGSPFRVRALRPGDLPPSPDDVKRRVKSPGGPGSHVRQKAVRRPSSMYSTGGKRKDNPIEDELVFRVGSRGREKGEFTNLQGVSAASSGRIVVADSNNQCIQSATKSHEPTSYICLESICVPPANFLGPSHHHFSTGILQQPLTGQLACSLDFSLQPECSFLKAKLILSLLCLEMLRNSSLHPG

SEQ ID NO: 1780 - protein, 515 aa, Artificial Sequence
  Synthetic polypeptide
MAKREDSPGPEVQPMDKQFLVCSICLDRYQCPKVLPCLHTFCERCLQNYIPAQSLTLSCPVCRQTSILPEQGVSALQNNFFISSLMEAMQQAPDGAHDPEDPHPLSVVAGRPLSCPNHEGKTMEFYCEACETAMCGECRAGEHREHGTVLLRDVVEQHKAALQRQLEAVRGRLPQLSAAIALVGGISQQLQERKAEALAQISAAFEDLEQALQQRKQALVSDLVDGLRRSVLNLGALLTTSATAHETVATGEGLRQALVGQPASLTVTTKDKDGRLVRTGSAELRAEITGPDGTRLPVPVVDHKNGTYELVYTARTEGELLLSVLLYGQPVRGSPFRVRALRPGDLPPSPDDVKRRVKSPGGPGSHVRQKAVRRPSSMYSTGGKRKDNPIEDELVFRVGSRGREKGEFTNLQGVSAASSGRIVVADSNNQCIQSATKSHEPTSYICLESICVPPANFLGPSHHHFSTGILQQPLTGQLACSLDFSLQPECSFLKAKLILSLLCLEMLRNSSLHPG

SEQ ID NO: 1781 - protein, 112 aa, Artificial Sequence
  Synthetic polypeptide
MSGRRTRSGGAAQRSGPRAPSPTKPLRRSQRKSGSELPSILPEIWPKTPSAAAVRKPIVLKRIVAHAVEVPAVQSPRRSPRNGAGVFSVLFPAVFPVPGTGQVTDKYLWTEW

SEQ ID NO: 1782 - protein, 6 aa, Artificial Sequence
  Synthetic polypeptide
SESPSS

SEQ ID NO: 1783 - protein, 97 aa, Artificial Sequence
  Synthetic polypeptide
MQLFVRAQELHTFEVTGQETVAQIKAHVASLEGIAPEDQVVLLAGAPLEDEATLGQCGVEALTTLEVAGRMLGGKVHGSLARAGKVRGQTPKGCCEG

SEQ ID NO: 1784 - protein, 62 aa, Artificial Sequence
  Synthetic polypeptide
MQLFVRAQELHTFEVTGQETVAQIKALTTLEVAGRMLGGKVHGSLARAGKVRGQTPKGCCEG

SEQ ID NO: 1785 - protein, 143 aa, Artificial Sequence
  Synthetic polypeptide
MSASAQQLAEELQIFGLDCEEALIEKLVELCVQYGQNEEGMVGELIAFCTSTHKVGLTSEILNSFEHEFLSKRLSKARHSTCKDSGHAGARDIVSIQELIEVEEEEEILLNSYTTPSKLFFCFRVHHKSADDLAAMSLTERMC

SEQ ID NO: 1786 - protein, 103 aa, Artificial Sequence
  Synthetic polypeptide
MVGELIAFCTSTHKVGLTSEILNSFEHEFLSKRLSKARHSTCKDSGHAGARDIVSIQELIEVEEEEEILLNSYTTPSKLFFCFRVHHKSADDLAAMSLTERMC

SEQ ID NO: 1787 - protein, 302 aa, Artificial Sequence
  Synthetic polypeptide
MPVEEFVAGWISGALGLVLGHPFDTVKVRLQTQTTYRGIVDCMVKIYRHESLLGFFKGMSFPIASIAVVNSVLFGVYSNTLLVLTATSHQERRAQPPSYMHIFLAGCTGGFLQAYCLAPFDLIKVRLQNQTEPRAQPGSPPPRYQGPVHCAASIFREEGPRGLFRGAWALTLRDTPTVGIYFITYEGLCRQYTPEGQNPSSATVLVAGGFAGIASWVAATPLDMIKSRMQMDGLRRRVYQGMLDCMNPSVALITFRKSPNSFHPPGSSLPTRLCSPGVASWTLNKLCSHWPGLASSAQCLAG

SEQ ID NO: 1788 - protein, 278 aa, Artificial Sequence
  Synthetic polypeptide
MPVEEFVAGWISGALGLVLGHPFDTVKLLGFFKGMSFPIASIAVVNSVLFGVYSNTLLVLTATSHQERRAQPPSYMHIFLAGCTGGFLQAYCLAPFDLIKVRLQNQTEPRAQPGSPPPRYQGPVHCAASIFREEGPRGLFRGAWALTLRDTPTVGIYFITYEGLCRQYTPEGQNPSSATVLVAGGFAGIASWVAATPLDMIKSRMQMDGLRRRVYQGMLDCMNPSVALITFRKSPNSFHPPGSSLPTRLCSPGVASWTLNKLCSHWPGLASSAQCLAG

SEQ ID NO: 1789 - protein, 198 aa, Artificial Sequence
  Synthetic polypeptide
MVKIYRHESAYCLAPFDLIKVRLQNQTEPRAQPGSPPPRYQGPVHCAASIFREEGPRGLFRGAWALTLRDTPTVGIYFITYEGLCRQYTPEGQNPSSATVLVAGGFAGIASWVAATPLDMIKSRMQMDGLRRRVYQGMLDCMNPSVALITFRKSPNSFHPPGSSLPTRLCSPGVASWTLNKLCSHWPGLASSAQCLAG

SEQ ID NO: 1790 - protein, 260 aa, Artificial Sequence
  Synthetic polypeptide
MVKIYRHESLLGFFKGMSFPIASIAVVNSVLFGVYSNTLLVLTATSHQERRAQPPSYMHIFLAGCTGGFLQAYCLAPFDLIKVRLQNQTEPRAQPGSPPPRYQGPVHCAASIFREEGPRGLFRGAWALTLRDTPTVGIYFITYEGLCRQYTPEGQNPSSATVLVAGGFAGIASWVAATPLDMIKSRMQMDGLRRRVYQGMLDCMNPSVALITFRKSPNSFHPPGSSLPTRLCSPGVASWTLNKLCSHWPGLASSAQCLAG

SEQ ID NO: 1791 - protein, 240 aa, Artificial Sequence
  Synthetic polypeptide
MPVEEFVAGWISGALGLVLGHPFDTVKVRLQTQTTYRGIVDCMVKIYRHESAYCLAPFDLIKVRLQNQTEPRAQPGSPPPRYQGPVHCAASIFREEGPRGLFRGAWALTLRDTPTVGIYFITYEGLCRQYTPEGQNPSSATVLVAGGFAGIASWVAATPLDMIKSRMQMDGLRRRVYQGMLDCMNPSVALITFRKSPNSFHPPGSSLPTRLCSPGVASWTLNKLCSHWPGLASSAQCLAG

SEQ ID NO: 1792 - protein, 38 aa, Artificial Sequence
  Synthetic polypeptide
MPVEEFVAGWISARRGGARLWSQLLQRLRWKEPLSSGG

SEQ ID NO: 1793 - protein, 198 aa, Artificial Sequence
  Synthetic polypeptide
MDGTEGSAGQPGPAERSHRSSVSSVGARAADVLVYLADDTVVPLAVENLPSLSAHELHRAVREVLQLPDIALDVFALWLVSPLLEVQLKPKHQPYKLGRQWPELLLRFTSAPDDDVAMDEPFLQFRRNVFFPKRRELQIHDEEVLRLLYEEAKGNVLAARYPCDVEDCEALGALVCRVQLGPYQPGRPAACDLRWRLQ

SEQ ID NO: 1794 - protein, 142 aa, Artificial Sequence
  Synthetic polypeptide
MDGTEGSAGQPGPAERSHRSSVSSVGAREVQLKPKHQPYKLGRQWPELLLRFTSAPDDDVAMDEPFLQFRRNVFFPKRRELQIHDEEVLRLLYEEAKGNVLAARYPCDVEDCEALGALVCRVQLGPYQPGRPAACDLRWRLQ

SEQ ID NO: 1795 - protein, 164 aa, Artificial Sequence
  Synthetic polypeptide
MDGTEGSAGQPGPAERSHRSSVSSVGARAADVLVYLADDTVVPLAVENLPSLSAHELHRAVREVLQLPDIALDVFALWLVSPLLDEPFLQFRRNVFFPKRRELQIHDEEVLRLLYEEAKGNVLAARYPCDVEDCEALGALVCRVQLGPYQPGRPAACDLRWRLQ

SEQ ID NO: 1796 - protein, 156 aa, Artificial Sequence
  Synthetic polypeptide
MDGTEGSAGQPGPAERSHRSSVSSVGARADDTVVPLAVENLPSLSAHELHRAVREVLQLPDIALDVFALWLVSPLLDEPFLQFRRNVFFPKRRELQIHDEEVLRLLYEEAKGNVLAARYPCDVEDCEALGALVCRVQLGPYQPGRPAACDLRWRLQ

SEQ ID NO: 1797 - protein, 84 aa, Artificial Sequence
  Synthetic polypeptide
QVAYVRARELHTLEVTGLETVAQSKAHVASLEGLIPEDKVVLLAGSPLQNEATLGQCGVEALTTLEVVGRRLGVSGFASKIGKI

SEQ ID NO: 1798 - protein, 128 aa, Artificial Sequence
  Synthetic polypeptide
MTSVWKRLQRVGKRAAKFQFVACYHELVLECTKKWQPDKLVVVWTRRNRRICSKAHSWQPGIQNPYRGTVVWMVPENVDISVTLYRLLGRLRHENCLNLGGRGCSEPRSHPCTPASTTEEDSVSKKKK

SEQ ID NO: 1799 - protein, 319 aa, Artificial Sequence
  Synthetic polypeptide
MDELFPLIFPAEPAQASGPYVEIIEQPKQRGMRFRYKCEGRSAGSIPGERSTDTTKTHPTIKINGYTGPGTVRISLVTKDPPHRPHPHELVGKDCRDGFYEAELCPDRCIHSFQNLGIQCVKKRDLEQAISQRIQTNNNPFQVPIEEQRGDYDLNAVRLCFQVTVRDPSGRPLRLPPVLSHPIFDNRAPNTAELKICRVNRNSGSCLGGDEIFLLCDKVQKEDIEVYFTGPGWEARGSFSQADVHRQVAIVFRTPPYADPSLQAPVRVSMQLRRPSDRELSEPMEFQYLPDTGCQLFGSRHLVCILTATSPVSRREAGT

SEQ ID NO: 1800 - protein, 252 aa, Artificial Sequence
  Synthetic polypeptide
MDELFPLIFPAEPAQASGPYVEIIEQPKQRGMRFRYKCEGRSAGSIPGERSTDTTKTHPTIKINGYTGPGTVRISLVTKDPPHRPHPHELVGKDCRDGFYEAELCPDRCIHSFQNLGIQCVKKRDLEQAISQRIQTNNNPFQVPIEEQRGDYDLNAVRLCFQVTVRDPSGRPLRLPPVLSHPIFDNRAPNTAELKICRVNRNSGSCLGGDEIFLLCDKVQKAHGIPVPARYRMPTFWEQTPCVHTHGHIPSV

SEQ ID NO: 1801 - protein, 316 aa, Artificial Sequence
  Synthetic polypeptide
MDELFPLIFPAEPAQASGPYVEIIEQPKQRGMRFRYKCEGRSAGSIPGERSTDTTKTHPTIKINGYTGPGTVRISLVTKDPPHRPHPHELVGKDCRDGFYEAELCPDRCIHSFQNLGIQCVKKRDLEQAISQRIQTNNNPFQEEQRGDYDLNAVRLCFQVTVRDPSGRPLRLPPVLSHPIFDNRAPNTAELKICRVNRNSGSCLGGDEIFLLCDKVQKEDIEVYFTGPGWEARGSFSQADVHRQVAIVFRTPPYADPSLQAPVRVSMQLRRPSDRELSEPMEFQYLPDTGCQLFGSRHLVCILTATSPVSRREAGT

SEQ ID NO: 1802 - protein, 330 aa, Artificial Sequence
  Synthetic polypeptide
MDELFPLIFPAEPAQASGPYVEIIEQPKQRGMRFRYKCEGRSAGSIPGERSTDTTKTHPTIKVWMSGPLYFGQINGYTGPGTVRISLVTKDPPHRPHPHELVGKDCRDGFYEAELCPDRCIHSFQNLGIQCVKKRDLEQAISQRIQTNNNPFQVPIEEQRGDYDLNAVRLCFQVTVRDPSGRPLRLPPVLSHPIFDNRAPNTAELKICRVNRNSGSCLGGDEIFLLCDKVQKEDIEVYFTGPGWEARGSFSQADVHRQVAIVFRTPPYADPSLQAPVRVSMQLRRPSDRELSEPMEFQYLPDTGCQLFGSRHLVCILTATSPVSRREAGT

SEQ ID NO: 1803 - protein, 112 aa, Artificial Sequence
  Synthetic polypeptide
MDELFPLIFPAEPAQASGPYVEIIEQPKQRGMRFRYKCEGRSAGSIPGERSTDTTKTHPTIKINGYTGPGTVRISLVTKDPPHRPHPHELVGKDCRDGFYEAELCPDRCIHR

SEQ ID NO: 1804 - protein, 123 aa, Artificial Sequence
  Synthetic polypeptide
MDELFPLIFPAEPAQASGPYVEIIEQPKQRGMRFRYKCEGRSAGSIPGERSTDTTKTHPTIKVWMSGPLYFGQINGYTGPGTVRISLVTKDPPHRPHPHELVGKDCRDGFYEAELCPDRCIHR

SEQ ID NO: 1805 - protein, 103 aa, Artificial Sequence
  Synthetic polypeptide
MDEPAQASGPYVEIIEQPKQRGMRFRYKCEGRSAGSIPGERSTDTTKTHPTIKINGYTGPGTVRISLVTKDPPHRPHPHELVGKDCRDGFYEAELCPDRCIHR

SEQ ID NO: 1806 - protein, 81 aa, Artificial Sequence
  Synthetic polypeptide
MRFRYKCEGRSAGSIPGERSTDTTKTHPTIKINGYTGPGTVRISLVTKDPPHRPHPHELVGKDCRDGFYEAELCPDRCIHR

SEQ ID NO: 1807 - protein, 113 aa, Artificial Sequence
  Synthetic polypeptide
MDELFPLIFPAEPAQASGPYVEIIEQPKQRGMRFRYKCEGRSAGSIPGERSTDTTKTHPTIKINGYTGPGTVRISLVTKDPPHRPHPHELVGKDCRDGFYEAELCPDRCIHSR

SEQ ID NO: 1808 - protein, 124 aa, Artificial Sequence
  Synthetic polypeptide
MDELFPLIFPAEPAQASGPYVEIIEQPKQRGMRFRYKCEGRSAGSIPGERSTDTTKTHPTIKVWMSGPLYFGQINGYTGPGTVRISLVTKDPPHRPHPHELVGKDCRDGFYEAELCPDRCIHSR

SEQ ID NO: 1809 - protein, 104 aa, Artificial Sequence
  Synthetic polypeptide
MDEPAQASGPYVEIIEQPKQRGMRFRYKCEGRSAGSIPGERSTDTTKTHPTIKINGYTGPGTVRISLVTKDPPHRPHPHELVGKDCRDGFYEAELCPDRCIHSR

SEQ ID NO: 1810 - protein, 82 aa, Artificial Sequence
  Synthetic polypeptide
MRFRYKCEGRSAGSIPGERSTDTTKTHPTIKINGYTGPGTVRISLVTKDPPHRPHPHELVGKDCRDGFYEAELCPDRCIHSR

SEQ ID NO: 1811 - protein, 243 aa, Artificial Sequence
  Synthetic polypeptide
MLPCASCLPGSLLLWALLLLLLGSASPQDSEEPDSYTECTDGYEWDPDSQHCRDVNECLTIPEACKGEMKCINHYGGYLCLPRSAAVINDLHGEGPPPPVPPAQHPNPCPPGYEPDDQDSCVDVDECAQALHDCRPSQDCHNLPGSYQCTCPDGYRKIGPECVDIDECRYRYCQHRCVNLPGSFRCQCEPGFQLGPNNRSCVDVNECDMGAPCEQRCFNSYGTFLCRCHQGYELHRDGFSCSG

SEQ ID NO: 1812 - protein, 218 aa, Artificial Sequence
  Synthetic polypeptide
MTSELDIFVGNTTLIDEDVYRLWLDGYSVTDAVALRVRSGILEQTGATAAVLQSDTMDHYRTFHMLERLLHAPPKLLHQLIFQIPPSRQALLIERYYAFDEAFVREVLGKKLSKGTKKDLDDISTKTGITLKSCRRQFDNFKRVFKVVEEMRGSLVDNIQQHFLLSDRLARDYAAIVFFANNRFETGKKKLQYLSFGDFAFCAELMIQNWTLGAVGGK

SEQ ID NO: 1813 - protein, 7 aa, Artificial Sequence
  Synthetic polypeptide
MPSALSS

SEQ ID NO: 1814 - protein, 215 aa, Artificial Sequence
  Synthetic polypeptide
MTSELDIFVGNTTLIDEDVYRLWLDVTDAVALRVRSGILEQTGATAAVLQSDTMDHYRTFHMLERLLHAPPKLLHQLIFQIPPSRQALLIERYYAFDEAFVREVLGKKLSKGTKKDLDDISTKTGITLKSCRRQFDNFKRVFKVVEEMRGSLVDNIQQHFLLSDRLARDYAAIVFFANNRFETGKKKLQYLSFGDFAFCAELMIQNWTLGAVGGK

SEQ ID NO: 1815 - protein, 922 aa, Artificial Sequence
  Synthetic polypeptide
MAERGGAGGGPGGAGGGSGQRGSGVAQSPQQPPPQQQQQQPPQQPTPPKLAQATSSSSSTSAAAASSSSSSTSTSMAVAVASGSAPPGGPGPGRTPAPVQMNLYATWEVDRSSSSCVPRLFSLTLKKLVMLKEMDKDLNSVVIAVKLQGSKRILRSNEIVLPASGLVETELQLTFSLQYPHFLKRDANKLQIMLQRRKRYKNRTILGYKTLAVGLINMAEVMQHPNEGALVLGLHSNVKDVSVPVAEIKIYSLSSQPIDHEGIKSKLSDRSPDIDNYSEEEEESFSSEQEGSDDPLHGQDLFYEDEDLRKVKKTRRKLTSTSAITRQPNIKQKFVALLKRFKVSDEVGFGLEHVSREQIREVEEDLDELYDSLEMYNPSDSGPEMEETESILSTPKPKLKPFFEGMSQSSSQTEIGSLNSKGSLGKDTTSPMELAALEKIKSTWIKNQDDSLTETDTLEITDQDMFGDASTSLVVPEKVKTPMKSSKTDLQGSASPSKVEGVHTPRQKRSTPLKERQLSKPLSERTNSSDSERSPDLGHSTQIPRKVVYDQLNQILVSDAALPENVILVNTTDWQGQYVAELLQDQRKPVVCTCSTVEVQAVLSALLTRIQRYCNCNSSMPRPVKVAAVGGQSYLSSILRFFVKSLANKTSDWLGYMRFLIIPLGSHPVAKYLGSVDSKYSSSFLDSGWRDLFSRSEPPVSEQLDVAGRVMQYVNGAATTHQLPVAEAMLTCRHKFPDEDSYQKFIPFIGVVKVGLVEDSPSTAGDGDDSPVVSLTVPSTSPPSSSGLSRDATATPPSSPSMSSALAIVGSPNSPYGDVIGLQVDYWLGHPGERRREGDKRDASSKNTLKSVFRSVQVSRLPHSGEAQLSGTMAMTVVTKEKNKKECKLQEKRKCFSLLYPWHPKYCLAHHRCTINTRLQNE

SEQ ID NO: 1816 - protein, 458 aa, Artificial Sequence
  Synthetic polypeptide
MFGDASTSLVVPEKVKTPMKSSKTDLQGSASPSKVEGVHTPRQKRSTPLKERQLSKPLSERTNSSDSERSPDLGHSTQIPRKVVYDQLNQILVSDAALPENVILVNTTDWQGQYVAELLQDQRKPVVCTCSTVEVQAVLSALLTRIQRYCNCNSSMPRPVKVAAVGGQSYLSSILRFFVKSLANKTSDWLGYMRFLIIPLGSHPVAKYLGSVDSKYSSSFLDSGWRDLFSRSEPPVSEQLDVAGRVMQYVNGAATTHQLPVAEAMLTCRHKFPDEDSYQKFIPFIGVVKVGLVEDSPSTAGDGDDSPVVSLTVPSTSPPSSSGLSRDATATPPSSPSMSSALAIVGSPNSPYGDVIGLQVDYWLGHPGERRREGDKRDASSKNTLKSVFRSVQVSRLPHSGEAQLSGTMAMTVVTKEKNKKECKLQEKRKCFSLLYPWHPKYCLAHHRCTINTRLQNE

SEQ ID NO: 1817 - protein, 50 aa, Artificial Sequence
  Synthetic polypeptide
MAMTVVTKEKNKKECKLQEKRKCFSLLYPWHPKYCLAHHRCTINTRLQNE

SEQ ID NO: 1818 - protein, 46 aa, Artificial Sequence
  Synthetic polypeptide
GRDWPPGGLLAGPPRGAEEGRRQEGRQLEEHPQECLPLSAGVPPAP

SEQ ID NO: 1819 - protein, 962 aa, Artificial Sequence
  Synthetic polypeptide
MAERGGAGGGPGGAGGGSGQRGSGVAQSPQQPPPQQQQQQPPQQPTPPKLAQATSSSSSTSAAAASSSSSSTSTSMAVAVASGSAPPGGPGPGRTPAPVQMNLYATWEVDRSSSSCVPRLFSLTLKKLVMLKEMDKDLNSVVIAVKLQGSKRILRSNEIVLPASGLVETELQLTFSLQYPHFLKRDANKLQIMLQRRKRYKNRTILGYKTLAVGLINMAEVMQHPNEGALVLGLHSNVKDVSVPVAEIKIYSLSSQPIDHEGIKSKLSDRSPDIDNYSEEEEESFSSEQEGSDDPLHGQDLFYEDEDLRKVKKTRRKLTSTSAITRQPNIKQKFVALLKRFKVSDEVGFGLEHVSREQIREVEEDLDELYDSLEMYNPSDSGPEMEETESILSTPKPKLKPFFEGMSQSSSQTEIGSLNSKGSLGKDTTSPMELAALEKIKSTWIKNQDDSLTETDTLEITDQDMFGDASTSLVVPEKVKTPMKSSKTDLQGSASPSKVEGVHTPRQKRSTPLKERQLSKPLSERTNSSDSERSPDLGHSTQIPRKVVYDQLNQILVSDAALPENVILVNTTDWQGQYVAELLQDQRKPVVCTCSTVEVQAVLSALLTRIQRYCNCNSSMPRPVKVAAVGGQSYLSSILRFFVKSLANKTSDWLGYMRFLIIPLGSHPVAKYLGSVDSKYSSSFLDSGWRDLFSRSEPPVSEQLDVAGRVMQYVNGAATTHQLPVAEAMLTCRHKFPDEDSYQKFIPFIGVVKVGLVEDSPSTAGDGDDSPVVSLTVPSTSPPSSSGLSRDATATPPSSPSMSSALAIVGSPNSPYGDVIGLQVDYWLGHPGERRREGDKRDASSKNTLKSVFRSVQVSRLPHSGEAQLSGTMAMTVVTKEKNKKVPTIFLSKKPREKEVDSKSQVIEGISRLICSAKQQQTMLRECKLQEKRKCFSLLYPWHPKYCLAHHRCTINTRLQNE

SEQ ID NO: 1820 - protein, 498 aa, Artificial Sequence
  Synthetic polypeptide
MFGDASTSLVVPEKVKTPMKSSKTDLQGSASPSKVEGVHTPRQKRSTPLKERQLSKPLSERTNSSDSERSPDLGHSTQIPRKVVYDQLNQILVSDAALPENVILVNTTDWQGQYVAELLQDQRKPVVCTCSTVEVQAVLSALLTRIQRYCNCNSSMPRPVKVAAVGGQSYLSSILRFFVKSLANKTSDWLGYMRFLIIPLGSHPVAKYLGSVDSKYSSSFLDSGWRDLFSRSEPPVSEQLDVAGRVMQYVNGAATTHQLPVAEAMLTCRHKFPDEDSYQKFIPFIGVVKVGLVEDSPSTAGDGDDSPVVSLTVPSTSPPSSSGLSRDATATPPSSPSMSSALAIVGSPNSPYGDVIGLQVDYWLGHPGERRREGDKRDASSKNTLKSVFRSVQVSRLPHSGEAQLSGTMAMTVVTKEKNKKVPTIFLSKKPREKEVDSKSQVIEGISRLICSAKQQQTMLRECKLQEKRKCFSLLYPWHPKYCLAHHRCTINTRLQNE

SEQ ID NO: 1821 - protein, 90 aa, Artificial Sequence
  Synthetic polypeptide
MAMTVVTKEKNKKVPTIFLSKKPREKEVDSKSQVIEGISRLICSAKQQQTMLRECKLQEKRKCFSLLYPWHPKYCLAHHRCTINTRLQNE

SEQ ID NO: 1822 - protein, 160 aa, Artificial Sequence
  Synthetic polypeptide
MAYHSGYGAHGSKHRARAAPDPPPLFDDTSGGYSSQPGGYPATGADVAFSVNHLLGDPMANVAMAYGSSIASHGKDMVHKELHRFVSVSKLKYFFAVDTAYVAKKLGLLVFPYTHQNWEVQYSRDAPLPPRQDLNAPDLYIPSCPHIQLTLLCPVGCTGP

SEQ ID NO: 1823 - protein, 252 aa, Artificial Sequence
  Synthetic polypeptide
MARGDAPRDSYHLVGISFFILGLGTLLPWNFFITAIPYFQARLAGAGNSTARILSTNHTGPEDAFNFNNWVTLLSQLPLLLFTLLNSFLYQCVPETVRILGSLLAILLLFALTAALVKVDMSPGPFFSITMASVCFINSFSAVLQGSLFGQLGTMPSTYSTLFLSGQGLAGIFAALAMLLSMASGVDAETSALGYFITPCVGILMSIVCYLSLPHLKFARYYLANKSSQAQAQELETKAELLQSVSTSIKWG

SEQ ID NO: 1824 - protein, 488 aa, Artificial Sequence
  Synthetic polypeptide
MDPSWRRSSHSWPQPMPDSGRAPVRPHLAKLEEDVWPCPQFHQTKAASGPPFVNEANSKWLDAHYDPMANIHTFSACLALADLHGDGEYKLVVGDLGPGGQQPRLKVLKGPLVMTESPLPALPAAAATFLMEQHEPRTPALALASGPCVYVYKNLRPYFKFSLPQLPPNPLEQDLWNQAKEDRIDPLTLKEMLESIRETAEEPLSIQSLRFLQLELSEMEAFVNQHKSNSIKRQTVITTMTTLKKNLADEDAVSCLVLGTENKELLVLDPEAFTILAKMSLPSVPVFLEVSGQFDVEFRLAAACRNGNIYILRRDSKHPKYCIELSAQPVGLIRVHKVLVVGSTQDSLHGFTHKGKKLWTVQMPAAILTMNLLEQHSRGLQAVMAGLANGEVRIYRDKALLNVIHTPDAVTSLCFGRYGREDNTLIMTTRGGGLIIKILKRTAVFVEGGSEVGPPPAQAMKLNVPRKTRLYVDQTLREREAGTGRRIT

SEQ ID NO: 1825 - protein, 451 aa, Artificial Sequence
  Synthetic polypeptide
MAAASSSDSDACGAESNEANSKWLDAHYDPMANIHTFSACLALADLHGDGEYKLVVGDLGPGGQQPRLKVLKGPLVMTESPLPALPAAAATFLMEQHEPRTPALALASGPCVYVYKNLRPYFKFSLPQLPPNPLEQDLWNQAKEDRIDPLTLKEMLESIRETAEEPLSIQSLRFLQLELSEMEAFVNQHKSNSIKRQTVITTMTTLKKNLADEDAVSCLVLGTENKELLVLDPEAFTILAKMSLPSVPVFLEVSGQFDVEFRLAAACRNGNIYILRRDSKHPKYCIELSAQPVGLIRVHKVLVVGSTQDSLHGFTHKGKKLWTVQMPAAILTMNLLEQHSRGLQAVMAGLANGEVRIYRDKALLNVIHTPDAVTSLCFGRYGREDNTLIMTTRGGGLIIKILKRTAVFVEGGSEVGPPPAQAMKLNVPRKTRLYVDQTLREREAGTGRRIT

SEQ ID NO: 1826 - protein, 354 aa, Artificial Sequence
  Synthetic polypeptide
MAAASSSDSDACGAESNEANSKWLDAHYDPMANIHTFSACLALADLHGDGEYKLVVGDLGPGGQQPRLKVLKGPLVMTESPLPALPAAAATFLMEQHEPRTPALALASGPCVYVYKNLRPYFKFSLPQLPPNPLEQDLWNQAKEMSLPSVPVFLEVSGQFDVEFRLAAACRNGNIYILRRDSKHPKYCIELSAQPVGLIRVHKVLVVGSTQDSLHGFTHKGKKLWTVQMPAAILTMNLLEQHSRGLQAVMAGLANGEVRIYRDKALLNVIHTPDAVTSLCFGRYGREDNTLIMTTRGGGLIIKILKRTAVFVEGGSEVGPPPAQAMKLNVPRKTRLYVDQTLREREAGTGRRIT

SEQ ID NO: 1827 - protein, 322 aa, Artificial Sequence
  Synthetic polypeptide
MAAASSSDSDACGAESNEANSKWLDAHYDPMANIHTFSACLALADLHGDGEYKLVVGDLGPGGQQPRLKVLKGPLVMTESPLPALPAAAATFLMEQHEPRTPALALASGPCVYVYKNLRPYFKFSLPQLPPNPLEQDLWNQAKEDRIDPLTLKEMLESIRETAEEPLSIQSLRFLQLELSEMEAFVNQHKSNSIKRQTVITTMTTLKKNLADEDAVSCLVLGTENKELLVLDPEAFTILAKDAVTSLCFGRYGREDNTLIMTTRGGGLIIKILKRTAVFVEGGSEVGPPPAQAMKLNVPRKTRLYVDQTLREREAGTGRRIT

SEQ ID NO: 1828 - protein, 141 aa, Artificial Sequence
  Synthetic polypeptide
MVKLFIGNLPREATEQEIRSLFEQYGKVLECDIIKNYGFVHIEDKTAAEDAIRNLHHYKLHGVNINVEASKNKSKTSTKLHVGNISPTCTNKELRAKFEEYGPVIECDIVKDYAFVHMERAEDAVEAIRGLDNTEFQDLGC

SEQ ID NO: 1829 - protein, 40 aa, Artificial Sequence
  Synthetic polypeptide
MTDCLVIKHFLRKIIMVHPKVMVAHTCNPNILGGRGGRIA

SEQ ID NO: 1830 - protein, 210 aa, Artificial Sequence
  Synthetic polypeptide
MEGTAVAVFEILRFLIIHWKCDIDVSKGALLEGQLVISIEGLNSKHQANALHCVTTRWSLTLLPRPECSGAVSAHCNLHLPGSSDSHASVPRVAGITDAHHHAWLIMVASAGSLFGGMVLKKFLKEIQSILPGISAKLTWTSEEGSYSQDMTGVTPFQMIFEVDEKPRTLMTDCLVIKHFLRKIIMVHPKVMVAHTCNPNILGGRGGRIA

SEQ ID NO: 1831 - protein, 104 aa, Artificial Sequence
  Synthetic polypeptide
MVASAGSLFGGMVLKKFLKEIQSILPGISAKLTWTSEEGSYSQDMTGVTPFQMIFEVDEKPRTLMTDCLVIKHFLRKIIMVHPKVMVAHTCNPNILGGRGGRIA

SEQ ID NO: 1832 - protein, 259 aa, Artificial Sequence
  Synthetic polypeptide
MGSRCRAWAWTRAWALAEFQARAEEGAAAAAAAAGGYPSTGRCRCSLRGMEGTAVAVFEILRFLIIHWKCDIDVSKGALLEGQLVISIEGLNSKHQANALHCVTTRWSLTLLPRPECSGAVSAHCNLHLPGSSDSHASVPRVAGITDAHHHAWLIMVASAGSLFGGMVLKKFLKEIQSILPGISAKLTWTSEEGSYSQDMTGVTPFQMIFEVDEKPRTLMTDCLVIKHFLRKIIMVHPKVMVAHTCNPNILGGRGGRIA

SEQ ID NO: 1833 - protein, 93 aa, Artificial Sequence
  Synthetic polypeptide
MVLKKFLKEIQSILPGISAKLTWTSEEGSYSQDMTGVTPFQMIFEVDEKPRTLMTDCLVIKHFLRKIIMVHPKVMVAHTCNPNILGGRGGRIA

SEQ ID NO: 1834 - protein, 12 aa, Artificial Sequence
  Synthetic polypeptide
KYSPYCPESLQS

SEQ ID NO: 1835 - protein, 371 aa, Artificial Sequence
  Synthetic polypeptide
MVASAGSLFGGMVLKKFLKEIQSILPGISAKLTWTSEEGSYSQDMTGVTPFQMIFEVDEKPRTLMTDCLVIKHFLRKIIMVHPKVRFHFSVKVNGILSTEIFGVENEPTLNLGNGIALLVDSQHYVSRPNFGTIESHCSRIHPVLGHPVMLFIPEDVAGMDLLGELILTPAAALCPSPKVSSNQLNRISSVSIFLYGPLGLPLILSTWEQPMTTFFKDTSSLVDWKKYHLCMIPNLDLNLDRDLVLPDVSYQVESSEEDQSQTMDPQGQTLLLFLFVDFHSAFPVQQMEIWGVYTLLTTHLNAILVESHSVVQGSIQFTVDKVLEQHHQAAKAADTQEFRTKLHKVFREITQHQFLHHCSCEVKQVFTQEK

SEQ ID NO: 1836 - protein, 562 aa, Artificial Sequence
  Synthetic polypeptide
MGSRCRAWAWTRAWALAEFQARAEEGAAAAAAAAGGYPSTGRCRCSLRGMEGTAVAVFEILRFLIIHWKCDIDVSKGALLEGQLVISIEGLNSKHQANALHCVTTRWSLTLLPRPECSGAVSAHCNLHLPGSSDSHASVPRVAGITDAHHHAWLIMVASAGSLFGGMVLKKFLKEIQSILPGISAKLTWTSEEGSYSQDMTGVTPFQMIFEVDEKPRTLMTDCLVIKHFLRKIIMVHPKVRFHFSVKVNGILSTEIFGVENEPTLNLGNGIALLVDSQHYVRPNFGTIESHCSRIHPVLGHPVMLFIPEDVAGMDLLGELILTPAAALCPSPKVSSNQLNRISSVSIFLYGPLGLPLILSTWEQPMTTFFKDTSSLVDWKKYHLCMIPNLDLNLDRDLVLPDVSYQVESSEEDQSQTMDPQGQTLLLFLFVDFHSAFPVQQMEIWGVYTLLTTHLNAILVESHSVVQGSIQFTVDKVLEQHHQAAKAQQKLQASLSVAVNSIMSILTGSTRSSFRKMCLQTLQAADTQEFRTKLHKVFREITQHQFLHHCSCEVKQVFTQEK

SEQ ID NO: 1837 - protein, 345 aa, Artificial Sequence
  Synthetic polypeptide
MTDCLVIKHFLRKIIMVHPKVRFHFSVKVNGILSTEIFGVENEPTLNLGNGIALLVDSQHYVSRPNFGTIESHCSRIHPVLGHPVMLFIPEDVAGMDLLGELILTPAAALCPSPKVSSNQLNRISSQLHIFLYGPLGLPLILSTWEQPMTTFFKDTSSLVDWKKYHLCMIPNLDLNLDRDLVLPDVSYQVESSEEDQSQTMDPQGQTLLLFLFVDFHSAFPVQQMEIWGVYTLLTTHLNAILVESHSVVQGSIQFTVDKVLEQHHQAAKAQQKLQASLSVAVNSIMSILTGSTRSSFRKMCLQTLQAADTQEFRTKLHKVFREITQHQFLHHCSCEVKQVFTQEK

SEQ ID NO: 1838 - protein, 397 aa, Artificial Sequence
  Synthetic polypeptide
MVLKKFLKEIQSILPGISAKLTWTSEEGSYSQDMTGVTPFQMIFEVDEKPRTLMTDCLVIKHFLRKIIMVHPKVRFHFSVKVNGILSTEIFGVENEPTLNLGNGIALLVDSQHYVSRPNFGTIESHCSRIHPVLGHPVMLFIPEDVAGMDLLGELILTPAAALCPSPKVSSNQLNRISSVSIFLYGPLGLPLILSTWEQPMTTFFKDTSSLVDWKKYHLCMIPNLDLNLDRDLVLPDVSYQVESSEEDQSQTMDPQGQTLLLFLFVDFHSAFPVQQMEIWGVYTLLTTHLNAILVESHSVVQGSIQFTVDKVLEQHHQAAKAQQKLQASLSVAVNSIMSILTGSTRSSFRKMCLQTLQAADTQEFRTKLHKVFREITQHQFLHHCSCEVKQVFTQEK

SEQ ID NO: 1839 - protein, 344 aa, Artificial Sequence
  Synthetic polypeptide
MTDCLVIKHFLRKIIMVHPKVRFHFSVKVNGILSTEIFGVENEPTLNLGNGIALLVDSQHYVRPNFGTIESHCSRIHPVLGHPVMLFIPEDVAGMDLLGELILTPAAALCPSPKVSSNQLNRISSQLHIFLYGPLGLPLILSTWEQPMTTFFKDTSSLVDWKKYHLCMIPNLDLNLDRDLVLPDVSYQVESSEEDQSQTMDPQGQTLLLFLFVDFHSAFPVQQMEIWGVYTLLTTHLNAILVESHSVVQGSIQFTVDKVLEQHHQAAKAQQKLQASLSVAVNSIMSILTGSTRSSFRKMCLQTLQAADTQEFRTKLHKVFREITQHQFLHHCSCEVKQVFTQEK

SEQ ID NO: 1840 - protein, 370 aa, Artificial Sequence
  Synthetic polypeptide
MVASAGSLFGGMVLKKFLKEIQSILPGISAKLTWTSEEGSYSQDMTGVTPFQMIFEVDEKPRTLMTDCLVIKHFLRKIIMVHPKVRFHFSVKVNGILSTEIFGVENEPTLNLGNGIALLVDSQHYVRPNFGTIESHCSRIHPVLGHPVMLFIPEDVAGMDLLGELILTPAAALCPSPKVSSNQLNRISSVSIFLYGPLGLPLILSTWEQPMTTFFKDTSSLVDWKKYHLCMIPNLDLNLDRDLVLPDVSYQVESSEEDQSQTMDPQGQTLLLFLFVDFHSAFPVQQMEIWGVYTLLTTHLNAILVESHSVVQGSIQFTVDKVLEQHHQAAKAADTQEFRTKLHKVFREITQHQFLHHCSCEVKQVFTQEK

SEQ ID NO: 1841 - protein, 19 aa, Artificial Sequence
  Synthetic polypeptide
ESILCSQLISMPSLWRATV

SEQ ID NO: 1842 - protein, 114 aa, Artificial Sequence
  Synthetic polypeptide
MEPEEERIRYSQRLRGTMRRRYEDDGISDDEIEGKRTFDLEEKLHTNKYNANFVTFMEGKDFNVEYIQRGGLRDPLIFKNSDGLGIKMPDPDFTVNDVKMCVGFLSTATQNGLR

SEQ ID NO: 1843 - protein, 109 aa, Artificial Sequence
  Synthetic polypeptide
MEPEEERIRYSQRLRGTMRRRYEDDGISDDEIEGKRTFDLEEKLHTNKYNANFVTFMEGKDFNVEYIQRGGLRDPLIFKNSDGLGIKMPDPDFTVNDVKMCVATQNGLR

SEQ ID NO: 1844 - protein, 110 aa, Artificial Sequence
  Synthetic polypeptide
MEPEEERIRYSQRLRGTMRRRYEDDGISDDEIEGKRTFDLEEKLHTNKYNANFVTFMEGKDFNVEYIQRGGLRDPLIFKNSDGLGIKMPDPDFTVNDVKMCVETLEARRQ

SEQ ID NO: 1845 - protein, 107 aa, Artificial Sequence
  Synthetic polypeptide
MEPEEERIRYSQRLRGTMRRRYEDDGISDDEIEGKRTFDLEEKLHTNKYNANFVTFMEGKDFNVEYIQRGGLRDPLIFKNSDGLGIKMPDPDFTVNDVKMCVGLPIS

SEQ ID NO: 1846 - protein, 351 aa, Artificial Sequence
  Synthetic polypeptide
MEPEEERIRYSQRLRGTMRRRYEDDGISDDEIEGKRTFDLEEKLHTNKYNANFVTFMEGKDFNVEYIQRGGLRDPLIFKNSDGLGIKMPDPDFTVNDVKMCVGSRRMVDVMDVNTQKGIEMTMAQWTRYYETPEEEREKLYNVISLEFSHTRLENMVQRPSTVDFIDWVDNMWPRHLKESQTESTNAILEMQYPKVQKYCLMSVRGCYTDFHVDFGGTSVWYHIHQGGKVFWLIPPTAHNLELYENWLLSGKQGDIFLGDRVSDCQRIELKQGYTFVIPSGWIHAVYTPTDTLVFGGNFLHSFNIPMQLKIYNIEDRTRAWWLMPVMPALWEAEAGESLEFRSSRPTWPTW

SEQ ID NO: 1847 - protein, 182 aa, Artificial Sequence
  Synthetic polypeptide
MALVTVSRSPPGSGASTPVGPWDQAVQRRSRLQRRQSFAVLRGAVLGLQDGGDNDDAAEASSEPTEKAPSEEELHGDQTDFGQGSQSPQKQEEQRQHLHLMVQLLRPQDDIRLAAQLEAPRPPRLRYLLVVSTREGEGLSQDETVLLGVDFPDSSSPSCTLGLVLPLWSDTQVYLDGDGKRM

SEQ ID NO: 1848 - protein, 222 aa, Artificial Sequence
  Synthetic polypeptide
MLIKEYHILLPMSLDEYQVAQLYMIQKKSREESSGEGSGVEILANRPYTDGPGGSGQYTHKVYHVGSHIPGWFRALLPKAALQVEEESWNAYPYTRTRYTCPFVEKFSIEIETYYLPDGGQQPNVFNLSGAERRQRILDTIDIVRDAVAPGEYKAEEDPRLYHSVKTGRGPLSDDWARTAAQTGPLMCAYKLCKVEFRYWGMQAKIEQFIHDVVNEEEVESD

SEQ ID NO: 1849 - protein, 245 aa, Artificial Sequence
  Synthetic polypeptide
MPPYTVVYFPVRGRCAALRMLLADQGQSWKEEVVTVETWQEGSLKASCLYGQLPKFQDGDLTLYQSNTILRHLGRTLGLYGKDQQEAALVDMVNDGVEDLRCKYISLIYTNYEAGKDDYVKALPGQLKPFETLLSQNQGGKTFIVGDQISFADYNLLDLLLIHEVLAPGCLDAFPLLSAYVGRLSARPKLKAFLASPECACFPFTFHPDCKFPEASQSCFLLSLQNCESIKPLFFINYSVSDRSL

SEQ ID NO: 1850 - protein, 209 aa, Artificial Sequence
  Synthetic polypeptide
MPPYTVVYFPVRGRCAALRMLLADQGQSWKEEVVTVETWQEGSLKASCLYGQLPKFQDGDLTLYQSNTILRHLGRTLGLYGKDQQEAALVDMVNDGVEDLRCKYISLIYTNYISFADYNLLDLLLIHEVLAPGCLDAFPLLSAYVGRLSARPKLKAFLASPECACFPFTFHPDCKFPEASQSCFLLSLQNCESIKPLFFINYSVSDRSL

SEQ ID NO: 1851 - protein, 134 aa, Artificial Sequence
  Synthetic polypeptide
MLATRRLLGWSLPARVSVRFSGDTTAPKKTSFGSLKDEDRIFTNLYGRHDWRLKGSLSRGDWYKTKEILLKGPDWILGEIKTSGLRGRGGAGFPTGLKWSFMNKPSDGRGRHKERCLDELNEDLSCGHSHPKTE

SEQ ID NO: 1852 - protein, 33 aa, Artificial Sequence
  Synthetic polypeptide
MNKPSDGRGRHKERCLDELNEDLSCGHSHPKTE

SEQ ID NO: 1853 - protein, 125 aa, Artificial Sequence
  Synthetic polypeptide
MLATRRLLGWSLPARTAPKKTSFGSLKDEDRIFTNLYGRHDWRLKGSLSRGDWYKTKEILLKGPDWILGEIKTSGLRGRGGAGFPTGLKWSFMNKPSDGRGRHKERCLDELNEDLSCGHSHPKTE

SEQ ID NO: 1854 - protein, 127 aa, Artificial Sequence
  Synthetic polypeptide
MLATRRLLGWSLPARVSTAPKKTSFGSLKDEDRIFTNLYGRHDWRLKGSLSRGDWYKTKEILLKGPDWILGEIKTSGLRGRGGAGFPTGLKWSFMNKPSDGRGRHKERCLDELNEDLSCGHSHPKTE

SEQ ID NO: 1855 - protein, 127 aa, Artificial Sequence
  Synthetic polypeptide
MLATRRLLGWSLPARVSVRFSGDTTAPKKTSFGSLKDEDRIFTNLLKGSLSRGDWYKTKEILLKGPDWILGEIKTSGLRGRGGAGFPTGLKWSFMNKPSDGRGRHKERCLDELNEDLSCGHSHPKTE

SEQ ID NO: 1856 - protein, 122 aa, Artificial Sequence
  Synthetic polypeptide
MLATRRLLGWSLPARVSVRFSGDTDEDRIFTNLYGRHDWRLKGSLSRGDWYKTKEILLKGPDWILGEIKTSGLRGRGGAGFPTGLKWSFMNKPSDGRGRHKERCLDELNEDLSCGHSHPKTE

SEQ ID NO: 1857 - protein, 95 aa, Artificial Sequence
  Synthetic polypeptide
MKTGFSPTCTAAMTGGSLSRGDWYKTKEILLKGPDWILGEIKTSGLRGRGGAGFPTGLKWSFMNKPSDGRGRHKERCLDELNEDLSCGHSHPKTE

SEQ ID NO: 1858 - protein, 455 aa, Artificial Sequence
  Synthetic polypeptide
MLATRRLLGWSLPARVSVRFSGDTTAPKKTSFGSLKDEDRIFTNLYGRHDWRLKGSLSRGDWYKTKEILLKGPDWILGEIKTSGLRGRGGAGFPTGLKWSFMNKPSDGRPKYLVVNADEGEPGTCKDREILRHDPHKLLEGCLVGGRAMGARAAYIYIRGEFYNEASNLQVAIREAYEAGLIGKNACGSGYDFDVFVVRGAGAYICGEETALIESIEGKQGKPRLKPPFPADVGVFGCPTTVANVETVAVSPTICRRGGTWFAGFGRERNSGTKLFNISGHVNHPCTVEEEMSVPLKELIEKHAGGVTGGWDNLLAVIPGGSSTPLIPKSVCETVLMDFDALVQAQTGLGTAAVIVMDRSTDIVKAIARLIEFYKHESCGQCTPCREGVDWMNKVMARFVRGDARPAEIDSLWEISKQIEGHTICALGDGAAWPVQNRGHQATDGLTNGTPNEFN

SEQ ID NO: 1859 - protein, 354 aa, Artificial Sequence
  Synthetic polypeptide
MNKPSDGRPKYLVVNADEGEPGTCKDREILRHDPHKLLEGCLVGGRAMGARAAYIYIRGEFYNEASNLQVAIREAYEAGLIGKNACGSGYDFDVFVVRGAGAYICGEETALIESIEGKQGKPRLKPPFPADVGVFGCPTTVANVETVAVSPTICRRGGTWFAGFGRERNSGTKLFNISGHVNHPCTVEEEMSVPLKELIEKHAGGVTGGWDNLLAVIPGGSSTPLIPKSVCETVLMDFDALVQAQTGLGTAAVIVMDRSTDIVKAIARLIEFYKHESCGQCTPCREGVDWMNKVMARFVRGDARPAEIDSLWEISKQIEGHTICALGDGAAWPVQNRGHQATDGLTNGTPNEFN

SEQ ID NO: 1860 - protein, 446 aa, Artificial Sequence
  Synthetic polypeptide
MLATRRLLGWSLPARTAPKKTSFGSLKDEDRIFTNLYGRHDWRLKGSLSRGDWYKTKEILLKGPDWILGEIKTSGLRGRGGAGFPTGLKWSFMNKPSDGRPKYLVVNADEGEPGTCKDREILRHDPHKLLEGCLVGGRAMGARAAYIYIRGEFYNEASNLQVAIREAYEAGLIGKNACGSGYDFDVFVVRGAGAYICGEETALIESIEGKQGKPRLKPPFPADVGVFGCPTTVANVETVAVSPTICRRGGTWFAGFGRERNSGTKLFNISGHVNHPCTVEEEMSVPLKELIEKHAGGVTGGWDNLLAVIPGGSSTPLIPKSVCETVLMDFDALVQAQTGLGTAAVIVMDRSTDIVKAIARLIEFYKHESCGQCTPCREGVDWMNKVMARFVRGDARPAEIDSLWEISKQIEGHTICALGDGAAWPVQNRGHQATDGLTNGTPNEFN

SEQ ID NO: 1861 - protein, 448 aa, Artificial Sequence
  Synthetic polypeptide
MLATRRLLGWSLPARVSTAPKKTSFGSLKDEDRIFTNLYGRHDWRLKGSLSRGDWYKTKEILLKGPDWILGEIKTSGLRGRGGAGFPTGLKWSFMNKPSDGRPKYLVVNADEGEPGTCKDREILRHDPHKLLEGCLVGGRAMGARAAYIYIRGEFYNEASNLQVAIREAYEAGLIGKNACGSGYDFDVFVVRGAGAYICGEETALIESIEGKQGKPRLKPPFPADVGVFGCPTTVANVETVAVSPTICRRGGTWFAGFGRERNSGTKLFNISGHVNHPCTVEEEMSVPLKELIEKHAGGVTGGWDNLLAVIPGGSSTPLIPKSVCETVLMDFDALVQAQTGLGTAAVIVMDRSTDIVKAIARLIEFYKHESCGQCTPCREGVDWMNKVMARFVRGDARPAEIDSLWEISKQIEGHTICALGDGAAWPVQNRGHQATDGLTNGTPNEFN

SEQ ID NO: 1862 - protein, 196 aa, Artificial Sequence
  Synthetic polypeptide
MEAEPPLYPMAGAAGPQGDEDLLGVPDGPEAPLDELVGAYPNYNEEEEERRYYRRKRLGVLKNVLAASAGGMLTYGVYLGLLQMQLILHYDETYREVKYGNMGLPDIDSKMLMGINVTPIAALLYTPVLIRFFGTKWMMFLAVGIYALFVSTNYWERYYTLVPSAVALGMAIVPLWASMGNYITRKPLPPSGPQFP

SEQ ID NO: 1863 - protein, 125 aa, Artificial Sequence
  Synthetic polypeptide
MLTYGVYLGLLQMQLILHYDETYREVKYGNMGLPDIDSKMLMGINVTPIAALLYTPVLIRFFGTKWMMFLAVGIYALFVSTNYWERYYTLVPSAVALGMAIVPLWASMGNYITRKPLPPSGPQFP

SEQ ID NO: 1864 - protein, 111 aa, Artificial Sequence
  Synthetic polypeptide
MDPLGDTLRRLREAFHAGRTRPAEFRAAQLQGLGRFLQENKQLLHDALAQDLHKEQSKRTATSGPLQPPGPLPKVCRLPVPTTCLFLDFRSLLQCDRRLETCTDRFVKTAH

SEQ ID NO: 1865 - protein, 59 aa, Artificial Sequence
  Synthetic polypeptide
MDPLGDTLRRLREAFHAGRTRPAEFRAAQLQGLGRFLQENKQLLHDALAQDLHKVTAPM

SEQ ID NO: 1866 - protein, 847 aa, Artificial Sequence
  Synthetic polypeptide
MFWKFDLHSSSHIDTLLEREDVTLKELMDEEDVLQECKAQNRKLIEFLLKAECLEDLVSFIIEEPPQDMDEKIRYKYPNISCELLTSDVSQMNDRLGEDESLLMKLYSFLLNDSPLNPLLASFFSKVLSILISRKPEQIVDFLKKKHDFVDLIIKHIGTSAIMDLLLRLLTCIEPPQPRQDVLNWLNEEKIIQRLVEIVHPSQEEDRHSNASQSLCEIVRLSRDQMLQIQNSTEPDPLLATLEKQEIIEQLLSNIFHKEKNESAIVSAIQILLTLLETRRPTFEGHIEICPPGMSHSACSVNKSVLEAIRGRLGSFHELLLEPPKKSVMKTTWGVLDPPVGNTRLNVIRLISSLLQTNTSSINGDLMELNSIGVILNMFFKYTWNNFLHTQVEICIALILASPFENTENATITDQDSTGDNLLLKHLFQKCQLIERILEAWEMNEKKQAEGGRRHGYMGHLTRIANCIVHSTDKGPNSALVQQLIKDLPDEVRERWETFCTSSLGETNKRNTVDLVTTCHIHSSSDDEIDFKETGFSQDSSLQQAFSDYQMQQMTSNFIDQFGFNDEKFADQDDIGNVSFDRVSDINFTLNTNESGNIALFEACCKERIQQFDDGGSDEEDIWEEKHIAFTPESQRRSSSGSTDSEESTDSEEEDGAKQDLFEPSSANTEDKMEVDLSEPPNWSANFDVPMETTHGAPLDSVGSDVWSTEEPMPTKETGWASFSEFTSSLSTKDSLRSNSPVEMETSTEPMDPLTPSAAALAVQPEAAGSVAMEASSDGEEDAESTDKVTETVMNGGMKETLSLTVDAKTETAVFKRPLRPSQAITSPVTCTYTPRWPEVTEESQKK

SEQ ID NO: 1867 - protein, 615 aa, Artificial Sequence
  Synthetic polypeptide
MNDRLGEDESLLMKLYSFLLNDSPLNPLLASFFSKVLSILISRKPEQIVDFLKKKHDFVDLIIKHIGTSAIMDLLLRLLTCIEPPQPRQDVLNKSVMKTTWGVLDPPVGNTRLNVIRLISSLLQTNTSSINGDLMELNSIGVILNMFFKYTWNNFLHTQVEICIALILASPFENTENATITDQDSTGDNLLLKHLFQKCQLIERILEAWEMNEKKQAEGGRRHGYMGHLTRIANCIVHSTDKGPNSALVQQLIKDLPDEVRERWETFCTSSLGETNKRNTVDLVTTCHIHSSSDDEIDFKETGFSQDSSLQQAFSDYQMQQMTSNFIDQFGFNDEKFADQDDIGNVSFDRVSDINFTLNTNESGNIALFEACCKERIQQFDDGGSDEEDIWEEKHIAFTPESQRRSSSGSTDSEESTDSEEEDGAKQDLFEPSSANTEDKMEVDLSEPPNWSANFDVPMETTHGAPLDSVGSDVWSTEEPMPTKETGWASFSEFTSSLSTKDSLRSNSPVEMETSTEPMDPLTPSAAALAVQPEAAGSVAMEASSDGEEDAESTDKVTETVMNGGMKETLSLTVDAKTETAVFKRPLRPSQAITSPVTCTYTPRWPEVTEESQKK

SEQ ID NO: 1868 - protein, 818 aa, Artificial Sequence
  Synthetic polypeptide
MFWKFDLHSSSHIDTLLEREDVTLKELMDEEDVLQECKAQNRKLIEFLLKAECLEDLVSFIIEEPPQDMDEKIRYKYPNISCELLTSDVSQMNDRLGEDESLLMKLYSFLLNDSPLNPLLASFFSKVLSILISRKPEQIVDFLKKKHDFVDLIIKHIGTSAIMDLLLRLLTCIEPPQPRQDVLNWLNEEKIIQRLVEIVHPSQEEDRHSNASQSLCEIVRLSRDQMLQIQNSTEPDPLLATLEKQEIIEQLLSNIFHKEKNESAIVSAIQILLTLLETRRPTFEGHIEICPPGMSHSACSVNKSVLEAIRGRLGSFHELLLEPPKKSVMKTTWGVLDPPVGNTRLNVIRLISSLLQTNTSSINGDLMELNSIGVILNMFFKYTWNNFLHTQVEICIALILASPFENTENATITDQDSTGDNLLLKHLFQKCQLIERILEAWEMNEKKQAEGGRRHGYMGHLTRIANCIVHSTDKGPNSALVQQLIKDLPDEVRERWETFCTSSLGETNKRNTVDLAFSDYQMQQMTSNFIDQFGFNDEKFADQDDIGNVSFDRVSDINFTLNTNESGNIALFEACCKERIQQFDDGGSDEEDIWEEKHIAFTPESQRRSSSGSTDSEESTDSEEEDGAKQDLFEPSSANTEDKMEVDLSEPPNWSANFDVPMETTHGAPLDSVGSDVWSTEEPMPTKETGWASFSEFTSSLSTKDSLRSNSPVEMETSTEPMDPLTPSAAALAVQPEAAGSVAMEASSDGEEDAESTDKVTETVMNGGMKETLSLTVDAKTETAVFKRPLRPSQAITSPVTCTYTPRWPEVTEESQKK

SEQ ID NO: 1869 - protein, 801 aa, Artificial Sequence
  Synthetic polypeptide
MFWKFDLHSSSHIDTLLEREDVTLKELMDEEDVLQECKAQNRKLIEFLLKAECLEDLVSFIIEEPPQDMDEKIRYKYPNISCELLTSDVSQMNDRLGEDESLLMKLYSFLLNDSPLNPLLASFFSKVLSILISRKPEQIVDFLKKKHDFVDLIIKHIGTSAIMDLLLRLLTCIEPPQPRQDVLNWLNEEKIIQRLVEIVHPSQEEDRHSNASQSLCEIVRLSRDQMLQIQNSTEPDPLLATLEKQEIIEQLLSNIFHKEKNESAIVSAIQILLTLLETRRPTFEGHIEICPPGMSHSACSVNKSVLEAIRGRLGSFHELLLEPPKKSVMKTTWGVLDPPVGNTRLNVIRLISSLLQTNTSSINGDLMELNSIGVILNMFFKYTWNNFLHTQVEICIALILASPFENTENATITDQDSTGDNLLLKHLFQKCQLIERILEAWEMNEKKQAEGGRRHGYMGHLTRIANCIVHSTDKGPNSALVQQLIKDLPDEVRERWETFCTSSLGETNKRNTVDLFGFNDEKFADQDDIGNVSFDRVSDINFTLNTNESGNIALFEACCKERIQQFDDGGSDEEDIWEEKHIAFTPESQRRSSSGSTDSEESTDSEEEDGAKQDLFEPSSANTEDKMEVDLSEPPNWSANFDVPMETTHGAPLDSVGSDVWSTEEPMPTKETGWASFSEFTSSLSTKDSLRSNSPVEMETSTEPMDPLTPSAAALAVQPEAAGSVAMEASSDGEEDAESTDKVTETVMNGGMKETLSLTVDAKTETAVFKRPLRPSQAITSPVTCTYTPRWPEVTEESQKK

SEQ ID NO: 1870 - protein, 841 aa, Artificial Sequence
  Synthetic polypeptide
MFWKFDLHSSSHIDTLLEREDVTLKELMDEEDVLQECKAQNRKLIEFLLKAECLEDLVSFIIEEPPQDMDEKIRYKYPNISCELLTSDVSQMNDRLGEDESLLMKLYSFLLNDSPLNPLLASFFSKVLSILISRKPEQIVDFLKKKHDFVDLIIKHIGTSAIMDLLLRLLTCIEPPQPRQDVLNWLNEEKIIQRLVEIVHPSQEEDRHSNASQSLCEIVRLSRDQMLQIQNSTEPDPLLATLEKQEIIEQLLSNIFHKEKNESAIVSAIQILLTLLETRRPTFEGHIEICPPGMSHSACSVNKSVLEAIRGRLGSFHELLLEPPKKSVMKTTWGVLDPPVGNTRLNVIRLISSLLQTNTSSINGDLMELNSIGVILNMFFKYTWNNFLHTQVEICIALILASPFENTENATITDQDSTGDNLLLKHLFQKCQLIERILEAWEMNEKKQAEGGRRHGYMGHLTRIANCIVHSTDKGPNSALVQQLIKDLPDEVRERWETFCTSSLGETNKRNTVDLVTTCHIHSSSDDEIDFKETGFSQDSSLQQMQQMTSNFIDQFGFNDEKFADQDDIGNVSFDRVSDINFTLNTNESGNIALFEACCKERIQQFDDGGSDEEDIWEEKHIAFTPESQRRSSSGSTDSEESTDSEEEDGAKQDLFEPSSANTEDKMEVDLSEPPNWSANFDVPMETTHGAPLDSVGSDVWSTEEPMPTKETGWASFSEFTSSLSTKDSLRSNSPVEMETSTEPMDPLTPSAAALAVQPEAAGSVAMEASSDGEEDAESTDKVTETVMNGGMKETLSLTVDAKTETAVFKRPLRPSQAITSPVTCTYTPRWPEVTEESQKK

SEQ ID NO: 1871 - protein, 767 aa, Artificial Sequence
  Synthetic polypeptide
MFWKFDLHSSSHIDTLLEREDVTLKELMDEEDVLQECKAQNRKLIEFLLKAECLEDLVSFIIEEPPQDMDEKIRYKYPNISCELLTSDVSQMNDRLGEDESLLMKLYSFLLNDSPLNPLLASFFSKVLSILISRKPEQIVDFLKKKHDFVDLIIKHIGTSAIMDLLLRLLTCIEPPQPRQDVLNWLNEEKIIQRLVEIVHPSQEEDRHSNASQSLCEIVRLSRDQMLQIQNSTEPDPLLATLEKQEIIEQLLSNIFHKEKNESAIVSAIQILLTLLETRRPTFEGHIEICPPGMSHSACSVNKSVLEAIRGRLGSFHELLLEPPKNMFFKYTWNNFLHTQVEICIALILASPFENTENATITDQDSTGDNLLLKHLFQKCQLIERILEAWEMNEKKQAEGGRRHGYMGHLTRIANCIVHSTDKGPNSALVQQLIKDLPDEVRERWETFCTSSLGETNKRNTVDLAFSDYQMQQMTSNFIDQFGFNDEKFADQDDIGNVSFDRVSDINFTLNTNESGNIALFEACCKERIQQFDDGGSDEEDIWEEKHIAFTPESQRRSSSGSTDSEESTDSEEEDGAKQDLFEPSSANTEDKMEVDLSEPPNWSANFDVPMETTHGAPLDSVGSDVWSTEEPMPTKETGWASFSEFTSSLSTKDSLRSNSPVEMETSTEPMDPLTPSAAALAVQPEAAGSVAMEASSDGEEDAESTDKVTETVMNGGMKETLSLTVDAKTETAVFKRPLRPSQAITSPVTCTYTPRWPEVTEESQKK

SEQ ID NO: 1872 - protein, 812 aa, Artificial Sequence
  Synthetic polypeptide
MFWKFDLHSSSHIDTLLEREDVTLKELMDEEDVLQECKAQNRKLIEFLLKAECLEDLVSFIIEEPPQDMDEKIRYKYPNISCELLTSDVSQMNDRLGEDESLLMKLYSFLLNDSPLNPLLASFFSKVLSILISRKPEQIVDFLKKKHDFVDLIIKHIGTSAIMDLLLRLLTCIEPPQPRQDVLNWLNEEKIIQRLVEIVHPSQEEDRHSNASQSLCEIVRLSRDQMLQIQNSTEPDPLLATLEKQEIIEQLLSNIFHKEKNESAIVSAIQILLTLLETRRPTFEGHIEICPPGMSHSACSVNKSVLEAIRGRLGSFHELLLEPPKKSVMKTTWGVLDPPVGNTRLNVIRLISSLLQTNTSSINGDLMELNSIGVILNMFFKYTWNNFLHTQVEICIALILASPFENTENATITDQDSTGDNLLLKHLFQKCQLIERILEAWEMNEKKQAEGGRRHGYMGHLTRIANCIVHSTDKGPNSALVQQLIKDLPDEVRERWETFCTSSLGETNKRNTVDLMQQMTSNFIDQFGFNDEKFADQDDIGNVSFDRVSDINFTLNTNESGNIALFEACCKERIQQFDDGGSDEEDIWEEKHIAFTPESQRRSSSGSTDSEESTDSEEEDGAKQDLFEPSSANTEDKMEVDLSEPPNWSANFDVPMETTHGAPLDSVGSDVWSTEEPMPTKETGWASFSEFTSSLSTKDSLRSNSPVEMETSTEPMDPLTPSAAALAVQPEAAGSVAMEASSDGEEDAESTDKVTETVMNGGMKETLSLTVDAKTETAVFKRPLRPSQAITSPVTCTYTPRWPEVTEESQKK

SEQ ID NO: 1873 - protein, 554 aa, Artificial Sequence
  Synthetic polypeptide
QILLTLLETRRPTFEGHIEICPPGMSHSACSVNKSVLEAIRGRLGSFHELLLEPPKLFLLQKSVMKTTWGVLDPPVGNTRLNVIRLISSLLQTNTSSINGDLMELNSIGVILNMFFKYTWNNFLHTQVEICIALILASPFENTENATITDQDSTGDNLLLKHLFQKCQLIERILEAWEMNEKKQAEGGRRHGYMGHLTRIANCIVHSTDKGPNSALVQQLIKDLPDEVRERWETFCTSSLGETNKRNTVDLAFSDYQMQQMTSNFIDQFGFNDEKFADQDDIGNVSFDRVSDINFTLNTNESGNIALFEACCKERIQQFDDGGSDEEDIWEEKHIAFTPESQRRSSSGSTDSEESTDSEEEDGAKQDLFEPSSANTEDKMEVDLSEPPNWSANFDVPMETTHGAPLDSVGSDVWSTEEPMPTKETGWASFSEFTSSLSTKDSLRSNSPVEMETSTEPMDPLTPSAAALAVQPEAAGSVAMEASSDGEEDAESTDKVTETVMNGGMKETLSLTVDAKTETAVFKRPLRPSQAITSPVTCTYTPRWPEVTEESQKK

SEQ ID NO: 1874 - protein, 15 aa, Artificial Sequence
  Synthetic polypeptide
ILQWKWKPALNPWTL

SEQ ID NO: 1875 - protein, 617 aa, Artificial Sequence
  Synthetic polypeptide
MAEPQAESEPLLGGARGGGGDWPAGLTTYRSIQVGPGAAARWDLCIDQAVVFIEDAIQYRSINHRVDASSMWLYRRYYSNVCQRTLSFTIFLILFLAFIETPSSLTSTADVRYRAAPWEPPCGLTESVEVLCLLVFAADLSVKGYLFGWAHFQKNLWLLGYLVVLVVSLVDWTVSLSLVCHEPLRIRRLLRPFFLLQNSSMMKKTLKCIRWSLPEMASVGLLLAIHLCLFTMFGMLLFAGGKQDDGQDRERLTYFQNLPESLTSLLVLLTTANNPDVMIPAYSKNRAYAIFFIVFTVIGSLFLMNLLTAIIYSQFRGYLMKSLQTSLFRRRLGTRAAFEVLSSMVGEGGAFPQAVGVKPQNLLQVLQKVQLDSSHKQAMMEKVRSYGSVLLSAEEFQKLFNELDRSVVKEHPPRPEYQSPFLQSAQFLFGHYYFDYLGNLIALANLVSICVFLVLDADVLPAERDDFILGILNCVFIVYYLLEMLLKVFALGLRGYLSYPSNVFDGLLTVVLLVLEISTLAVYRLPHPGWRPEMVGLLSLWDMTRMLNMLIVFRFLRIIPSMKLEEKNQNVPNVKKRYMFAAMDIPVTCCDRYLLKWDHIHVLKYHMCPMNMYVIMC

SEQ ID NO: 1876 - protein, 989 aa, Artificial Sequence
  Synthetic polypeptide
MMCEVMPTISEAEGPPGGGGGHGSGSPSQPDADSHFEQLMVSMLEERDRLLDTLRETQETLALTQGKLHEVGHERDSLQRQLNTALPQEFAALTKELNVCREQLLEREEEIAELKAERNNTRLLLEHLECLVSRHERSLRMTVVKRQAQSPAGVSSEVEVLKALKSLFEHHKALDEKVRERLRVALERCSLLEEELGATHKELMILKEQNNQKKTLTDGVLDINHEQENTPSTSGKRSSDGSLSHEEDLAKVIELQEIISKQSREQSQMKERLASLSSHVTELEEDLDTARKDLIKSEEMNTKLQRDVREAMAQKEDMEERITTLEKRYLAAQREATSVHDLNDKLENEIANKDSMHRQTEDKNRQLQERLELAEQKLQQTLRKAETLPEVEAELAQRVAALSKAEERHGNIEERLRQMEAQLEEKNQELQRARQREKMNEEHNKRLSDTVDKLLSESNERLQLHLKERMAALEDKNSLLREVESAKKQLEETQHDKDQLVLNIEALRAELDHMRLRGASLHHGRPHLGSVPDFRFPMADGHTDSYSTSAVLRRPQKGRLAALRDEPSKVQTLNEQDWERAQQASVLANVAQAFESDADVSDGEDDRDTLLSSVDLLSPSGQADAHTLAMMLQEQLDAINKEIRLIQEEKENTEQRAEEIESRVGSGSLDNLGRFRSMSSIPPYPASSLASSSPPGSGRSTPRRIPHSPAREVDRLGVMTLLPPSREEVRDDKTTIKCETSPPSSPRALRLDRLHKGALHTVSHEDIRDIRNSTGSQDGPVSNPSSSNSSQDSLHKAPKKKGIKSSIGRLFGKKEKGRPGQTGKEALGQAGVSETDNSSQDALGLSKLGGQAEKNRKLQKKHELLEEARRQGLPFAQWDGPTVVVWLELWVGMPAWYVAACRANVKSGAIMSALSDTEIQREIGISNPLHRLKLRLAIQEIMSLTSPSAPPTSRTILGRLRPENDLNPGGEVAVIRGRATALQPGRQRE

SEQ ID NO: 1877 - protein, 83 aa, Artificial Sequence
  Synthetic polypeptide
MPRSPTSSEDEMAQSFSDYSVGSESDSSKEETIYDTIRATAEKPGGARTEESQGNTLVIRVVIHDLQQTEQVGSTSALCWDPS

SEQ ID NO: 1878 - protein, 1053 aa, Artificial Sequence
  Synthetic polypeptide
MADSSSSSFFPDFGLLLYLEELNKEELNTFKLFLKETMEPEHGLTPWNEVKKARREDLANLMKKYYPGEKAWSVSLKIFGKMNLKDLCERAKEEINWSAQTIGPDDAKAGETQEDQEAVLGDGTEYRNRIKEKFCITWDKKSLAGKPEDFHHGIAEKDRKLLEHLFDVDVKTGAQPQIVVLQGAAGVGKTTLVRKAMLDWAEGSLYQQRFKYVFYLNGREINQLKERSFAQLISKDWPSTEGPIEEIMYQPSSLLFIIDSFDELNFAFEEPEFALCEDWTQEHPVSFLMSSLLRKVMLPEASLLVTTRLTTSKRLKQLLKNHHYVELLGMSEDAREEYIYQFFEDKRWAMKVFSSLKSNEMLFSMCQVPLVCWAACTCLKQQMEKGGDVTLTCQTTTALFTCYISSLFTPVDGGSPSLPNQAQLRRLCQVAAKGIWTMTYVFYRENLRRLGLTQSDVSSFMDSNIIQKDAEYENCYVFTHLHVQEFFAAMFYMLKGSWEAGNPSCQPFEDLKSLLQSTSYKDPHLTQMKCFLFGLLNEDRVKQLERTFNCKMSLKIKSKLLQCMEVLGNSDYSPSQLGFLELFHCLYETQDKAFISQAMRCFPKVAINICEKIHLLVSSFCLKHCRCLRTIRLSVTVVFEKKILKTSLPTNTWDGDRITHCWQDLCSVLHTNEHLRELDLYHSNLDKSAMNILHHELRHPNCKLQKLLLKFITFPDGCQDISTSLIHNKNLMHLDLKGSDIGDNGVKSLCEALKHPECKLQTLRLESCNLTVFCCLNISNALIRSQSLIFLNLSTNNLLDDGVQLLCEALRHPKCYLERLSLESCGLTEAGCEYLSLALISNKRLTHLCLADNVLGDGGVKLMSDALQHAQCTLKSLVLRRCHFTSLSSEYLSTSLLHNKSLTHLDLGSNWLQDNGVKLLCDVFRHPSCNLQDLELMGCVLTNACCLDLASVILNNPNLRSLDLGNNDLQDDGVKILCDALRYPNCNIQRLGLEYCGLTSLCCQDLSSALICNKRLIKMNLTQNTLGYEGIVKLYKVLKSPKCKLQVLGWLLL

SEQ ID NO: 1879 - protein, 40 aa, Artificial Sequence
  Synthetic polypeptide
RSSRSMGNSGRWPRWGPTACSANSSACGDTSAPRDRSLTK

SEQ ID NO: 1880 - protein, 16 aa, Artificial Sequence
  Synthetic polypeptide
QDDHAHTRVPRRELQP

SEQ ID NO: 1881 - protein, 697 aa, Artificial Sequence
  Synthetic polypeptide
MGRKVTVATCALNQWALDFEGNLQRILKSIEIAKNRGARYRLGPELEICGYGCWDHYYESDTLLHSFQVLAALVESPVTQDIICDVGMPVMHRNVRYNCRVIFLNRKILLIRPKMALANEGNYRELRWFTPWSRSRHTEEYFLPRMIQDLTKQETVPFGDAVLVTWDTCIGSEICEELWTPHSPHIDMGLDGVEIITNASGSHQVLRKANTRVDLVTMVTSKNGGIYLLANQKGCDGDRLYYDGCAMIAMNGSVFAQGSQFSLDDVEVLTATLDLEDVRSYRAEISSRNLAASRASPYPRVKVDFALSCHEDLLAPISEPIEWKYHSPEEEISLGPACWLWDFLRRSQQAGFLLPLSGGVDSAATACLIYSMCCQVCEAVRSGNEEVLADVRTIVNQISYTPQDPRDLCGRILTTCYMASKNSSQETCTRARELAQQIGSHHISLNIDPAVKAVMGIFSLVTGKSPLFAAHGGSSRENLALQNVQARIRMVLAYLFAQLSLWSRGVHGGLLVLGSANVDESLLGYLTKYDCSSADINPIGGISKTDLRAFVQFCIQRFQLPALQSILLAPATAELEPLADGQVSQTDEEDMGMTYAELSVYGKLRKVAKMGPYSMFCKLLGMWRHICTPRQVADKVKRFFSKYSMNRHKMTTLTPAYHAENYSPEDNRFDLRPFLYNTSWPWQFRCIENQMAGSCLN

SEQ ID NO: 1882 - protein, 437 aa, Artificial Sequence
  Synthetic polypeptide
MGISGQEVLTATLDLEDVRSYRAEISSRNLAASRASPYPRVKVDFALSCHEDLLAPISEPIEWKYHSPEEEISLGPACWLWDFLRRSQQAGFLLPLSGGVDSAATACLIYSMCCQVCEAVRSGNEEVLADVRTIVNQISYTPQDPRDLCGRILTTCYMASKNSSQETCTRARELAQQIGSHHISLNIDPAVKAVMGIFSLVTGKSPLFAAHGGSSRENLALQNVQARIRMVLAYLFAQLSLWSRGVHGGLLVLGSANVDESLLGYLTKYDCSSADINPIGGISKTDLRAFVQFCIQRFQLPALQSILLAPATAELEPLADGQVSQTDEEDMGMTYAELSVYGKLRKVAKMGPYSMFCKLLGMWRHICTPRQVADKVKRFFSKYSMNRHKMTTLTPAYHAENYSPEDNRFDLRPFLYNTSWPWQFRCIENQMAGSCLN

SEQ ID NO: 1883 - protein, 326 aa, Artificial Sequence
  Synthetic polypeptide
MCCQVCEAVRSGNEEVLADVRTIVNQISYTPQDPRDLCGRILTTCYMASKNSSQETCTRARELAQQIGSHHISLNIDPAVKAVMGIFSLVTGKSPLFAAHGGSSRENLALQNVQARIRMVLAYLFAQLSLWSRGVHGGLLVLGSANVDESLLGYLTKYDCSSADINPIGGISKTDLRAFVQFCIQRFQLPALQSILLAPATAELEPLADGQVSQTDEEDMGMTYAELSVYGKLRKVAKMGPYSMFCKLLGMWRHICTPRQVADKVKRFFSKYSMNRHKMTTLTPAYHAENYSPEDNRFDLRPFLYNTSWPWQFRCIENQMAGSCLN

SEQ ID NO: 1884 - protein, 137 aa, Artificial Sequence
  Synthetic polypeptide
QDKSGQLKVELQLERAVPTGYIDVGNCGCAFLQIDVGHSSWPLDRPFITLLPATTLMSLTDSKQGKNRSGVRMFKDVDFLAPASGELWDRLRLTCSRPFTRHQSFGLAFLRVCSSLDSLDDSVVGPSALLSSVLNKD

SEQ ID NO: 1885 - protein, 206 aa, Artificial Sequence
  Synthetic polypeptide
MYFPGCSTCHLASVGLIFKNSSFLKPQNAFLCYGRRKSSSRGQKAKDPKYPVENLLNPDSPRRPWLGCPQDKSGQLKVELQLERAVPTGYIDVGNCGCAFLQIDVGHSSWPLDRPFITLLPATTLMSLTDSKQGKNRSGVRMFKDVDFLAPASGELWDRLRLTCSRPFTRHQSFGLAFLRVCSSLDSLDDSVVGPSALLSSVLNKD

SEQ ID NO: 1886 - protein, 9 aa, Artificial Sequence
  Synthetic polypeptide
SSRPAWPAW

SEQ ID NO: 1887 - protein, 173 aa, Artificial Sequence
  Synthetic polypeptide
MAAVVEVEVGGGAAGERELDEVDMSDLSPEEQWRVEHARMHAKHRGHEAMHAEMVLILIATLVVAQLLLVQWKQRHPRSYNMVTLFQMWVVPLYFTVKLHWWRFLVIWILFSAVTAFVTFRATRKPLVQTTPRLVYKWFLLIYKISYATGIVGYMAVMFTLFGLNLLFKGSTG

SEQ ID NO: 1888 - protein, 141 aa, Artificial Sequence
  Synthetic polypeptide
MRVEHARMHAKHRGHEAMHAEMVLILIATLVVAQLLLVQWKQRHPRSYNMVTLFQMWVVPLYFTVKLHWWRFLVIWILFSAVTAFVTFRATRKPLVQTTPRLVYKWFLLIYKISYATGIVGYMAVMFTLFGLNLLFKGSTG

SEQ ID NO: 1889 - protein, 92 aa, Artificial Sequence
  Synthetic polypeptide
MVTLFQMWVVPLYFTVKLHWWRFLVIWILFSAVTAFVTFRATRKPLVQTTPRLVYKWFLLIYKISYATGIVGYMAVMFTLFGLNLLFKGSTG

SEQ ID NO: 1890 - protein, 783 aa, Artificial Sequence
  Synthetic polypeptide
MAEAGDAALSVAEWLRALHLEQYTGLFEQHGLVWATECQGLSDTRLMDMGMLLPGHRRRILAGLLRAHTSPAPAPRPTPRPVPMKRHIFRSPPVPATPPEPLPTTTEDEGLPAAPPIPPRRSCLPPTCFTTPSTAAPDPVLPPLPAKRHLAELSVPPVPPRTGPPRLLVSLPTKEEESLLPSLSSPPQPQSEEPLSTLPQGPPQPPSPPPCPPEIPPKPVRLFPEFDDSDYDEVPEEGPGAPARVMTKKEEPPPSRVPRAVRVASLLSEGEELSGDDQGDEEEDDHAYEGVPNGGWHTSSLSLSLPSTIAAPHPMDGPPGGSTPVTPVIKAGWLDKNPPQGSYIYQKRWVRLDTDHLRYFDSNKDAYSKRFISVACISHVAAIGDQKFEVITNNRTFAFRAESDVERKEWMQALQQAMAEQRARARLSSAYLLGVPGSEQPDRAGSLELRGFKNKLYVAVVGDKVQLYKNLEEYHLGIGITFIDMSVGNVKEVDRRSFDLTTPYRIFSFSADSELEKEQWLEAMQGAIAEALSTSEVAERIWAAAPNRFCADCGAPQPDWASINLCVVICKRCAGEHRGLGAGVSKVRSLKMDRKVWTETLIELFLQLGNGAGNRFWAANVPPSEALQPSSSPSTRRCHLEAKYREGKYRRYHPLFGNQEELDKALCAAVTTTDLAETQALLGCGAGINCFSGDPEAPTPLALAEQAGQTLQMEFLRNNRTTEVPRLDSMKPLEKHYSVVLPTVSHSGFLYKTASAGKLLQDRRAREDTSSPTRIFACAVPSA

SEQ ID NO: 1891 - protein, 543 aa, Artificial Sequence
  Synthetic polypeptide
MTLSGSRGQEEPPPSRVPRAVRVASLLSEGEELSGDDQGDEEEDDHAYEGVPNGGWHTSSLSLSLPSTIAAPHPMDGPPGGSTPVTPVIKAGWLDKNPPQGSYIYQKRWVRLDTDHLRYFDSNKDAYSKRFISVACISHVAAIGDQKFEVITNNRTFAFRAESDVERKEWMQALQQAMAEQRARARLSSAYLLGVPGSEQPDRAGSLELRGFKNKLYVAVVGDKVQLYKNLEEYHLGIGITFIDMSVGNVKEVDRRSFDLTTPYRIFSFSADSELEKEQWLEAMQGAIAEALSTSEVAERIWAAAPNRFCADCGAPQPDWASINLCVVICKRCAGEHRGLGAGVSKVRSLKMDRKVWTETLIELFLQLGNGAGNRFWAANVPPSEALQPSSSPSTRRCHLEAKYREGKYRRYHPLFGNQEELDKALCAAVTTTDLAETQALLGCGAGINCFSGDPEAPTPLALAEQAGQTLQMEFLRNNRTTEVPRLDSMKPLEKHYSVVLPTVSHSGFLYKTASAGKLLQDRRAREDTSSPTRIFACAVPSA

SEQ ID NO: 1892 - protein, 538 aa, Artificial Sequence
  Synthetic polypeptide
MTKKEEPPPSRVPRAVRVASLLSEGEELSGDDQGDEEEDDHAYEGVPNGGWHTSSLSLSLPSTIAAPHPMDGPPGGSTPVTPVIKAGWLDKNPPQGSYIYQKRWVRLDTDHLRYFDSNKDAYSKRFISVACISHVAAIGDQKFEVITNNRTFAFRAESDVERKEWMQALQQAMAEQRARARLSSAYLLGVPGSEQPDRAGSLELRGFKNKLYVAVVGDKVQLYKNLEEYHLGIGITFIDMSVGNVKEVDRRSFDLTTPYRIFSFSADSELEKEQWLEAMQGAIAEALSTSEVAERIWAAAPNRFCADCGAPQPDWASINLCVVICKRCAGEHRGLGAGVSKVRSLKMDRKVWTETLIELFLQLGNGAGNRFWAANVPPSEALQPSSSPSTRRCHLEAKYREGKYRRYHPLFGNQEELDKALCAAVTTTDLAETQALLGCGAGINCFSGDPEAPTPLALAEQAGQTLQMEFLRNNRTTEVPRLDSMKPLEKHYSVVLPTVSHSGFLYKTASAGKLLQDRRAREDTSSPTRIFACAVPSA

SEQ ID NO: 1893 - protein, 477 aa, Artificial Sequence
  Synthetic polypeptide
MTKKEEPPPSRVPRAVRVASLLSEGEELSGDDQGDEEEDDHAYEGVPNGGWHTSSLSLSLPSTIAAPHPMDGPPGGSTPVTPVIKAGWLDKNPPQGSYIYQKRWVRLDTDHLRYFDSNKDAYSKRFISVACISHVAAIGDQKFEVITNNRTFAFRAESDVERKEWMQALQQAMAEQRARARLSSAYLLGVPGSEQPDRAGSLELRGFKNKLYVAVVGDKVQLYKNLEEYHLGIGITFIDMSVGNVKEVDRRSFDLTTPYRIFSFSADSELEKEQWLEAMQGAIAEALSTSEVAERIWAAAPNRFCADCGAPQPDWASINLCVVICKRCAGEHRGLGAGVSKVRSLKMDRKVWTETLIEALCAAVTTTDLAETQALLGCGAGINCFSGDPEAPTPLALAEQAGQTLQMEFLRNNRTTEVPRLDSMKPLEKHYSVVLPTVSHSGFLYKTASAGKLLQDRRAREDTSSPTRIFACAVPSA

SEQ ID NO: 1894 - protein, 71 aa, Artificial Sequence
  Synthetic polypeptide
MEFLRNNRTTEVPRLDSMKPLEKHYSVVLPTVSHSGFLYKTASAGKLLQDRRAREDTSSPTRIFACAVPSA

SEQ ID NO: 1895 - protein, 612 aa, Artificial Sequence
  Synthetic polypeptide
MAGPGVPGAPAARWKRHIVRQLRLRDRTQKALFLELVPAYNHLLEKAELLDKFSKKLQPEPNSVTPTTHQGPWEESELDSDQVPSLVALRVKWQEEEEGLRLVCGEMAYQVVEKGAALGTLESELQQRQSRLAALEARVAQLREARAQQAQQVEEWRAQNAVQRAAYEALRAHVGLREAALRRLQEEARDLLERLVQRKARAAAERNLRNERRERAKQARVSQELKKAAKRTVSISEGPDTLGDGMRERRETLALAPEPEPLEKEACEKWKRPFRSASATSLTLSHCVDVVKGLLDFKKRRGHSIGGAPEQRYQIIPVCVAARLPTRAQDVLDAHLSEVNAVRFGPNSSLLATGGADRLIHLWNVVGSRLEANQTLEGAGGSITSVDFDPSGYQVLAATYNQAAQLWKVGEAQSKETLSGHKDKVTAAKFKLTRHQAVTGSRDRTVKEWDLGRAYCSRTINVLSYCNDVVCGDHIIISGHNDQKIRFWDSRGPHCTQVIPVQGRVTSLSLSHDQLHLLSCSRDNTLKVIDLRVSNIRQVFRADGFKCGSDWTKAVFSPDRSYALAGSCDGALYIWDVDTGKLESRLQGPHWLDAVAHACNPSTLGGQGGQIT

SEQ ID NO: 1896 - protein, 443 aa, Artificial Sequence
  Synthetic polypeptide
AGRSRASPVSGREGGSSRPLEEGTGSSPACVRGAAPGSQDAFYPTRAKQARVSQELKKAAKRTVSISEGPDTLGDGMRERRETLALAPEPEPLEKEACEKWKRPFRSASATSLTLSHCVDVVKGLLDFKKRRGHSIGGAPEQRYQIIPVCVAARLPTRAQDVLDAHLSEVNAVRFGPNSSLLATGGADRLIHLWNVVGSRLEANQTLEGAGGSITSVDFDPSGYQVLAATYNQAAQLWKVGEAQSKETLSGHKDKVTAAKFKLTRHQAVTGSRDRTVKEWDLGRAYCSRTINVLSYCNDVVCGDHIIISGHNDQKIRFWDSRGPHCTQVIPVQGRVTSLSLSHDQLHLLSCSRDNTLKVIDLRVSNIRQVFRADGFKCGSDWTKAVFSPDRSYALAGSCDGALYIWDVDTGKLESRLQGPHWLDAVAHACNPSTLGGQGGQIT

SEQ ID NO: 1897 - protein, 55 aa, Artificial Sequence
  Synthetic polypeptide
RRARVSGCFLPNKGQAGAGVPGAEEGCQADREHQRGPGHPRRWDEGEKGDSGSGP

SEQ ID NO: 1898 - protein, 614 aa, Artificial Sequence
  Synthetic polypeptide
MAGPGVPGAPAARWKRHIVRQLRLRDRTQKALFLELVPAYNHLLEKAELLDKFSKKLQPEPNSVTPTTHQGPWEESELDSDQVPSLVALRVKWQEEEEGLRLVCGEMAYQVVEKGAALGTLESELQQRQSRLAALEARVAQLREARAQQAQQVEEWRAQNAVQRAAYEALRAHVGLREAALRRLQEEARDLLERLVQRKARAAAERNLRNERRERAKQARVSQELKKAAKRTVSISEGPDTLGDGMRERRETLALAPEPEPLEKEACEKWKRPFRSASATSLTLSHCVDVVKGLLDFKKRRGHSIGGAPEQRYQIIPVCVAARLPTRAQDVLDAHLSEVNAVRFGPNSSLLATGGADRLIHLWNVVGSRLEANQTLEGAGGSITSVDFDPSGYQVLAATYNQAAQLWKVGEAQSKETLSGHKDKVTAAKFKLTRHQAVTGSRDRTVKEWDLGRAYCSRTINVLSYCNDVVCGDHIIISGHNDQKIRFWDSRGPHCTQVIPVQGRVTSLSLSHDQLHLLSCSRDNTLKVIDLRVSNIRQVFRADGFKCGSDWTKAVFSPDRSYALAGSCDGALYIWDVDTGKLESRLQGPHCAAVNAVAWCYSGSHMAGCGGSRL

SEQ ID NO: 1899 - protein, 411 aa, Artificial Sequence
  Synthetic polypeptide
AGRSRASPVSGREGGSSRPLEEGTGSSPACVRGAAPGSQDAFYPTRAKQARVSQELKKAAKRTVSISEGPDTLGDGMRERRETLALAPEPEPLEKEACEKWKRPFRSASATSLTLSHCVDVVKGLLDFKKRRGHSIGGAPEQRYQIIPVCVAARLPTRAQDVLDAHLSEVNAVRFGPNSSLLATGGADRLIHLWNVVGSRLEANQTLEGAGGSITSVDFDPSGYQVLAATYNQAAQLWKVGEAQSKETLSGHKDKVTAAKFKLTRHQAVTGSRDRTVKEWDLGRAYCSRTINVLSYCNDVVCGDHIIISGHNDQKIRFWDSRGPHCTQVIPVQGRVTSLSLSHDQLHLLSCSRDNTLKVIDLRVSNIRQVFRADGFKCGSDWTKAVFSAAVNAVAWCYSGSHMAGCGGSRL

SEQ ID NO: 1900 - protein, 445 aa, Artificial Sequence
  Synthetic polypeptide
AGRSRASPVSGREGGSSRPLEEGTGSSPACVRGAAPGSQDAFYPTRAKQARVSQELKKAAKRTVSISEGPDTLGDGMRERRETLALAPEPEPLEKEACEKWKRPFRSASATSLTLSHCVDVVKGLLDFKKRRGHSIGGAPEQRYQIIPVCVAARLPTRAQDVLDAHLSEVNAVRFGPNSSLLATGGADRLIHLWNVVGSRLEANQTLEGAGGSITSVDFDPSGYQVLAATYNQAAQLWKVGEAQSKETLSGHKDKVTAAKFKLTRHQAVTGSRDRTVKEWDLGRAYCSRTINVLSYCNDVVCGDHIIISGHNDQKIRFWDSRGPHCTQVIPVQGRVTSLSLSHDQLHLLSCSRDNTLKVIDLRVSNIRQVFRADGFKCGSDWTKAVFSPDRSYALAGSCDGALYIWDVDTGKLESRLQGPHCAAVNAVAWCYSGSHMAGCGGSRL

SEQ ID NO: 1901 - protein, 55 aa, Artificial Sequence; identical to SEQ ID NO: 1897
  Synthetic polypeptide

SEQ ID NO: 1902 - protein, 126 aa, Artificial Sequence
  Synthetic polypeptide
MAAPLRIQSDWAQALRKDEGEAWLSCHPPGKPSLYGSLTCQGIGLDGIPEVTASEGFTVNEINKKSIHISCPKENASSKFLAPYTTFSRIHTKSVQWLTPAILALWEAEAGGSLEAKSLRPAWATE

SEQ ID NO: 1903 - protein, 109 aa, Artificial Sequence
  Synthetic polypeptide
MLVPCFLYSLQNRKPSLYGSLTCQGIGLDGIPEVTASEGFTVNEINKKSIHISCPKENASSKFLAPYTTFSRIHTKSVQWLTPAILALWEAEAGGSLEAKSLRPAWATE

SEQ ID NO: 1904 - protein, 104 aa, Artificial Sequence
  Synthetic polypeptide
MLLLYHIGKPSLYGSLTCQGIGLDGIPEVTASEGFTVNEINKKSIHISCPKENASSKFLAPYTTFSRIHTKSVQWLTPAILALWEAEAGGSLEAKSLRPAWATE

SEQ ID NO: 1905 - protein, 127 aa, Artificial Sequence
  Synthetic polypeptide
MLELKPSSVDSKFSTTMQAYVFPRCFGTAWVLTSFFPSYSDLDTVFITSNMIANFCCEPAEWVQTKSIHISCPKENASSKFLAPYTTFSRIHTKSVQWLTPAILALWEAEAGGSLEAKSLRPAWATE

SEQ ID NO: 1906 - protein, 231 aa, Artificial Sequence
  Synthetic polypeptide
MKIWQASNGELRRVLEGHVFDVNCCRFFPSGLVVLSGGMDAQLKIWSAEDASCVVTFKGHKGGILDTAIVDRGRNVVSASRDGTARLWDCGRSACLGVLADCGSSINGVAVGAADNSINLGSPEQMPSEREVGTEAKMLLLAREDKKLQCLGLQSRQLVFLFIGSDAFNCCTFLSGFLLLAGTQDGNIYQLDVRSPRAPVQVIHRSGAPVLSLLSVRDGFIASQEFSSMPT

SEQ ID NO: 1907 - protein, 346 aa, Artificial Sequence
  Synthetic polypeptide
MAAPLRIQSDWAQALRKDEGEAWLSCHPPGKPSLYGSLTCQGIGLDGIPEVTASEGFTVNEINKKSIHISCPKENASSKFLAPYTTFSRIHTKSITCLDISSRGGLGVSSSTDGTMKIWQASNGELRRVLEGHVFDVNCCRFFPSGLVVLSGGMDAQLKIWSAEDASCVVTFKGHKGGILDTAIVDRGRNVVSASRDGTARLWDCGRSACLGVLADCGSSINGVAVGAADNSINLGSPEQMPSEREVGTEAKMLLLAREDKKLQCLGLQSRQLVFLFIGSDAFNCCTFLSGFLLLAGTQDGNIYQLDVRSPRAPVQVIHRSGAPVLSLLSVRDGFIASQEFSSMPT

SEQ ID NO: 1908 - protein, 329 aa, Artificial Sequence
  Synthetic polypeptide
MLVPCFLYSLQNRKPSLYGSLTCQGIGLDGIPEVTASEGFTVNEINKKSIHISCPKENASSKFLAPYTTFSRIHTKSITCLDISSRGGLGVSSSTDGTMKIWQASNGELRRVLEGHVFDVNCCRFFPSGLVVLSGGMDAQLKIWSAEDASCVVTFKGHKGGILDTAIVDRGRNVVSASRDGTARLWDCGRSACLGVLADCGSSINGVAVGAADNSINLGSPEQMPSEREVGTEAKMLLLAREDKKLQCLGLQSRQLVFLFIGSDAFNCCTFLSGFLLLAGTQDGNIYQLDVRSPRAPVQVIHRSGAPVLSLLSVRDGFIASQEFSSMPT

SEQ ID NO: 1909 - protein, 347 aa, Artificial Sequence
  Synthetic polypeptide
MLELKPSSVDSKFSTTMQAYVFPRCFGTAWVLTSFFPSYSDLDTVFITSNMIANFCCEPAEWVQTKSIHISCPKENASSKFLAPYTTFSRIHTKSITCLDISSRGGLGVSSSTDGTMKIWQASNGELRRVLEGHVFDVNCCRFFPSGLVVLSGGMDAQLKIWSAEDASCVVTFKGHKGGILDTAIVDRGRNVVSASRDGTARLWDCGRSACLGVLADCGSSINGVAVGAADNSINLGSPEQMPSEREVGTEAKMLLLAREDKKLQCLGLQSRQLVFLFIGSDAFNCCTFLSGFLLLAGTQDGNIYQLDVRSPRAPVQVIHRSGAPVLSLLSVRDGFIASQEFSSMPT

SEQ ID NO: 1910 - protein, 457 aa, Artificial Sequence
  Synthetic polypeptide
GEQRRTHPVACSFCPEFSHHVEFTCNLVTQHCSGEACFLAELLEFAEVIFAVYHENTKSASDIISIESCKEYLLGVVKVPTKELLIKRSGITGWYPIILPEDGGLPHGLELMQKIVGGLELSISFTHRGDRERVLEAAEHLGWSFENSLKDFVRMDEGEPATVTISTPRLWLPIHCVLLAGHNHIHKNTYCYLRYKFYDHEAFWTPLKKPKESVNKKQIMVTFKASKRAEVTRGPSLLWYFREERLEIQVWRAYGNDSVERPHQTDSWIGSAYVDLARLGERSARTLTVSGVYPLFGRNASNLSGAALRVHVVLSSLSSHLEPTHELDSMDCSSHSESEQLPRRNDEVQLSPPEVISCHQKSPASTQVPCSSTTAEVRLTQEGPADLDGTFAVSILVERAMHLSLKGSPLTERKVSIPSCCVSFATADESSPVYTQVVENTDSPIWNFQQQSRLLCR

SEQ ID NO: 1911 - protein, 1701 aa, Artificial Sequence
  Synthetic polypeptide
MKQRKGQGSGGSRGRKKRGLSDISPSTSLPPLVEGQLRCFLKLTVNRVIWKIAKPPTCVLVRVRWWGETSDGTLFCPRDALQTEPKAVRTTTRYAIRCGPKQFTSYLTDMAVLVLEVITKLDGLPIGRVQINGLAQLSPTHQINGFFTIVSSTSKKLGELQVSLALEPLSETYDSYHPLPTTDMTENVLLSKQGFRENTEPSSTQFQVPSRPRDIHTIKIDGKELAANSSRSTTPRGKDHVCFAENPDTIKDSSFGLQHSLNSGQSLESVTLKGRAPRKQMSLLNSSEFQPQIRTVAKSHSDSCILSSNNLPTKDLLSALLEQGNKLRNAMVISAMKSSPETSMLLDQVHPPINEDSLRASTQIRAFSRNRFKDHIEDHLLPSTENTFWRHDTKADTRAIQLLLGSAELSQGNFWDGLGSPPDSPSPGSDVYCISELNDPQYDQSLLENLFYTAPKSDTSISDFLSEEDDIVPSKKISQSTALARSSKVLESSDHKLKKRSAGKRNRNLVEQQMLSETPEDAQTMTLSVDRLALLGRTHSVRIIIETMGVPPDSPQMTPGKKSYAGPPPKVTTAKKRTFFVEYHFPVGFSESGLGKTALITEVVRLASSKITDGKVKFQQRFVFPVQFGGPMIEHWWNSNLTFQIYVKKTPQKKPEVIGSVSLSLRAVIQSELLSFSDQLPVQQENGQSPFGPLKVTMELITDNKDFTGINTKLSGNTHYTPLCAPTSPNKALPELNQDMTCTKNPQNLNQIHEETAKKAQNLVLPNRKSPSPVAPHPSTFVATPASHNLVNQTNGTTKESALLLHVLLMVPDGKDFISGESEKQSPCNVYLNCKLFSTEEVTRSVIAWGTTQPVFNFSQVIPVSLSSKYLERLKNNVMVIETWNKVRSPGQDKLLGLVKLPLHQFYMSFKDAKISRLLLDAQYPVVAVDSYMPVIDVFSGHQNGSLRVFLAMGSSNQIMALQRLKNEEGTLPPFSPRPAHFLDQPTAASVAMAEDRGNGLMEHCFEIHIEMVKGLAPLQATVWGEADCYVQYYFPVQHSQSSVLKGPEFLENGITLKPFRTATTLCVPDPIFNSEHHHSLLLPAEVPVQRLLLSAFSAQGLVPGGGVQFEIWCRYYYPNVRDQKVAKGTLPLSRICAMVTTQHREDVGIQTFNLPLTPRIENRKELRNQSSGLLDVGLRYRRSPRTAEGVLAARTVSISVQIIRACGLQAAAKALAEREPALQFSATVGVNASVTTHLSFLPQGEQRRTHPVACSFCPEFSHHVEFTCNLVTQHCSGEACFLAELLEFAEVIFAVYHENTKSASDIISIESCKEYLLGVVKVPTKELLIKRSGITGWYPIILPEDGGLPHGLELMQKIVGGLELSISFTHRGDRERVLEAAEHLGWSFENSLKDFVRMDEGEPATVTISTPRLWLPIHCVLLAGHNHIHKNTYCYLRYKFYDHEAFWTPLKKPKESVNKKQIMVTFKASKRAEVTRGPSLLWYFREERLEIQVWRAYGNDSVERPHQTDSWIGSAYVDLARLGERSARTLTVSGVYPLFGRNASNLSGAALRVHVVLSSLSSHLEPTHELDSMDCSSHSESEQLPRRNDEVQLSPPEVISCHQKSPASTQVPCSSTTAEVRLTQEGPADLDGTFAVSILVERAMHLSLKGSPLTERKVSIPSCCVSFATADESSPVYTQVVENTDSPIWNFQQQSRLLCR

SEQ ID NO: 1912 - protein, 509 aa, Artificial Sequence
  Synthetic polypeptide
AARTVSISVQIIRACGLQAAAKALAEREPALQFSATVGVNASVTTHLSFLPQGEQRRTHPVACSFCPEFSHHVEFTCNLVTQHCSGEACFLAELLEFAEVIFAVYHENTKSASDIISIESCKEYLLGVVKVPTKELLIKRSGITGWYPIILPEDGGLPHGLELMQKIVGGLELSISFTHRGDRERVLEAAEHLGWSFENSLKDFVRMDEGEPATVTISTPRLWLPIHCVLLAGHNHIHKNTYCYLRYKFYDHEAFWTPLKKPKESVNKKQIMVTFKASKRAEVTRGPSLLWYFREERLEIQVWRAYGNDSVERPHQTDSWIGSAYVDLARLGERSARTLTVSGVYPLFGRNASNLSGAALRVHVVLSSLSSHLEPTHELDSMDCSSHSESEQLPRRNDEVQLSPPEVISCHQKSPASTQVPCSSTTAEVRLTQEGPADLDGTFAVSILVERAMHLSLKGSPLTERKVSIPSCCVSFATADESSPVYTQVVENTDSPIWNFQQQSRLLCR

SEQ ID NO: 1913 - protein, 442 aa, Artificial Sequence
  Synthetic polypeptide
MKQRKGQGSGGSRGRKKRGLSDISPSTSLPPLVEGQLRCFLKLTVNRVIWKIAKPPTCVLVRVRWWGETSDGTLFCPRDALQTEPKAVRTTTRYAIRCGPKQFTSYLTDMAVLVLEVITKLDGLPIGRVQINGLAQLSPTHQINGFFTIVSSTSKKLGELQVSLALEPLSETYDSYHPLPTTDMTENVLLSKQGFRENTEPSSTQFQVPSRPRDIHTIKIDGKELAANSSRSTTPRGKDHVCFAENPDTIKDSSFGLQHSLNSGQSLESVTLKGRAPRKQMSLLNSSEFQPQIRTVAKSHSDSCILSSNNLPTKDLLSALLEQGNKLRNAMVISAMKSSPETSMLLDQVHPPINEDSLRASTQIRAFSRNRFKDHIEDHLLPSTENTFWRHDTKADTRAIQLLLGSLPSACDCRRAPPRLTGFRIFLVEMGFLCVGRLVCSS

SEQ ID NO: 1914 - protein, 430 aa, Artificial Sequence
  Synthetic polypeptide
MKQRKGQGSGGSRGRKKRGLSDISPSTSLPPLVEGQLRCFLKLTVNRVIWKIAKPPTCVLVRVRWWGETSDGTLFCPRDALQTEPKAVRTTTRYAIRCGPKQFTSYLTDMAVLVLEVITKLDGLPIGRVQINGLAQLSPTHQINGFFTIVSSTSKKLGELQVSLALEPLSETYDSYHPLPTTDMTENVLLSKQGFRENTEPSSTQFQVPSRPRDIHTIKIDGKELAANSSRSTTPRGKDHVCFAENPDTIKDSSFGLQHSLNSGQSLESVTLKGRAPRKQMSLLNSSEFQPQIRTVAKSHSDSCILSSNNLPTKDLLSALLEQGNKLRNAMVISAMKSSPETSMLLDQVHPPINEDSLRASTQIRAFSRNRFKDHIEDHLLPSTENTFWRHDTKADTRAIQLLLGRKLQGTQNSQNNLEKKESRTHTFQF

SEQ ID NO: 1915 - protein, 47 aa, Artificial Sequence
  Synthetic polypeptide
MSALEKSMHLGRLPSRPPLPGSGGSQSGAKMRMGLKYFFIAVQEWTT

SEQ ID NO: 1916 - protein, 337 aa, Artificial Sequence
  Synthetic polypeptide
MSALEKSMHLGRLPSRPPLPGSGGSQSGAKMRMGPGRKRDFSPVPWSQYFESMEDVEVENETGKDTFRVYKSGSEGPVLLLLHGGGHSALSWAVFTAAIISRVQCRIVALDLRSHGETKVKNPEDLSAETMAKDVGNVVEAMYGDLPPPIMLIGHSMGGAIAVHTASSNLVPSLLGLCMIDVVEGTAMDALNSMQNFLRGRPKTFKSLENAIEWSVKSGQIRNLESARVSMVGQVKQCEGITSPEGSKSIVEGIIEEEEEDEEGSESISKRKKEDDMETKKDHPYTWRIELAKTEKYWDGWFRGLSNLFLSCPIPKLLLLAGVDRLDKDLTIGQMQG

SEQ ID NO: 1917 - protein, 351 aa, Artificial Sequence
  Synthetic polypeptide
MSALEKSMHLGRLPSRPPLPGSGGSQSGAKMRMGPGRKRDFSPVPWSQYFESMEDVEVENETGKDTFRVYKSGSEGPVLLLLHGGGHSALSWAVFTAAIISRVQCRIVALDLRSHGETKVKNPEDLSAETMAKDVGNVVEAMYGDLPPPIMLIGHSMGGAIAVHTASSNLVPSLLGLCMIDVVEGTAMDALNSMQNFLRGRPKTFKSLENAIEWSVKSGQIRNLESARVSMVGQVKQCEGITSPEGSKSIVEGIIEEEEEDEEGSESISKRKKEDDMEGLPSETQNLLLFLQTKKDHPYTWRIELAKTEKYWDGWFRGLSNLFLSCPIPKLLLLAGVDRLDKDLTIGQMQG

SEQ ID NO: 1918 - protein, 150 aa, Artificial Sequence
  Synthetic polypeptide
MDALNSMQNFLRGRPKTFKSLENAIEWSVKSGQIRNLESARVSMVGQVKQCEGITSPEGSKSIVEGIIEEEEEDEEGSESISKRKKEDDMETKKDHPYTWRIELAKTEKYWDGWFRGLSNLFLSCPIPKLLLLAGVDRLDKDLTIGQMQG

SEQ ID NO: 1919 - protein, 21 aa, Artificial Sequence
  Synthetic polypeptide
MADQLYLENIDEFVTDQNKIH

SEQ ID NO: 1920 - protein, 315 aa, Artificial Sequence
  Synthetic polypeptide
MADQLYLENIDEFVTDQNKIVTYKWLSYTLGVHVNQAKQMLYDYVERKRKENSGAQLHVTYLVSGSLIQNGHSCHKVAVVREDKLEAVKSKLAVTASIHVYSIQKAMLKDSGPLFNTDYDILKSNLQNCSKFSAIQCAAAVPRAPAESSSSSKKFEQSHLHMSSETQANNELTTNGHGPPASKQVSQQPKGIMGMFASKAAAKTQETNKETKTEAKEVTNASAAGNKAPGKGNMMSNFFGKAAMNKFKVNLDSEQAVKEEKIVEQPTVSVTEPKLATPAGLKKSSKKAEPVKVLQKEKKRCLNTQIPLCYSCLQY

SEQ ID NO: 1921 - protein, 276 aa, Artificial Sequence
  Synthetic polypeptide
MLYDYVERKRKENSGAQLHVTYLVSGSLIQNGHSCHKVAVVREDKLEAVKSKLAVTASIHVYSIQKAMLKDSGPLFNTDYDILKSNLQNCSKFSAIQCAAAVPRAPAESSSSSKKFEQSHLHMSSETQANNELTTNGHGPPASKQVSQQPKGIMGMFASKAAAKTQETNKETKTEAKEVTNASAAGNKAPGKGNMMSNFFGKAAMNKFKVNLDSEQAVKEEKIVEQPTVSVTEPKLATPAGLKKSSKKAEPVKVLQKEKKRCLNTQIPLCYSCLQY

SEQ ID NO: 1922 - protein, 209 aa, Artificial Sequence
  Synthetic polypeptide
MLKDSGPLFNTDYDILKSNLQNCSKFSAIQCAAAVPRAPAESSSSSKKFEQSHLHMSSETQANNELTTNGHGPPASKQVSQQPKGIMGMFASKAAAKTQETNKETKTEAKEVTNASAAGNKAPGKGNMMSNFFGKAAMNKFKVNLDSEQAVKEEKIVEQPTVSVTEPKLATPAGLKKSSKKAEPVKVLQKEKKRCLNTQIPLCYSCLQY

SEQ ID NO: 1923 - protein, 4 aa, Artificial Sequence
  Synthetic polypeptide
LLQA

SEQ ID NO: 1924 - protein, 36 aa, Artificial Sequence
  Synthetic polypeptide
MGDKGTRVFKKASPNGKAGQQEQNSISKKKLFKKKE

SEQ ID NO: 1925 - protein, 31 aa, Artificial Sequence
  Synthetic polypeptide
MGVFKKASPNGKAGQQEQNSISKKKLFKKKE

SEQ ID NO: 1926 - protein, 46 aa, Artificial Sequence
  Synthetic polypeptide
SHCKRWERRGHGRRLAAGEAESVQEGQSKWKGRATRAKFHLEKKII

SEQ ID NO: 1927 - protein, 49 aa, Artificial Sequence
  Synthetic polypeptide
VSAFRCPVGALGKQHRHRGLYLLQSVQEGQSKWKGRATRAKFHLEKKII

SEQ ID NO: 1928 - protein, 161 aa, Artificial Sequence
  Synthetic polypeptide
MSDRYLEQRISIKFCVKLNKSASETHHLLKEAYGDEVMSRARVFDWHKRFKEGREDVRDDARSGRPVTHRTDDNIQKVKDLVCSNRQLTVRMMAEELNLDKETVRLILKENLNMRKISAKVISGVLKGEPKPRKLDFRSDLSKETRKNSSCLRKKDVFLLY

SEQ ID NO: 1929 - protein, 108 aa, Artificial Sequence
  Synthetic polypeptide
MIIPPMFGAVQSVRDGLEKRYIASYLALTVVGMGSWCFHMTLKYEMQLLDELPMIYSCCIFVYCMFECFKIKNSVNYHLLFTLVLFSLIVTTVYLKVKEPIFHQVTAT

SEQ ID NO: 1930 - protein, 150 aa, Artificial Sequence
  Synthetic polypeptide
MAPAADREGYWGPTTSTLDWCEENYSVTWYIAEFWNTVSNLIMIIPPMFGAVQSVRDGLEKRYIASYLALTVVGMGSWCFHMTLKYEMQLLDELPMIYSCCIFVYCMFECFKIKNSVNYHLLFTLVLFSLIVTTVYLKVKEPIFHQVTAT

SEQ ID NO: 1931 - protein, 55 aa, Artificial Sequence
  Synthetic polypeptide
MIYSCCIFVYCMFECFKIKNSVNYHLLFTLVLFSLIVTTVYLKVKEPIFHQVTAT

SEQ ID NO: 1932 - protein, 113 aa, Artificial Sequence
  Synthetic polypeptide
MAPAADREGYWGPTTSTLDWCEENYSVTWYIAEFLVGMGSWCFHMTLKYEMQLLDELPMIYSCCIFVYCMFECFKIKNSVNYHLLFTLVLFSLIVTTVYLKVKEPIFHQVTAT

SEQ ID NO: 1933 - protein, 17 aa, Artificial Sequence
  Synthetic polypeptide
MAQSRLIGTSTSQVTAT

SEQ ID NO: 1934 - protein, 896 aa, Artificial Sequence
  Synthetic polypeptide
MASDASHALEAALEQMDGIIAGTKTGADLSDGTCEPGLASPASYMNPFPVLHLIEDLRLALEMLELPQERAALLSQIPGPTAAYIKEWFEESLSQVNHHSAASNETYQERLARLEGDKESLILQVSVLTDQVEAQGEKIRDLEVCLEGHQVKLNAAEEMLQQELLSRTSLETQKLDLMTEVSELKLKLVGMEKEQREQEEKQRKAEELLQELRHLKIKVEELENERNQYEWKLKATKAEVAQLQEQVALKDAEIERLHSQLSRTAALHSESHTERDQEIQRLKMGMETLLLANEDKDRRIEELTGLLNQYRKVKEIVMVTQGPSERTLSINEEEPEGGFSKWNATNKDPEELFKQEMPPRCSSPTVGPPPLPQKSLETRAQKKLSCSLEDLRSESVDKCMDGNQPFPVLEPKDSPFLAEHKYPTLPGKLSGATPNGEAAKSPPTICQPDATGSSLLRLRDTESGWDDTAVVNDLSSTSSGTESGPQSPLTPDGKRNPKGIKKFWGKIRRTQSGNFYTDTLGMAEFRRGGLRATAGPRLSRTRDSKGQKSDANAPFAQWSTERVCAWLEDFGLAQYVIFARQWVSSGHTLLTATPQDMEKELGIKHPLHRKKLVLAVKAINTKQEEKSALLDHIWVTRWLDDIGLPQYKDQFHESRVDRRMLQYLTVNDLLFLKVTSQLHHLSIKCAIHVLHVNKFNPHCLHRRPADESNLSPSEVVQWSNHRVMEWLRSVDLAEYAPNLRGSGVHGGLIILEPRFTGDTLAMLLNIPPQKTLLRRHLTTKFNALIGPEAEQEKREKMASPAYTPLTTTAKVRPRKLGFSHFGNIRKKKFDESTDYICPMEPSDGVSDSHRVYSGYRGLSPLDAPELDGLDQVFGSSSLILSLLVPYEEGACFPFTL

SEQ ID NO: 1935 - protein, 738 aa, Artificial Sequence
  Synthetic polypeptide
MLQQELLSRTSLETQKLDLMTEVSELKLKLVGMEKEQREQEEKQRKAEELLQELRHLKIKVEELENERNQYEWKLKATKAEVAQLQEQVALKDAEIERLHSQLSRTAALHSESHTERDQEIQRLKMGMETLLLANEDKDRRIEELTGLLNQYRKVKEIVMVTQGPSERTLSINEEEPEGGFSKWNATNKDPEELFKQEMPPRCSSPTVGPPPLPQKSLETRAQKKLSCSLEDLRSESVDKCMDGNQPFPVLEPKDSPFLAEHKYPTLPGKLSGATPNGEAAKSPPTICQPDATGSSLLRLRDTESGWDDTAVVNDLSSTSSGTESGPQSPLTPDGKRNPKGIKKFWGKIRRTQSGNFYTDTLGMAEFRRGGLRATAGPRLSRTRDSKGQKSDANAPFAQWSTERVCAWLEDFGLAQYVIFARQWVSSGHTLLTATPQDMEKELGIKHPLHRKKLVLAVKAINTKQEEKSALLDHIWVTRWLDDIGLPQYKDQFHESRVDRRMLQYLTVNDLLFLKVTSQLHHLSIKCAIHVLHVNKFNPHCLHRRPADESNLSPSEVVQWSNHRVMEWLRSVDLAEYAPNLRGSGVHGGLIILEPRFTGDTLAMLLNIPPQKTLLRRHLTTKFNALIGPEAEQEKREKMASPAYTPLTTTAKVRPRKLGFSHFGNIRKKKFDESTDYICPMEPSDGVSDSHRVYSGYRGLSPLDAPELDGLDQVFGSSSLILSLLVPYEEGACFPFTL

SEQ ID NO: 1936 - protein, 784 aa, Artificial Sequence
  Synthetic polypeptide
MSSEQWPRLPGKVSVLTDQVEAQGEKIRDLEVCLEGHQVKLNAAEEMLQQELLSRTSLETQKLDLMTEVSELKLKLVGMEKEQREQEEKQRKAEELLQELRHLKIKVEELENERNQYEWKLKATKAEVAQLQEQVALKDAEIERLHSQLSRTAALHSESHTERDQEIQRLKMGMETLLLANEDKDRRIEELTGLLNQYRKVKEIVMVTQGPSERTLSINEEEPEGGFSKWNATNKDPEELFKQEMPPRCSSPTVGPPPLPQKSLETRAQKKLSCSLEDLRSESVDKCMDGNQPFPVLEPKDSPFLAEHKYPTLPGKLSGATPNGEAAKSPPTICQPDATGSSLLRLRDTESGWDDTAVVNDLSSTSSGTESGPQSPLTPDGKRNPKGIKKFWGKIRRTQSGNFYTDTLGMAEFRRGGLRATAGPRLSRTRDSKGQKSDANAPFAQWSTERVCAWLEDFGLAQYVIFARQWVSSGHTLLTATPQDMEKELGIKHPLHRKKLVLAVKAINTKQEEKSALLDHIWVTRWLDDIGLPQYKDQFHESRVDRRMLQYLTVNDLLFLKVTSQLHHLSIKCAIHVLHVNKFNPHCLHRRPADESNLSPSEVVQWSNHRVMEWLRSVDLAEYAPNLRGSGVHGGLIILEPRFTGDTLAMLLNIPPQKTLLRRHLTTKFNALIGPEAEQEKREKMASPAYTPLTTTAKVRPRKLGFSHFGNIRKKKFDESTDYICPMEPSDGVSDSHRVYSGYRGLSPLDAPELDGLDQVFGSSSLILSLLVPYEEGACFPFTL

SEQ ID NO: 1937 - protein, 753 aa, Artificial Sequence
  Synthetic polypeptide
MGKLITRMWKLLRRRSAPKELLSRTSLETQKLDLMTEVSELKLKLVGMEKEQREQEEKQRKAEELLQELRHLKIKVEELENERNQYEWKLKATKAEVAQLQEQVALKDAEIERLHSQLSRTAALHSESHTERDQEIQRLKMGMETLLLANEDKDRRIEELTGLLNQYRKVKEIVMVTQGPSERTLSINEEEPEGGFSKWNATNKDPEELFKQEMPPRCSSPTVGPPPLPQKSLETRAQKKLSCSLEDLRSESVDKCMDGNQPFPVLEPKDSPFLAEHKYPTLPGKLSGATPNGEAAKSPPTICQPDATGSSLLRLRDTESGWDDTAVVNDLSSTSSGTESGPQSPLTPDGKRNPKGIKKFWGKIRRTQSGNFYTDTLGMAEFRRGGLRATAGPRLSRTRDSKGQKSDANAPFAQWSTERVCAWLEDFGLAQYVIFARQWVSSGHTLLTATPQDMEKELGIKHPLHRKKLVLAVKAINTKQEEKSALLDHIWVTRWLDDIGLPQYKDQFHESRVDRRMLQYLTVNDLLFLKVTSQLHHLSIKCAIHVLHVNKFNPHCLHRRPADESNLSPSEVVQWSNHRVMEWLRSVDLAEYAPNLRGSGVHGGLIILEPRFTGDTLAMLLNIPPQKTLLRRHLTTKFNALIGPEAEQEKREKMASPAYTPLTTTAKVRPRKLGFSHFGNIRKKKFDESTDYICPMEPSDGVSDSHRVYSGYRGLSPLDAPELDGLDQVFGSSSLILSLLVPYEEGACFPFTL

SEQ ID NO: 1938 - protein, 20 aa, Artificial Sequence
  Synthetic polypeptide
KDAPQAPPDHQVQCLDWSGG

SEQ ID NO: 1939 - protein, 139 aa, Artificial Sequence
  Synthetic polypeptide
MTSPEIASLSWGQMKVKGSNTTYKDCKVWPGGSRTWDWRETGTEHSPGVQPADVKEVVEKGVQTLVIGRGMSEALKAPTQQLPSGVHVRAVVQFHLATASWHILERCKTGWNTGGTVRSELLSRGCLMQKMKTEERMSL

SEQ ID NO: 1940 - protein, 46 aa, Artificial Sequence
  Synthetic polypeptide
RLQPSSCHQVFMSGLWYNSTWLQLHGTSLRDAKQDGIQGAQLDLNC

SEQ ID NO: 1941 - protein, 26 aa, Artificial Sequence
  Synthetic polypeptide
MDVGPRLKAWKPRSNHEMVVCIQPCC

SEQ ID NO: 1942 - protein, 9 aa, Artificial Sequence
  Synthetic polypeptide
MVVCIQPCC

SEQ ID NO: 1943 - protein, 31 aa, Artificial Sequence
  Synthetic polypeptide
MAALTIATGTGNWFSALALGVTLLKCLLIPT

SEQ ID NO: 1944 - protein, 15 aa, Artificial Sequence
  Synthetic polypeptide
MPSHPHIALLLTEIQ

SEQ ID NO: 1945 - protein, 389 aa, Artificial Sequence
  Synthetic polypeptide
MLGVRCLLRSVRFCSSAPFPKHKPSAKLSVRDALGAQNASGERIKIQGWIRSVRSQKEVLFLHVNDGSSLESLQVVADSGLDSRELNFGSSVEVQGQLIKSPSKRQNVELKAEKIKVIGNCDAKDFPIKYKERHPLEYLRQYPHFRCRTNVLGSILRIRSEATAAIHSFFKDSGFVHIHTPIITSNDSEGAGELFQLEPSGKLKVPEENFFNVPAFLTVSGQLHLEVMSGAFTQVFTFGPTFRAENSQSRRHLAEFYMIEAEISFVDSLQDLMQVIEELFKATTMMVLSKCPEDVELCHKFIAPGQKDRLEHMLKNNFLIISYTEAVEILKQASQNFTFTPEWGADLRTEHEKYLVKHCGNIPVFVINYPLTLKPFYMRDNEDGPQHTT

SEQ ID NO: 1946 - protein, 162 aa, Artificial Sequence
  Synthetic polypeptide
MSGAFTQVFTFGPTFRAENSQSRRHLAEFYMIEAEISFVDSLQDLMQVIEELFKATTMMVLSKCPEDVELCHKFIAPGQKDRLEHMLKNNFLIISYTEAVEILKQASQNFTFTPEWGADLRTEHEKYLVKHCGNIPVFVINYPLTLKPFYMRDNEDGPQHTT

SEQ ID NO: 1947 - protein, 79 aa, Artificial Sequence
  Synthetic polypeptide
MGRRALLLLLLSFLAPWATIALRPALRALGSLHLPTNPTSLPAVAKNYSVLYFQQKPPLVIPGKQGLEGTSSKLQQTCS

SEQ ID NO: 1948 - protein, 204 aa, Artificial Sequence
  Synthetic polypeptide
MPGVANSGPSTSSRETANPCSRKKVHFGSIHDAVRAGDVKQLSEIVVRGASINELDVLHKFTPLHWAAHSGSLECLHWLLWHGADITHVTTRGWTASHIAAIRGQDACVQALIMNGANLTAQDDRGCTPLHLAATHGHSFTLQIMLRSGVDPSVTDKREWRPVHYAAFHGRLGCLQLLVKWGCSIEDVDYNGNLPVFFFKVKFK

SEQ ID NO: 1949 - protein, 91 aa, Artificial Sequence
  Synthetic polypeptide
MNGANLTAQDDRGCTPLHLAATHGHSFTLQIMLRSGVDPSVTDKREWRPVHYAAFHGRLGCLQLLVKWGCSIEDVDYNGNLPVFFFKVKFK

SEQ ID NO: 1950 - protein, 203 aa, Artificial Sequence
  Synthetic polypeptide
MPGVANSGPSTSSRETANPCSRKKVHFGSIHDAVRAGDVKQLSEIVVRGASINELDVLHKFTPLHWAAHSGSLECLHWLLWHGADITHVTTRGWTASHIAAIRGQDACVQALIMNGANLTAQDDRGCTPLHLAATHGHSFTLQIMLRSGDPSVTDKREWRPVHYAAFHGRLGCLQLLVKWGCSIEDVDYNGNLPVFFFKVKFK

SEQ ID NO: 1951 - protein, 176 aa, Artificial Sequence
  Synthetic polypeptide
MPGVANSGPSTSSRETANPCSRKKVHFGSIHDAVRAGDVKQLSEIVCLHWLLWHGADITHVTTRGWTASHIAAIRGQDACVQALIMNGANLTAQDDRGCTPLHLAATHGHSFTLQIMLRSGVDPSVTDKREWRPVHYAAFHGRLGCLQLLVKWGCSIEDVDYNGNLPVFFFKVKFK

SEQ ID NO: 1952 - protein, 451 aa, Artificial Sequence
  Synthetic polypeptide
MADSGLDKKSTKCPDCSSASQKDVLCVCSSKTRVPPVLVVEMSQTSSIGSAESLISLERKKEKNINRDITSRKDLPSRTSNVERKASQQQWGRGNFTEGKVPHIRIENGAAIEEIYTFGRILGKGSFGIVIEATDKETETKWAIKKVNKEKAGSSAVKLLEREVNILKSVKHEHIIHLEQVFETPKKMYLVMELCEDGELKEILDRKGHFSENETRWIIQSLASAIAYLHNNDIVHRDLKLENIMVKSSLIDDNNEINLNIKVTDFGLAVKKQSRSEAMLQATCGTPIYMAPEVISAHDYSQQCDIWSIGVVMYMLLRGEPPFLASSEEKLFELIRKGELHFENAVWNSISDCAKSVLKQLMKVDPAHRITAKELLDNQWLTGNKLSSVRPTNVLEMMKEWKNNPESVEENTTEEKNKPSTEEKLKSYQPWGNVPDANYTSDEEEEKQDNA

SEQ ID NO: 1953 - protein, 264 aa, Artificial Sequence
  Synthetic polypeptide
MYLVMELCEDGELKEILDRKGHFSENETRWIIQSLASAIAYLHNNDIVHRDLKLENIMVKSSLIDDNNEINLNIKVTDFGLAVKKQSRSEAMLQATCGTPIYMAPEVISAHDYSQQCDIWSIGVVMYMLLRGEPPFLASSEEKLFELIRKGELHFENAVWNSISDCAKSVLKQLMKVDPAHRITAKELLDNQWLTGNKLSSVRPTNVLEMMKEWKNNPESVEENTTEEKNKPSTEEKLKSYQPWGNVPDANYTSDEEEEKQDNA

SEQ ID NO: 1954 - protein, 410 aa, Artificial Sequence
  Synthetic polypeptide
MSQTSSIGSAESLISLERKKEKNINRDITSRKDLPSRTSNVERKASQQQWGRGNFTEGKVPHIRIENGAAIEEIYTFGRILGKGSFGIVIEATDKETETKWAIKKVNKEKAGSSAVKLLEREVNILKSVKHEHIIHLEQVFETPKKMYLVMELCEDGELKEILDRKGHFSENETRWIIQSLASAIAYLHNNDIVHRDLKLENIMVKSSLIDDNNEINLNIKVTDFGLAVKKQSRSEAMLQATCGTPIYMAPEVISAHDYSQQCDIWSIGVVMYMLLRGEPPFLASSEEKLFELIRKGELHFENAVWNSISDCAKSVLKQLMKVDPAHRITAKELLDNQWLTGNKLSSVRPTNVLEMMKEWKNNPESVEENTTEEKNKPSTEEKLKSYQPWGNVPDANYTSDEEEEKQDNA

SEQ ID NO: 1955 - protein, 130 aa, Artificial Sequence
  Synthetic polypeptide
MADSGLDKKSTKCPDCSSASQKDVLCVCSSKTRVPPVLVVEMSQTSSIGSAESLISLERKKEKNINRDITSRKDLPSRTSNVERKASQQQWGRGNFTEGKVPHIRIENGAAIESLRDNIKIRTINNPAVF

SEQ ID NO: 1956 - protein, 89 aa, Artificial Sequence
  Synthetic polypeptide
MSQTSSIGSAESLISLERKKEKNINRDITSRKDLPSRTSNVERKASQQQWGRGNFTEGKVPHIRIENGAAIESLRDNIKIRTINNPAVF

SEQ ID NO: 1957 - protein, 80 aa, Artificial Sequence
  Synthetic polypeptide
AESLISLERKKEKNINRDITSRKDLPSRTSNVERKASQQQWGRGNFTEGKVPHIRIENGAAIESLRDNIKIRTINNPAVF

SEQ ID NO: 1958 - protein, 53 aa, Artificial Sequence
  Synthetic polypeptide
MGIFKSSLFQALLDIILFLSPVCNLHEGKNFCLFCSLLYPQELKQCLAFNKYL

SEQ ID NO: 1959 - protein, 95 aa, Artificial Sequence
  Synthetic polypeptide
MFGCLVAGRLVQTAAQQVAEDKFVFDLPDYESINHVVVFMLGTIPFPEGMGGSVYFSYPDSNGMPVWQLLGFVTNGKPSAIFKISGLKSGSRENM

SEQ ID NO: 1960 - protein, 312 aa, Artificial Sequence
  Synthetic polypeptide
MGAALGTGTRLAPWPGRACGALPRWTPTAPAQGCHSKPGPARPVPLKKRGYDVTRNPHLNKGMAFTLEERLQLGIHGLIPPCFLSQDVQLLRIMRYYERQQSDLDKYIILMTLQDRNEKLFYRVLTSDVEKFMPIVYTPTVGLACQHYGLTFRRPRGLFITIHDKGHLATMLNSWPEDNIKAVVVTDGERILGLGDLGCYGMGIPVGKLALYTACGGVNPQQCLPVLLDVGTNNEELLRDPLYIGLKHQRVHGKAYDDLLDEFMQAVTDKFGINCLIQFEDFANANAFRLLNKYRNKYCMFNDDIQVSFSTK

SEQ ID NO: 1961 - protein, 250 aa, Artificial Sequence
  Synthetic polypeptide
MAFTLEERLQLGIHGLIPPCFLSQDVQLLRIMRYYERQQSDLDKYIILMTLQDRNEKLFYRVLTSDVEKFMPIVYTPTVGLACQHYGLTFRRPRGLFITIHDKGHLATMLNSWPEDNIKAVVVTDGERILGLGDLGCYGMGIPVGKLALYTACGGVNPQQCLPVLLDVGTNNEELLRDPLYIGLKHQRVHGKAYDDLLDEFMQAVTDKFGINCLIQFEDFANANAFRLLNKYRNKYCMFNDDIQVSFSTK

SEQ ID NO: 1962 - protein, 278 aa, Artificial Sequence
  Synthetic polypeptide
MGAALGTGTRLAPWPGRACGALPRWTPTAPAQGCHSKPGPARPVPLKKRGYDVTRNPHLNKGMAFTLEERLQLGIHGLIPPCFLSQDVQLLRIMRYYERQQSDLDKYIILMTLQDRNEKLFYRVLTSDVEKFMPIVYTPTVGLACQHYGLTFRRPRGLFITIHDKGHLATMLNSWPEDNIKAVVVTDGERILGLGDLGCYGMGIPVGKLALYTACGGVNPQQCLPVLLDVGTNNEELLRDPLYIGLKHQRVHGKAYDDLLDEFMQAVTDKNPEYHIQC

SEQ ID NO: 1963 - protein, 216 aa, Artificial Sequence
  Synthetic polypeptide
MAFTLEERLQLGIHGLIPPCFLSQDVQLLRIMRYYERQQSDLDKYIILMTLQDRNEKLFYRVLTSDVEKFMPIVYTPTVGLACQHYGLTFRRPRGLFITIHDKGHLATMLNSWPEDNIKAVVVTDGERILGLGDLGCYGMGIPVGKLALYTACGGVNPQQCLPVLLDVGTNNEELLRDPLYIGLKHQRVHGKAYDDLLDEFMQAVTDKNPEYHIQC

SEQ ID NO: 1964 - protein, 90 aa, Artificial Sequence
  Synthetic polypeptide
MGAALGTGTRLAPWPGRACGALPRWTPTAPAQGCHSKPGPARPVPLKKRGYDVTRNPHLNKTPYGIHQKILLPCLQTKSGIQPLFTMGHH

SEQ ID NO: 1965 - protein, 91 aa, Artificial Sequence
  Synthetic polypeptide
MSRMRPVCQPWPSPHAPTTVKREGSTVSNSIQPPPPEYQLGSRTWLEAETPGQKRQCSAFMEFTEESRRIEAIKLQMVLQMESQMSSTHGF

SEQ ID NO: 1966 - protein, 167 aa, Artificial Sequence
  Synthetic polypeptide
MAALSKSIPHNCYEIGHTWHPSCRVSFLQITGGALEESLKIYAPLYLIAAILRKRKLDYYLHKLLPEILQSASFLTANGALYMAFFCILRKILGKFYSWTPGFGAALPASYVAILIERKSRRGLLTIYMANLMGPSSYRKKGSGLPLILHCGECIIIYFIIYYNVIR

SEQ ID NO: 1967 - protein, 136 aa, Artificial Sequence
  Synthetic polypeptide
MAALSKSIPHNCYEIGHTWHPSCRVSFLQITGGALEESLKIYAPLYLIAAILRKRKLDYYLHKLLPEILQSASFLTANGALYMAFFCILRRGLLTIYMANLMGPSSYRKKGSGLPLILHCGECIIIYFIIYYNVIR

SEQ ID NO: 1968 - protein, 138 aa, Artificial Sequence
  Synthetic polypeptide
MGAGPSLLLAALLLLLSGDGAVRCDTPANCTYLDLLGTWVFQVGSSGSQRDVNCSVMGPQEKKVVVYLQKLDTAYDDLGNSGHFTIIYNQGFEIVLNDYKWFAFFKPGTVTHTCNPSTLGGRDRRSPEVRRSRPVWPT

SEQ ID NO: 1969 - protein, 6 aa, Artificial Sequence
  Synthetic polypeptide
SWWTHR

SEQ ID NO: 1970 - protein, 350 aa, Artificial Sequence
  Synthetic polypeptide
MLLAVLYCLLWSFQTSAGHFPRACVSSKNLMEKECCPPWSGDRSPCGQLSGRGSCQNILLSNAPLGPQFPFTGVDDRESWPSVFYNRTCQCSGNFMGFNCGNCKFGFWGPNCTERRLLVRRNIFDLSAPEKDKFFAYLTLAKHTISSDYVIPIGTYGQMKNGSTPMFNDINIYDLFVWMHYYVSMDALLGGSEIWRDIDFAHEAPAFLPWHRLFLLRWEQEIQKLTGDENFTIPYWDWRDAEKCDICTDEYMGGQHPTNPNLLSPASFFSSWQIVCSRLEEYNSHQSLCNGTPEGPLRRNPGNHDKSRTPRLPSSADVEFCLSLTQYESGSMDKAANFSFRNTLEASVTK

SEQ ID NO: 1971 - protein, 485 aa, Artificial Sequence
  Synthetic polypeptide
MAESRGRLYLWMCLAAALASFLMGFMVGWFIKPLKETTTSVRYHQSIRWKLVSEMKAENIKSFLRSFTKLPHLAGTEQNFLLAKKIQTQWKKFGLDSAKLVHYDVLLSYPNETNANYISIVDEHETEIFKTSYLEPPPDGYENVTNIVPPYNAFSAQGMPEGDLVYVNYARTEDFFKLEREMGINCTGKIVIARYGKIFRGNKVKNAMLAGAIGIILYSDPADYFAPEVQPYPKGWNLPGTAAQRGNVLNLNGAGDPLTPGYPAKEYTFRLDVEEGVGIPRIPVHPIGYNDAEILLRYLGGIAPPDKSWKGALNVSYSIGPGFTGSDSFRKVRMHVYNINKITRIYNVVGTIRGSVEPDRYVILGGHRDSWVFGAIDPTSGVAVLQEIARSFGKLMSKGWRPRRTIIFASWDAEEFGLLGSTEWAEVCNFTREASETTNPPGGRNNSRWAALRVTLTVKVCSFTSEPARPQTHQKEETLNTSEHQ

SEQ ID NO: 1972 - protein, 452 aa, Artificial Sequence
  Synthetic polypeptide
MAESRGRLYLWMCLAAALASFLMGFMVGWFIKPLKETTTSVRYHQSIRWKLVSEMKAENIKSFLRSFTKLPHLAGTEQNFLLAKKIQTQWKKFGLDSAKLVHYDVLLSYPNETNANYISIVDEHETEIFKTSYLEPPPDGYENVTNIVPPYNAFSAQGMPEGDLVYVNYARTEDFFKLEREMGINCTGKIVIARYGKIFRGNKVKNAMLAGAIGIILYSDPADYFAPEVQPYPKGWNLPGTAAQRGNVLNLNGAGDPLTPGYPAKEYTFRLDVEEGVGIPRIPVHPIGYNDAEILLRKVRMHVYNINKITRIYNVVGTIRGSVEPDRYVILGGHRDSWVFGAIDPTSGVAVLQEIARSFGKLMSKGWRPRRTIIFASWDAEEFGLLGSTEWAEVCNFTREASETTNPPGGRNNSRWAALRVTLTVKVCSFTSEPARPQTHQKEETLNTSEHQ

SEQ ID NO: 1973 - protein, 392 aa, Artificial Sequence
  Synthetic polypeptide
MAESRGRLYLWMCLAAALASFLMGFMVGWFIKPLKETTTSVRYHQSIRWKLVSEMKAENIKSFLRSFTKLPHLAGTEQNFLLAKKIQTQWKKFGLDSAKLVHYDVLLSYPNETNANYISIVDEHETEIFKTSYLEPPPDGYENVTNIVPPYNAFSAQGMPEGDLVYVNYARTEDFFKLEREMGINCTGKIVIARYGKIFRGNKVKNAMLAGAIGIILYSDPADYFAPEVQPYPKGWNLPGTAAQRGNVLNLNGAGDPLTPGYPAKDRYVILGGHRDSWVFGAIDPTSGVAVLQEIARSFGKLMSKGWRPRRTIIFASWDAEEFGLLGSTEWAEVCNFTREASETTNPPGGRNNSRWAALRVTLTVKVCSFTSEPARPQTHQKEETLNTSEHQ

SEQ ID NO: 1974 - protein, 25 aa, Artificial Sequence
  Synthetic polypeptide
MPAVSKGDGMRGLAVFISDIRNSPW

SEQ ID NO: 1975 - protein, 187 aa, Artificial Sequence
  Synthetic polypeptide
MEAAATPAAAGAARREELDMDVMRPLINEQNFDGTSDEEHEQELLPVQKHYQLDDQEGISFVQTLMHLLKGNIGTGLLGLPLAIKNAGIVLGPISLVFIGIISVHCMHILVRCSHFLCLRFKKSTLGYSDTVSFAMEVSPWSCLQKQAAWGRSVVDFFLVITQLGFCSVYIVFLAENVKQLQKKIKL

SEQ ID NO: 1976 - protein, 52 aa, Artificial Sequence
  Synthetic polypeptide
MEVSPWSCLQKQAAWGRSVVDFFLVITQLGFCSVYIVFLAENVKQLQKKIKL

SEQ ID NO: 1977 - protein, 81 aa, Artificial Sequence
  Synthetic polypeptide
MHILVRCSHFLCLRFKKSTLGYSDTVSFAMEVSPWSCLQKQAAWGRSVVDFFLVITQLGFCSVYIVFLAENVKQLQKKIKL

SEQ ID NO: 1978 - protein, 249 aa, Artificial Sequence
  Synthetic polypeptide
MAKGRVAERSQLGAHHTTPVGDGAAGTRGLAAPGSRDHQKEKSWVEAGSARMSLLILVSIFLSAAFVMFLVYKNFPQLSEEERVNMKVPRDMDDAKALGKVLSKYKDTFYVQVLVAYFATYIFLQTFAIPGSIFLSILSGFLYPFPLALFLVCLCSGLGASFCYMLSYLVGRPVVYKYLTEKAVKWSQQVERHREHLINYIIFLRITPFLPNWFINITSPVINVPLKVFFIGTFLGAGAHACNPSTLGG

SEQ ID NO: 1979 - protein, 45 aa, Artificial Sequence
  Synthetic polypeptide
MDPNTIIEALRGTMDPALREAAERQLNEARWLTPVIPAFCEAEAD

SEQ ID NO: 1980 - protein, 661 aa, Artificial Sequence
  Synthetic polypeptide
MSTADALDDENTFKILVATDIHLGFMEKDAVRGNDTFVTLDEILRLAQENEVDFILLGGDLFHENKPSRKTLHTCLELLRKYCMGDRPVQFEILSDQSVNFGFSKFPWVNYQDGNLNISIPVFSIHGNHDDPTGADALCALDILSCAGFVNHFGRSMSVEKIDISPVLLQKGSTKIALYGLGSIPDERLYRMFVNKKVTMLRPKEDENSWFNLFVIHQNRSKHGSTNFIPEQFLDDFIDLVIWGHEHECKIAPTKNEQQLFYISQPGSSVVTSLSPGEAVKKHVGLLRIKGRKMNMHKIPLHTVRQFFMEDIVLANHPDIFNPDNPKVTQAIQSFCLEKIEEMLENAERERLGNSHQPEKPLVRLRVDYSGGFEPFSVLRFSQKFVDRVANPKDIIHFFRHREQKEKTGEEINFGKLITKPSEGTTLRVEDLVKQYFQTAEKNVQLSLLTERGMGEAVQEFVDKEEKDAIEELVKYQLEKTQRFLKERHIDALEDKIDEEVRRFRETRQKNTNEEDDEVREAMTRARALRSQSEESASAFSADDLMSIDLAEQMANDSDDSISAATNKGRGRGRGRRGGRGQNSASRGGSQRGRADTGLETSTRSRNSKTAVSASRNMSIIDGQAQWITPVIPALWEAETGRSRGQEIETSLANMVKPGLY

SEQ ID NO: 1981 - protein, 664 aa, Artificial Sequence
  Synthetic polypeptide
MNRNISHQKGDDENTFKILVATDIHLGFMEKDAVRGNDTFVTLDEILRLAQENEVDFILLGGDLFHENKPSRKTLHTCLELLRKYCMGDRPVQFEILSDQSVNFGFSKFPWVNYQDGNLNISIPVFSIHGNHDDPTGADALCALDILSCAGFVNHFGRSMSVEKIDISPVLLQKGSTKIALYGLGSIPDERLYRMFVNKKVTMLRPKEDENSWFNLFVIHQNRSKHGSTNFIPEQFLDDFIDLVIWGHEHECKIAPTKNEQQLFYISQPGSSVVTSLSPGEAVKKHVGLLRIKGRKMNMHKIPLHTVRQFFMEDIVLANHPDIFNPDNPKVTQAIQSFCLEKIEEMLENAERERLGNSHQPEKPLVRLRVDYSGGFEPFSVLRFSQKFVDRVANPKDIIHFFRHREQKEKTGEEINFGKLITKPSEGTTLRVEDLVKQYFQTAEKNVQLSLLTERGMGEAVQEFVDKEEKDAIEELVKYQLEKTQRFLKERHIDALEDKIDEEVRRFRETRQKNTNEEDDEVREAMTRARALRSQSEESASAFSADDLMSIDLAEQMANDSDDSISAATNKGRGRGRGRRGGRGQNSASRGGSQRGRADTGLETSTRSRNSKTAVSASRNMSIIDGQAQWITPVIPALWEAETGRSRGQEIETSLANMVKPGLY

SEQ ID NO: 1982 - protein, 660 aa, Artificial Sequence
  Synthetic polypeptide
MSTADALDDENTFKILVATDIHLGFMEKDAVRGNDTFVTLDEILRLAQENEVDFILLGGDLFHENKPSRKTLHTCLELLRKYCMGDRPVQFEILSDQSVNFGFSKFPWVNYQDGNLNISIPVFSIHGNHDDPTGADALCALDILSCAGFVNHFGRSMSVEKIDISPVLLQKGSTKIALYGLGSIPDERLYRMFVNKKVTMLRPKEDENSWFNLFVIHQNRSKHGSTNFIPEQFLDDFIDLVIWGHEHECKIAPTKNEQQLFYISQPGSSVVTSLSPGEAVKKHVGLLRIKGRKMNMHKIPLHTVRQFFMEDIVLANHPDIFNPDNPKVTQAIQSFCLEKIEEMLENAERERLGNSHQPEKPLVRLRVDYSGGFEPFSVLRFSQKFVDRVANPKDIIHFFRHREQKEKTGEEINFGKLITKPSEGTTLRVEDLVKQYFQTAEKNVQLSLLTERGMGEAVQEFVDKEEKDAIEELVKYQLEKTQRFLKERHIDALEDKIDEEVRRFRETRQKNTNEEDDEVREAMTRARALRSQSEESASAFSADDLMSIDLAEQMANDSDDSISAATNKGRGRGRGRRGGRGQNSASRGGSQRGRDTGLETSTRSRNSKTAVSASRNMSIIDGQAQWITPVIPALWEAETGRSRGQEIETSLANMVKPGLY

SEQ ID NO: 1983 - protein, 527 aa, Artificial Sequence
  Synthetic polypeptide
MSTADALDDENTFKILVATDIHLGFMEKDAVRGNDTFVTLDEILRLAQENEVDFILLGGDLFHENKPSRKTLHTCLELLRKYCMGDRPVQFEILSDQSVNFGFSKFPWVNYQDGNLNISIPVFSIHGNHDDPTGADALCALDILSCAGFVNHFGRSMSVEKIDISPVLLQKGSTKIALYGLGSIPDERLYRMFVNKKVTMLRPKEDENSWFNLFVIHQNRSKHGSTNFIPEQFLDDFIDLVIWGHEHECKIAPTKNEQQLFYISQPGSSVVTSLSPGEAVKKHVGLLRIKGRKMNMHKIPLHTVRQFFMEDIVLANHPDIFNPDNPKVTQAIQSFCLEKIEEMLENAERERLGNSHQPEKPLVRLRVDYSGGFEPFSVLRFSQKFVDRVANPKDIIHFFRHREQKEKTGEEINFGKLITKPSEGTTLRVEDLVKQYFQTAEKNVQLSLLTERGMGEAVQEFVDKEEKDAIEELVKYQLEKTQRFLKERHIDALEDKIDEEVRRFRETRQKNTNEEDDEVREVHNQKN

SEQ ID NO: 1984 - protein, 530 aa, Artificial Sequence
  Synthetic polypeptide
MNRNISHQKGDDENTFKILVATDIHLGFMEKDAVRGNDTFVTLDEILRLAQENEVDFILLGGDLFHENKPSRKTLHTCLELLRKYCMGDRPVQFEILSDQSVNFGFSKFPWVNYQDGNLNISIPVFSIHGNHDDPTGADALCALDILSCAGFVNHFGRSMSVEKIDISPVLLQKGSTKIALYGLGSIPDERLYRMFVNKKVTMLRPKEDENSWFNLFVIHQNRSKHGSTNFIPEQFLDDFIDLVIWGHEHECKIAPTKNEQQLFYISQPGSSVVTSLSPGEAVKKHVGLLRIKGRKMNMHKIPLHTVRQFFMEDIVLANHPDIFNPDNPKVTQAIQSFCLEKIEEMLENAERERLGNSHQPEKPLVRLRVDYSGGFEPFSVLRFSQKFVDRVANPKDIIHFFRHREQKEKTGEEINFGKLITKPSEGTTLRVEDLVKQYFQTAEKNVQLSLLTERGMGEAVQEFVDKEEKDAIEELVKYQLEKTQRFLKERHIDALEDKIDEEVRRFRETRQKNTNEEDDEVREVHNQKN

SEQ ID NO: 1985 - protein, 240 aa, Artificial Sequence
  Synthetic polypeptide
MSTADALDDENTFKILVATDIHLGFMEKDAVRGNDTFVTLDEILRLAQENEVDFILLGGDLFHENKPSRKTLHTCLELLRKYCMGDRPVQFEILSDQSVNFGFSKFPWVNYQDGNLNISIPVFSIHGNHDDPTGADALCALDILSCAGFVNHFGRSMSVEKIDISPVLLQKGSTKIALYGLGSIPDERLYRMFVNKKVTMLRPKEDENSWFNLFVIHQNRTRTLFTAVSSISRRSLGHLT

SEQ ID NO: 1986 - protein, 243 aa, Artificial Sequence
  Synthetic polypeptide
MNRNISHQKGDDENTFKILVATDIHLGFMEKDAVRGNDTFVTLDEILRLAQENEVDFILLGGDLFHENKPSRKTLHTCLELLRKYCMGDRPVQFEILSDQSVNFGFSKFPWVNYQDGNLNISIPVFSIHGNHDDPTGADALCALDILSCAGFVNHFGRSMSVEKIDISPVLLQKGSTKIALYGLGSIPDERLYRMFVNKKVTMLRPKEDENSWFNLFVIHQNRTRTLFTAVSSISRRSLGHLT

SEQ ID NO: 1987 - protein, 200 aa, Artificial Sequence
  Synthetic polypeptide
MSTADALDDENTFKILVATDIHLGFMEKDAVRGNDTFVTLDEILRLAQENEVDFILLGGDLFHENKPSRKTLHTCLELLRKYCMGDRPVQFEILSDQSVNFGFSKFPWVNYQDGNLNISIPVFSIHGNHDDPTGADALCALDILSCAGFVNHFGRSMSVEKIDISPVLLQKGSTKIALYGLEQGLCSLLCLPYLEEAWDI

SEQ ID NO: 1988 - protein, 203 aa, Artificial Sequence
  Synthetic polypeptide
MNRNISHQKGDDENTFKILVATDIHLGFMEKDAVRGNDTFVTLDEILRLAQENEVDFILLGGDLFHENKPSRKTLHTCLELLRKYCMGDRPVQFEILSDQSVNFGFSKFPWVNYQDGNLNISIPVFSIHGNHDDPTGADALCALDILSCAGFVNHFGRSMSVEKIDISPVLLQKGSTKIALYGLEQGLCSLLCLPYLEEAWDI

SEQ ID NO: 1989 - protein, 282 aa, Artificial Sequence
  Synthetic polypeptide
MVRHSSSPYVVYPSDKPFLNSDLRRSPSKPTLAYPESNSRAIFSALKNLQDKIRRLELERIQAEESVKTLSRETIEYKKVLDEQIQERENSKNEESKHNQELTSQLLAAENKCNLLEKQLEYMRNMIKHAEMERTSVLEKQVSLERERQHDQTHVQSQLEKLDLLEQEYNKLTTMQALAEKKMQELEAKLHEEEQERKRMQAKAAELQTGLETNRLIFEDKATPCVPNARRIKKKKSKPPEKKSSRNYFGAQPHYRLCLGDMPFVAGKIEVCSCGCPPFQNK

SEQ ID NO: 1990 - protein, 309 aa, Artificial Sequence
  Synthetic polypeptide
MAAASVSAASGSHLSNSFAEPSRSNGSMVRHSSSPYVVYPSDKPFLNSDLRRSPSKPTLAYPESNSRAIFSALKNLQDKIRRLELERIQAEESVKTLSRETIEYKKVLDEQIQERENSKNEESKHNQELTSQLLAAENKCNLLEKQLEYMRNMIKHAEMERTSVLEKQVSLERERQHDQTHVQSQLEKLDLLEQEYNKLTTMQALAEKKMQELEAKLHEEEQERKRMQAKAAELQTGLETNRLIFEDKATPCVPNARRIKKKKSKPPEKKSSRNYFGAQPHYRLCLGDMPFVAGKIEVCSCGCPPFQNK

SEQ ID NO: 1991 - protein, 300 aa, Artificial Sequence
  Synthetic polypeptide
MLTRIDNSFAEPSRSNGSMVRHSSSPYVVYPSDKPFLNSDLRRSPSKPTLAYPESNSRAIFSALKNLQDKIRRLELERIQAEESVKTLSRETIEYKKVLDEQIQERENSKNEESKHNQELTSQLLAAENKCNLLEKQLEYMRNMIKHAEMERTSVLEKQVSLERERQHDQTHVQSQLEKLDLLEQEYNKLTTMQALAEKKMQELEAKLHEEEQERKRMQAKAAELQTGLETNRLIFEDKATPCVPNARRIKKKKSKPPEKKSSRNYFGAQPHYRLCLGDMPFVAGKIEVCSCGCPPFQNK

SEQ ID NO: 1992 - protein, 29 aa, Artificial Sequence
  Synthetic polypeptide
MEKSSSCESLGSQPAAARPPSVDSLSRVN

SEQ ID NO: 1993 - protein, 105 aa, Artificial Sequence
  Synthetic polypeptide
MYQGPSRVLKEAPGAEAYGYECLGGLHRTSTGCWGVIPNCQFRSKTARLKTFTANQIDEIKDPSGLFYILPFQKGYLVNWDVQRQVWDYLFGKEMYQAKRSGSCL

SEQ ID NO: 1994 - protein, 93 aa, Artificial Sequence
  Synthetic polypeptide
MTTLVLDNGAYNAKIGYSHENVSVIPNCQFRSKTARLKTFTANQIDEIKDPSGLFYILPFQKGYLVNWDVQRQVWDYLFGKEMYQAKRSGSCL

SEQ ID NO: 1995 - protein, 11 aa, Artificial Sequence
  Synthetic polypeptide
MYQAKRSGSCL

SEQ ID NO: 1996 - protein, 136 aa, Artificial Sequence
  Synthetic polypeptide
MINPELRDGRADGFIHRIVPKLIQNWKIGLMCFLSIIITTVCIIMIATWSKHAKPVACSGDWLGVRDKCFYFSDDTRNWTASKIFCSLQKAELAQIDTQEDMEFLKRYAGTDMHWIGLSRKQGDSWKWTNGTTFNG

SEQ ID NO: 1997 - protein, 149 aa, Artificial Sequence
  Synthetic polypeptide
MINPELRDGRADGFIHRIVPKLIQNWKIGLMCFLSIIITTVCIIMIATWSKHAKPVACSGDWLGVRDKCFYFSDDTRNWTASKIFCSLQKAELAQIDTQEDMEFLKRYAGTDMHWIGLSRKQGDSWKWTNGTTFNGWTQLEKVFILPTL

SEQ ID NO: 1998 - protein, 138 aa, Artificial Sequence
  Synthetic polypeptide
MINPELRDGRADGFIHRIVPKLIQNWKIGLMCFLSIIITTVCIIMIATWSKHAKPVACSGDWLGVRDKCFYFSDDTRNWTASKIFCSLQKAELAQIDTQEDMEFLKRYAGTDMHWIGLSRKQGDSWKWTNGTTFNGWL

SEQ ID NO: 1999 - protein, 150 aa, Artificial Sequence
  Synthetic polypeptide
MINPELRDGRADGFIHRIVPKLIQNWKIGLMCFLSIIITTVCIIMIATWSKHAKPVACSGDWLGVRDKCFYFSDDTRNWTASKIFCSLQKAELAQIDTQEDMEFLKRYAGTDMHWIGLSRKQGDSWKWTNGTTFNDISAVQANMERLLLN

SEQ ID NO: 2000 - protein, 191 aa, Artificial Sequence
  Synthetic polypeptide
MINPELRDGRADGFIHRIVPKLIQNWKIGLMCFLSIIITTVCIIMIATWSKHAKPVACSGDWLGVRDKCFYFSDDTRNWTASKIFCSLQKAELAQIDTQEDMEFLKRYAGTDMHWIGLSRKQGDSWKWTNGTTFNGHNWRKCLFYQHFDWKGKLAFKESISTCRANKSPVGKLASYPCLFSPCTGFLTCGQ

SEQ ID NO: 2001 - protein, 511 aa, Artificial Sequence
  Synthetic polypeptide
MESMLNKLKSTVTKVTADVTSAVMGNPVTREFDVGRHIASGGNGLAWKIFNGTKKSTKQEVAVFVFDKKLIDKYQKFEKDQIIDSLKRGVQQLTRLRHPRLLTVQHPLEESRDCLAFCTEPVFASLANVLGNWENLPSPISPDIKDYKLYDVETKYGLLQVSEGLSFLHSSVKMVHGNITPENIILNKSGAWKIMGFDFCVSSTNPSEQEPKFPCKEWDPNLPSLCLPNPEYLAPEYILSVSCETASDMYSLGTVMYAVFNKGKPIFEVNKQDIYKSFSRQLDQLSRLGSSSLTNIPEEVREHVKLLLNVTPTVRPDADQMTKIPFFDDVGAVTLQYFDTLFQRDNLQKSQFFKGLPKVLPKLPKRVIVQRILPCLTSEFVNPDMVPFVLPNVLLIAEECTKEEYVKLILPELGPVFKQQEPIQILLIFLQKMDLLLTKTPPDEIKNSVLPMVYRALEAPSIQIQELCLNIIPTFANLIDYPSMKNALIPRIKNACLQTSSLAAGHGGSHL

SEQ ID NO: 2002 - protein, 29 aa, Artificial Sequence
  Synthetic polypeptide
QELKMLVYKHLPLRPGMVAHTFNPNTLGG

SEQ ID NO: 2003 - protein, 201 aa, Artificial Sequence
  Synthetic polypeptide
MQPAIQVWFGEDLPLSPRSPLTPRHGPGLANVCQYDEWIAVRHEATLLPMQEDLSIWLSGLLGIKVKAEKLLEELDNGVLLCQLIDVLQNMVKTCNSEESGNFPMRKVPCKKDAASGSFFARDNTANFLHWCRDIGVDETYLFESEGLGWAHWLTPVIPALWEAEAGGSPEVRSLRPAWATWRNPVSTKIQKLAGHGGARL

SEQ ID NO: 2004 - protein, 97 aa, Artificial Sequence
  Synthetic polypeptide
MRKVPCKKDAASGSFFARDNTANFLHWCRDIGVDETYLFESEGLGWAHWLTPVIPALWEAEAGGSPEVRSLRPAWATWRNPVSTKIQKLAGHGGARL

SEQ ID NO: 2005 - protein, 54 aa, Artificial Sequence
  Synthetic polypeptide
MWIDFFTYSSMSEEVTYADLQFQNSSEMEKIPEIGKFGEKGGRDLPCLRWTVDF

SEQ ID NO: 2006 - protein, 44 aa, Artificial Sequence
  Synthetic polypeptide
MSEEVTYADLQFQNSSEMEKIPEIGKFGEKGGRDLPCLRWTVDF

SEQ ID NO: 2007 - protein, 56 aa, Artificial Sequence
  Synthetic polypeptide
MAVFNQKSVSDMIKEFRKNWRALCNSERTTLCGADSMLLALQLSMAENNKQHSESP

SEQ ID NO: 2008 - protein, 23 aa, Artificial Sequence
  Synthetic polypeptide
ADSMLLALQLSMAENNKQHSESP

SEQ ID NO: 2009 - protein, 58 aa, Artificial Sequence
  Synthetic polypeptide
MAVFNQKSVSDMIKEFRKNWRALCNSERTTLCGADSMLLALQLSMAENNKQWYETRNL

SEQ ID NO: 2010 - protein, 25 aa, Artificial Sequence
  Synthetic polypeptide
ADSMLLALQLSMAENNKQWYETRNL

SEQ ID NO: 2011 - protein, 160 aa, Artificial Sequence
  Synthetic polypeptide
MAVFNQKSVSDMIKEFRKNWRALCNSERTTLCGADSMLLALQLSMAENNKQRIKYLGTQLTKDVKDLFKENYKPLLNEIKEDTKKWKNIPCSWVGRINMVKMAILPKVIYRFNAIPIKPPMAFFTELEKNYFKVHMEPKKNPHHQVNPKPKEQSWRHHAT

SEQ ID NO: 2012 - protein, 127 aa, Artificial Sequence
  Synthetic polypeptide
ADSMLLALQLSMAENNKQRIKYLGTQLTKDVKDLFKENYKPLLNEIKEDTKKWKNIPCSWVGRINMVKMAILPKVIYRFNAIPIKPPMAFFTELEKNYFKVHMEPKKNPHHQVNPKPKEQSWRHHAT

SEQ ID NO: 2013 - protein, 88 aa, Artificial Sequence
  Synthetic polypeptide
ADSMLLALQLSMAENNKQSQLLDFLSGKQYAVGDETDLSIPTSPTSKYNRDNEKVLINCPPSPEEITESLAPFNRKHLPSIVSKGGHL

SEQ ID NO: 2014 - protein, 308 aa, Artificial Sequence
  Synthetic polypeptide
MDVTDHYEDVRKIYDDFLKNSNMLDLIDVYQKCRALTSNCENYNTVSPSQLLDFLSGKQYAVGDETDLSIPTSPTSKYNRDNEKVQLLARKIIFSYLNLLVNSKNDLAVAYILNIPDRGLGREAFTDLKHAAREKQMSIFLVATSFIRTIELGGKGYAPPPSDPLRTHVKGLSNFINFIDKLDEILGEIPNPSIAGGQILSVIKMQLIKGQNSRDPFCKAIEEVAQDLDLRIKNIINSQEGVVALSTTDISPARPCHATWSLKAPCSLLPLGASSSVESSLMPGYIGHFFCTPTALCVHLLEIALSIL

SEQ ID NO: 2015 - protein, 466 aa, Artificial Sequence
  Synthetic polypeptide
MAVFNQKSVSDMIKEFRKNWRALCNSERTTLCGADSMLLALQLSMAENNKQHSGEFTVSLSDVLLTWKYLLHEKLNLPVENMDVTDHYEDVRKIYDDFLKNSNMLDLIDVYQKCRALTSNCENYNTVSPGSTIQPPSERGSLLLSRPDLLAPGEDPPVSASLTLERQKGESLLAWSWSLNFRLPGIPITVQKKRRDLKKLAAVMRQSQLLDFLSGKQYAVGDETDLSIPTSPTSKYNRDNEKVQLLARKIIFSYLNLLVNSKNDLAVAYILNIPDRGLGREAFTDLKHAAREKQMSIFLVATSFIRTIELGGKGYAPPPSDPLRTHVKGLSNFINFIDKLDEILGEIPNPSIAGGQILSVIKMQLIKGQNSRDPFCKAIEEVAQDLDLRIKNIINSQEGVVALSTTDISPARPCHATWSLKAPCSLLPLGASSSVESSLMPGYIGHFFCTPTALCVHLLEIALSIL

SEQ ID NO: 2016 - protein, 389 aa, Artificial Sequence
  Synthetic polypeptide
MAVFNQKSVSDMIKEFRKNWRALCNSERTTLCGADSMLLALQLSMAENNKQHSGEFTVSLSDVLLTWKYLLHEKLNLPVENMDVTDHYEDVRKIYDDFLKNSNMLDLIDVYQKCRALTSNCENYNTVSPSQLLDFLSGKQYAVGDETDLSIPTSPTSKYNRDNEKVQLLARKIIFSYLNLLVNSKNDLAVAYILNIPDRGLGREAFTDLKHAAREKQMSIFLVATSFIRTIELGGKGYAPPPSDPLRTHVKGLSNFINFIDKLDEILGEIPNPSIAGGQILSVIKMQLIKGQNSRDPFCKAIEEVAQDLDLRIKNIINSQEGVVALSTTDISPARPCHATWSLKAPCSLLPLGASSSVESSLMPGYIGHFFCTPTALCVHLLEIALSIL

SEQ ID NO: 2017 - protein, 111 aa, Artificial Sequence
  Synthetic polypeptide
MSTVICMKQREEEFLLTIRPFANRMQKSPCYIPIVSSATLWDRSTPSAKHIPCYERTSVPCSRFINHMKNFSESPKFRSLHFLNFPGSHHGQATQKLQGAMVLHLEECHHS

SEQ ID NO: 2018 - protein, 2 aa, Artificial Sequence
  Synthetic polypeptide
KP

SEQ ID NO: 2019 - protein, 484 aa, Artificial Sequence
  Synthetic polypeptide
MTMAAAAVVARGAGARAATAAALRGGCGTAARGRPCAGPARPLCTAPGTAPDMKRYLWERYREAKRSTEELVPSIMSNLLNPDAIFSNNEMSLSDIEIYGFDYDYTLVFYSKHLHTLIFNAARDLLINEHRYPAEIRKYEYDPNFAIRGLHYDVQRAVLMKIDAFHYIQLGTVYRGLSVVPDEEVIEMYEGSHVPLEQMSDFYGKSSHGNTMKQFMDIFSLPEMTLLSCVNEYFLKNNIDYEPVHLYKDVKDSIRDVHIKGIMYRAIEADIEKYICYAEQTRAVLAKLADHGKKMFLITNSPSSFVDKGMSYIVGKDWRDLFDVVIVQAEKPNFFNDKRRPFRKMNEKGVLLWDKIHKLQKGQIYKQGNLYEFLKLTGWRGSRVLYFGDHIYSDLADLTLKHGWRTGAIIPELRSELKIMNTEQYIQTMTWLQTLTGLLEQMQVHRDAESQLVLQEWKKERKEMRNAAICKPKEDFDFILFRAL

SEQ ID NO: 2020 - protein, 796 aa, Artificial Sequence
  Synthetic polypeptide
MRALWVLGLCCVLLTFGSVRADDEVDVDGTVEEDLGKSREGSRTDDEVVQREEEAIQLDGLNASQIRELREKSEKFAFQAEVNRMMKLIINSLYKNKEIFLRELISNASDALDKIRLISLTDENALSGNEELTVKIKCDKEKNLLHVTDTGVGMTREELVKNLGTIAKSGTSEFLNKMTEAQEDGQSTSELIGQFGVGFYSAFLVADKVIVTSKHNNDTQHIWESDSNEFSVIADPRGNTLGRGTTITLVLKEEASDYLELDTIKNLVKKYSQFINFPIYVWSSKTETVEEPMEEEEAAKEEKEESDDEAAVEEEEEEKKPKTKKVEKTVWDWELMNDIKPIWQRPSKEVEEDEYKAFYKSFSKESDDPMAYIHFTAEGEVTFKSILFVPTSAPRGLFDEYGSKKSDYIKLYVRRVFITDDFHDMMPKYLNFVKGVVDSDDLPLNVSRETLQQHKLLKVIRKKLVRKTLDMIKKIADDKYNDTFWKEFGTNIKLGVIEDHSNRTRLAKLLRFQSSHHPTDITSLDQYVERMKEKQDKIYFMAGSSRKEAESSPFVERLLKKGYEVIYLTEPVDEYCIQALPEFDGKRFQNVAKEGVKFDESEKTKESREAVEKEFEPLLNWMKDKALKDKIEKAVVSQRLTESPCALVASQYGWSGNMERIMKAQAYQTGKDISTNYYASQKKTFEINPRHPLIRDMLRRIKEDEDDKTVLDLAVVLFETATLRSGYLLPDTKAYGDRIERMLRLSLNIDPDAKVEEEPEEEPEETAEDTTEDTEQDEDEEMDVGTDEEEETAKES

SEQ ID NO: 2021 - protein, 12 aa, Artificial Sequence
  Synthetic polypeptide
ASTDGLATWRES

SEQ ID NO: 2022 - protein, 115 aa, Artificial Sequence
  Synthetic polypeptide
MGCAEGKAVAAAAPTELQTKGKNGDGRRRSAKDHHPGKTLPENPAGFTSTATADSRALLQAYIDGHSVVIFSRSTCTRCTEVKKLFKSLCVPYFVLELDQTGAVAPACNSSVLGG

SEQ ID NO: 2023 - protein, 109 aa, Artificial Sequence
  Synthetic polypeptide
MGCAEGKAVAAAAPTELQTKGKNGDGRRRSAKDHHPGKTLPENPAGFTSTATADSRALLQAYIDGHSVVIFSRSTCTRCTEVKKLFKSLCVPYFVLELDQTARCGGACL

SEQ ID NO: 2024 - protein, 173 aa, Artificial Sequence
  Synthetic polypeptide
MGCAEGKAVAAAAPTELQTKGKNGDGRRRSAKDHHPGKTLPENPAGFTSTATADSRALLQAYIDGHSVVIFSRSTCTRCTEVKKLFKSLCVPYFVLELDQTEDGRALEGTLSELAAETDLPVVFVKQRKIGGHGPTLKWLTPVIPALWEAEAGGSRDEEFETSLANMEKPHLY

SEQ ID NO: 2025 - protein, 75 aa, Artificial Sequence
  Synthetic polypeptide
MSCEDGRALEGTLSELAAETDLPVVFVKQRKIGGHGPTLKWLTPVIPALWEAEAGGSRDEEFETSLANMEKPHLY

SEQ ID NO: 2026 - protein, 73 aa, Artificial Sequence
  Synthetic polypeptide
MEDGRALEGTLSELAAETDLPVVFVKQRKIGGHGPTLKWLTPVIPALWEAEAGGSRDEEFETSLANMEKPHLY

SEQ ID NO: 2027 - protein, 122 aa, Artificial Sequence
  Synthetic polypeptide
MQQVMLTCKGVNRGHAVPAGPGRKPRPRRSSRLLAGEKHLTRSALLLCHTEDGRALEGTLSELAAETDLPVVFVKQRKIGGHGPTLKWLTPVIPALWEAEAGGSRDEEFETSLANMEKPHLY

SEQ ID NO: 2028 - protein, 644 aa, Artificial Sequence
  Synthetic polypeptide
MGCAEGKAVAAAAPTELQTKGKNGDGRRRSAKDHHPGKTLPENPAGFTSTATADSRALLQAYIDGHSVVIFSRSTCTRCTEVKKLFKSLCVPYFVLELDQTEDGRALEGTLSELAAETDLPVVFVKQRKIGGHGPTLKAYQEGRLQKLLKMNGPEDLPKSYDYDLIIIGGGSGGLAAAKEAAQYGKKVMVLDFVTPTPLGTRWGLGGTCVNVGCIPKKLMHQAALLGQALQDSRNYGWKVEETVKHDWDRMIEAVQNHIGSLNWGYRVALREKKVVYENAYGQFIGPHRIKATNNKGKEKIYSAERFLIATGERPRYLGIPGDKEYCISSDDLFSLPYCPGKTLVVGASYVALECAGFLAGIGLDVTVMVRSILLRGFDQDMANKIGEHMEEHGIKFIRQFVPIKVEQIEAGTPGRLRVVAQSTNSEEIIEGEYNTVMLAIGRDACTRKIGLETVGVKINEKTGKIPVTDEEQTNVPYIYAIGDILEDKVELTPVAIQAGRLLAQRLYAGSTVKCDYENVPTTVFTPLEYGACGLSEEKAVEKFGEENIEVYHSYFWPLEWTIPSRDNNKCYAKIICNTKDNERVVGFHVLGPNAGEVTQGFAAALKCGLTKKQLDSTIGIHPVCAEGWRPAMSKQMSQEASRC

SEQ ID NO: 2029 - protein, 494 aa, Artificial Sequence
  Synthetic polypeptide
MNGPEDLPKSYDYDLIIIGGGSGGLAAAKEAAQYGKKVMVLDFVTPTPLGTRWGLGGTCVNVGCIPKKLMHQAALLGQALQDSRNYGWKVEETVKHDWDRMIEAVQNHIGSLNWGYRVALREKKVVYENAYGQFIGPHRIKATNNKGKEKIYSAERFLIATGERPRYLGIPGDKEYCISSDDLFSLPYCPGKTLVVGASYVALECAGFLAGIGLDVTVMVRSILLRGFDQDMANKIGEHMEEHGIKFIRQFVPIKVEQIEAGTPGRLRVVAQSTNSEEIIEGEYNTVMLAIGRDACTRKIGLETVGVKINEKTGKIPVTDEEQTNVPYIYAIGDILEDKVELTPVAIQAGRLLAQRLYAGSTVKCDYENVPTTVFTPLEYGACGLSEEKAVEKFGEENIEVYHSYFWPLEWTIPSRDNNKCYAKIICNTKDNERVVGFHVLGPNAGEVTQGFAAALKCGLTKKQLDSTIGIHPVCAEGWRPAMSKQMSQEASRC

SEQ ID NO: 2030 - protein, 546 aa, Artificial Sequence
  Synthetic polypeptide
MSCEDGRALEGTLSELAAETDLPVVFVKQRKIGGHGPTLKAYQEGRLQKLLKMNGPEDLPKSYDYDLIIIGGGSGGLAAAKEAAQYGKKVMVLDFVTPTPLGTRWGLGGTCVNVGCIPKKLMHQAALLGQALQDSRNYGWKVEETVKHDWDRMIEAVQNHIGSLNWGYRVALREKKVVYENAYGQFIGPHRIKATNNKGKEKIYSAERFLIATGERPRYLGIPGDKEYCISSDDLFSLPYCPGKTLVVGASYVALECAGFLAGIGLDVTVMVRSILLRGFDQDMANKIGEHMEEHGIKFIRQFVPIKVEQIEAGTPGRLRVVAQSTNSEEIIEGEYNTVMLAIGRDACTRKIGLETVGVKINEKTGKIPVTDEEQTNVPYIYAIGDILEDKVELTPVAIQAGRLLAQRLYAGSTVKCDYENVPTTVFTPLEYGACGLSEEKAVEKFGEENIEVYHSYFWPLEWTIPSRDNNKCYAKIICNTKDNERVVGFHVLGPNAGEVTQGFAAALKCGLTKKQLDSTIGIHPVCAEGWRPAMSKQMSQEASRC

SEQ ID NO: 2031 - protein, 538 aa, Artificial Sequence
  Synthetic polypeptide
MLSRLVLNSWAQAIIRPRPPKVLGLQVTTFSEAYQEGRLQKLLKMNGPEDLPKSYDYDLIIIGGGSGGLAAAKEAAQYGKKVMVLDFVTPTPLGTRWGLGGTCVNVGCIPKKLMHQAALLGQALQDSRNYGWKVEETVKHDWDRMIEAVQNHIGSLNWGYRVALREKKVVYENAYGQFIGPHRIKATNNKGKEKIYSAERFLIATGERPRYLGIPGDKEYCISSDDLFSLPYCPGKTLVVGASYVALECAGFLAGIGLDVTVMVRSILLRGFDQDMANKIGEHMEEHGIKFIRQFVPIKVEQIEAGTPGRLRVVAQSTNSEEIIEGEYNTVMLAIGRDACTRKIGLETVGVKINEKTGKIPVTDEEQTNVPYIYAIGDILEDKVELTPVAIQAGRLLAQRLYAGSTVKCDYENVPTTVFTPLEYGACGLSEEKAVEKFGEENIEVYHSYFWPLEWTIPSRDNNKCYAKIICNTKDNERVVGFHVLGPNAGEVTQGFAAALKCGLTKKQLDSTIGIHPVCAEGWRPAMSKQMSQEASRC

SEQ ID NO: 2032 - protein, 456 aa, Artificial Sequence
  Synthetic polypeptide
MVLDFVTPTPLGTRWGLGGTCVNVGCIPKKLMHQAALLGQALQDSRNYGWKVEETVKHDWDRMIEAVQNHIGSLNWGYRVALREKKVVYENAYGQFIGPHRIKATNNKGKEKIYSAERFLIATGERPRYLGIPGDKEYCISSDDLFSLPYCPGKTLVVGASYVALECAGFLAGIGLDVTVMVRSILLRGFDQDMANKIGEHMEEHGIKFIRQFVPIKVEQIEAGTPGRLRVVAQSTNSEEIIEGEYNTVMLAIGRDACTRKIGLETVGVKINEKTGKIPVTDEEQTNVPYIYAIGDILEDKVELTPVAIQAGRLLAQRLYAGSTVKCDYENVPTTVFTPLEYGACGLSEEKAVEKFGEENIEVYHSYFWPLEWTIPSRDNNKCYAKIICNTKDNERVVGFHVLGPNAGEVTQGFAAALKCGLTKKQLDSTIGIHPVCAEGWRPAMSKQMSQEASRC

SEQ ID NO: 2033 - protein, 544 aa, Artificial Sequence
  Synthetic polypeptide
MEDGRALEGTLSELAAETDLPVVFVKQRKIGGHGPTLKAYQEGRLQKLLKMNGPEDLPKSYDYDLIIIGGGSGGLAAAKEAAQYGKKVMVLDFVTPTPLGTRWGLGGTCVNVGCIPKKLMHQAALLGQALQDSRNYGWKVEETVKHDWDRMIEAVQNHIGSLNWGYRVALREKKVVYENAYGQFIGPHRIKATNNKGKEKIYSAERFLIATGERPRYLGIPGDKEYCISSDDLFSLPYCPGKTLVVGASYVALECAGFLAGIGLDVTVMVRSILLRGFDQDMANKIGEHMEEHGIKFIRQFVPIKVEQIEAGTPGRLRVVAQSTNSEEIIEGEYNTVMLAIGRDACTRKIGLETVGVKINEKTGKIPVTDEEQTNVPYIYAIGDILEDKVELTPVAIQAGRLLAQRLYAGSTVKCDYENVPTTVFTPLEYGACGLSEEKAVEKFGEENIEVYHSYFWPLEWTIPSRDNNKCYAKIICNTKDNERVVGFHVLGPNAGEVTQGFAAALKCGLTKKQLDSTIGIHPVCAEGWRPAMSKQMSQEASRC

SEQ ID NO: 2034 - protein, 593 aa, Artificial Sequence
  Synthetic polypeptide
MQQVMLTCKGVNRGHAVPAGPGRKPRPRRSSRLLAGEKHLTRSALLLCHTEDGRALEGTLSELAAETDLPVVFVKQRKIGGHGPTLKAYQEGRLQKLLKMNGPEDLPKSYDYDLIIIGGGSGGLAAAKEAAQYGKKVMVLDFVTPTPLGTRWGLGGTCVNVGCIPKKLMHQAALLGQALQDSRNYGWKVEETVKHDWDRMIEAVQNHIGSLNWGYRVALREKKVVYENAYGQFIGPHRIKATNNKGKEKIYSAERFLIATGERPRYLGIPGDKEYCISSDDLFSLPYCPGKTLVVGASYVALECAGFLAGIGLDVTVMVRSILLRGFDQDMANKIGEHMEEHGIKFIRQFVPIKVEQIEAGTPGRLRVVAQSTNSEEIIEGEYNTVMLAIGRDACTRKIGLETVGVKINEKTGKIPVTDEEQTNVPYIYAIGDILEDKVELTPVAIQAGRLLAQRLYAGSTVKCDYENVPTTVFTPLEYGACGLSEEKAVEKFGEENIEVYHSYFWPLEWTIPSRDNNKCYAKIICNTKDNERVVGFHVLGPNAGEVTQGFAAALKCGLTKKQLDSTIGIHPVCAEGWRPAMSKQMSQEASRC

SEQ ID NO: 2035 - protein, 609 aa, Artificial Sequence
  Synthetic polypeptide
MPVDDYWLCLPASCARPFVQTVRVVQSCPHCCWFPGVLPSVPEPLRMPAMLPTGSHSAVLPPSHCSTAPPSTSQEPSSSADPKLCLSPPTSDSRQERNVQFGLAYQEGRLQKLLKMNGPEDLPKSYDYDLIIIGGGSGGLAAAKEAAQYGKKVMVLDFVTPTPLGTRWGLGGTCVNVGCIPKKLMHQAALLGQALQDSRNYGWKVEETVKHDWDRMIEAVQNHIGSLNWGYRVALREKKVVYENAYGQFIGPHRIKATNNKGKEKIYSAERFLIATGERPRYLGIPGDKEYCISSDDLFSLPYCPGKTLVVGASYVALECAGFLAGIGLDVTVMVRSILLRGFDQDMANKIGEHMEEHGIKFIRQFVPIKVEQIEAGTPGRLRVVAQSTNSEEIIEGEYNTVMLAIGRDACTRKIGLETVGVKINEKTGKIPVTDEEQTNVPYIYAIGDILEDKVELTPVAIQAGRLLAQRLYAGSTVKCDYENVPTTVFTPLEYGACGLSEEKAVEKFGEENIEVYHSYFWPLEWTIPSRDNNKCYAKIICNTKDNERVVGFHVLGPNAGEVTQGFAAALKCGLTKKQLDSTIGIHPVCAEGWRPAMSKQMSQEASRC

SEQ ID NO: 2036 - protein, 563 aa, Artificial Sequence
  Synthetic polypeptide
MPAMLPTGSHSAVLPPSHCSTAPPSTSQEPSSSADPKLCLSPPTSDSRQERNVQFGLAYQEGRLQKLLKMNGPEDLPKSYDYDLIIIGGGSGGLAAAKEAAQYGKKVMVLDFVTPTPLGTRWGLGGTCVNVGCIPKKLMHQAALLGQALQDSRNYGWKVEETVKHDWDRMIEAVQNHIGSLNWGYRVALREKKVVYENAYGQFIGPHRIKATNNKGKEKIYSAERFLIATGERPRYLGIPGDKEYCISSDDLFSLPYCPGKTLVVGASYVALECAGFLAGIGLDVTVMVRSILLRGFDQDMANKIGEHMEEHGIKFIRQFVPIKVEQIEAGTPGRLRVVAQSTNSEEIIEGEYNTVMLAIGRDACTRKIGLETVGVKINEKTGKIPVTDEEQTNVPYIYAIGDILEDKVELTPVAIQAGRLLAQRLYAGSTVKCDYENVPTTVFTPLEYGACGLSEEKAVEKFGEENIEVYHSYFWPLEWTIPSRDNNKCYAKIICNTKDNERVVGFHVLGPNAGEVTQGFAAALKCGLTKKQLDSTIGIHPVCAEGWRPAMSKQMSQEASRC

SEQ ID NO: 2037 - protein, 639 aa, Artificial Sequence
  Synthetic polypeptide
MGCAEGKAVAAAAPTELQTKGKNGDGRRRSAKDHHPGKTLPENPAGFTSTATADSRALLQAYIDGHSVVIFSRSTCTRCTEVKKLFKSLCVPYFVLELDQTEDGRALEGTLSELAAETDLPVVFVKQRKIGGHGPTLKAYQEGRLQKLLKMNGPEDLPKSYDYDLIIIGGGSGGLAAAKEAAQYGKKVMVLDFVTPTPLGTRWGLGGTCVNVGCIPKKLMHQAALLGQALQDSRNYGWKVEETVKHDWDRMIEAVQNHIGSLNWGYRVALREKKVVYENAYGQFIGPHRIKATNNKGKEKIYSAERFLIATGERPRYLGIPGDKEYCISSDDLFSLPYCPGKTLVVGASYVALECAGFLAGIGLDVTVMVRSILLRGFDQDMANKIGEHMEEHGIKFIRQFVPIKVEQIEAGTPGRLRVVAQSTNSEEIIEGEYNTVMLAIGRDACTRKIGLETVGVKINEKTGKIPVTDEEQTNVPYIYAIGDILEDKVELTPVAIQAGRLLAQRLYAGSTVKCDYENVPTTVFTPLEYGACGLSEEKAVEKFGEENIEVYHSYFWPLEWTIPSRDNNKCYAKIICNTKDNERVVGFHVLGPNAGEVTQGFAAALKCGLTKKQLDSTIGIHPVCAEILSIAFLALTLQ

SEQ ID NO: 2038 - protein, 489 aa, Artificial Sequence
  Synthetic polypeptide
MNGPEDLPKSYDYDLIIIGGGSGGLAAAKEAAQYGKKVMVLDFVTPTPLGTRWGLGGTCVNVGCIPKKLMHQAALLGQALQDSRNYGWKVEETVKHDWDRMIEAVQNHIGSLNWGYRVALREKKVVYENAYGQFIGPHRIKATNNKGKEKIYSAERFLIATGERPRYLGIPGDKEYCISSDDLFSLPYCPGKTLVVGASYVALECAGFLAGIGLDVTVMVRSILLRGFDQDMANKIGEHMEEHGIKFIRQFVPIKVEQIEAGTPGRLRVVAQSTNSEEIIEGEYNTVMLAIGRDACTRKIGLETVGVKINEKTGKIPVTDEEQTNVPYIYAIGDILEDKVELTPVAIQAGRLLAQRLYAGSTVKCDYENVPTTVFTPLEYGACGLSEEKAVEKFGEENIEVYHSYFWPLEWTIPSRDNNKCYAKIICNTKDNERVVGFHVLGPNAGEVTQGFAAALKCGLTKKQLDSTIGIHPVCAEILSIAFLALTLQ

SEQ ID NO: 2039 - protein, 541 aa, Artificial Sequence
  Synthetic polypeptide
MSCEDGRALEGTLSELAAETDLPVVFVKQRKIGGHGPTLKAYQEGRLQKLLKMNGPEDLPKSYDYDLIIIGGGSGGLAAAKEAAQYGKKVMVLDFVTPTPLGTRWGLGGTCVNVGCIPKKLMHQAALLGQALQDSRNYGWKVEETVKHDWDRMIEAVQNHIGSLNWGYRVALREKKVVYENAYGQFIGPHRIKATNNKGKEKIYSAERFLIATGERPRYLGIPGDKEYCISSDDLFSLPYCPGKTLVVGASYVALECAGFLAGIGLDVTVMVRSILLRGFDQDMANKIGEHMEEHGIKFIRQFVPIKVEQIEAGTPGRLRVVAQSTNSEEIIEGEYNTVMLAIGRDACTRKIGLETVGVKINEKTGKIPVTDEEQTNVPYIYAIGDILEDKVELTPVAIQAGRLLAQRLYAGSTVKCDYENVPTTVFTPLEYGACGLSEEKAVEKFGEENIEVYHSYFWPLEWTIPSRDNNKCYAKIICNTKDNERVVGFHVLGPNAGEVTQGFAAALKCGLTKKQLDSTIGIHPVCAEILSIAFLALTLQ

SEQ ID NO: 2040 - protein, 533 aa, Artificial Sequence
  Synthetic polypeptide
MLSRLVLNSWAQAIIRPRPPKVLGLQVTTFSEAYQEGRLQKLLKMNGPEDLPKSYDYDLIIIGGGSGGLAAAKEAAQYGKKVMVLDFVTPTPLGTRWGLGGTCVNVGCIPKKLMHQAALLGQALQDSRNYGWKVEETVKHDWDRMIEAVQNHIGSLNWGYRVALREKKVVYENAYGQFIGPHRIKATNNKGKEKIYSAERFLIATGERPRYLGIPGDKEYCISSDDLFSLPYCPGKTLVVGASYVALECAGFLAGIGLDVTVMVRSILLRGFDQDMANKIGEHMEEHGIKFIRQFVPIKVEQIEAGTPGRLRVVAQSTNSEEIIEGEYNTVMLAIGRDACTRKIGLETVGVKINEKTGKIPVTDEEQTNVPYIYAIGDILEDKVELTPVAIQAGRLLAQRLYAGSTVKCDYENVPTTVFTPLEYGACGLSEEKAVEKFGEENIEVYHSYFWPLEWTIPSRDNNKCYAKIICNTKDNERVVGFHVLGPNAGEVTQGFAAALKCGLTKKQLDSTIGIHPVCAEILSIAFLALTLQ

SEQ ID NO: 2041 - protein, 451 aa, Artificial Sequence
  Synthetic polypeptide
MVLDFVTPTPLGTRWGLGGTCVNVGCIPKKLMHQAALLGQALQDSRNYGWKVEETVKHDWDRMIEAVQNHIGSLNWGYRVALREKKVVYENAYGQFIGPHRIKATNNKGKEKIYSAERFLIATGERPRYLGIPGDKEYCISSDDLFSLPYCPGKTLVVGASYVALECAGFLAGIGLDVTVMVRSILLRGFDQDMANKIGEHMEEHGIKFIRQFVPIKVEQIEAGTPGRLRVVAQSTNSEEIIEGEYNTVMLAIGRDACTRKIGLETVGVKINEKTGKIPVTDEEQTNVPYIYAIGDILEDKVELTPVAIQAGRLLAQRLYAGSTVKCDYENVPTTVFTPLEYGACGLSEEKAVEKFGEENIEVYHSYFWPLEWTIPSRDNNKCYAKIICNTKDNERVVGFHVLGPNAGEVTQGFAAALKCGLTKKQLDSTIGIHPVCAEILSIAFLALTLQ

SEQ ID NO: 2042 - protein, 539 aa, Artificial Sequence
  Synthetic polypeptide
MEDGRALEGTLSELAAETDLPVVFVKQRKIGGHGPTLKAYQEGRLQKLLKMNGPEDLPKSYDYDLIIIGGGSGGLAAAKEAAQYGKKVMVLDFVTPTPLGTRWGLGGTCVNVGCIPKKLMHQAALLGQALQDSRNYGWKVEETVKHDWDRMIEAVQNHIGSLNWGYRVALREKKVVYENAYGQFIGPHRIKATNNKGKEKIYSAERFLIATGERPRYLGIPGDKEYCISSDDLFSLPYCPGKTLVVGASYVALECAGFLAGIGLDVTVMVRSILLRGFDQDMANKIGEHMEEHGIKFIRQFVPIKVEQIEAGTPGRLRVVAQSTNSEEIIEGEYNTVMLAIGRDACTRKIGLETVGVKINEKTGKIPVTDEEQTNVPYIYAIGDILEDKVELTPVAIQAGRLLAQRLYAGSTVKCDYENVPTTVFTPLEYGACGLSEEKAVEKFGEENIEVYHSYFWPLEWTIPSRDNNKCYAKIICNTKDNERVVGFHVLGPNAGEVTQGFAAALKCGLTKKQLDSTIGIHPVCAEILSIAFLALTLQ

SEQ ID NO: 2043 - protein, 588 aa, Artificial Sequence
  Synthetic polypeptide
MQQVMLTCKGVNRGHAVPAGPGRKPRPRRSSRLLAGEKHLTRSALLLCHTEDGRALEGTLSELAAETDLPVVFVKQRKIGGHGPTLKAYQEGRLQKLLKMNGPEDLPKSYDYDLIIIGGGSGGLAAAKEAAQYGKKVMVLDFVTPTPLGTRWGLGGTCVNVGCIPKKLMHQAALLGQALQDSRNYGWKVEETVKHDWDRMIEAVQNHIGSLNWGYRVALREKKVVYENAYGQFIGPHRIKATNNKGKEKIYSAERFLIATGERPRYLGIPGDKEYCISSDDLFSLPYCPGKTLVVGASYVALECAGFLAGIGLDVTVMVRSILLRGFDQDMANKIGEHMEEHGIKFIRQFVPIKVEQIEAGTPGRLRVVAQSTNSEEIIEGEYNTVMLAIGRDACTRKIGLETVGVKINEKTGKIPVTDEEQTNVPYIYAIGDILEDKVELTPVAIQAGRLLAQRLYAGSTVKCDYENVPTTVFTPLEYGACGLSEEKAVEKFGEENIEVYHSYFWPLEWTIPSRDNNKCYAKIICNTKDNERVVGFHVLGPNAGEVTQGFAAALKCGLTKKQLDSTIGIHPVCAEILSIAFLALTLQ

SEQ ID NO: 2044 - protein, 604 aa, Artificial Sequence
  Synthetic polypeptide
MPVDDYWLCLPASCARPFVQTVRVVQSCPHCCWFPGVLPSVPEPLRMPAMLPTGSHSAVLPPSHCSTAPPSTSQEPSSSADPKLCLSPPTSDSRQERNVQFGLAYQEGRLQKLLKMNGPEDLPKSYDYDLIIIGGGSGGLAAAKEAAQYGKKVMVLDFVTPTPLGTRWGLGGTCVNVGCIPKKLMHQAALLGQALQDSRNYGWKVEETVKHDWDRMIEAVQNHIGSLNWGYRVALREKKVVYENAYGQFIGPHRIKATNNKGKEKIYSAERFLIATGERPRYLGIPGDKEYCISSDDLFSLPYCPGKTLVVGASYVALECAGFLAGIGLDVTVMVRSILLRGFDQDMANKIGEHMEEHGIKFIRQFVPIKVEQIEAGTPGRLRVVAQSTNSEEIIEGEYNTVMLAIGRDACTRKIGLETVGVKINEKTGKIPVTDEEQTNVPYIYAIGDILEDKVELTPVAIQAGRLLAQRLYAGSTVKCDYENVPTTVFTPLEYGACGLSEEKAVEKFGEENIEVYHSYFWPLEWTIPSRDNNKCYAKIICNTKDNERVVGFHVLGPNAGEVTQGFAAALKCGLTKKQLDSTIGIHPVCAEILSIAFLALTLQ

SEQ ID NO: 2045 - protein, 558 aa, Artificial Sequence
  Synthetic polypeptide
MPAMLPTGSHSAVLPPSHCSTAPPSTSQEPSSSADPKLCLSPPTSDSRQERNVQFGLAYQEGRLQKLLKMNGPEDLPKSYDYDLIIIGGGSGGLAAAKEAAQYGKKVMVLDFVTPTPLGTRWGLGGTCVNVGCIPKKLMHQAALLGQALQDSRNYGWKVEETVKHDWDRMIEAVQNHIGSLNWGYRVALREKKVVYENAYGQFIGPHRIKATNNKGKEKIYSAERFLIATGERPRYLGIPGDKEYCISSDDLFSLPYCPGKTLVVGASYVALECAGFLAGIGLDVTVMVRSILLRGFDQDMANKIGEHMEEHGIKFIRQFVPIKVEQIEAGTPGRLRVVAQSTNSEEIIEGEYNTVMLAIGRDACTRKIGLETVGVKINEKTGKIPVTDEEQTNVPYIYAIGDILEDKVELTPVAIQAGRLLAQRLYAGSTVKCDYENVPTTVFTPLEYGACGLSEEKAVEKFGEENIEVYHSYFWPLEWTIPSRDNNKCYAKIICNTKDNERVVGFHVLGPNAGEVTQGFAAALKCGLTKKQLDSTIGIHPVCAEILSIAFLALTLQ

SEQ ID NO: 2046 - protein, 633 aa, Artificial Sequence
  Synthetic polypeptide
MGCAEGKAVAAAAPTELQTKGKNGDGRRRSAKDHHPGKTLPENPAGFTSTATADSRALLQAYIDGHSVVIFSRSTCTRCTEVKKLFKSLCVPYFVLELDQTEDGRALEGTLSELAAETDLPVVFVKQRKIGGHGPTLKAYQEGRLQKLLKMNGPEDLPKSYDYDLIIIGGGSGGLAAAKEAAQYGKKVMVLDFVTPTPLGTRWGLGGTCVNVGCIPKKLMHQAALLGQALQDSRNYGWKVEETVKHDWDRMIEAVQNHIGSLNWGYRVALREKKVVYENAYGQFIGPHRIKATNNKGKEKIYSAERFLIATGERPRYLGIPGDKEYCISSDDLFSLPYCPGKTLVVGASYVALECAGFLAGIGLDVTVMVRSILLRGFDQDMANKIGEHMEEHGIKFIRQFVPIKVEQIEAGTPGRLRVVAQSTNSEEIIEGEYNTVMLAIGRDACTRKIGLETVGVKINEKTGKIPVTDEEQTNVPYIYAIGDILEDKVELTPVAIQAGRLLAQRLYAGSTVKCDYENVPTTVFTPLEYGACGLSEEKAVEKFGEENIEVYHSYFWPLEWTIPSRDNNKCYAKIICNTKDNERVVGFHVLGPNAGEVTQGFAAALKCGLTKKQLDSTIGIHPVCAEQPEVTK

SEQ ID NO: 2047 - protein, 483 aa, Artificial Sequence
  Synthetic polypeptide
MNGPEDLPKSYDYDLIIIGGGSGGLAAAKEAAQYGKKVMVLDFVTPTPLGTRWGLGGTCVNVGCIPKKLMHQAALLGQALQDSRNYGWKVEETVKHDWDRMIEAVQNHIGSLNWGYRVALREKKVVYENAYGQFIGPHRIKATNNKGKEKIYSAERFLIATGERPRYLGIPGDKEYCISSDDLFSLPYCPGKTLVVGASYVALECAGFLAGIGLDVTVMVRSILLRGFDQDMANKIGEHMEEHGIKFIRQFVPIKVEQIEAGTPGRLRVVAQSTNSEEIIEGEYNTVMLAIGRDACTRKIGLETVGVKINEKTGKIPVTDEEQTNVPYIYAIGDILEDKVELTPVAIQAGRLLAQRLYAGSTVKCDYENVPTTVFTPLEYGACGLSEEKAVEKFGEENIEVYHSYFWPLEWTIPSRDNNKCYAKIICNTKDNERVVGFHVLGPNAGEVTQGFAAALKCGLTKKQLDSTIGIHPVCAEQPEVTK

SEQ ID NO: 2048 - protein, 535 aa, Artificial Sequence
  Synthetic polypeptide
MSCEDGRALEGTLSELAAETDLPVVFVKQRKIGGHGPTLKAYQEGRLQKLLKMNGPEDLPKSYDYDLIIIGGGSGGLAAAKEAAQYGKKVMVLDFVTPTPLGTRWGLGGTCVNVGCIPKKLMHQAALLGQALQDSRNYGWKVEETVKHDWDRMIEAVQNHIGSLNWGYRVALREKKVVYENAYGQFIGPHRIKATNNKGKEKIYSAERFLIATGERPRYLGIPGDKEYCISSDDLFSLPYCPGKTLVVGASYVALECAGFLAGIGLDVTVMVRSILLRGFDQDMANKIGEHMEEHGIKFIRQFVPIKVEQIEAGTPGRLRVVAQSTNSEEIIEGEYNTVMLAIGRDACTRKIGLETVGVKINEKTGKIPVTDEEQTNVPYIYAIGDILEDKVELTPVAIQAGRLLAQRLYAGSTVKCDYENVPTTVFTPLEYGACGLSEEKAVEKFGEENIEVYHSYFWPLEWTIPSRDNNKCYAKIICNTKDNERVVGFHVLGPNAGEVTQGFAAALKCGLTKKQLDSTIGIHPVCAEQPEVTK

SEQ ID NO: 2049 - protein, 527 aa, Artificial Sequence
  Synthetic polypeptide
MLSRLVLNSWAQAIIRPRPPKVLGLQVTTFSEAYQEGRLQKLLKMNGPEDLPKSYDYDLIIIGGGSGGLAAAKEAAQYGKKVMVLDFVTPTPLGTRWGLGGTCVNVGCIPKKLMHQAALLGQALQDSRNYGWKVEETVKHDWDRMIEAVQNHIGSLNWGYRVALREKKVVYENAYGQFIGPHRIKATNNKGKEKIYSAERFLIATGERPRYLGIPGDKEYCISSDDLFSLPYCPGKTLVVGASYVALECAGFLAGIGLDVTVMVRSILLRGFDQDMANKIGEHMEEHGIKFIRQFVPIKVEQIEAGTPGRLRVVAQSTNSEEIIEGEYNTVMLAIGRDACTRKIGLETVGVKINEKTGKIPVTDEEQTNVPYIYAIGDILEDKVELTPVAIQAGRLLAQRLYAGSTVKCDYENVPTTVFTPLEYGACGLSEEKAVEKFGEENIEVYHSYFWPLEWTIPSRDNNKCYAKIICNTKDNERVVGFHVLGPNAGEVTQGFAAALKCGLTKKQLDSTIGIHPVCAEQPEVTK

SEQ ID NO: 2050 - protein, 445 aa, Artificial Sequence
  Synthetic polypeptide
MVLDFVTPTPLGTRWGLGGTCVNVGCIPKKLMHQAALLGQALQDSRNYGWKVEETVKHDWDRMIEAVQNHIGSLNWGYRVALREKKVVYENAYGQFIGPHRIKATNNKGKEKIYSAERFLIATGERPRYLGIPGDKEYCISSDDLFSLPYCPGKTLVVGASYVALECAGFLAGIGLDVTVMVRSILLRGFDQDMANKIGEHMEEHGIKFIRQFVPIKVEQIEAGTPGRLRVVAQSTNSEEIIEGEYNTVMLAIGRDACTRKIGLETVGVKINEKTGKIPVTDEEQTNVPYIYAIGDILEDKVELTPVAIQAGRLLAQRLYAGSTVKCDYENVPTTVFTPLEYGACGLSEEKAVEKFGEENIEVYHSYFWPLEWTIPSRDNNKCYAKIICNTKDNERVVGFHVLGPNAGEVTQGFAAALKCGLTKKQLDSTIGIHPVCAEQPEVTK

SEQ ID NO: 2051 - protein, 533 aa, Artificial Sequence
  Synthetic polypeptide
MEDGRALEGTLSELAAETDLPVVFVKQRKIGGHGPTLKAYQEGRLQKLLKMNGPEDLPKSYDYDLIIIGGGSGGLAAAKEAAQYGKKVMVLDFVTPTPLGTRWGLGGTCVNVGCIPKKLMHQAALLGQALQDSRNYGWKVEETVKHDWDRMIEAVQNHIGSLNWGYRVALREKKVVYENAYGQFIGPHRIKATNNKGKEKIYSAERFLIATGERPRYLGIPGDKEYCISSDDLFSLPYCPGKTLVVGASYVALECAGFLAGIGLDVTVMVRSILLRGFDQDMANKIGEHMEEHGIKFIRQFVPIKVEQIEAGTPGRLRVVAQSTNSEEIIEGEYNTVMLAIGRDACTRKIGLETVGVKINEKTGKIPVTDEEQTNVPYIYAIGDILEDKVELTPVAIQAGRLLAQRLYAGSTVKCDYENVPTTVFTPLEYGACGLSEEKAVEKFGEENIEVYHSYFWPLEWTIPSRDNNKCYAKIICNTKDNERVVGFHVLGPNAGEVTQGFAAALKCGLTKKQLDSTIGIHPVCAEQPEVTK

SEQ ID NO: 2052 - protein, 582 aa, Artificial Sequence
  Synthetic polypeptide
MQQVMLTCKGVNRGHAVPAGPGRKPRPRRSSRLLAGEKHLTRSALLLCHTEDGRALEGTLSELAAETDLPVVFVKQRKIGGHGPTLKAYQEGRLQKLLKMNGPEDLPKSYDYDLIIIGGGSGGLAAAKEAAQYGKKVMVLDFVTPTPLGTRWGLGGTCVNVGCIPKKLMHQAALLGQALQDSRNYGWKVEETVKHDWDRMIEAVQNHIGSLNWGYRVALREKKVVYENAYGQFIGPHRIKATNNKGKEKIYSAERFLIATGERPRYLGIPGDKEYCISSDDLFSLPYCPGKTLVVGASYVALECAGFLAGIGLDVTVMVRSILLRGFDQDMANKIGEHMEEHGIKFIRQFVPIKVEQIEAGTPGRLRVVAQSTNSEEIIEGEYNTVMLAIGRDACTRKIGLETVGVKINEKTGKIPVTDEEQTNVPYIYAIGDILEDKVELTPVAIQAGRLLAQRLYAGSTVKCDYENVPTTVFTPLEYGACGLSEEKAVEKFGEENIEVYHSYFWPLEWTIPSRDNNKCYAKIICNTKDNERVVGFHVLGPNAGEVTQGFAAALKCGLTKKQLDSTIGIHPVCAEQPEVTK

SEQ ID NO: 2053 - protein, 598 aa, Artificial Sequence
  Synthetic polypeptide
MPVDDYWLCLPASCARPFVQTVRVVQSCPHCCWFPGVLPSVPEPLRMPAMLPTGSHSAVLPPSHCSTAPPSTSQEPSSSADPKLCLSPPTSDSRQERNVQFGLAYQEGRLQKLLKMNGPEDLPKSYDYDLIIIGGGSGGLAAAKEAAQYGKKVMVLDFVTPTPLGTRWGLGGTCVNVGCIPKKLMHQAALLGQALQDSRNYGWKVEETVKHDWDRMIEAVQNHIGSLNWGYRVALREKKVVYENAYGQFIGPHRIKATNNKGKEKIYSAERFLIATGERPRYLGIPGDKEYCISSDDLFSLPYCPGKTLVVGASYVALECAGFLAGIGLDVTVMVRSILLRGFDQDMANKIGEHMEEHGIKFIRQFVPIKVEQIEAGTPGRLRVVAQSTNSEEIIEGEYNTVMLAIGRDACTRKIGLETVGVKINEKTGKIPVTDEEQTNVPYIYAIGDILEDKVELTPVAIQAGRLLAQRLYAGSTVKCDYENVPTTVFTPLEYGACGLSEEKAVEKFGEENIEVYHSYFWPLEWTIPSRDNNKCYAKIICNTKDNERVVGFHVLGPNAGEVTQGFAAALKCGLTKKQLDSTIGIHPVCAEQPEVTK

SEQ ID NO: 2054 - protein, 552 aa, Artificial Sequence
  Synthetic polypeptide
MPAMLPTGSHSAVLPPSHCSTAPPSTSQEPSSSADPKLCLSPPTSDSRQERNVQFGLAYQEGRLQKLLKMNGPEDLPKSYDYDLIIIGGGSGGLAAAKEAAQYGKKVMVLDFVTPTPLGTRWGLGGTCVNVGCIPKKLMHQAALLGQALQDSRNYGWKVEETVKHDWDRMIEAVQNHIGSLNWGYRVALREKKVVYENAYGQFIGPHRIKATNNKGKEKIYSAERFLIATGERPRYLGIPGDKEYCISSDDLFSLPYCPGKTLVVGASYVALECAGFLAGIGLDVTVMVRSILLRGFDQDMANKIGEHMEEHGIKFIRQFVPIKVEQIEAGTPGRLRVVAQSTNSEEIIEGEYNTVMLAIGRDACTRKIGLETVGVKINEKTGKIPVTDEEQTNVPYIYAIGDILEDKVELTPVAIQAGRLLAQRLYAGSTVKCDYENVPTTVFTPLEYGACGLSEEKAVEKFGEENIEVYHSYFWPLEWTIPSRDNNKCYAKIICNTKDNERVVGFHVLGPNAGEVTQGFAAALKCGLTKKQLDSTIGIHPVCAEQPEVTK

SEQ ID NO: 2055 - protein, 432 aa, Artificial Sequence
  Synthetic polypeptide
MTNSKGRSITDKTSGGPSSGGGFVDWTLRLNTIQSDKFLNLLLSMVPVIYQKNQEDRHKKANGIWQDGLSTAVQTFSNRSEQHMEYHSFSEQSFHANNGHASSSCSQKYDDYANYNYCDGRETSETTAMLQDEDISSDGDEDAIVEVTPKLPKESSGIMALQILVPFLLAGFGTVSAGMVLDIVQHWEVFRKVTEVFILVPALLGLKGNLEMTLASRLSTAVNIGKMDSPIEKWNLIIGNLALKQVQATVVGFLAAVAAIILGWIPEGKYYLDHSILLCSSSVATAFIASLLQGIIMVGVIVGSKKTGINPDNVATPIAASFGDLITLAILAWISQGLYSCLETYYYISPLVGVFFLALTPIWIIIAAKHPATRTVLHSGWEPVITAMVISSIGGLILDTTVSDPNLVGIVVYTPVINGMVVHACSPSYLGG

SEQ ID NO: 2056 - protein, 139 aa, Artificial Sequence
  Synthetic polypeptide
MEVHGKPKASPSCSSPTRDSSGVPVSKELLTAGSDGRGGIWDRLLINSQPKSRKTSTLQTVRIERSPLLDQVQTFLPQMARANEKLRKEMAAAPPGRFNIENIDGPHSKVIQMLSLQNRSQIQPLCTTSAVPLDLCWPR

SEQ ID NO: 2057 - protein, 911 aa, Artificial Sequence
  Synthetic polypeptide
MLRRGSQALRRFSTGRVYFKNKLKLALIGQSLFGQEVYSHLRKEGHRVVGVFTVPDKDGKADPLALAAEKDGTPVFKLPKWRVKGKTIKEVAEAYRSVGAELNVLPFCTQFIPMDIIDSPKHGSIIYHPSILPRHRGASAINWTLIMGDKKAGFSVFWADDGLDTGPILLQRSCDVEPNDTVDALYNRFLFPEGIKAMVEAVQLIADGKAPRIPQPEEGATYEGIQKKENAEISWDQSAEVLHNWIRGHDKVPGAWTEINGQMVTFYGSTLLNSSVPPGEPLEIKGAKKPGLVTKNGLVLFGNDGKALTVRNLQFEDGKMIPASQYFSTGETSVVELTAEEVKVAETIKVIWAGILSNVPIIEDSTDFFKSGASSMDVARLVEEIRQKCGGLQLQNEDVYMATKFEGFIQKVVRKLRGEDQEVELVVDYISKEVNEIMVKMPYQCFINGQFTDADDGKTYDTINPTDGSTICKVSYASLADVDKAVAAAKDAFENGEWGRMNARERGRLMYRLADLLEENQEELATIEALDSGAVYTLALKTHIGMSVQTFRYFAGWCDKIQGSTIPINQARPNRNLTFTKKEPLGVCAIIIPWNYPLMMLAWKSAACLAAGNTLVLKPAQVTPLTALKFAELSVKAGFPKGVINIIPGSGGIAGQRLSEHPDIRKLGFTGSTPIGKQIMKSCAVSNLKKVSLELGGKSPLIIFNDCELDKAVRMGMGAVFFNKGENCIAAGRLFVEESIHDEFVTRVVEEIKKMKIGDPLDRSTDHGPQNHKAHLEKLLQYCETGVKEGATLVYGGRQVQRPGFFMEPTVFTDVEDYMYLAKEESFGPIMVISKFQNGDIDGVLQRANSTEYGLASGVFTRDINKAMYVSEKLEAGTVFINTYNKTDVAAPFGGVKQSGFGKDLGVARIQ

SEQ ID NO: 2058 - protein, 856 aa, Artificial Sequence
  Synthetic polypeptide
MLRRGSQALRRFSTGRVYFKNKLKLALIGQSLFGQEVYSHLRKEGHRVVGVFTVPDKDGKADPLALAAEKDGTPVFKLPKWRVKGKTIKEVAEAYRSVGAELNVLPFCTQFIPMDIIDSPKHGSIIYHPSILPRHRGASAINWTLIMGDKKAGFSVFWADDGLDTGPILLQRSCDVEPNDTVDALYNRFLFPEGIKAMVEAVQLIADGKAPRIPQPEEGATYEGIQKKENAEISWDQSAEVLHNWIRGHDKVPGAWTEINGQMVTFYGSTLLNSSVPPGEPLEIKGAKKPGLVTKNGLVLFGNDGKALTVRNLQFEDGKMIPASQYFSTGETSVVELTAEEVKVAETIKVIWAGILSNVPIIEDSTDFFKSGASSMDVARLVEEIRQKCGGLQLQNEDVYMATKFEGFIQKVVRKLRGEDQEVELVVDYISKEVNEIMVKMPYQCFINGQFTDADDGKTYDTINPTDGSTICKVSYASLADVDKAVAAAKDAFENGEWGRMNARERGRLMYRLADLLEENQEELATIEALDSGAVYTLALKTHIGMSVQTFRYFAGWCDKIQGSTIPINQARPNRNLTFTKKEPLGVCAIIIPWNYPLMMLAWKSAACLAAGNTLVLKPAQVTPLTALKFAELSVKAGFPKGVINIIPGSGGIAGQRLSEHPDIRKLGFTGSTPIGKQIMKSCAVSNLKKVSLELGGKSPLIIFNDCELDKAVRMGMGAVFFNKGENCIAAGRLFVEESIHDEFVTRVVEEIKKMKIGDPLDRSTDHGPQNHKAHLEKLLQYCETGVKEGATLVYGGRQVQRPGFFMEPTVFTDVEDYMYLAKEESFGPIMVISKFQNGFGTDPVSLLEHQMKYLA

SEQ ID NO: 2059 - protein, 4 aa, Artificial Sequence
  Synthetic polypeptide
GRRN

SEQ ID NO: 2060 - protein, 622 aa, Artificial Sequence
  Synthetic polypeptide
MLRRGSQALRRFSTGRVYFKNKLKLALIGQSLFGQEVYSHLRKEGHRVVGVFTVPDKDGKADPLALAAEKDGTPVFKLPKWRVKGKTIKEVAEAYRSVGAELNVLPFCTQFIPMDIIDSPKHGSIIYHPSILPRHRGASAINWTLIMGDKKAGFSVFWADDGLDTGPILLQRSCDVEPNDTVDALYNRFLFPEGIKAMVEAVQLIADGKAPRIPQPEEGATYEGIQKKENAEISWDQSAEVLHNWIRGHDKVPGAWTEINGQMVTFYGSTLLNSSVPPGEPLEIKGAKKPGLVTKNGLVLFGNDGKALTVRNLQFEDGKMIPASQYFSTGETSVVELTAEEVKVAETIKVIWAGILSNVPIIEDSTDFFKSGASSMDVARLVEEIRQKCGGLQLQNEDVYMATKFEGFIQKVVRKLRGEDQEVELVVDYISKEVNEIMVKMPYQCFINGQFTDADDGKTYDTINPTDGSTICKVSYASLADVDKAVAAAKDAFENGEWGRMNARERGRLMYRLADLLEENQEELATIEALDSGAVYTLALKTHIGMSVQTFRYFAGWCDKIQGSTIPINQARPNRNLTFTKKEPLGVCAIIIPWNYPLMMLAWKSAACLAAGNTLVLKPAQD

SEQ ID NO: 2061 - protein, 517 aa, Artificial Sequence
  Synthetic polypeptide
MLRRGSQALRRFSTGRVYFKNKLKLALIGQSLFGQEVYSHLRKEGHRVVGVFTVPDKDGKADPLALAAEKDGTPVFKLPKWRVKGKTIKEVAEAYRSVGAELNVLPFCTQFIPMDIIDSPKHGSIIYHPSILPRHRGASAINWTLIMGDKKAGFSVFWADDGLDTGPILLQRSCDVEPNDTVDALYNRFLFPEGIKAMVEAVQLIADGKAPRIPQPEEGATYEGIQKKENAEISWDQSAEVLHNWIRGHDKVPGAWTEINGQMVTFYGSTLLNSSVPPGEPLEIKGAKKPGLVTKNGLVLFGNDGKALTVRNLQFEDGKMIPASQYFSTGETSVVELTAEEVKVAETIKVIWAGILSNVPIIEDSTDFFKSGASSMDVARLVEEIRQKCGGLQLQNEDVYMATKFEGFIQKVVRKLRGEDQEVELVVDYISKEVNEIMVKMPYQCFINGQFTDADDGKTYDTINPTDGSTICKVSYASLADVDKAVAAAKDAFENGEWGRMNARERGRLMYSSMRMN

SEQ ID NO: 2062 - protein, 269 aa, Artificial Sequence
  Synthetic polypeptide
MAVETLSPDWEFDRVDDGSQKIHAEVQLKNYGKFLEEYTSQLRRIEDALDDSIGDVWDFNLDPIALKLLPYEQSSLLELIKTENKVLNKVITVYAALCCEIKKLKYEAETKFYNGLLFYGEGATDASMVEGDCQIQMGRFISFLQELSCFVTRCYEVVMNVVHQLAALYISNKIAPKIIETTGVHFQTMYEHLGELLTVLLTLDEIIDNHITLKDHWTMYKRLLKSVHHNPSKFGIQEEKLKPFEKFLLKLEGQLLDGMIFQVIAFSTN

SEQ ID NO: 2063 - protein, 849 aa, Artificial Sequence
  Synthetic polypeptide
MAVETLSPDWEFDRVDDGSQKIHAEVQLKNYGKFLEEYTSQLRRIEDALDDSIGDVWDFNLDPIALKLLPYEQSSLLELIKTENKVLNKVITVYAALCCEIKKLKYEAETKFYNGLLFYGEGATDASMVEGDCQIQMGRFISFLQELSCFVTRCYEVVMNVVHQLAALYISNKIAPKIIETTGVHFQTMYEHLGELLTVLLTLDEIIDNHITLKDHWTMYKRLLKSVHHNPSKFGIQEEKLKPFEKFLLKLEGQLLDGMIFQACIEQQFDSLNGGVSVSKNSTFAEEFAHSIRSIFANVEAKLGEPSEIDQRDKYVGICGLFVLHFQIFRTIDKKFYKSLLDICKKVPAITLTANIIWFPDNFLIQKIPAAAKLLDRKSLQAIKIHRDTFLQQKAQSLTKDVQSYYVFVSSWMMKMESILSKEQRMDKFAEDLTNRCNVFIQGFLYAYSISTIIKTTMNLYMSMQKPMTKTSVKALCRLVELLKAIEHMFYRRSMVVADSVSHITQHLQHQALHSISVAKKRVISDKKYSEQRLDVLSALVLAENTLNGPSTKQRRLIVSLALSVGTQMKTFKDEELFPLQVVMKKLDLISELRERVQTQCDCCFLYWHRAVFPIYLDDVYENAVDAARLHYMFSALRDCVPAMMHARHLESYEILLDCYDKEIMEILNEHLLDKLCKEIEKDLRLSVHTHLKLDDRNPFKVGMKDLALFFSLNPIRFFNRFIDIRAYVTHYLDKTFYNLTTVALHDWATYSEMRNLATQRYGLVMTEAHLPSQTLEQGLDVLEIMRNIHIFVSRYLYNLNNQIFIERTSNNKHLNTINIRHIANSIRTHGTGIMNTTNINFVKTRTMS

SEQ ID NO: 2064 - protein, 617 aa, Artificial Sequence
  Synthetic polypeptide
MPAVDKLLLEEALQDSPQTRSLLSVFEEDAGTLTDYTNQLLQAMQRVYGAQNEMCLATQQLSKQLLAYEKQNFALGKGDEEVISTLHYFSKVVDELNLLHTELAKQLADTMVLPIIQFREKDLTEVSTLKDLFGLASNEHDLSMAKYSRLPKKKENEKVKTEVGKEVAAARRKQHLSSLQYYCALNALQYRKQMAMMEPMIGFAHGQINFFKKGAEMFSKRMDSFLSSVADMVQSIQVELEAEAEKMRVSQQELLSVDESVYTPDSDVAAPQINRNLIQKAGYLNLRNKTGLVTTTWERLYFFTQGGNLMCQPRGAVAGGLIQDLDNCSVMAVDCEDRRYCFQITTPNGKSGIILQAESRKENEEWICAINNISRQIYLTDNPEAVAIKLNQTALQAVTPITSFGKKQESSCPSQNLKNSEMENENDKIVPKATASLPEAEELIAPGTPIQFDIVLPATEFLDQNRGSRRTNPFGETEDESFPEAEDSLLQQMFIVRFLGSMAVKTDSTTEVIYEAMRQVLAARAIHNIFRMTESHLMVTSQSLRNRQTPHTGEFQLASGGCPSGMKLPEEGAGSSLCYSAASTGDTQAKRVRSVPSANCSRPAEEGPEGKLTNRKL

SEQ ID NO: 2065 - protein, 574 aa, Artificial Sequence
  Synthetic polypeptide
MQRVYGAQNEMCLATQQLSKQLLAYEKQNFALGKGDEEVISTLHYFSKVVDELNLLHTELAKQLADTMVLPIIQFREKDLTEVSTLKDLFGLASNEHDLSMAKYSRLPKKKENEKVKTEVGKEVAAARRKQHLSSLQYYCALNALQYRKQMAMMEPMIGFAHGQINFFKKGAEMFSKRMDSFLSSVADMVQSIQVELEAEAEKMRVSQQELLSVDESVYTPDSDVAAPQINRNLIQKAGYLNLRNKTGLVTTTWERLYFFTQGGNLMCQPRGAVAGGLIQDLDNCSVMAVDCEDRRYCFQITTPNGKSGIILQAESRKENEEWICAINNISRQIYLTDNPEAVAIKLNQTALQAVTPITSFGKKQESSCPSQNLKNSEMENENDKIVPKATASLPEAEELIAPGTPIQFDIVLPATEFLDQNRGSRRTNPFGETEDESFPEAEDSLLQQMFIVRFLGSMAVKTDSTTEVIYEAMRQVLAARAIHNIFRMTESHLMVTSQSLRNRQTPHTGEFQLASGGCPSGMKLPEEGAGSSLCYSAASTGDTQAKRVRSVPSANCSRPAEEGPEGKLTNRKL

SEQ ID NO: 2066 - protein, 623 aa, Artificial Sequence
  Synthetic polypeptide
MPAVDKLLLEEALQDSPQTRSLLSVFEEDAGTLTDYTNQLLQAMQRVYGAQNEMCLATQQLSKQLLAYEKQNFALGKGDEEVISTLHYFSKVVDELNLLHTELAKQLADTMVLPIIQFREKDLTEVSTLKDLFGLASNDVCLFLEHDLSMAKYSRLPKKKENEKVKTEVGKEVAAARRKQHLSSLQYYCALNALQYRKQMAMMEPMIGFAHGQINFFKKGAEMFSKRMDSFLSSVADMVQSIQVELEAEAEKMRVSQQELLSVDESVYTPDSDVAAPQINRNLIQKAGYLNLRNKTGLVTTTWERLYFFTQGGNLMCQPRGAVAGGLIQDLDNCSVMAVDCEDRRYCFQITTPNGKSGIILQAESRKENEEWICAINNISRQIYLTDNPEAVAIKLNQTALQAVTPITSFGKKQESSCPSQNLKNSEMENENDKIVPKATASLPEAEELIAPGTPIQFDIVLPATEFLDQNRGSRRTNPFGETEDESFPEAEDSLLQQMFIVRFLGSMAVKTDSTTEVIYEAMRQVLAARAIHNIFRMTESHLMVTSQSLRNRQTPHTGEFQLASGGCPSGMKLPEEGAGSSLCYSAASTGDTQAKRVRSVPSANCSRPAEEGPEGKLTNRKL

SEQ ID NO: 2067 - protein, 148 aa, Artificial Sequence
  Synthetic polypeptide
DIVLPATEFLDQNRGSRRTNPFGETEDESFPEAEVKTDSTTEVIYEAMRQVLAARAIHNIFRMTESHLMVTSQSLRNRQTPHTGEFQLASGGCPSGMKLPEEGAGSSLCYSAASTGDTQAKRVRSVPSANCSRPAEEGPEGKLTNRKL

SEQ ID NO: 2068 - protein, 560 aa, Artificial Sequence
  Synthetic polypeptide
MPAVDKLLLEEALQDSPQTRSLLSVFEEDAGTLTDYTNQLLQAMQRVYGAQNEMCLATQQLSKQLLAYEKQNFALGKGDEEVISTLHYFSKVVDELNLLHTELAKQLADTMVLPIIQFREKDLTEVSTLKDLFGLASNEHDLSMAKYSRLPKKKENEKVKTEVGKEVAAARRKQHLSSLQYYCALNALQYRKQMAMMEPMIGFAHGQINFFKKGAEMFSKRMDSFLSSVADMVQSIQVELEAEAEKMRVSQQELLSVDESVYTPDSDVAAPQINRNLIQKAGYLNLRNKTGLVTTTWERLYFFTQGGNLMCQPRGAVAGGLIQDLDNCSVMAVDCEDRRYCFQITTPNGKSGIILQAESRKENEEWICAINNISRQIYLTDNPEAVAIKLNQTALQAVTPITSFGKKQESSCPSQNLKNSEMENENDKIVPKATASLPEAEELIAPGTPIQFDIVLPATEFLDQNRGSRRTNPFGETEDESFPEAEDSLLQQMFIVRFLGSMAVKTDSTTEVIYEAMRQVLAARAIHNIFRMTESHLMVTSQSLSPQTRRFHRVPTPPGP

SEQ ID NO: 2069 - protein, 517 aa, Artificial Sequence
  Synthetic polypeptide
MQRVYGAQNEMCLATQQLSKQLLAYEKQNFALGKGDEEVISTLHYFSKVVDELNLLHTELAKQLADTMVLPIIQFREKDLTEVSTLKDLFGLASNEHDLSMAKYSRLPKKKENEKVKTEVGKEVAAARRKQHLSSLQYYCALNALQYRKQMAMMEPMIGFAHGQINFFKKGAEMFSKRMDSFLSSVADMVQSIQVELEAEAEKMRVSQQELLSVDESVYTPDSDVAAPQINRNLIQKAGYLNLRNKTGLVTTTWERLYFFTQGGNLMCQPRGAVAGGLIQDLDNCSVMAVDCEDRRYCFQITTPNGKSGIILQAESRKENEEWICAINNISRQIYLTDNPEAVAIKLNQTALQAVTPITSFGKKQESSCPSQNLKNSEMENENDKIVPKATASLPEAEELIAPGTPIQFDIVLPATEFLDQNRGSRRTNPFGETEDESFPEAEDSLLQQMFIVRFLGSMAVKTDSTTEVIYEAMRQVLAARAIHNIFRMTESHLMVTSQSLSPQTRRFHRVPTPPGP

SEQ ID NO: 2070 - protein, 566 aa, Artificial Sequence
  Synthetic polypeptide
MPAVDKLLLEEALQDSPQTRSLLSVFEEDAGTLTDYTNQLLQAMQRVYGAQNEMCLATQQLSKQLLAYEKQNFALGKGDEEVISTLHYFSKVVDELNLLHTELAKQLADTMVLPIIQFREKDLTEVSTLKDLFGLASNDVCLFLEHDLSMAKYSRLPKKKENEKVKTEVGKEVAAARRKQHLSSLQYYCALNALQYRKQMAMMEPMIGFAHGQINFFKKGAEMFSKRMDSFLSSVADMVQSIQVELEAEAEKMRVSQQELLSVDESVYTPDSDVAAPQINRNLIQKAGYLNLRNKTGLVTTTWERLYFFTQGGNLMCQPRGAVAGGLIQDLDNCSVMAVDCEDRRYCFQITTPNGKSGIILQAESRKENEEWICAINNISRQIYLTDNPEAVAIKLNQTALQAVTPITSFGKKQESSCPSQNLKNSEMENENDKIVPKATASLPEAEELIAPGTPIQFDIVLPATEFLDQNRGSRRTNPFGETEDESFPEAEDSLLQQMFIVRFLGSMAVKTDSTTEVIYEAMRQVLAARAIHNIFRMTESHLMVTSQSLSPQTRRFHRVPTPPGP

SEQ ID NO: 2071 - protein, 91 aa, Artificial Sequence
  Synthetic polypeptide
DIVLPATEFLDQNRGSRRTNPFGETEDESFPEAEVKTDSTTEVIYEAMRQVLAARAIHNIFRMTESHLMVTSQSLSPQTRRFHRVPTPPGP

SEQ ID NO: 2072 - protein, 175 aa, Artificial Sequence
  Synthetic polypeptide
MPSAKQRGSKGGHGAASPSEKGAHPSGGADDVAKKPPPAPQQPPPPPAPHPQQHPQQHPQNQAHGKGGHRGGGGGGGKSSSSSSASAAAAAAAASSSASCSRRLGRALNFLFYLALVAAAAFSGWCVHHVLEEVQQVRRSHQDFSRQREELGQGLQGVEQKASCLAPGSIWCFDP

SEQ ID NO: 2073 - protein, 60 aa, Artificial Sequence
  Synthetic polypeptide
MGVNAVHWFRKGLRLHDNPALKECIQGADTIRCVYILDPWFAGSSNVGINRWRHFKLNTC

SEQ ID NO: 2074 - protein, 24 aa, Artificial Sequence
  Synthetic polypeptide
MVESLHGLDSRKGTIRDPLWALGK

SEQ ID NO: 2075 - protein, 39 aa, Artificial Sequence
  Synthetic polypeptide
MAAAGAFRLRRAASALLLRSPRLPARELSAPARLYHKKV

SEQ ID NO: 2076 - protein, 549 aa, Artificial Sequence [sequence omitted]

SEQ ID NO: 2077 - protein, 1022 aa, Artificial Sequence
  Synthetic polypeptide
MFTLSQTSRAWFIDRARQAREERLVQKERERAAVVIQAHVRSFLCRSRLQRDIRREIDDFFKADDPESTKRSALCIFKIARKLLFLFRIKEDNERFEKLCRSILSSMDAENEPKVWYVSLACSKDLTLLWIQQIKNILWYCCDFLKQLKPEILQDSRLITLYLTMLVTFTDTSTWKILRGKGESLRPAMNHICANIMGHLNQHGFYSVLQILLTRGLARPRPCLSKGTLTAAFSLALRPVIAAQFSDNLIRPFLIHIMSVPALVTHLSTVTPERLTVLESHDMLRKFIIFLRDQDRCRDVCESLEGCHTLCLMGNLLHLGSLSPRVLEEETDGFVSLLTQTLCYCRKYVSQKKSNLTHWHPVLGWFSQSVDYGLNESMHLITKQLQFLWGVPLIRIFFCDILSKKLLESQEPAHAQPASPQNVLPVKSLLKRAFQKSASVRNILRPVGGKRVDSAEVQKVCNICVLYQTSLTTLTQIRLQILTGLTYLDDLLPKLWAFICELGPHGGLKLFLECLNNDTEESKQLLAMLMLFCDCSRHLITILDDIEVYEEQISFKLEELVTISSFLNSFVFKMIWDGIVENAKGETLELFQSVHGWLMVLYERDCRRRFTPEDHWLRKDLKPSVLFQELDRDRKRAQLILQYIPHVIPHKNRVLLFRTMVTKEKEKLGLVETSSASPHVTHITIRRSRMLEDGYEQLRQLSQHAMKGVIRVKFVNDLGVDEAGIDQDGVFKEFLEEIIKRVFDPALNLFKTTSGDERLYPSPTSYIHENYLQLFEFVGKMLGKAVYEGIVVDVPFASFFLSQLLGHHHSVFYSSVDELPSLDSEFYKNLTSIKRYDGDITDLGLTLSYDEDVMGQLVCHELIPGGKTIPVTNENKISYIHLMAHFRMHTQIKNQTAALISGFRSIIKPEWIRMFSTPELQRLISGDNAEIDLEDLKKHTVYYGGFHGSHRVIIWLWDILASDFTPDERAMFLKFVTSCSRPPLLGFAYLKPPFSIRCVEVSDDQAVHVQARCFISSLAKGE

SEQ ID NO: 2078 - protein, 109 aa, Artificial Sequence
  Synthetic polypeptide
MFSTPELQRLISGDNAEIDLEDLKKHTVYYGGFHGSHRVIIWLWDILASDFTPDERAMFLKFVTSCSRPPLLGFAYLKPPFSIRCVEVSDDQAVHVQARCFISSLAKGE

SEQ ID NO: 2079 - protein, 133 aa, Artificial Sequence
  Synthetic polypeptide
TQIKNQTAALISGFRSIIKPEWIRMFSTPELQRLISGDNAEIDLEDLKKHTVYYGGFHGSHRVIIWLWDILASDFTPDERAMFLKFVTSCSRPPLLGFAYLKPPFSIRCVEVSDDQAVHVQARCFISSLAKGE

SEQ ID NO: 2080 - protein, 1011 aa, Artificial Sequence
  Synthetic polypeptide
MFTLSQTSRAWFIDRARQAREERLVQKERERAAVVIQAHVRSFLCRSRLQRDIRREIDDFFKADDPESTKRSALCIFKIARKLLFLFRIKEDNERFEKLCRSILSSMDAENEPKVWYVSLACSKDLTLLWIQQIKNILWYCCDFLKQLKPEILQDSRLITLYLTMLVTFTDTSTWKILRGKGESLRPAMNHICANIMGHLNQHGFYSVLQILLTRGLARPRPCLSKGTLTAAFSLALRPVIAAQFSDNLIRPFLIHIMSVPALVTHLSTVTPERLTVLESHDMLRKFIIFLRDQDRCRDVCESLEGCHTLCLMGNLLHLGSLSPRVLEEETDGFVSLLTQTLCYCRKYVSQKKSNLTHWHPVLGWFSQSVDYGLNESMHLITKQLQFLWGVPLIRIFFCDILSKKLLESQEPAHAQPASPQNVLPVKSLLKRAFQKSASVRNILRPVGGKRVDSAEVQKVCNICVLYQTSLTTLTQIRLQILTGLTYLDDLLPKLWAFICELGPHGGLKLFLECLNNDTEESKQLLAMLMLFCDCSRHLITILDDIEVYEEQISFKLEELVTISSFLNSFVFKMIWDGIVENAKGETLELFQSVHGWLMVLYERDCRRRFTPEDHWLRKDLKPSVLFQELDRDRKRAQLILQYIPHVIPHKNRVLLFRTMVTKEKEKLGLVETSSASPHVTHITIRRSRMLEDGYEQLRQLSQHAMKGVIRVKFVNDLGVDEAGIDQDGVFKEFLEEIIKRVFDPALNLFKTTSGDERLYPSPTSYIHENYLQLFEFVGKMLGKAVYEGIVVDVPFASFFLSQLLGHHHSVFYSSVDELPSLDSEFYKNLTSIKRYDGDITDLGLTLSYDEDVMGQLVCHELIPGGKTIPVTNENKISYIHLMAHFRMHTQIKNQTAALISGFRSIIKPEWIRMFSTPELQRLISGDNAEIDLEDLKKHTVYYGGFHGSHRVIIWLWDILASDFTPDERAMFLKFVTSCSRPPLLGFAYLKPPFSIRCVEVSDDQEPHFKK

SEQ ID NO: 2081 - protein, 98 aa, Artificial Sequence
  Synthetic polypeptide
MFSTPELQRLISGDNAEIDLEDLKKHTVYYGGFHGSHRVIIWLWDILASDFTPDERAMFLKFVTSCSRPPLLGFAYLKPPFSIRCVEVSDDQEPHFKK

SEQ ID NO: 2082 - protein, 122 aa, Artificial Sequence
  Synthetic polypeptide
TQIKNQTAALISGFRSIIKPEWIRMFSTPELQRLISGDNAEIDLEDLKKHTVYYGGFHGSHRVIIWLWDILASDFTPDERAMFLKFVTSCSRPPLLGFAYLKPPFSIRCVEVSDDQEPHFKK

SEQ ID NO: 2083 - protein, 298 aa, Artificial Sequence
  Synthetic polypeptide
MSSACDAGDHYPLHLLVWKNDYRQLEKELQGQNVEAVDPRGRTLLHLAVSLGHLESARVLLRHKADVTKENRQGWTVLHEAVSTGDPEMVYTVLQHRDYHNTSMALEGVPELLQKILEAPDFYVQMKWEFTSWVPLVSRICPNDVCRIWKSGAKLRVDITLLGFENMSWIRGRRSFIFKGEDNWAELMEVNHDDKVVTTERFDLSQEMERLTLDLMKPKSREVERRLTSPVINTSLDTKNIAFERTKSGFWGWRTDKAEVVNGYEAKVYTVNNVNVITKIRTEHLTEEEKKRYKVPQQ

SEQ ID NO: 2084 - protein, 20 aa, Artificial Sequence
  Synthetic polypeptide
ASGKVVPNCASISHCWDLKT

SEQ ID NO: 2085 - protein, 15 aa, Artificial Sequence
  Synthetic polypeptide
MLGTDSAQEDSFDSL

SEQ ID NO: 2086 - protein, 8 aa, Artificial Sequence
  Synthetic polypeptide
NATITSSQ

SEQ ID NO: 2087 - protein, 162 aa, Artificial Sequence
  Synthetic polypeptide
MSDQIKFIMDSLNKEPFRKNYNLITFDSLEPMQLLQVLSDVLAEIDPKQLVDIREEMPEQTAKRMLSLLGILKYKPSGNATDMSTFRQGLVIGSKPVIYPVLHWLLQRTNELKKRAYLARFLIKLEVPSEFLQDETVADTNKQARWLTPVIPALWEAKADGS

SEQ ID NO: 2088 - protein, 279 aa, Artificial Sequence
  Synthetic polypeptide
MSDQIKFIMDSLNKEPFRKNYNLITFDSLEPMQLLQVLSDVLAEIDPKQLVDIREEMPEQTAKRMLSLLGILKYKPSGNATDMSTFRQGLVIGSKPVIYPVLHWLLQRTNELKKRAYLARFLIKLEVPSEFLQDETVADTNKQYEELMEAFKTLHKEYEQLKISGFSTAEIRKDISAMEEEKDQLIKRVEHLKKRVETAQNHQWMLKIARQLRVEKEREEYLAQQKQEQKNQLFHAVQRLQRVQNQLKSMRQAAADAKPETTQDAAAGELLEPRRQRLQ

SEQ ID NO: 2089 - protein, 249 aa, Artificial Sequence
  Synthetic polypeptide
MSDQIKFIMDSLNKEPFRKNYNLITFDSLEPMQLLQVLSDVLAEIDPKQLVDIREEMPEQTAKRMLSLLGILKYKPSGNATDMSTFRQGLVIGSKPVIYPVLHWLLQRTNELKKRAYLARFLIKLEVPSEFLQDETVADTNKQDISAMEEEKDQLIKRVEHLKKRVETAQNHQWMLKIARQLRVEKEREEYLAQQKQEQKNQLFHAVQRLQRVQNQLKSMRQAAADAKPETTQDAAAGELLEPRRQRLQ

SEQ ID NO: 2090 - protein, 8 aa, Artificial Sequence
  Synthetic polypeptide
NATITSSQ

SEQ ID NO: 2091 - protein, 12 aa, Artificial Sequence
  Synthetic polypeptide
SSSRYLDFLQQK

SEQ ID NO: 2092 - protein, 2 aa, Artificial Sequence
  Synthetic polypeptide
AT

SEQ ID NO: 2093 - protein, 538 aa, Artificial Sequence
  Synthetic polypeptide
MDPGDAAILESSLRILYRLFESVLPPLPAALQSRMNVIDHVRDMAAAGLHSNVRLLSSLLLTMSNNNPELFSPPQKYQLLVYHADSLFHDKEYRNAVSKYTMALQQKKALSKTSKVRPSTGNSASTPQSQCLPSEIEVKYKMAECYTMLKQDKDAIAILDGIPSRQRTPKINMMLANLYKKAGQERPSVTSYKEVLRQCPLALDAILGLLSLSVKGAEVASMTMNVIQTVPNLDWLSVWIKAYAFVHTGDNSRAISTICSLEKKSLLRDNVDLLGSLADLYFRAGDNKNSVLKFEQAQMLDPYLIKGMDVYGYLLAREGRLEDVENLGCRLFNISDQHAEPWVVSGCHSFYSKRYSRALYLGAKAIQLNSNSVQALLLKGAALRNMGRVQEAIIHFREAIRLAPCRLDCYEGLIECYLASNSIREAMVMANNVYKTLGANAQTLTLLATVCLEDPVTQEKAKTLLDKALTQRPDYIKAVVKKAELLSREQKYEDGIALLRNALANQSDCVLHRILGDFLVAVNEYQEAMDQYSIALSH

SEQ ID NO: 2094 - protein, 187 aa, Artificial Sequence
  Synthetic polypeptide
MDPGDAAILESSLRILYRLFESVLPPLPAALQSRMNVIDHVRDMAAAGLHSNVRLLSSLLLTMSNNNPELFSPPQKYQLLVYHADSLFHDKEYRNAVSKYTMALQQKKALSKTSKVRPSTGNSASTPQSQCLPSEIEVKYKMAECYTMLKQDKDAIAILDGIPSRQRTPKHIIVKKTPLTKIKRSGV

SEQ ID NO: 2095 - protein, 69 aa, Artificial Sequence
  Synthetic polypeptide
MDPGDAAILESSLRILYRLFESVLPPLPAALQSRMNVIDHVRDMAAAGLHSNVRLLSSLLLTMSNNNPF

SEQ ID NO: 2096 - protein, 42 aa, Artificial Sequence
  Synthetic polypeptide
SAAAAARGFAEQDECDRPRAGHGGRGAALQRAAPQQLVTYNE

SEQ ID NO: 2097 - protein, 73 aa, Artificial Sequence
  Synthetic polypeptide
MLVLVLGDLHIPHRCNSLPAKFKKLLVPGKIQHILCTGNLCTKESYDYLKTLAGDVHIVRGDFDEAGCGGSRL

SEQ ID NO: 2098 - protein, 77 aa, Artificial Sequence
  Synthetic polypeptide
MAGHRLVLVLGDLHIPHRCNSLPAKFKKLLVPGKIQHILCTGNLCTKESYDYLKTLAGDVHIVRGDFDEAGCGGSRL

SEQ ID NO: 2099 - protein, 105 aa, Artificial Sequence
  Synthetic polypeptide
MSRCALRGRDLALAIAGTVSFHGLLRLFRAGHRLVLVLGDLHIPHRCNSLPAKFKKLLVPGKIQHILCTGNLCTKESYDYLKTLAGDVHIVRGDFDEAGCGGSRL

SEQ ID NO: 2100 - protein, 454 aa, Artificial Sequence
  Synthetic polypeptide
MRPRGLPPLLVVLLGCWASVSAQTDATPAVTTEGLNSTEAALATFGTFPSTRPPGTPRAPGPSSGPRPTPVTDVAVLCVCDLSPAQCDINCCCDPDCSSVDFSVFSACSVPVVTGDSQFCSQKAVIYSLNFTANPPQRVFELVDQINPSIFCIHITNYKPALSFINPEVPDENNFDTLMKTSDGFTLNAESYVSFTTKLDIPTAAKYEYGVPLQTSDSFLRFPSSLTSSLCTDNNPAAFLVNQAVKCTRKINLEQCEEIEALSMAFYSSPEILRVPDSRKKVPITVQSIVIQSLNKTLTRREDTDVLQPTLVNAGHFSLCVNVVLEVKYSLTYTDAGEVTKADLSFVLGTVSSVVVPLQQKFEIHFLQENTQPVPLSGNPGYVVGLPLAAGFQPHKGSGIIQTTNRYGQLTILHSTTEQDCLALEGVRTPVLFGYTMQSGCKLRSSVEHSLGNT

SEQ ID NO: 2101 - protein, 440 aa, Artificial Sequence
  Synthetic polypeptide
MRPRGLPPLLVVLLGCWASVSAQTDATPAVTTEGLNSTEAALATFGTFPSTRPPGTPRAPGPSSGPRPTPVTDVAVLCVCDLSPAQCDINCCCDPDCSSVDFSVFSACSVPVVTGDSQFCSQKAVIYSLNFTANPPQRVFELVDQINPSIFCIHITNYKPALSFINPEVPDENNFDTLMKTSDGFTLNAESYVSFTTKLDIPTAAKYEYGVPLQTSDSFLRFPSSLTSSLCTDNNPAGQAYWFTPVIPALWEAEARGSLEVPDSRKKVPITVQSIVIQSLNKTLTRREDTDVLQPTLVNAGHFSLCVNVVLEVKYSLTYTDAGEVTKADLSFVLGTVSSVVVPLQQKFEIHFLQENTQPVPLSGNPGYVVGLPLAAGFQPHKGSGIIQTTNRYGQLTILHSTTEQDCLALEGVRTPVLFGYTMQSGCKLRSSVEHSLGNT

SEQ ID NO: 2102 - protein, 9 aa, Artificial Sequence
  Synthetic polypeptide
MATWDEKEH

SEQ ID NO: 2103 - protein, 246 aa, Artificial Sequence
  Synthetic polypeptide
MCVRSCFQSPRLQWVWRTAFLKHTQRRHQGSHRWTHLGGSTYRAVIFDMGGVLIPSPGRVAAEWEVQNRIPSGTILKALMEGGENGPWMRFMRAEITAEGFLREFGRLCSEMLKTSVPVDSFFSLLTSERVAKQFPVMTEAITQIRAKGLQTAVLSNNFYLPNQKSFLPLDRKQFDVIVESCMEGICKPDPRIYKLCLEQLGLQPSESIFLDDLGTNLKEAARLGIHTIKPMETGHSSRMDASAYK

SEQ ID NO: 2104 - protein, 273 aa, Artificial Sequence
  Synthetic polypeptide
MCVRSCFQSPRLQWVWRTAFLKHTQRRHQGSHRWTHLGGSTYRAVIFDMGGVLIPSPGRVAAEWEVQNRIPSGTILKALMEGGENGPWMRFMRAEITAEGFLREFGRLCSEMLKTSVPVDSFFSLLTSERVAKQFPVMTEAITQIRAKGLQTAVLSNNFYLPNQKSFLPLDRKQFDVIVESCMEGICKPDPRIYKLCLEQLGLQPSESIFLDDLGTNLKEAARLGIHTIKRQGFAVLPKLVSNSWAQAIYPPYPPKVPMETGHSSRMDASAYK

SEQ ID NO: 2105 - protein, 90 aa, Artificial Sequence
  Synthetic polypeptide
MLRAAARFGPRLGRRLLSAAATQAVPAPNQQPEVFCNQSRLKMSTPDITVLLETIKRKWELGHPPTTPRPRAFTCVMEKGRLSPQPGTLD

SEQ ID NO: 2106 - protein, 102 aa, Artificial Sequence
  Synthetic polypeptide
MATLSVIGSSSLIAYAVFHNIQKSPEIRPLFYLSFCDLLLGLCWLTETLLYGASVANKDIICYNLQAVGQARWLIPVIPALWEANEGRLPELRSPQPAWTTR

SEQ ID NO: 2107 - protein, 748 aa, Artificial Sequence
  Synthetic polypeptide
MDLYSTPAAALDRFVARRLQPRKEFVEKARRALGALAAALRERGGRLGAAAPRVLKTVKGGSSGRGTALKGGCDSELVIFLDCFKSYVDQRARRAEILSEMRASLESWWQNPVPGLRLTFPEQSVPGALQFRLTSVDLEDWMDVSLVPAFNVLGQAGSGVKPKPQVYSTLLNSGCQGGEHAACFTELRRNFVNIRPAKLKNLILLVKHWYHQVCLQGLWKETLPPVYALELLTIFAWEQGCKKDAFSLAEGLRTVLGLIQQHQHLCVFWTVNYGFEDPAVGQFLQRQLKRPRPVILDPADPTWDLGNGAAWHWDLLAQEAASCYDHPCFLRGMGDPVQSWKGPGLPRAGCSGLGHPIQLDPNQKTPENSKSLNAVYPRAGSKPPSCPAPGPTGAASIVPSVPGMALDLSQIPTKELDRFIQDHLKPSPQFQEQVKKAIDIILRCLHENCVHKASRVSKGGSFGRGTDLRDGCDVELIIFLNCFTDYKDQGPRRAEILDEMRAQLESWWQDQVPSLSLQFPEQNVPEALQFQLVSTALKSWTDVSLLPAFDAVGQLSSGTKPNPQVYSRLLTSGCQEGEHKACFAELRRNFMNIRPVKLKNLILLVKHWYRQVAAQNKGKGPAPASLPPAYALELLTIFAWEQGCRQDCFNMAQGFRTVLGLVQQHQQLCVYWTVNYSTEDPAMRMHLLGQLRKPRPLVLDPADPTWNVGHGSWELLAQEAAALGMQACFLSRDGTSVQPWDVMAEPIL

SEQ ID NO: 2108 - protein, 143 aa, Artificial Sequence
  Synthetic polypeptide
MVGQMYCYPGSHLARALTRALALALVLALLVGPFLSGLAGAIPAPGGRWARDGQVPPASRSRSVLLDVSAGQLLMVDGRHPDAVAWANLTNAIRETGWAFLELGTSGQYNDSLQAYAAGVVEAAVSEEMEACIGSQVDINLWS

SEQ ID NO: 2109 - protein, 40 aa, Artificial Sequence
  Synthetic polypeptide
MVNLAAMVWRRLLRKRWVLALVFGLSLVYFLSSTFKQMPH

SEQ ID NO: 2110 - protein, 19 aa, Artificial Sequence
  Synthetic polypeptide
SSGCRSSTSSAAPSSRCHI

SEQ ID NO: 2111 - protein, 63 aa, Artificial Sequence
  Synthetic polypeptide
MPPGTRACRVPRPGRRAPRPRRDGEPGGHGVAPASAEEVGARPGLRAVARLLPQQHLQADATL

SEQ ID NO: 2112 - protein, 62 aa, Artificial Sequence
  Synthetic polypeptide
MVNLAAMVWRRLLRKRWVLALVFGLSLVYFLSSTFKQYCIMKMCQLEDLRKICSMCNTDSWI

SEQ ID NO: 2113 - protein, 18 aa, Artificial Sequence
  Synthetic polypeptide
SSGCRSSTSSAAPSSSIV

SEQ ID NO: 2114 - protein, 72 aa, Artificial Sequence
  Synthetic polypeptide
MPPGTRACRVPRPGRRAPRPRRDGEPGGHGVAPASAEEVGARPGLRAVARLLPQQHLQAVLYNENVSIRRSA

SEQ ID NO: 2115 - protein, 69 aa, Artificial Sequence
  Synthetic polypeptide
MVNLAAMVWRRLLRKRWVLALVFGLSLVYFLSSTFKQTIIFLRTETLSVLFIDSPAPRILPATSWESKY

SEQ ID NO: 2116 - protein, 17 aa, Artificial Sequence
  Synthetic polypeptide
SSGCRSSTSSAAPSSRL

SEQ ID NO: 2117 - protein, 79 aa, Artificial Sequence
  Synthetic polypeptide
MPPGTRACRVPRPGRRAPRPRRDGEPGGHGVAPASAEEVGARPGLRAVARLLPQQHLQADYNILENRDLVCLVHRLSSP

SEQ ID NO: 2118 - protein, 78 aa, Artificial Sequence
  Synthetic polypeptide
MVNLAAMVWRRLLRKRWVLALVFGLSLVYFLSSTFKQTPPHSRVLSLLCLVTPEWWGAPGLRPLPSSLSDSGNLWAIV

SEQ ID NO: 2119 - protein, 29 aa, Artificial Sequence
  Synthetic polypeptide
SSGCRSSTSSAAPSSRHLLTVACCPFSVL

SEQ ID NO: 2120 - protein, 75 aa, Artificial Sequence
  Synthetic polypeptide
MPPGTRACRVPRPGRRAPRPRRDGEPGGHGVAPASAEEVGARPGLRAVARLLPQQHLQADTSSQSRVVPSLSCDP

SEQ ID NO: 2121 - protein, 165 aa, Artificial Sequence
  Synthetic polypeptide
MAAAAVDSAMEVVPALAEEAAPEVAGLSCLVNLPGEVLEYILCCGSLTAADIGRVSSTCRRLRELCQSSGKVWKEQFRVRWPSLMKHYSPTDYVNWLEEYKVRQKAGLEARKIVASFSKRFFSEHVPCNGFSDIENLEGPEIFFEDELVCILNMEGRRSEDRRTC

SEQ ID NO: 2122 - protein, 43 aa, Artificial Sequence
  Synthetic polypeptide
HLPAAARAVPEQREGVEGAVPGEVAFPYETLQPHRLRQLVGRV

SEQ ID NO: 2123 - protein, 212 aa, Artificial Sequence
  Synthetic polypeptide
MVLELNASDDRGIDIIRGPILSFASTRTIFKKGFKLVILDEADAMTQDAQNALRRVIEKFTENTRFCLICNYLSKIIPALQSRCTRFRFGPLTPELMVPRLEHVVEEEKVDISEDGMKALVTLSSGDMRRALNILQSTNMAFGKVTEETVYTCTGHPLKSDIANILDWMLNQDFTTAYRNITELKTLKGLALHDILTEIHLFVHRAPQVTCV

SEQ ID NO: 2124 - protein, 297 aa, Artificial Sequence
  Synthetic polypeptide
METSALKQQEQPAATKIRNLPWVEKYRPQTLNDLISHQDILSTIQKFINEDRLPHLLLYGPPGTGKTSTILACAKQLYKDKEFGSMVLELNASDDRGIDIIRGPILSFASTRTIFKKGFKLVILDEADAMTQDAQNALRRVIEKFTENTRFCLICNYLSKIIPALQSRCTRFRFGPLTPELMVPRLEHVVEEEKVDISEDGMKALVTLSSGDMRRALNILQSTNMAFGKVTEETVYTCTGHPLKSDIANILDWMLNQDFTTAYRNITELKTLKGLALHDILTEIHLFVHRAPQVTCV

SEQ ID NO: 2125 - protein, 276 aa, Artificial Sequence
  Synthetic polypeptide
MVEKYRPQTLNDLISHQDILSTIQKFINEDRLPHLLLYGPPGTGKTSTILACAKQLYKDKEFGSMVLELNASDDRGIDIIRGPILSFASTRTIFKKGFKLVILDEADAMTQDAQNALRRVIEKFTENTRFCLICNYLSKIIPALQSRCTRFRFGPLTPELMVPRLEHVVEEEKVDISEDGMKALVTLSSGDMRRALNILQSTNMAFGKVTEETVYTCTGHPLKSDIANILDWMLNQDFTTAYRNITELKTLKGLALHDILTEIHLFVHRAPQVTCV

SEQ ID NO: 2126 - protein, 66 aa, Artificial Sequence
  Synthetic polypeptide
MRKGVLKDPEIADLFYKDDPEELFIGLHEIGHGSFGAVYFATNAHTSEVVAIKKMSYSGKQTHEAG

SEQ ID NO: 2127 - protein, 61 aa, Artificial Sequence
  Synthetic polypeptide
MRKGVLKDPEIADLFYKDDPEELFIGLHEIGHGSFGAVYFPGVVVAACNPSYSRGCGGKIT

SEQ ID NO: 2128 - protein, 125 aa, Artificial Sequence
  Synthetic polypeptide
MSAAGLLAPAPAQAGAPPAPEYYPEEDEELESAEDDERSCRGRESDEDTEDASETDLAKHDEEDYVEMKEQMYQDKLASLKRQLQQLQEGTLQEYQKRMKKLDQQYKERIRNAEGNINTSWNWHK

SEQ ID NO: 2129 - protein, 216 aa, Artificial Sequence
  Synthetic polypeptide
MASVQQGEKQLFEKFWRGTFKAVATPRPESIIVASITARKPLPRTEPQNNPVVPAQDGPSEKLGQHLATEPLGTNSWERDKTCRELGATRGHSASHDKDLTPPPSSRGKKKKKKSTRKKRRRSSSYSPSPVKKKKKKSSKKHKRRRSFSKKRRHSSSSPKSKRRDEKRHKKQSRSRPRKSHRHRHHRCPSRSQSSESRPSSCESRDMDEIGNHHSQ

SEQ ID NO: 2130 - protein, 216 aa, Artificial Sequence; identical to SEQ ID NO: 2129
  Synthetic polypeptide

SEQ ID NO: 2131 - protein, 511 aa, Artificial Sequence
  Synthetic polypeptide
MASVQQGEKQLFEKFWRGTFKAVATPRPESIIVASITARKPLPRTEPQNNPVVPAQDGPSEKLGQHLATEPLGTNSWERDKTCRELGATRGHSASHDKDLTPPPSSRGKKKKKKSTRKKRRRSSSYSPSPVKKKKKKSSKKHKRRRSFSKKRRHSSSSPKSKRRDEKRHKKQSRSRPRKSHRHRHHRCPSRSQSSESRPSSCESRHRGRSPEEGQKSRRRHSRRCSKTLCKDSPEAQSSRPPSQPLQMLGYLSARGVITGSGSAADLFTKTASPLTTSRGRSQEYDSGNDTSSPPSTQTSSARSRGQEKGSPSGGLSKSRELNSGNTSDSGNSFTTSSPQNKGAMLENLSPTSRGRESRGFQSPCLECAEVKKSSLVPSTARSSPMKGCSRSSSYASTRSSSHSSRSPNPRASPRYTQSRSTSSEKRSYSRSPSYSSKSGKRSPPSRSSRSRRSPSYSRYSPSRERDPKYSEKDSQQRERERARRRRRSYSPMRKRRRDSPSHLEARRITR

SEQ ID NO: 2132 - protein, 1781 aa, Artificial Sequence
  Synthetic polypeptide
MLKFKYGARNPLDAGAAEPIASRASRLNLFFQGKPPFMTQQQMSPLSREGILDALFVLFEECSQPALMKIKHVSNFVRKYSDTIAELQELQPSAKDFEVRSLVGCGHFAEVQVVREKATGDIYAMKVMKKKALLAQEQVSFFEEERNILSRSTSPWIPQLQYAFQDKNHLYLVMEYQPGGDLLSLLNRYEDQLDENLIQFYLAELILAVHSVHLMGYVHRDIKPENILVDRTGHIKLVDFGSAAKMNSNKMVNAKLPIGTPDYMAPEVLTVMNGDGKGTYGLDCDWWSVGVIAYEMIYGRSPFAEGTSARTFNNIMNFQRFLKFPDDPKVSSDFLDLIQSLLCGQKERLKFEGLCCHPFFSKIDWNNIRNSPPPFVPTLKSDDDTSNFDEPEKNSWVSSSPCQLSPSGFSGEELPFVGFSYSKALGILGRSESVVSGLDSPAKTSSMEKKLLIKSKELQDSQDKCHKMEQEMTRLHRRVSEVEAVLSQKEVELKASETQRSLLEQDLATYITECSSLKRSLEQARMEVSQEDDKALQLLHDIREQSRKLQEIKEQEYQAQVEEMRLMMNQLEEDLVSARRRSDLYESELRESRLAAEEFKRKATECQHKLLKAKDQGKPEVGEYAKLEKINAEQQLKIQELQEKLEKAVKASTEATELLQNIRQAKERAERELEKLQNREDSSEGIRKKLVEAEERRHSLENKVKRLETMERRENRLKDDIQTKSQQIQQMADKILELEEKHREAQVSAQHLEVHLKQKEQHYEEKIKVLDNQIKKDLADKETLENMMQRHEEEAHEKGKILSEQKAMINAMDSKIRSLEQRIVELSEANKLAANSSLFTQRNMKAQEEMISELRQQKFYLETQAGKLEAQNRKLEEQLEKISHQDHSDKNRLLELETRLREVSLEHEEQKLELKRQLTELQLSLQERESQLTALQAARAALESQLRQAKTELEETTAEAEEEIQALTAHRDEIQRKFDALRNSCTVITDLEEQLNQLTEDNAELNNQNFYLSKQLDEASGANDEIVQLRSEVDHLRREITEREMQLTSQKQTMEALKTTCTMLEEQVMDLEALNDELLEKERQWEAWRSVLGDEKSQFECRVRELQRMLDTEKQSRARADQRITESRQVVELAVKEHKAEILALQQALKEQKLKAESLSDKLNDLEKKHAMLEMNARSLQQKLETERELKQRLLEEQAKLQQQMDLQKNHIFRLTQGLQEALDRADLLKTERSDLEYQLENIQVLYSHEKVKMEGTISQQTKLIDFLQAKMDQPAKKKKGLFSRRKEDPALPTQVPLQYNELKLALEKEKARCAELEEALQKTRIELRSAREEAAHRKATDHPHPSTPATARQQIAMSAIVRSPEHQPSAMSLLAPPSSRRKESSTPEEFSRRLKERMHHNIPHRFNVGLNMRATKCAVCLDTVHFGRQASKCLECQVMCHPKCSTCLPATCGLPAEYATHFTEAFCRDKMNSPGLQTKEPSSSLHLEGWMKVPRNNKRGQQGWDRKYIVLEGSKVLIYDNEAREAGQRPVEEFELCLPDGDVSIHGAVGASELANTAKADVPYILKMESHPHTTCWPGRTLYLLAPSFPDKQRWVTALESVVAGGRVSREKAEADAKLLGNSLLKLEGDDRLDMNCTLPFSDQVVLVGTEEGLYALNVLKNSLTHVPGIGAVFQIYIIKDLEKLLMIAGEERALCLVDVKKVKQSLAQSHLPAQPDISPNIFEAVKGCHLFGAGKIENGLCICAAMPSKVVILRYNENLSKYCIRKVTERDLVSKKKKR

SEQ ID NO: 2133 - protein, 1739 aa, Artificial Sequence
  Synthetic polypeptide
MLKFKYGARNPLDAGAAEPIASRASRLNLFFQGKPPFMTQQQMSPLSREGILDALFVLFEECSQPALMKIKHVSNFVRKYSDTIAELQELQPSAKDFEVRSLVGCGHFAEVQVVREKATGDIYAMKVMKKKALLAQEQVSFFEEERNILSRSTSPWIPQLQYAFQDKNHLYLVMEYQPGGDLLSLLNRYEDQLDENLIQFYLAELILAVHSVHLMGYVHRDIKPENILVDRTGHIKLVDFGSAAKMNSNKMVNAKLPIGTPDYMAPEVLTVMNGDGKGTYGLDCDWWSVGVIAYEMIYGRSPFAEGTSARTFNNIMNFQRFLKFPDDPKVSSDFLDLIQSLLCGQKERLKFEGLCCHPFFSKIDWNNIRNSPPPFVPTLKSDDDTSNFDEPEKNSWVSSSPCQLSPSGFSGEELPFVGFSYSKALGILGRSESVVSGLDSPAKTSSMEKKLLIKSKELQDSQDKCHKMEQEMTRLHRRVSEVEAVLSQKEVELKASETQRSLLEQDLATYITECSSLKRSLEQARMEVSQEDDKALQLLHDIREQSRKLQEIKEQEYQAQVEEMRLMMNQLEEDLVSARRRSDLYESELRESRLAAEEFKRKATECQHKLLKAKDQGKPEVGEYAKLEKINAEQQLKIQELQEKLEKAVKASTEATELLQNIRQAKERAERELEKLQNREDSSEGIRKKLVEAEELEEKHREAQVSAQHLEVHLKQKEQHYEEKIKVLDNQIKKDLADKETLENMMQRHEEEAHEKGKILSEQKAMINAMDSKIRSLEQRIVELSEANKLAANSSLFTQRNMKAQEEMISELRQQKFYLETQAGKLEAQNRKLEEQLEKISHQDHSDKNRLLELETRLREVSLEHEEQKLELKRQLTELQLSLQERESQLTALQAARAALESQLRQAKTELEETTAEAEEEIQALTAHRDEIQRKFDALRNSCTVITDLEEQLNQLTEDNAELNNQNFYLSKQLDEASGANDEIVQLRSEVDHLRREITEREMQLTSQKQTMEALKTTCTMLEEQVMDLEALNDELLEKERQWEAWRSVLGDEKSQFECRVRELQRMLDTEKQSRARADQRITESRQVVELAVKEHKAEILALQQALKEQKLKAESLSDKLNDLEKKHAMLEMNARSLQQKLETERELKQRLLEEQAKLQQQMDLQKNHIFRLTQGLQEALDRADLLKTERSDLEYQLENIQVLYSHEKVKMEGTISQQTKLIDFLQAKMDQPAKKKKGLFSRRKEDPALPTQVPLQYNELKLALEKEKARCAELEEALQKTRIELRSAREEAAHRKATDHPHPSTPATARQQIAMSAIVRSPEHQPSAMSLLAPPSSRRKESSTPEEFSRRLKERMHHNIPHRFNVGLNMRATKCAVCLDTVHFGRQASKCLECQVMCHPKCSTCLPATCGLPAEYATHFTEAFCRDKMNSPGLQTKEPSSSLHLEGWMKVPRNNKRGQQGWDRKYIVLEGSKVLIYDNEAREAGQRPVEEFELCLPDGDVSIHGAVGASELANTAKADVPYILKMESHPHTTCWPGRTLYLLAPSFPDKQRWVTALESVVAGGRVSREKAEADAKLLGNSLLKLEGDDRLDMNCTLPFSDQVVLVGTEEGLYALNVLKNSLTHVPGIGAVFQIYIIKDLEKLLMIAGEERALCLVDVKKVKQSLAQSHLPAQPDISPNIFEAVKGCHLFGAGKIENGLCICAAMPSKVVILRYNENLSKYCIRKVTERDLVSKKKKR

SEQ ID NO: 2134 - protein, 31 aa, Artificial Sequence
  Synthetic polypeptide
PPSFPPSSLTMTPPILMNQRRIRGFHPLRAS

SEQ ID NO: 2135 - protein, 1010 aa, Artificial Sequence
  Synthetic polypeptide
MLKFKYGARNPLDAGAAEPIASRASRLNLFFQGKPPFMTQQQMSPLSREGILDALFVLFEECSQPALMKIKHVSNFVRKYSDTIAELQELQPSAKDFEVRSLVGCGHFAEVQVVREKATGDIYAMKVMKKKALLAQEQVSFFEEERNILSRSTSPWIPQLQYAFQDKNHLYLVMEYQPGGDLLSLLNRYEDQLDENLIQFYLAELILAVHSVHLMGYVHRDIKPENILVDRTGHIKLVDFGSAAKMNSNKMVNAKLPIGTPDYMAPEVLTVMNGDGKGTYGLDCDWWSVGVIAYEMIYGRSPFAEGTSARTFNNIMNFQRFLKFPDDPKVSSDFLDLIQSLLCGQKERLKFEGLCCHPFFSKIDWNNIRNSPPPFVPTLKSDDDTSNFDEPEKNSWVSSSPCQLSPSGFSGEELPFVGFSYSKALGILGRSESVVSGLDSPAKTSSMEKKLLIKSKELQDSQDKCHKMEQEMTRLHRRVSEVEAVLSQKEVELKASETQRSLLEQDLATYITECSSLKRSLEQARMEVSQEDDKALQLLHDIREQSRKLQEIKEQEYQAQVEEMRLMMNQLEEDLVSARRRSDLYESELRESRLAAEEFKRKATECQHKLLKAKDQGKPEVGEYAKLEKINAEQQLKIQELQEKLEKAVKASTEATELLQNIRQAKERAERELEKLQNREDSSEGIRKKLVEAEERRHSLENKVKRLETMERRENRLKDDIQTKSQQIQQMADKILELEEKHREAQVSAQHLEVHLKQKEQHYEEKIKVLDNQIKKDLADKETLENMMQRHEEEAHEKGKILSEQKAMINAMDSKIRSLEQRIVELSEANKLAANSSLFTQRNMKAQEEMISELRQQKFYLETQAGKLEAQNRKLEEQLEKISHQDHSDKNRLLELETRLREVSLEHEEQKLELKRQLTELQLSLQERESQLTALQAARAALESQLRQAKTELEETTAEAEEEIQALTGLCKCCSLCRLLSIAWLAPHHPIGFSLHATSSEKPSLTIPSK

SEQ ID NO: 2136 - protein, 968 aa, Artificial Sequence
  Synthetic polypeptide
MLKFKYGARNPLDAGAAEPIASRASRLNLFFQGKPPFMTQQQMSPLSREGILDALFVLFEECSQPALMKIKHVSNFVRKYSDTIAELQELQPSAKDFEVRSLVGCGHFAEVQVVREKATGDIYAMKVMKKKALLAQEQVSFFEEERNILSRSTSPWIPQLQYAFQDKNHLYLVMEYQPGGDLLSLLNRYEDQLDENLIQFYLAELILAVHSVHLMGYVHRDIKPENILVDRTGHIKLVDFGSAAKMNSNKMVNAKLPIGTPDYMAPEVLTVMNGDGKGTYGLDCDWWSVGVIAYEMIYGRSPFAEGTSARTFNNIMNFQRFLKFPDDPKVSSDFLDLIQSLLCGQKERLKFEGLCCHPFFSKIDWNNIRNSPPPFVPTLKSDDDTSNFDEPEKNSWVSSSPCQLSPSGFSGEELPFVGFSYSKALGILGRSESVVSGLDSPAKTSSMEKKLLIKSKELQDSQDKCHKMEQEMTRLHRRVSEVEAVLSQKEVELKASETQRSLLEQDLATYITECSSLKRSLEQARMEVSQEDDKALQLLHDIREQSRKLQEIKEQEYQAQVEEMRLMMNQLEEDLVSARRRSDLYESELRESRLAAEEFKRKATECQHKLLKAKDQGKPEVGEYAKLEKINAEQQLKIQELQEKLEKAVKASTEATELLQNIRQAKERAERELEKLQNREDSSEGIRKKLVEAEELEEKHREAQVSAQHLEVHLKQKEQHYEEKIKVLDNQIKKDLADKETLENMMQRHEEEAHEKGKILSEQKAMINAMDSKIRSLEQRIVELSEANKLAANSSLFTQRNMKAQEEMISELRQQKFYLETQAGKLEAQNRKLEEQLEKISHQDHSDKNRLLELETRLREVSLEHEEQKLELKRQLTELQLSLQERESQLTALQAARAALESQLRQAKTELEETTAEAEEEIQALTGLCKCCSLCRLLSIAWLAPHHPIGFSLHATSSEKPSLTIPSK

SEQ ID NO: 2137 - protein, 31 aa, Artificial Sequence; identical to SEQ ID NO: 2134
  Synthetic polypeptide

SEQ ID NO: 2138 - protein, 574 aa, Artificial Sequence
  Synthetic polypeptide
MLKFKYGARNPLDAGAAEPIASRASRLNLFFQGKPPFMTQQQMSPLSREGILDALFVLFEECSQPALMKIKHVSNFVRKYSDTIAELQELQPSAKDFEVRSLVGCGHFAEVQVVREKATGDIYAMKVMKKKALLAQEQVSFFEEERNILSRSTSPWIPQLQYAFQDKNHLYLVMEYQPGGDLLSLLNRYEDQLDENLIQFYLAELILAVHSVHLMGYVHRDIKPENILVDRTGHIKLVDFGSAAKMNSNKMVNAKLPIGTPDYMAPEVLTVMNGDGKGTYGLDCDWWSVGVIAYEMIYGRSPFAEGTSARTFNNIMNFQRFLKFPDDPKVSSDFLDLIQSLLCGQKERLKFEGLCCHPFFSKIDWNNIRNSPPPFVPTLKSDDDTSNFDEPEKNSWVSSSPCQLSPSGFSGEELPFVGFSYSKALGILGRSESVVSGLDSPAKTSSMEKKLLIKSKELQDSQDKCHKMEQEMTRLHRRVSEVEAVLSQKEVELKASETQRSLLEQDLATYITECSSLKRSLEQARMEVSQEDDKALQLLHDIREQSRKLQEIKEQPCLVICISALAAFRLQSQR

SEQ ID NO: 2139 - protein, 31 aa, Artificial Sequence; identical to SEQ ID NO: 2134
  Synthetic polypeptide

SEQ ID NO: 2140 - protein, 31 aa, Artificial Sequence; identical to SEQ ID NO: 2134
  Synthetic polypeptide

SEQ ID NO: 2141 - protein, 461 aa, Artificial Sequence
  Synthetic polypeptide
MLKFKYGARNPLDAGAAEPIASRASRLNLFFQGKPPFMTQQQMSPLSREGILDALFVLFEECSQPALMKIKHVSNFVRKYSDTIAELQELQPSAKDFEVRSLVGCGHFAEVQVVREKATGDIYAMKVMKKKALLAQEQVSFFEEERNILSRSTSPWIPQLQYAFQDKNHLYLVMEYQPGGDLLSLLNRYEDQLDENLIQFYLAELILAVHSVHLMGYVHRDIKPENILVDRTGHIKLVDFGSAAKMNSNKMVNAKLPIGTPDYMAPEVLTVMNGDGKGTYGLDCDWWSVGVIAYEMIYGRSPFAEGTSARTFNNIMNFQRFLKFPDDPKVSSDFLDLIQSLLCGQKERLKFEGLCCHPFFSKIDWNNIRNSPPPFVPTLKSDDDTSNFDEPEKNSWVSSSPCQLSPSGFSGEELPFVGFSYSKALGILGRSETFAGMDEIRKTLGLVPGTWKSLGKCSLLL

SEQ ID NO: 2142 - protein, 34 aa, Artificial Sequence
  Synthetic polypeptide
MLKFKYGARNPLDAGAAEPIASRASRLNLFFQVV

SEQ ID NO: 2143 - protein, 308 aa, Artificial Sequence
  Synthetic polypeptide
MSAFCLGLVGRASAPAEPDSACCMELPAAAGDAVRSPAAAAALIFPGGSGELELALEEELALLAAGERPSDPGEHPQAEPGSLAEGAGPQPPPSQDPELLSVIRQKEKDLVLAARLGKALLERNQDMSRQYEQMHKELTDKLEHLEQEKHELRRRFENREGEWEGRVSELESDVKQLQDELERQQIHLREADREKSRAVQELSEQNQRLLDQLSRASEVERQLSMQVHALREDFREKNSSTNQHIIRLESLQAEIKMLSDRKRELEHRLSATLEENDLLQGTVEELQDRVLILERQGHDKDLQSSEKD

SEQ ID NO: 2144 - protein, 52 aa, Artificial Sequence
  Synthetic polypeptide
MLSDRKRELEHRLSATLEENDLLQGTVEELQDRVLILERQGHDKDLQSSEKD

SEQ ID NO: 2145 - protein, 842 aa, Artificial Sequence
  Synthetic polypeptide
MAADTQVSETLKRFAGKVTTASVKERREILSELGKCVAGKDLPEGAVKGLCKLFCLTLHRYRDAASRRALQAAIQQLAEAQPEATAKNLLHSLQSSGIGSKAGVPSKSSGSAALLALTWTCLLVRIVFPSRAKRQGDIWNKLVEVQCLLLLEVLGGSHKHAVDGAVKKLTKLWKENPGLVEQYLSAILSLEPNQNYAGMLGLLVQFCTSHKEMDVVSQHKSALLDFYMKNILMSKVKPPKYLLDSCAPLLRYLSHSEFKDLILPTIQKSLLRSPENVIETISSLLASVTLDLSQYAMDIVKGLAGHLKSNSPRLMDEAVLALRNLARQCSDSSAMESLTKHLFAILGGSEGKLTVVAQKMSVLSGIGSVSHHVVSGPSSQVLNGIVAELFIPFLQQEVHEGTLVHAVSVLALWCNRFTMEVPKKLTEWFKKAFSLKTSTSAVRHAYLQCMLASYRGDTLLQALDLLPLLIQTVEKAASQSTQVPTITEGVAAALLLLKLSVADSQAEAKLSSFWQLIVDEKKQVFTSEKFLVMASEDALCTVLHLTERLFLDHPHRLTGNKVQQYHRALVAVLLSRTWHVRRQAQQTVRKLLSSLGGFKLAHGLLEELKTVLSSHKVLPLEALVTDAGEVTEAGKAYVPPRVLQEALCVISGVPGLKGDVTDTEQLAQEMLIISHHPSLVAVQSGLWPALLARMKIDPEAFITRHLDQIIPRMTTQSPLNQSSMNAMGSLSVLSPDRVLPQLISTITASVQNPALRLVTREEFAIMQTPAGELYDKSIIQSAQQDSIKKANMKRENKAYSFKEQIIELELKEIVSSVRAGTLSCSYDIPAIWNSAWHNPGAH

SEQ ID NO: 2146 - protein, 31 aa, Artificial Sequence
  Synthetic polypeptide
MDDLGNKHGRHPALLTPSPYPLSFQVTLILP

SEQ ID NO: 2147 - protein, 157 aa, Artificial Sequence
  Synthetic polypeptide
MSGQLERCEREWHELEGEFQELQETHRIYKQKLEELAALQTLCSSSISKQKKHLKDLKLTLQRCKRHASREEAELVQQMAANIKERQDVFFDMEAYLPKKNGLYLNLVLGNVNVTLLSNQAKFAYKDEYEKFKLYLTIILLLGAVACRFVLHYRSLR

SEQ ID NO: 2148 - protein, 136 aa, Artificial Sequence
  Synthetic polypeptide
LQETHRIYKQKLEELAALQTLCSSSISKQKKHLKDLKLTLQRCKRHASREEAELVQQMAANIKERQDVFFDMEAYLPKKNGLYLNLVLGNVNVTLLSNQAKFAYKDEYEKFKLYLTIILLLGAVACRFVLHYRSLR

SEQ ID NO: 2149 - protein, 154 aa, Artificial Sequence
  Synthetic polypeptide
MSGRSVRAETRSRAKDDIKRVMAAIEKVRKWEKKWVTVGDTSLRIYKWVPVTEPKVDDKNKNKKKGKDEKCGSEVTTPENSSSPGMMDMHDDNSNQSSIADASPIKQENSSNSSPAPEPNSAVPSDGTEAKVDEAQADGKEHPGAEGGQGVRTA

SEQ ID NO: 2150 - protein, 147 aa, Artificial Sequence
  Synthetic polypeptide
MKDCPMPRNAARISEKRKEYMDACGEANNQNFQQRYHAEEVEERFGRFKPGVISEELQDALGVTDKSLPPFIYRMRQLGYPPGWLKEAELENSGLALYDGKDGTDGETEVGEIQQNKSVTYDLSKLVNYPGFNISTPRGIPDSSMGF

SEQ ID NO: 2151 - protein, 385 aa, Artificial Sequence
  Synthetic polypeptide
MAAEVYFGDLELFEPFDHPEESIPKPVHTRFKDDDGDEEDENGVGDAELRERLRQCEETIEQLRAENQELKRKLNILTRPSGILVNDTKLDGPILQILFMNNAISKQYHQEIEEFVSNLVKRFEEQQKNDVEKTSFNLLPQPSSIVLEEDHKVEESCAIKNNKEAFSVVGSVLYFTNFCLDKLGQPLLNENPQLSEGWEIPKYHQVFSHIVSLEGQEIQVKAKRPKPHCFNCGSEEHQMKDCPMPRNAARISEKRKEYMDACGEANNQNFQQRYHAEEVEERFGRFKPGVISEELQDALGVTDKSLPPFIYRMRQLGYPPGWLKEAELENSGLALYDGKDGTDGETEVGEIQQNKSVTYDLSKLVNYPGFNISTPRGIPDSSMGF

SEQ ID NO: 2152 - protein, 1464 aa, Artificial Sequence
  Synthetic polypeptide
MWNDIELLTNDDTGSGYLSVGSRKEHGTALYQVDLLVKISSEKASLNPKIQACSLSDGFIIVADQSVILLDSICRSLQLHLVFDTEVDVVGLCQEGKFLLVGERSGNLHLIHVTSKQTLLTNAFVQKANDENRRTYQNLVIEKDGSNEGTYYMLLLTYSGFFCITNLQLLKIQQAIENVDFSTAKKLQGQIKSSFISTENYHTLGCLSLVAGDLASEVPVIIGGTGNCAFSKWEPDSSKKGMTVKNLIDAEIIKGAKKFQLIDNLLFVLDTDNVLSLWDIYTLTPVWNWPSLHVEEFLLTTEADSPSSVTWQGITNLKLIALTASANKKMKNLMVYSLPTMEILYSLEVSSVSSLVQTGISTDTIYLLEGVCKNDPKLSEDSVSVLVLRCLTEALPENRLSRLLHKHRFAEAESFAIQFGLDVELVYKVKSNHILEKLALSSVDASEQTEWQQLVDDAKENLHKIQDDEFVVNYCLKAQWITYETTQEMLNYAKTRLLKKEDKTALIYSDGLKEVLRAHAKLTTFYGAFGPEKFSGSSWIEFLNNEDDLKDIFLQLKEGNLVCAQYLWLRHRANFESRFDVKMLESLLNSMSASVSLQKLCPWFKNDVIPFVRRTVPEGQIILAKWLEQAARNLELTDKANWPENGLQLAEIFFTAEKTDELGLASSWHWISLKDYQNTEEVCQLRTLVNNLRELITLHRKYNCKLALSDFEKENTTTIVFRMFDKVLAPELIPSILEKFIRVYMREHDLQEEELLLLYIEDLLNRCSSKSTSLFETAWEAKAMAVIACLSDTDLIFDAVLKIMYAAVVPWSAAVEQLVKQHLEMDHPKVKLLQESYKLMEMKKLLRGYGIREVNLLNKEIMRVVRYILKQDVPSSLEDALKVAQAFMLSDDEIYSLRIIDLIDREQGEDCLLLLKSLPPAEAEKTAERVIIWARLALQEEPDHSKEGKAWRMSVAKTSVDILKILCDIQKDNLQKKDECEEMLKLFKEVASLQENFEVFLSFEDYSNSSLVADLREQHIKAHEVAQAKHKPGSTPEPIAAEVRSPSMESKLHRQALALQMSKQELEAELTLRALKDGNIKTALKKCSDLFKYHCNADTGKLLFLTCQKLCQMLADNVPVTVPVGLNLPSMIHDLASQAATICSPDFLLDALELCKHTLMAVELSRQCQMDDCGILMKASFGTHKDPYEEWSYSDFFSEDGIVLESQMVLPVIYELISSLVPLAESKRYPLESTSLPYCSLNEGDGLVLPVINSISALLQNLQESSQWELALRFVVGSFGTCLQHSVSNFMNATLSEKLFGETTLVKSRHVVMELKEKAVIFIRENATTLLHKVFNCRLVDLDLALGYCTLLPQKDVFENLWKLIDKAWQNYDKILAISLVGSELASLYQEIEMGLKFRELSTDAQWGIRLGKLGLFAIILLLLTLWVHAVFMSCETHMKICSFFPEWRPRAHREEGTTPDALP

SEQ ID NO: 2153 - protein, 1416 aa, Artificial Sequence
  Synthetic polypeptide
MWNDIELLTNDDTGSGYLSVGSRKEHGTALYQVDLLVKISSEKASLNPKIQACSLSDGFIIVADQSVILLDSICRSLQLHLVFDTEVDVVGLCQEGKFLLVGERSGNLHLIHVTSKQTLLTNAFVQKANDENRRTYQNLVIEKDGSNEGTYYMLLLTYSGFFCITNLQLLKIQQAIENVDFSTAKKLQGQIKSSFISTENYHTLGCLSLVAGDLASEVPVIIGGTGNCAFSKWEPDSSKKGMTVKNLIDAEIIKGAKKFQLIDNLLFVLDTDNVLSLWDIYTLTPVWNWPSLHVEEFLLTTEADSPSSVTWQGITNLKLIALTASANKKMKNLMVYSLPTMEILYSLEVSSVSSLVQTGISTDTIYLLEGVCKNDPKLSEDSVSVLVLRCLTEALPENRLSRLLHKHRFAEAESFAIQFGLDVELVYKVKSNHILEKLALSSVDASEQTEWQQLVDDAKENLHKIQDDEFVVNYCLKAQWITYETTQEMLNYAKTRLLKKEDKTALIYSDGLKEVLRAHAKLTTFYGAFGPEKFSGSSWIEFLNNEDDLKDIFLQLKEGNLVCAQYLWLRHRANFESRFDVKMLESLLNSMSASVSLQKLCPWFKNDVIPFVRRTVPEGQIILAKWLEQAARNLELTDKANWPENGLQLAEIFFTAEKTDELGLASSWHWISLKDYQNTEEVCQLRTLVNNLRELITLHRKYNCKLALSDFEKENTTTIVFRMFDKVLAPELIPSILEKFIRVYMREHDLQEEELLLLYIEDLLNRCSSKSTSLFETAWEAKAMAVIACLSDTDLIFDAVLKIMYAAVVPWSAAVEQLVKQHLEMDHPKVKLLQESYKLMEMKKLLRGYGIREVNLLNKEIMRVVRYILKQDVPSSLEDALKVAQAFMLSDDEIYSLRIIDLIDREQGEDCLLLLKSLPPAEAEKTAERVIIWARLALQEEPDHSKEGKAWRMSVAKTSVDILKILCDIQKDNLQKKDECEEMLKLFKEVASLQENFEVFLSFEDYSNSSLVADLREQHIKAHEVAQAKHKPGSTPEPIAAEVRSPSMESKLHRQALALQMSKQELEAELTLRALKDGNIKTALKKCSDLFKYHCNADTGKLLFLTCQKLCQMLADNVPVTVPVGLNLPSMIHDLASQAATICSPDFLLDALELCKHTLMAVELSRQCQMDDCGILMKASFGTHKDPYEEWSYSDFFSEDGIVLESQMVLPVIYELISSLVPLAESKRYPLESTSLPYCSLNEGDGLVLPVINSISALLQNLQESSQWELALRFVVGSFGTCLQHSVSNFMNATLSEKLFGETTLVKSRHVVMELKEKAVIFIRENATTLLHKVFNCRLVDLDLALGYCTLLPQKDVFENLWKLIDKAWQNYDKILAISLVGSELASLYQEIEMGLKFRELSTDAQWGIRLGKLGL

SEQ ID NO: 2154 - protein, 1418 aa, Artificial Sequence
  Synthetic polypeptide
MWNDIELLTNDDTGSGYLSVGSRKEHGTALYQVDLLVKISSEKASLNPKIQACSLSDGFIIVADQSVILLDSICRSLQLHLVFDTEVDVVGLCQEGKFLLVGERSGNLHLIHVTSKQTLLTNAFVQKANDENRRTYQNLVIEKDGSNEGTYYMLLLTYSGFFCITNLQLLKIQQAIENVDFSTAKKLQGQIKSSFISTENYHTLGCLSLVAGDLASEVPVIIGGTGNCAFSKWEPDSSKKGMTVKNLIDAEIIKGAKKFQLIDNLLFVLDTDNVLSLWDIYTLTPVWNWPSLHVEEFLLTTEADSPSSVTWQGITNLKLIALTASANKKMKNLMVYSLPTMEILYSLEVSSVSSLVQTGISTDTIYLLEGVCKNDPKLSEDSVSVLVLRCLTEALPENRLSRLLHKHRFAEAESFAIQFGLDVELVYKVKSNHILEKLALSSVDASEQTEWQQLVDDAKENLHKIQDDEFVVNYCLKAQWITYETTQEMLNYAKTRLLKKEDKTALIYSDGLKEVLRAHAKLTTFYGAFGPEKFSGSSWIEFLNNEDDLKDIFLQLKEGNLVCAQYLWLRHRANFESRFDVKMLESLLNSMSASVSLQKLCPWFKNDVIPFVRRTVPEGQIILAKWLEQAARNLELTDKANWPENGLQLAEIFFTAEKTDELGLASSWHWISLKDYQNTEEVCQLRTLVNNLRELITLHRKYNCKLALSDFEKENTTTIVFRMFDKVLAPELIPSILEKFIRVYMREHDLQEEELLLLYIEDLLNRCSSKSTSLFETAWEAKAMAVIACLSDTDLIFDAVLKIMYAAVVPWSAAVEQLVKQHLEMDHPKVKLLQESYKLMEMKKLLRGYGIREVNLLNKEIMRVVRYILKQDVPSSLEDALKVAQAFMLSDDEIYSLRIIDLIDREQGEDCLLLLKSLPPAEAEKTAERVIIWARLALQEEPDHSKEGKAWRMSVAKTSVDILKILCDIQKDNLQKKDECEEMLKLFKEVASLQENFEVFLSFEDYSNSSLVADLREQHIKAHEVAQAKHKPGSTPEPIAAEVRSPSMESKLHRQALALQMSKQELEAELTLRALKDGNIKTALKKCSDLFKYHCNADTGKLLFLTCQKLCQMLADNVPVTVPVGLNLPSMIHDLASQAATICSPDFLLDALELCKHTLMAVELSRQCQMDDCGILMKASFGTHKDPYEEWSYSDFFSEDGIVLESQMVLPVIYELISSLVPLAESKRYPLESTSLPYCSLNEGDGLVLPVINSISALLQNLQESSQWELALRFVVGSFGTCLQHSVSNFMNATLSEKLFGETTLVKSRHVVMELKEKAVIFIRENATTLLHKVFNCRLVDLDLALGYCTLLPQKDVFENLWKLIDKAWQNYDKILAISLVGSELASLYQEIEMGLKFRELSTDAQWGIRLGKLGLLS

SEQ ID NO: 2155 - protein, 1459 aa, Artificial Sequence
  Synthetic polypeptide
MWNDIELLTNDDTGSGYLSVGSRKEHGTALYQVDLLVKISSEKASLNPKIQACSLSDGFIIVADQSVILLDSICRSLQLHLVFDTEVDVVGLCQEGKFLLVGERSGNLHLIHVTSKQTLLTNAFVQKANDENRRTYQNLVIEKDGSNEGTYYMLLLTYSGFFCITNLQLLKIQQAIENVDFSTAKKLQGQIKSSFISTENYHTLGCLSLVAGDLASEVPVIIGGTGNCAFSKWEPDSSKKGMTVKNLIDAEIIKGAKKFQLIDNLLFVLDTDNVLSLWDIYTLTPVWNWPSLHVEEFLLTTEADSPSSVTWQGITNLKLIALTASANKKMKNLMVYSLPTMEILYSLEVSSVSSLVQTGISTDTIYLLEGVCKNDPKLSEDSVSVLVLRCLTEALPENRLSRLLHKHRFAEAESFAIQFGLDVELVYKVKSNHILEKLALSSVDASEQTEWQQLVDDAKENLHKIQDDEFVVNYCLKAQWITYETTQEMLNYAKTRLLKKEDKTALIYSDGLKEVLRAHAKLTTFYGAFGPEKFSGSSWIEFLNNEDDLKDIFLQLKEGNLVCAQYLWLRHRANFESRFDVKMLESLLNSMSASVSLQKLCPWFKNDVIPFVRRTVPEGQIILAKWLEQAARNLELTDKANWPENGLQLAEIFFTAEKTDELGLASSWHWISLKDYQNTEEVCQLRTLVNNLRELITLHRKYNCKLALSDFEKENTTTIVFRMFDKVLAPELIPSILEKFIRVYMREHDLQEEELLLLYIEDLLNRCSSKSTSLFETAWEAKAMAVIACLSDTDLIFDAVLKIMYAAVVPWSAAVEQLVKQHLEMDHPKVKLLQESYKLMEMKKLLRGYGIREVNLLNKEIMRVVRYILKQDVPSSLEDALKVAQAFMLSDDEIYSLRIIDLIDREQGEDCLLLLKSLPPAEAEKTAERVIIWARLALQEEPDHSKEGKAWRMSVAKTSVDILKILCDIQKDNLQKKDECEEMLKLFKEVASLQENFEVFLSFEDYSNSSLVADLREQHIKAHEVAQAKHKPGSTPEPIAAEVRSPSMESKLHRQALALQMSKQELEAELTLRALKDGNIKTALKKCSDLFKYHCNADTGKLLFLTCQKLCQMLADNVPVTVPVGLNLPSMIHDLASQAATICSPDFLLDALELCKHTLMAVELSRQCQMDDCGILMKASFGTHKDPYEEWSYSDFFSEDGIVLESQMVLPVIYELISSLVPLAESKRYPLESTSLPYCSLNEGDGLVLPVINSISALLQNLQESSQWELALRFVVGSFGTCLQHSVSNFMNATLSEKLFGETTLVKSRHVVMELKEKAVIFIRENATTLLHKVFNCRLVDLDLALGYCTLLPQKDVFENLWKLIDKAWQNYDKILAISLVGSELASLYQEIEMGLKFRELSTDAQWGIRLGKLGISFQPVFRQHFLTKKDLIKALVENIDMDTSLILEYCRGQGRRIA

SEQ ID NO: 2156 - protein, 18 aa, Artificial Sequence
  Synthetic polypeptide
MDTSLILEYCRGQGRRIA

SEQ ID NO: 2157 - protein, 84 aa, Artificial Sequence
  Synthetic polypeptide
MAADISESSGADCKGDPRNSAKLDADYPLRVLYCGVCSLPTEYCEYMPDVAKCRQWLEKNFPNEFAKLTVGVVAGTCSPSYSGG

SEQ ID NO: 2158 - protein, 138 aa, Artificial Sequence
  Synthetic polypeptide
MAADISESSGADCKGDPRNSAKLDADYPLRVLYCGVCSLPTEYCEYMPDVAKCRQWLEKNFPNEFAKLTVENSPKQEAGISEGQGTAGEEEEKKKQKRGGRGQIKQKKKTVPQKVTIAKIPRAKKKYVTRVCGLATFA

SEQ ID NO: 2159 - protein, 262 aa, Artificial Sequence
  Synthetic polypeptide
MIIKEYRIPLPMTVEEYRIAQLYMIQKKSRNETYGEGSGVEILENRPYTDGPGGSGQYTHKVYHVGMHIPSWFRSILPKAALRVVEESWNAYPYTRTRFTCPFVEKFSIDIETFYKTDAGENPDVFNLSPVEKNQLTIDFIDIVKDPVPHNEYKTEEDPKLFQSTKTQRGPLSENWIEEYKKQVFPIMCAYKLCKVEFRYWGMQSKIERFIHDTGKGINEMWHFTHTRMPHNPSLMSQSPHACIHGQNSPREASGRKIQRDT

SEQ ID NO: 2160 - protein, 10 aa, Artificial Sequence
  Synthetic polypeptide
QVLQQKERLC

SEQ ID NO: 2161 - protein, 1015 aa, Artificial Sequence
  Synthetic polypeptide
MGFFSLSSERNESVIHYPESTEPEIQQEMSTSQPDCNVDSCSVSSGYGTFCISELNLYKSKDPKEFMEHIDVPKGQYVAPAVPAESLVDGVKNENFYIQTPEECHVSLKEDVSISPGEFEHNFLGENKVSEVYSGKTNSNAITSWAQKLKQNQPKRAHVEDGGSRSKQGNEQSKKTPIEKSDFAAATHPRAFYLSKPDETPNAWMSDSGTGLTYWKLEEKDMHHSLPETLEKTFISLSSTDVSPNQSNTSNEMKLPSLKDIYYKKQRENKQLPERNLTSASNPNHPPEVLTLDPTLHMKPKQQISGIQPHGLPNALDDRISFSPDSVLEPSMSSPSDIDSFSQASNVTSQLPGFPKYPSHTKASPVDSWKNQTFQNESRTSSTFPSVYTITSNDISVNTVDEENTVMVASASVSQSQLPGTANSVPECISLTSLEDPVILSKIRQNLKEKHARHIADLRAYYESEINSLKQKLEAKEISGVEDWKITNQILVDRCGQLDSALHEATSRVRTLENKNNLLEIEVNDLRERFSAASSASKILQERIEEMRTSSKEKDNTIIRLKSRLQDLEEAFENAYKLSDDKEAQLKQENKMFQDLLGEYESLGKEHRRVKDALNTTENKLLDAYTQISDLKRMISKLEAQVKQVEHENMLSLRHNSRIHVRPSRANTLATSDVSRRKWLIPGAEYSIFTGQPLDTQDSNVDNQLEETCSLGHRSPLEKDSSPGSSSTSLLIKKQRETSDTPIMRALKELDEGKIFKNWGTQTEKEDTSNINPRQTETSVNASRSPEKCAQQRQKRLNSASQRSSSLPPSNRKSSTPTKREIMLTPVTVAYSPKRSPKENLSPGFSHLLSKNESSPIRFDILLDDLDTVPVSTLQRTNPRKQLQFLPLDDSEEKTYSEKATDNHVNHSSCPEPVPNGVKKVSVRTAWEKNKSVSYEQCKPVSVTPQGNDFEYTAKIRTLAETERFFDELTKEKDQIEAALSRMPSPGGRITLQTRLNQFQILERLRWKDCLSPGV

SEQ ID NO: 2162 - protein, 1137 aa, Artificial Sequence
  Synthetic polypeptide
MEEFDLVKTLHKTSSSVGSDENSLHSLGLNLNTDRSSPHLSTNGVSSFSGKTRPSVIQGTVEVLTSLMQELQNSGKTDSELWKNCEHIQEEIKNLVKLQTSSASLASCEGNSSNKQVSSESQMGFFSLSSERNESVIHYPESTEPEIQQEMSTSQPDCNVDSCSVSSGYGTFCISELNLYKSKDPKEFMEHIDVPKGQYVAPAVPAESLVDGVKNENFYIQTPEECHVSLKEDVSISPGEFEHNFLGENKVSEVYSGKTNSNAITSWAQKLKQNQPKRAHVEDGGSRSKQGNEQSKKTPIEKSDFAAATHPRAFYLSKPDETPNAWMSDSGTGLTYWKLEEKDMHHSLPETLEKTFISLSSTDVSPNQSNTSNEMKLPSLKDIYYKKQRENKQLPERNLTSASNPNHPPEVLTLDPTLHMKPKQQISGIQPHGLPNALDDRISFSPDSVLEPSMSSPSDIDSFSQASNVTSQLPGFPKYPSHTKASPVDSWKNQTFQNESRTSSTFPSVYTITSNDISVNTVDEENTVMVASASVSQSQLPGTANSVPECISLTSLEDPVILSKIRQNLKEKHARHIADLRAYYESEINSLKQKLEAKEISGVEDWKITNQILVDRCGQLDSALHEATSRVRTLENKNNLLEIEVNDLRERFSAASSASKILQERIEEMRTSSKEKDNTIIRLKSRLQDLEEAFENAYKLSDDKEAQLKQENKMFQDLLGEYESLGKEHRRVKDALNTTENKLLDAYTQISDLKRMISKLEAQVKQVEHENMLSLRHNSRIHVRPSRANTLATSDVSRRKWLIPGAEYSIFTGQPLDTQDSNVDNQLEETCSLGHRSPLEKDSSPGSSSTSLLIKKQRETSDTPIMRALKELDEGKIFKNWGTQTEKEDTSNINPRQTETSVNASRSPEKCAQQRQKRLNSASQRSSSLPPSNRKSSTPTKREIMLTPVTVAYSPKRSPKENLSPGFSHLLSKNESSPIRFDILLDDLDTVPVSTLQRTNPRKQLQFLPLDDSEEKTYSEKATDNHVNHSSCPEPVPNGVKKVSVRTAWEKNKSVSYEQCKPVSVTPQGNDFEYTAKIRTLAETERFFDELTKEKDQIEAALSRMPSPGGRITLQTRLNQFQILERLRWKDCLSPGV

SEQ ID NO: 2163 - protein, 1167 aa, Artificial Sequence
  Synthetic polypeptide
MEEFDLVKTLHKTSSSVGSDENSLHSLGLNLNTDRSSPHLSTNGVSSFSGKTRPSVIQGTVEVLTSLMQELQNSGKTDSELWKNCETRWLQLFNLVEKQCQEQIVAQQEQFHNQIQHIQEEIKNLVKLQTSSASLASCEGNSSNKQVSSESQMGFFSLSSERNESVIHYPESTEPEIQQEMSTSQPDCNVDSCSVSSGYGTFCISELNLYKSKDPKEFMEHIDVPKGQYVAPAVPAESLVDGVKNENFYIQTPEECHVSLKEDVSISPGEFEHNFLGENKVSEVYSGKTNSNAITSWAQKLKQNQPKRAHVEDGGSRSKQGNEQSKKTPIEKSDFAAATHPRAFYLSKPDETPNAWMSDSGTGLTYWKLEEKDMHHSLPETLEKTFISLSSTDVSPNQSNTSNEMKLPSLKDIYYKKQRENKQLPERNLTSASNPNHPPEVLTLDPTLHMKPKQQISGIQPHGLPNALDDRISFSPDSVLEPSMSSPSDIDSFSQASNVTSQLPGFPKYPSHTKASPVDSWKNQTFQNESRTSSTFPSVYTITSNDISVNTVDEENTVMVASASVSQSQLPGTANSVPECISLTSLEDPVILSKIRQNLKEKHARHIADLRAYYESEINSLKQKLEAKEISGVEDWKITNQILVDRCGQLDSALHEATSRVRTLENKNNLLEIEVNDLRERFSAASSASKILQERIEEMRTSSKEKDNTIIRLKSRLQDLEEAFENAYKLSDDKEAQLKQENKMFQDLLGEYESLGKEHRRVKDALNTTENKLLDAYTQISDLKRMISKLEAQVKQVEHENMLSLRHNSRIHVRPSRANTLATSDVSRRKWLIPGAEYSIFTGQPLDTQDSNVDNQLEETCSLGHRSPLEKDSSPGSSSTSLLIKKQRETSDTPIMRALKELDEGKIFKNWGTQTEKEDTSNINPRQTETSVNASRSPEKCAQQRQKRLNSASQRSSSLPPSNRKSSTPTKREIMLTPVTVAYSPKRSPKENLSPGFSHLLSKNESSPIRFDILLDDLDTVPVSTLQRTNPRKQLQFLPLDDSEEKTYSEKATDNHVNHSSCPEPVPNGVKKVSVRTAWEKNKSVSYEQCKPVSVTPQGNDFEYTAKIRTLAETERFFDELTKEKDQIEAALSRMPSPGGRITLQTRLNQFQILERLRWKDCLSPGV

SEQ ID NO: 2164 - protein, 6 aa, Artificial Sequence
  Synthetic polypeptide
MARGLL

SEQ ID NO: 2165 - protein, 296 aa, Artificial Sequence
  Synthetic polypeptide
MEEPPVREEEEEEGEEDEERDEVGPEGALGKSPFQLTAEDVYDISYLLGRELMALGSDPRVTQLQFKVVRVLEMLEALVNEGSLALEELKMERDHLRKEVEGLRRQSPPASGEVNLGPNKMVVDLTDPNRPRFTLQELRDVLQERNKLKSQLLVVQEELQCYKSGLIPPREGPGGRREKDAVVTSAKNAGRNKEEKTIIKKLFTPEARETRSPPGGTSNSRRAALRAVTLTTKVCSFTPEPARSRTHQKEETPNTSEHQKEQTLDTPPLRTVTLTARVRGFILEVSETKNPPIPDT

SEQ ID NO: 2166 - protein, 273 aa, Artificial Sequence
  Synthetic polypeptide
MEEERGSALAAESALEKNVAELTVMDVYDIASLVGHEFERVIDQHGCEAIARLMPKVVRVLEILEVLVSRHHVAPELDELRLELDRLRLERMDRIEKERKHQKELELVEDVWRGEAQDLLSQIAQLQEENKQLMTNLSHKDVNFSEEEFQKHEGMSERERQVMKKLKEVVDKQRDEIRAKDRELGLKNEDVEALQQQQTRLMKINHDLRHRVTVVEAQGKALIEQKVELEADLQTKEQEMGSLRAELGKLRERLQGEHSQNGEEEPEGDMIQL

SEQ ID NO: 2167 - protein, 121 aa, Artificial Sequence
  Synthetic polypeptide
MSMSERERQVMKKLKEVVDKQRDEIRAKDRELGLKNEDVEALQQQQTRLMKINHDLRHRVTVVEAQGKALIEQKVELEADLQTKEQEMGSLRAELGKLRERLQGEHSQNGEEEPEGDMIQL

SEQ ID NO: 2168 - protein, 161 aa, Artificial Sequence
  Synthetic polypeptide
MEEERGSALAAESALEKNVAELTVMDVYDIASLVGHEFERVIDQHGCEAIARLMPKVVRVLEILEVLVSRHHVAPELDELRLELDRLRLERMDRIEKERKHQKELELVEDVWRGEAQDLLSQIAQLQEENKQLMTNLSHKDVNFSEEEFQKHEARCSGAHL

SEQ ID NO: 2169 - protein, 288 aa, Artificial Sequence
  Synthetic polypeptide
MEHVTEGSWESLPVPLHPQVLGALRELGFPYMTPVQSATIPLFMRNKDVAAEAVTGSGKTLAFVIPILEILLRREEKLKKSQVGAIIITPTRELAIQIDEVLSHFTKHFPEFSQILWIGGRNPGEDVERFKQQGGNIIVATPGRLEDMFRRKAEGLDLASCVRSLDVLVLDEADRLLDMGFEASINTILEFLPKQRRTGLFSATQTQEVENLVRAGLRNPVRVSVKEKGVAASSAQKTPSRLENYYMVAHACNPSTLELRWEDRRMPGQEFDTSLGNILRVCLLKKKK

SEQ ID NO: 2170 - protein, 360 aa, Artificial Sequence
  Synthetic polypeptide
MEHVTEGSWESLPVPLHPQVLGALRELGFPYMTPVQSATIPLFMRNKDVAAEAVTGSGKTLAFVIPILEILLRREEKLKKSQVGAIIITPTRELAIQIDEVLSHFTKHFPEFSQILWIGGRNPGEDVERFKQQGGNIIVATPGRLEDMFRRKAEGLDLASCVRSLDVLVLDEADRLLDMGFEASINTILEFLPKQRRTGLFSATQTQEVENLVRAGLRNPVRVSVKEKGVAASSAQKTPSRLENYYMVCKADEKFNQLVHFLRNHKQEKHLVFFSTCACVEYYGKALEVLVKGVKIMCIHGKMKYKRNKIFMEFRKLQSGILVCTDVMARGIDIPEVNWVLQYDPPSNARFSTGDYVPPV

SEQ ID NO: 2171 - protein, 1284 aa, Artificial Sequence
  Synthetic polypeptide
MSGSTQPVAQTWRATEPRYPPHSLSYPVQIARTHTDVGLLEYQHHSRDYASHLSPGSIIQPQRRRPSLLSEFQPGNERSQELHLRPESHSYLPELGKSEMEFIESKRPRLELLPDPLLRPSPLLATGQPAGSEDLTKDRSLTGKLEPVSPPSPPHTDPELELVPPRLSKEELIQNMDRVDREITMVEQQISKLKKKQQQLEEEAAKPPEPEKPVSPPPIESKHRSLVQIIYDENRKKAEAAHRILEGLGPQVELPLYNQPSDTRQYHENIKINQAMRKKLILYFKRRNHARKQWEQKFCQRYDQLMEAWEKKVERIENNPRRRAKESKVREYYEKQFPEIRKQRELQERMQSRVGQRGSGLSMSAARSEHEVSEIIDGLSEQENLEKQMRQLAVIPPMLYDADQQRIKFINMNGLMADPMKVYKDRQVMNMWSEQEKETFREKFMQHPKNFGLIASFLERKTVAECVLYYYLTKKNENYKSLVRRSYRRRGKSQQQQQQQQQQQQQQQQQPMPRSSQEEKDEKEKEKEAEKEEEKPEVENDKEDLLKEKTDDTSGEDNDEKEAVASKGRKTANSQGRRKGRITRSMANEANSEEAITPQQSAELASMELNESSRWTEEEMETAKKGLLEHGRNWSAIARMVGSKTVSQCKNFYFNYKKRQNLDEILQQHKLKMEKERNARRKKKKAPAAASEEAAFPPVVEDEEMEASGVSGNEEEMVEEAEALHASGNEVPRGECSGPATVNNSSDTESIPSPHTEAAKDTGQNGPKPPATLGADGPPPGPPTPPPEDIPAPTEPTPASEATGAPTPPPAPPSPSAPPPVVPKEEKEEETAAAPPVEEGEEQKPPAAEELAVDTGKAEEPVKSECTEEAEEGPAKGKDAEAAEATAEGALKAEKKEGGSGRATTAKSSGAPQDSDSSATCSADEVDEAEGGDKNRLLSPRPSLLTPTGDPRANASPQKPLDLKQLKQRAAAIPPIQVTKVHEPPREDAAPTKPAPPAPPPPQNLQPESDAPQQPGSSPRGKSRSPAPPADKEAFAAEAQKLPGDPPCWTSGLPFPVPPREVIKASPHAPDPSAFSYAPPGHPLPLGLHDTARPVLPRPPTISNPPPLISSAKHPSVLERQIGAISQGMSVQLHVPYSEHAKAPVGPVTMGLPLPMDPKKLAPFSGVKQEQLSPRGQAGPPESLGVPTAQEASVLRGTALGSVPGGSITKGIPSTRVPSDSAITYRGSITHGTPADVLYKGTITRIIGEDSPSRLDRGREDSLPKGHVIYEGKKGHVLSYEGMQ

SEQ ID NO: 2172 - protein, 1274 aa, Artificial Sequence
  Synthetic polypeptide
MSGSTQPVAQTWRATEPRYPPHSLSYPVQIARTHTDVGLLEYQHHSRDYASHLSPGSIIQPQRRRPSLLSEFQPGNERSQELHLRPESHSYLPELGKSEMEFIESKRPRLELLPDPLLRPSPLLATGQPAGSEDLTKDRSLTGKLEPVSPPSPPHTDPELELVPPRLSKEELIQNMDRVDREITMVEQQISKLKKKQQQLEEEAAKPPEPEKPVSPPPIESKHRSLVQIIYDENRKKAEAAHRILEGLGPQVELPLYNQPSDTRQYHENIKINQAMRKKLILYFKRRNHARKQWEQKFCQRYDQLMEAWEKKVERIENNPRRRAKESKVREYYEKQFPEIRKQRELQERMQRVGQRGSGLSMSAARSEHEVSEIIDGLSEQENLEKQMRQLAVIPPMLYDADQQRIKFINMNGLMADPMKVYKDRQVMNMWSEQEKETFREKFMQHPKNFGLIASFLERKTVAECVLYYYLTKKNENYKSLVRRSYRRRGKSQQQQQQQQQQQQQQQQQPMPRSSQEEKDEKEKEKEAEKEEEKPEVENDKEDLLKEKTDDTSGEDNDEKEAVASKGRKTANSQGRRKGRITRSMANEANSEEAITPQQSAELASMELNESSRWTEEEMETAKKGLLEHGRNWSAIARMVGSKTVSQCKNFYFNYKKRQNLDEILQQHKLKMEKERNARRKKKKAPAAASEEAAFPPVVEDEEMEASGVSGNEEEMVEEAEATVNNSSDTESIPSPHTEAAKDTGQNGPKPPATLGADGPPPGPPTPPPEDIPAPTEPTPASEATGAPTPPPAPPSPSAPPPVVPKEEKEEETAAAPPVEEGEEQKPPAAEELAVDTGKAEEPVKSECTEEAEEGPAKGKDAEAAEATAEGALKAEKKEGGSGRATTAKSSGAPQDSDSSATCSADEVDEAEGGDKNRLLSPRPSLLTPTGDPRANASPQKPLDLKQLKQRAAAIPPIQVTKVHEPPREDAAPTKPAPPAPPPPQNLQPESDAPQQPGSSPRGKSRSPAPPADKEAEKPVFFPAFAAEAQKLPGDPPCWTSGLPFPVPPREVIKASPHAPDPSAFSYAPPGHPLPLGLHDTARPVLPRPPTISNPPPLISSAKHPSVLERQIGAISQGMSVQLHVPYSEHAKAPVGPVTMGLPLPMDPKKLAPFSGVKQEQLSPRGQAGPPESLGVPTAQEASVLRGTALGSVPGGSITKGIPSTRVPSDSAITYRGSITHGTPADVLYKGTITRIIGEDSPSRLDRGREDSLPKGHVIYEGKKGHVLSYEGMQ

SEQ ID NO: 2173 - protein, 1291 aa, Artificial Sequence
  Synthetic polypeptide
MSGSTQPVAQTWRATEPRYPPHSLSYPVQIARTHTDVGLLEYQHHSRDYASHLSPGSIIQPQRRRPSLLSEFQPGNERSQELHLRPESHSYLPELGKSEMEFIESKRPRLELLPDPLLRPSPLLATGQPAGSEDLTKDRSLTGKLEPVSPPSPPHTDPELELVPPRLSKEELIQNMDRVDREITMVEQQISKLKKKQQQLEEEAAKPPEPEKPVSPPPIESKHRSLVQIIYDENRKKAEAAHRILEGLGPQVELPLYNQPSDTRQYHENIKINQAMRKKLILYFKRRNHARKQWEQKFCQRYDQLMEAWEKKVERIENNPRRRAKESKVREYYEKQFPEIRKQRELQERMQSRVGQRGSGLSMSAARSEHEVSEIIDGLSEQENLEKQMRQLAVIPPMLYDADQQRIKFINMNGLMADPMKVYKDRQVMNMWSEQEKETFREKFMQHPKNFGLIASFLERKTVAECVLYYYLTKKNENYKSLVRRSYRRRGKSQQQQQQQQQQQQQQQQQPMPRSSQEEKDEKEKEKEAEKEEEKPEVENDKEDLLKEKTDDTSGEDNDEKEAVASKGRKTANSQGRRKGRITRSMANEANSEEAITPQQSAELASMELNESSRWTEEEMETAKKGLLEHGRNWSAIARMVGSKTVSQCKNFYFNYKKRQNLDEILQQHKLKMEKERNARRKKKKAPAAASEEAAFPPVVEDEEMEASGVSGNEEEMVEEAEALHASGNEVPRGECSGPATVNNSSDTESIPSPHTEAAKDTGQNGPKPPATLGADGPPPGPPTPPPEDIPAPTEPTPASEATGAPTPPPAPPSPSAPPPVVPKEEKEEETAAAPPVEEGEEQKPPAAEELAVDTGKAEEPVKSECTEEAEEGPAKGKDAEAAEATAEGALKAEKKEGGSGRATTAKSSGAPQDSDSSATCSADEVDEAEGGDKNRLLSPRPSLLTPTGDPRANASPQKPLDLKQLKQRAAAIPPIVTKVHEPPREDAAPTKPAPPAPPPPQNLQPESDAPQQPGSSPRGKSRSPAPPADKEAEKPVFFPAFAAEAQKLPGDPPCWTSGLPFPVPPREVIKASPHAPDPSAFSYAPPGHPLPLGLHDTARPVLPRPPTISNPPPLISSAKHPSVLERQIGAISQGMSVQLHVPYSEHAKAPVGPVTMGLPLPMDPKKLAPFSGVKQEQLSPRGQAGPPESLGVPTAQEASVLRGTALGSVPGGSITKGIPSTRVPSDSAITYRGSITHGTPADVLYKGTITRIIGEDSPSRLDRGREDSLPKGHVIYEGKKGHVLSYEGMQ

SEQ ID NO: 2174 - protein, 1275 aa, Artificial Sequence
  Synthetic polypeptide
MSGSTQPVAQTWRATEPRYPPHSLSYPVQIARTHTDVGLLEYQHHSRDYASHLSPGSIIQPQRRRPSLLSEFQPGNERSQELHLRPESHSYLPELGKSEMEFIESKRPRLELLPDPLLRPSPLLATGQPAGSEDLTKDRSLTGKLEPVSPPSPPHTDPELELVPPRLSKEELIQNMDRVDREITMVEQQISKLKKKQQQLEEEAAKPPEPEKPVSPPPIESKHRSLVQIIYDENRKKAEAAHRILEGLGPQVELPLYNQPSDTRQYHENIKINQAMRKKLILYFKRRNHARKQWEQKFCQRYDQLMEAWEKKVERIENNPRRRAKESKVREYYEKQFPEIRKQRELQERMQSRVGQRGSGLSMSAARSEHEVSEIIDGLSEQENLEKQMRQLAVIPPMLYDADQQRIKFINMNGLMADPMKVYKDRQVMNMWSEQEKETFREKFMQHPKNFGLIASFLERKTVAECVLYYYLTKKNENYKSLVRRSYRRRGKSQQQQQQQQQQQQQQQQQPMPRSSQEEKDEKEKEKEAEKEEEKPEVENDKEDLLKEKTDDTSGEDNDEKEAVASKGRKTANSQGRRKGRITRSMANEANSEEAITPQQSAELASMELNESSRWTEEEMETAKKGLLEHGRNWSAIARMVGSKTVSQCKNFYFNYKKRQNLDEILQQHKLKMEKERNARRKKKKAPAAASEEAAFPPVVEDEEMEASGVSGNEEEMVEEAEATVNNSSDTESIPSPHTEAAKDTGQNGPKPPATLGADGPPPGPPTPPPEDIPAPTEPTPASEATGAPTPPPAPPSPSAPPPVVPKEEKEEETAAAPPVEEGEEQKPPAAEELAVDTGKAEEPVKSECTEEAEEGPAKGKDAEAAEATAEGALKAEKKEGGSGRATTAKSSGAPQDSDSSATCSADEVDEAEGGDKNRLLSPRPSLLTPTGDPRANASPQKPLDLKQLKQRAAAIPPIQVTKVHEPPREDAAPTKPAPPAPPPPQNLQPESDAPQQPGSSPRGKSRSPAPPADKEAEKPVFFPAFAAEAQKLPGDPPCWTSGLPFPVPPREVIKASPHAPDPSAFSYAPPGHPLPLGLHDTARPVLPRPPTISNPPPLISSAKHPSVLERQIGAISQGMSVQLHVPYSEHAKAPVGPVTMGLPLPMDPKKLAPFSGVKQEQLSPRGQAGPPESLGVPTAQEASVLRGTALGSVPGGSITKGIPSTRVPSDSAITYRGSITHGTPADVLYKGTITRIIGEDSPSRLDRGREDSLPKGHVIYEGKKGHVLSYEGMQ

SEQ ID NO: 2175 - protein, 845 aa, Artificial Sequence
  Synthetic polypeptide
MWSEQEKETFREKFMQHPKNFGLIASFLERKTVAECVLYYYLTKKNENYKSLVRRSYRRRGKSQQQQQQQQQQQQQQQQQPMPRSSQEEKDEKEKEKEAEKEEEKPEVENDKEDLLKEKTDDTSGEDNDEKEAVASKGRKTANSQGRRKGRITRSMANEANSEEAITPQQSAELASMELNESSRWTEEEMETAKKGLLEHGRNWSAIARMVGSKTVSQCKNFYFNYKKRQNLDEILQQHKLKMEKERNARRKKKKAPAAASEEAAFPPVVEDEEMEASGVSGNEEEMVEEAEATVNNSSDTESIPSPHTEAAKDTGQNGPKPPATLGADGPPPGPPTPPPEDIPAPTEPTPASEATGAPTPPPAPPSPSAPPPVVPKEEKEEETAAAPPVEEGEEQKPPAAEELAVDTGKAEEPVKSECTEEAEEGPAKGKDAEAAEATAEGALKAEKKEGGSGRATTAKSSGAPQDSDSSATCSADEVDEAEGGDKNRLLSPRPSLLTPTGDPRANASPQKPLDLKQLKQRAAAIPPIQVTKVHEPPREDAAPTKPAPPAPPPPQNLQPESDAPQQPGSSPRGKSRSPAPPADKEAEKPVFFPAFAAEAQKLPGDPPCWTSGLPFPVPPREVIKASPHAPDPSAFSYAPPGHPLPLGLHDTARPVLPRPPTISNPPPLISSAKHPSVLERQIGAISQGMSVQLHVPYSEHAKAPVGPVTMGLPLPMDPKKLAPFSGVKQEQLSPRGQAGPPESLGVPTAQEASVLRGTALGSVPGGSITKGIPSTRVPSDSAITYRGSITHGTPADVLYKGTITRIIGEDSPSRLDRGREDSLPKGHVIYEGKKGHVLSYEGMQ

SEQ ID NO: 2176 - protein, 1292 aa, Artificial Sequence
  Synthetic polypeptide
MSGSTQPVAQTWRATEPRYPPHSLSYPVQIARTHTDVGLLEYQHHSRDYASHLSPGSIIQPQRRRPSLLSEFQPGNERSQELHLRPESHSYLPELGKSEMEFIESKRPRLELLPDPLLRPSPLLATGQPAGSEDLTKDRSLTGKLEPVSPPSPPHTDPELELVPPRLSKEELIQNMDRVDREITMVEQQISKLKKKQQQLEEEAAKPPEPEKPVSPPPIESKHRSLVQIIYDENRKKAEAAHRILEGLGPQVELPLYNQPSDTRQYHENIKINQAMRKKLILYFKRRNHARKQWEQKFCQRYDQLMEAWEKKVERIENNPRRRAKESKVREYYEKQFPEIRKQRELQERMQSRVGQRGSGLSMSAARSEHEVSEIIDGLSEQENLEKQMRQLAVIPPMLYDADQQRIKFINMNGLMADPMKVYKDRQVMNMWSEQEKETFREKFMQHPKNFGLIASFLERKTVAECVLYYYLTKKNENYKSLVRRSYRRRGKSQQQQQQQQQQQQQQQQQPMPRSSQEEKDEKEKEKEAEKEEEKPEVENDKEDLLKEKTDDTSGEDNDEKEAVASKGRKTANSQGRRKGRITRSMANEANSEEAITPQQSAELASMELNESSRWTEEEMETAKKGLLEHGRNWSAIARMVGSKTVSQCKNFYFNYKKRQNLDEILQQHKLKMEKERNARRKKKKAPAAASEEAAFPPVVEDEEMEASGVSGNEEEMVEEAEALHASGNEVPRGECSGPATVNNSSDTESIPSPHTEAAKDTGQNGPKPPATLGADGPPPGPPTPPPEDIPAPTEPTPASEATGAPTPPPAPPSPSAPPPVVPKEEKEEETAAAPPVEEGEEQKPPAAEELAVDTGKAEEPVKSECTEEAEEGPAKGKDAEAAEATAEGALKAEKKEGGSGRATTAKSSGAPQDSDSSATCSADEVDEAEGGDKNRLLSPRPSLLTPTGDPRANASPQKPLDLKQLKQRAAAIPPIQVTKVHEPPREDAAPTKPAPPAPPPPQNLQPESDAPQQPGSSPRGKSRSPAPPADKEAEKPVFFPAFAAEAQKLPGDPPCWTSGLPFPVPPREVIKASPHAPDPSAFSYAPPGHPLPLGLHDTARPVLPRPPTISNPPPLISSAKHPSVLERQIGAISQGMSVQLHVPYSEHAKAPVGPVTMGLPLPMDPKKLAPFSGVKQEQLSPRGQAGPPESLGVPTAQEASVLRGTALGSVPGGSITKGIPSTRVPSDSAITYRGSITHGTPADVLYKGTITRIIGEDSPSRLDRGREDSLPKGHVIYEGKKGHVLSYEGMQ

SEQ ID NO: 2177 - protein, 635 aa, Artificial Sequence
  Synthetic polypeptide
MSGSTQPVAQTWRATEPRYPPHSLSYPVQIARTHTDVGLLEYQHHSRDYASHLSPGSIIQPQRRRPSLLSEFQPGNERSQELHLRPESHSYLPELGKSEMEFIESKRPRLELLPDPLLRPSPLLATGQPAGSEDLTKDRSLTGKLEPVSPPSPPHTDPELELVPPRLSKEELIQNMDRVDREITMVEQQISKLKKKQQQLEEEAAKPPEPEKPVSPPPIESKHRSLVQIIYDENRKKAEAAHRILEGLGPQVELPLYNQPSDTRQYHENIKINQAMRKKLILYFKRRNHARKQWEQKFCQRYDQLMEAWEKKVERIENNPRRRAKESKVREYYEKQFPEIRKQRELQERMQSRVGQRGSGLSMSAARSEHEVSEIIDGLSEQENLEKQMRQLAVIPPMLYDADQQRIKFINMNGLMADPMKVYKDRQVMNMWSEQEKETFREKFMQHPKNFGLIASFLERKTVAECVLYYYLTKKNENYKSLVRRSYRRRGKSQQQQQQQQQQQQQQQQQPMPRSSQEEKDEKEKEKEAEKEEEKPEVENDKEDLLKEKTDDTSGEDNDEKEAVASKGRKTANSQGRRKGRITRSMANEANSEEAITPQQSAELGAPTSAACVEVGPDQRHVGLPSTAPAQHKGS

SEQ ID NO: 2178 - protein, 634 aa, Artificial Sequence
  Synthetic polypeptide
MSGSTQPVAQTWRATEPRYPPHSLSYPVQIARTHTDVGLLEYQHHSRDYASHLSPGSIIQPQRRRPSLLSEFQPGNERSQELHLRPESHSYLPELGKSEMEFIESKRPRLELLPDPLLRPSPLLATGQPAGSEDLTKDRSLTGKLEPVSPPSPPHTDPELELVPPRLSKEELIQNMDRVDREITMVEQQISKLKKKQQQLEEEAAKPPEPEKPVSPPPIESKHRSLVQIIYDENRKKAEAAHRILEGLGPQVELPLYNQPSDTRQYHENIKINQAMRKKLILYFKRRNHARKQWEQKFCQRYDQLMEAWEKKVERIENNPRRRAKESKVREYYEKQFPEIRKQRELQERMQRVGQRGSGLSMSAARSEHEVSEIIDGLSEQENLEKQMRQLAVIPPMLYDADQQRIKFINMNGLMADPMKVYKDRQVMNMWSEQEKETFREKFMQHPKNFGLIASFLERKTVAECVLYYYLTKKNENYKSLVRRSYRRRGKSQQQQQQQQQQQQQQQQQPMPRSSQEEKDEKEKEKEAEKEEEKPEVENDKEDLLKEKTDDTSGEDNDEKEAVASKGRKTANSQGRRKGRITRSMANEANSEEAITPQQSAELGAPTSAACVEVGPDQRHVGLPSTAPAQHKGS

SEQ ID NO: 2179 - protein, 205 aa, Artificial Sequence
  Synthetic polypeptide
MWSEQEKETFREKFMQHPKNFGLIASFLERKTVAECVLYYYLTKKNENYKSLVRRSYRRRGKSQQQQQQQQQQQQQQQQQPMPRSSQEEKDEKEKEKEAEKEEEKPEVENDKEDLLKEKTDDTSGEDNDEKEAVASKGRKTANSQGRRKGRITRSMANEANSEEAITPQQSAELGAPTSAACVEVGPDQRHVGLPSTAPAQHKGS

SEQ ID NO: 2180 - protein, 167 aa, Artificial Sequence
  Synthetic polypeptide
MGARASGGPLARAGLLLLLLLLLLLGLLAPGAQGARGRGGAEKNSYRRTVNTFSQSVSSLFGEDNVRAAQKFLARLTERFVLGVDMFVETLWKVWTELLDVLGLDGWTLSVMIAVLIRSGEFGHRNTKKHREKTAMRNEKQGLEGRSHKPRNTGTTRSWKRRGRILP

SEQ ID NO: 2181 - protein, 102 aa, Artificial Sequence
  Synthetic polypeptide
MTPSPAKHRAKMDDIVVVAQGSQASRNVSNDPDVIKLQEIPTFQPLLKGLLSGQTSPTNAKLEKLDSQQVLQLCLRYQDHLHQCAEAVAFDQNALVKRIKEL

SEQ ID NO: 2182 - protein, 121 aa, Artificial Sequence
  Synthetic polypeptide
MGSEQSSEAESRPNDLNSSVTPSPAKHRAKMDDIVVVAQGSQASRNVSNDPDVIKLQEIPTFQPLLKGLLSGQTSPTNAKLEKLDSQQVLQLCLRYQDHLHQCAEAVAFDQNALVKRIKEL

SEQ ID NO: 2183 - protein, 73 aa, Artificial Sequence
  Synthetic polypeptide
MGSEQSSEAESRPNDLNSSGLLSGQTSPTNAKLEKLDSQQVLQLCLRYQDHLHQCAEAVAFDQNALVKRIKEL

SEQ ID NO: 2184 - protein, 93 aa, Artificial Sequence
  Synthetic polypeptide
MAAPEEHDSPTEASQPIVEEEETKTFKDLGVTDVLCEACDQLGWTKPTKIQIEAIPLALQEISRSQPRPTESEFPGMGPGIYIYVSLIDYSEA

SEQ ID NO: 2185 - protein, 94 aa, Artificial Sequence
  Synthetic polypeptide
MRDRLPDLTACRKNDDGDTVVVVEKDHFMDDFFHQVEEIRNSIDKITQYVEEVKKNHSIILSAPNPEGKIKEELEDLNKEIKKTANKIRAKLKG

SEQ ID NO: 2186 - protein, 7 aa, Artificial Sequence
  Synthetic polypeptide
WRHSCCG

SEQ ID NO: 2187 - protein, 729 aa, Artificial Sequence
  Synthetic polypeptide
MYGASGGRAKPERKSGAKEEAGPGGAGGGGSRVELLVFGYACKLFRDDERALAQEQGQHLIPWMGDHKILIDRYDGRGHLHDLSEYDAEYSTWNRDYQLSEEEARIEALCDEERYLALHTDLLEEEARQEEEYKRLSEALAEDGSYNAVGFTYGSDYYDPSEPTEEEEPSKQREKNEAENLEENEEPFVAPLGLSVPSDVELPPTAKMHAIIERTASFVCRQGAQFEIMLKAKQARNSQFDFLRFDHYLNPYYKFIQKAMKEGRYTVLAENKSDEKKKSGVSSDNEDDDDEEDGNYLHPSLFASKKCNRLEELMKPLKVVDPDHPLAALVRKAQADSSTPTPHNADGAPVQPSQVEYTADSTVAAMYYSYYMLPDGTYCLAPPPPGIDVTTYYSTLPAGVTVSNSPGVTTTAPPPPGTTPLPPPTTAETSSGATSTTTTTSALAPVAAIIPPPPDVQPVIDKLAEYVARNGLKFETSVRAKNDQRFEFLQPWHQYNAYYEFKKQFFLQKEGGDSMQAVSAPEEAPTDSAPEKPSDAGEDGAPEDAAEVGARAGSGGKKEASSSKTVPDGKLVKASFAPISFAIKAKENDLLPLEKNRVKLDDDSDDDEESKEGQESSSSAANTNPAVAPPCVVVEEKKPQLTQEELEAKQAKQKLEDRLAAAAREKLAQASKESKEKQLQAERKRKAALFLQTLKNPLPEAEAGKIEESPFSVEEQKIRHHMFSLISGS

SEQ ID NO: 2188 - protein, 522 aa, Artificial Sequence
  Synthetic polypeptide
MHAIIERTASFVCRQGAQFEIMLKAKQARNSQFDFLRFDHYLNPYYKFIQKAMKEGRYTVLAENKSDEKKKSGVSSDNEDDDDEEDGNYLHPSLFASKKCNRLEELMKPLKVVDPDHPLAALVRKAQADSSTPTPHNADGAPVQPSQVEYTADSTVAAMYYSYYMLPDGTYCLAPPPPGIDVTTYYSTLPAGVTVSNSPGVTTTAPPPPGTTPLPPPTTAETSSGATSTTTTTSALAPVAAIIPPPPDVQPVIDKLAEYVARNGLKFETSVRAKNDQRFEFLQPWHQYNAYYEFKKQFFLQKEGGDSMQAVSAPEEAPTDSAPEKPSDAGEDGAPEDAAEVGARAGSGGKKEASSSKTVPDGKLVKASFAPISFAIKAKENDLLPLEKNRVKLDDDSDDDEESKEGQESSSSAANTNPAVAPPCVVVEEKKPQLTQEELEAKQAKQKLEDRLAAAAREKLAQASKESKEKQLQAERKRKAALFLQTLKNPLPEAEAGKIEESPFSVEEQKIRHHMFSLISGS

SEQ ID NO: 2189 - protein, 28 aa, Artificial Sequence
  Synthetic polypeptide
RPWQPCITATTCYRTALTAWRRPLPEST

SEQ ID NO: 2190 - protein, 302 aa, Artificial Sequence
  Synthetic polypeptide
MRRRAARGPGPPPPGPGLSRLPLPLLLLLALGTRGGCAAPAPAPRAEDLSLGVEWLSRFGYLPPADPTTGQLQTQEELSKAITAMQQFGGLEATGILDEATLALMKTPRCSLPDLPVLTQARRRRQAPAPTKWNKRNLSWRVRTFPRDSPLGHDTVRALMYYALKVWSDIAPLNFHEVAGSAADIQIDFSKADHNDGYPFDGPGGTVAHAFFPGHHHTAGDTHFDDDEAWTFRSSDAHGMDLFAVAVHEFGHAIGLSHVAAAHSIMRPYYQGPVGDPLRYGLPYEDKVRVWQLYAGYGSRCL

SEQ ID NO: 2191 - protein, 218 aa, Artificial Sequence
  Synthetic polypeptide
MQQFGGLEATGILDEATLALMKTPRCSLPDLPVLTQARRRRQAPAPTKWNKRNLSWRVRTFPRDSPLGHDTVRALMYYALKVWSDIAPLNFHEVAGSAADIQIDFSKADHNDGYPFDGPGGTVAHAFFPGHHHTAGDTHFDDDEAWTFRSSDAHGMDLFAVAVHEFGHAIGLSHVAAAHSIMRPYYQGPVGDPLRYGLPYEDKVRVWQLYAGYGSRCL

SEQ ID NO: 2192 - protein, 143 aa, Artificial Sequence
  Synthetic polypeptide
MYYALKVWSDIAPLNFHEVAGSAADIQIDFSKADHNDGYPFDGPGGTVAHAFFPGHHHTAGDTHFDDDEAWTFRSSDAHGMDLFAVAVHEFGHAIGLSHVAAAHSIMRPYYQGPVGDPLRYGLPYEDKVRVWQLYAGYGSRCL

SEQ ID NO: 2193 - protein, 1402 aa, Artificial Sequence
  Synthetic polypeptide
MSLRSGGRRRADPGADGEASRDDGATSSVSALKRLERSQWTDKMDLRFGFERLKEPGEKTGWLINMHPTEILDEDKRLGSAVDYYFIQDDGSRFKVALPYKPYFYIATRKGCEREVSSFLSKKFQGKIAKVETVPKEDLDLPNHLVGLKRNYIRLSFHTVEDLVKVRKEISPAVKKNREQDHASDAYTALLSSVLQRGGVITDEEETSKKIADQLDNIVDMREYDVPYHIRLSIDLKIHVAHWYNVRYRGNAFPVEITRRDDLVERPDPVVLAFDIETTKLPLKFPDAETDQIMMISYMIDGQGYLITNREIVSEDIEDFEFTPKPEYEGPFCVFNEPDEAHLIQRWFEHVQETKPTIMVTYNGDFFDWPFVEARAAVHGLSMQQEIGFQKDSQGEYKAPQCIHMDCLRWVKRDSYLPVGSHNLKAAAKAKLGYDPVELDPEDMCRMATEQPQTLATYSVSDAVATYYLYMKYVHPFIFALCTIIPMEPDEVLRKGSGTLCEALLMVQAFHANIIFPNKQEQEFNKLTDDGHVLDSETYVGGHVEALESGVFRSDIPCRFRMNPAAFDFLLQRVEKTLRHALEEEEKVPVEQVTNFEEVCDEIKSKLASLKDVPSRIECPLIYHLDVGAMYPNIILTNRLQPSAMVDEATCAACDFNKPGANCQRKMAWQWRGEFMPASRSEYHRIQHQLESEKFPPLFPEGPARAFHELSREEQAKYEKRRLADYCRKAYKKIHITKVEERLTTICQRENSFYVDTVRAFRDRRYEFKGLHKVWKKKLSAAVEVGDAAEVKRCKNMEVLYDSLQLAHKCILNSFYGYVMRKGARWYSMEMAGIVCFTGANIITQARELIEQIGRPLELDTDGIWCVLPNSFPENFVFKTTNVKKPKVTISYPGAMLNIMVKEGFTNDQYQELAEPSSLTYVTRSENSIFFEVDGPYLAMILPASKEEGKKLKKRYAVFNEDGSLAELKGFEVKRRGELQLIKIFQSSVFEAFLKGSTLEEVYGSVAKVADYWLDVLYSKAANMPDSELFELISENRSMSRKLEDYGEQKSTSISTAKRLAEFLGDQMVKDAGLSCRYIISRKPEGSPVTERAIPLAIFQAEPTVRKHFLRKWLKSSSLQDFDIRAILDWDYYIERLGSAIQKIITIPAALQQVKNPVPRVKHPDWLHKKLLEKNDVYKQKKISELFTLEGRRQVTMAEASEDSPRPSAPDMEDFGLVKLPHPAAPVTVKRKRVLWESQEESQDLTPTVPWQEILGQPPALGTSQEEWLVWLRFHKKKWQLQARQRLARRKRQRLESAEGVLRPGAIRDGPATGLGSFLRRTARSILDLPWQIVQISETSQAGLFRLWALVGSDLHCIRLSIPRVFYVNQRVAKAEEGASYRKEFLKTTCVSAEHRAWGRAS

SEQ ID NO: 2194 - protein, 1375 aa, Artificial Sequence
  Synthetic polypeptide
MSLRSGGRRRADPGADGEASRDDGATSSVSALKRLERSQWTDKMDLRFGFERLKEPGEKTGWLINMHPVALPYKPYFYIATRKGCEREVSSFLSKKFQGKIAKVETVPKEDLDLPNHLVGLKRNYIRLSFHTVEDLVKVRKEISPAVKKNREQDHASDAYTALLSSVLQRGGVITDEEETSKKIADQLDNIVDMREYDVPYHIRLSIDLKIHVAHWYNVRYRGNAFPVEITRRDDLVERPDPVVLAFDIETTKLPLKFPDAETDQIMMISYMIDGQGYLITNREIVSEDIEDFEFTPKPEYEGPFCVFNEPDEAHLIQRWFEHVQETKPTIMVTYNGDFFDWPFVEARAAVHGLSMQQEIGFQKDSQGEYKAPQCIHMDCLRWVKRDSYLPVGSHNLKAAAKAKLGYDPVELDPEDMCRMATEQPQTLATYSVSDAVATYYLYMKYVHPFIFALCTIIPMEPDEVLRKGSGTLCEALLMVQAFHANIIFPNKQEQEFNKLTDDGHVLDSETYVGGHVEALESGVFRSDIPCRFRMNPAAFDFLLQRVEKTLRHALEEEEKVPVEQVTNFEEVCDEIKSKLASLKDVPSRIECPLIYHLDVGAMYPNIILTNRLQPSAMVDEATCAACDFNKPGANCQRKMAWQWRGEFMPASRSEYHRIQHQLESEKFPPLFPEGPARAFHELSREEQAKYEKRRLADYCRKAYKKIHITKVEERLTTICQRENSFYVDTVRAFRDRRYEFKGLHKVWKKKLSAAVEVGDAAEVKRCKNMEVLYDSLQLAHKCILNSFYGYVMRKGARWYSMEMAGIVCFTGANIITQARELIEQIGRPLELDTDGIWCVLPNSFPENFVFKTTNVKKPKVTISYPGAMLNIMVKEGFTNDQYQELAEPSSLTYVTRSENSIFFEVDGPYLAMILPASKEEGKKLKKRYAVFNEDGSLAELKGFEVKRRGELQLIKIFQSSVFEAFLKGSTLEEVYGSVAKVADYWLDVLYSKAANMPDSELFELISENRSMSRKLEDYGEQKSTSISTAKRLAEFLGDQMVKDAGLSCRYIISRKPEGSPVTERAIPLAIFQAEPTVRKHFLRKWLKSSSLQDFDIRAILDWDYYIERLGSAIQKIITIPAALQQVKNPVPRVKHPDWLHKKLLEKNDVYKQKKISELFTLEGRRQVTMAEASEDSPRPSAPDMEDFGLVKLPHPAAPVTVKRKRVLWESQEESQDLTPTVPWQEILGQPPALGTSQEEWLVWLRFHKKKWQLQARQRLARRKRQRLESAEGVLRPGAIRDGPATGLGSFLRRTARSILDLPWQIVQISETSQAGLFRLWALVGSDLHCIRLSIPRVFYVNQRVAKAEEGASYRKEFLKTTCVSAEHRAWGRAS

SEQ ID NO: 2195 - protein, 1182 aa, Artificial Sequence
  Synthetic polypeptide
MREYDVPYHIRLSIDLKIHVAHWYNVRYRGNAFPVEITRRDDLVERPDPVVLAFDIETTKLPLKFPDAETDQIMMISYMIDGQGYLITNREIVSEDIEDFEFTPKPEYEGPFCVFNEPDEAHLIQRWFEHVQETKPTIMVTYNGDFFDWPFVEARAAVHGLSMQQEIGFQKDSQGEYKAPQCIHMDCLRWVKRDSYLPVGSHNLKAAAKAKLGYDPVELDPEDMCRMATEQPQTLATYSVSDAVATYYLYMKYVHPFIFALCTIIPMEPDEVLRKGSGTLCEALLMVQAFHANIIFPNKQEQEFNKLTDDGHVLDSETYVGGHVEALESGVFRSDIPCRFRMNPAAFDFLLQRVEKTLRHALEEEEKVPVEQVTNFEEVCDEIKSKLASLKDVPSRIECPLIYHLDVGAMYPNIILTNRLQPSAMVDEATCAACDFNKPGANCQRKMAWQWRGEFMPASRSEYHRIQHQLESEKFPPLFPEGPARAFHELSREEQAKYEKRRLADYCRKAYKKIHITKVEERLTTICQRENSFYVDTVRAFRDRRYEFKGLHKVWKKKLSAAVEVGDAAEVKRCKNMEVLYDSLQLAHKCILNSFYGYVMRKGARWYSMEMAGIVCFTGANIITQARELIEQIGRPLELDTDGIWCVLPNSFPENFVFKTTNVKKPKVTISYPGAMLNIMVKEGFTNDQYQELAEPSSLTYVTRSENSIFFEVDGPYLAMILPASKEEGKKLKKRYAVFNEDGSLAELKGFEVKRRGELQLIKIFQSSVFEAFLKGSTLEEVYGSVAKVADYWLDVLYSKAANMPDSELFELISENRSMSRKLEDYGEQKSTSISTAKRLAEFLGDQMVKDAGLSCRYIISRKPEGSPVTERAIPLAIFQAEPTVRKHFLRKWLKSSSLQDFDIRAILDWDYYIERLGSAIQKIITIPAALQQVKNPVPRVKHPDWLHKKLLEKNDVYKQKKISELFTLEGRRQVTMAEASEDSPRPSAPDMEDFGLVKLPHPAAPVTVKRKRVLWESQEESQDLTPTVPWQEILGQPPALGTSQEEWLVWLRFHKKKWQLQARQRLARRKRQRLESAEGVLRPGAIRDGPATGLGSFLRRTARSILDLPWQIVQISETSQAGLFRLWALVGSDLHCIRLSIPRVFYVNQRVAKAEEGASYRKEFLKTTCVSAEHRAWGRAS

SEQ ID NO: 2196 - protein, 279 aa, Artificial Sequence
  Synthetic polypeptide
MSLRSGGRRRADPGADGEASRDDGATSSVSALKRLERSQWTDKMDLRFGFERLKEPGEKTGWLINMHPTEILDEDKRLGSAVDYYFIQDDGSRFKVALPYKPYFYIATRKGCEREVSSFLSKKFQGKIAKVETVPKEDLDLPNHLVGLKRNYIRLSFHTVEDLVKVRKEISPAVKKNREQDHASDAYTALLSSVLQRGGVITDEEETSKKIADQLDNIVDMREYDVPYHIRLSIDLKIHVAHWYNVRYRGNAFPVEITRRDDLVERPLPFRVVITTRMR

SEQ ID NO: 2197 - protein, 252 aa, Artificial Sequence
  Synthetic polypeptide
MSLRSGGRRRADPGADGEASRDDGATSSVSALKRLERSQWTDKMDLRFGFERLKEPGEKTGWLINMHPVALPYKPYFYIATRKGCEREVSSFLSKKFQGKIAKVETVPKEDLDLPNHLVGLKRNYIRLSFHTVEDLVKVRKEISPAVKKNREQDHASDAYTALLSSVLQRGGVITDEEETSKKIADQLDNIVDMREYDVPYHIRLSIDLKIHVAHWYNVRYRGNAFPVEITRRDDLVERPLPFRVVITTRMR

SEQ ID NO: 2198 - protein, 59 aa, Artificial Sequence
  Synthetic polypeptide
MREYDVPYHIRLSIDLKIHVAHWYNVRYRGNAFPVEITRRDDLVERPLPFRVVITTRMR

SEQ ID NO: 2199 - protein, 81 aa, Artificial Sequence
  Synthetic polypeptide
MERPEEGKQSPPPQPWGRLLRLGAEEGEPHVLLRKREWTIGRRRGCDLSFPSNKLVSGDHCRIVVDEKSGQVTLEDTRRQS

SEQ ID NO: 2200 - protein, 53 aa, Artificial Sequence
  Synthetic polypeptide
MERPEEGKQSPPPQPWGRLLRLGAEEGEPHVLLRKREWTIGRRRGPGAGGSRL

SEQ ID NO: 2201 - protein, 82 aa, Artificial Sequence
  Synthetic polypeptide
MIQSQISFEDVAVDFTLEEWQLLNPTQKNLYRDVMLENYSNLVFLGFQILKPDAMFKLEQQDPWIIGQEILNQNFSDPIKGG

SEQ ID NO: 2202 - protein, 51 aa, Artificial Sequence
  Synthetic polypeptide
MIQSQISFEDVAVDFTLEEWQLLNPTQKNLYRDVMLENYSNLVFLDPIKGG

SEQ ID NO: 2203 - protein, 18 aa, Artificial Sequence
  Synthetic polypeptide
MSQWFPQCDPWTSSISII

SEQ ID NO: 2204 - protein, 533 aa, Artificial Sequence
  Synthetic polypeptide
MDSLEEPQKKVFKARKTMRVSDRQQLEAVYKVKEELLKTDVKLLNGNHENGDLDPTSPLENMDYIKDKEEVNGIEEICFDPEGSKAEWKETPCILSVNVKNKQDDDLNCEPLSPHNITPEPVSKLPAEPVSGDPAPGDLDAGDPASGVLASGDSTSGDPTSSEPSSSDAASGDATSGDAPSGDVSPGDATSGDATADDLSSGDPTSSDPIPGEPVPVEPISGDCAADDIASSEITSVDLASGAPASTDPASDDLASGDLSSSELASDDLATGELASDELTSESTFDRTFEPKSVPVCEPVPEIDNIEPSSNKDDDFLEKNGADEKLEQIQSKDSLDEKNKADNNIDANEETLETDDTTICSDRPPENEKKVEEDIITELALGEDAISSSMEIDQGEKNEDETSADLVETINENVIEDNKSENILENTDSMETDEIIPILEKLAPSEDELTCFSKTSLLPIDETNPDLEEKMESSFGSPSKQESSESLPKEAFLVLSDEEDISGEKDESEVISQNETCSPGKVAHTYNPRTLGG

SEQ ID NO: 2205 - protein, 541 aa, Artificial Sequence
  Synthetic polypeptide
MHQDQRFRMDSLEEPQKKVFKARKTMRVSDRQQLEAVYKVKEELLKTDVKLLNGNHENGDLDPTSPLENMDYIKDKEEVNGIEEICFDPEGSKAEWKETPCILSVNVKNKQDDDLNCEPLSPHNITPEPVSKLPAEPVSGDPAPGDLDAGDPASGVLASGDSTSGDPTSSEPSSSDAASGDATSGDAPSGDVSPGDATSGDATADDLSSGDPTSSDPIPGEPVPVEPISGDCAADDIASSEITSVDLASGAPASTDPASDDLASGDLSSSELASDDLATGELASDELTSESTFDRTFEPKSVPVCEPVPEIDNIEPSSNKDDDFLEKNGADEKLEQIQSKDSLDEKNKADNNIDANEETLETDDTTICSDRPPENEKKVEEDIITELALGEDAISSSMEIDQGEKNEDETSADLVETINENVIEDNKSENILENTDSMETDEIIPILEKLAPSEDELTCFSKTSLLPIDETNPDLEEKMESSFGSPSKQESSESLPKEAFLVLSDEEDISGEKDESEVISQNETCSPGKVAHTYNPRTLGG

SEQ ID NO: 2206 - protein, 513 aa, Artificial Sequence
  Synthetic polypeptide
MNGHISNHPSSFGMYPSQMNGYGSSPTFSQTDREHGSKTSAKALYEQRKNYARDSVSSVSDISQYRVEHLTTFVLDRKDAMITVDDGIRKLKLLDAKGKVWTQDMILQVDDRAVSLIDLESKNELENFPLNTIQHCQAVMHSCSYDSVLALVCKEPTQNKPDLHLFQCDEVKANLISEDIESAISDSKGGKQKRRPDALRMISNADPSIPPPPRAPAPAPPGTVTQVDVRSRVAAWSAWAADQGDFEKPRQYHEQEETPEMMAARIDRDVQILNHILDDIEFFITKLQKAAEAFSELSKRKKNKKGKRKGPGEGVLTLRAKPPPPDEFLDCFQKFKHGFNLLAKLKSHIQNPSAADLVHFLFTPLNMVVQATGGPELASSVLSPLLNKDTIDFLNYTVNGDERQLWMSLGGTWMKARAEWPKEQFIPPYVPRFRNGWEPPMLNFMGATMEQDLYQLAESVANVAEHQRKQEIKRLSTEQGSPVPGSWTSTSAWPVGNCASLQEVSSRPASITA

SEQ ID NO: 2207 - protein, 253 aa, Artificial Sequence
  Synthetic polypeptide
MMAARIDRDVQILNHILDDIEFFITKLQKAAEAFSELSKRKKNKKGKRKGPGEGVLTLRAKPPPPDEFLDCFQKFKHGFNLLAKLKSHIQNPSAADLVHFLFTPLNMVVQATGGPELASSVLSPLLNKDTIDFLNYTVNGDERQLWMSLGGTWMKARAEWPKEQFIPPYVPRFRNGWEPPMLNFMGATMEQDLYQLAESVANVAEHQRKQEIKRLSTEQGSPVPGSWTSTSAWPVGNCASLQEVSSRPASITA

SEQ ID NO: 2208 - protein, 81 aa, Artificial Sequence
  Synthetic polypeptide
MTLAHKHIVKTVDFTQDSNYLLTGGQDKLLRIYDLNKPEAEPKEISGHTSGIKKALWCSEDKQILSADDKTVRLSIPNLKI

SEQ ID NO: 2209 - protein, 188 aa, Artificial Sequence
  Synthetic polypeptide
MAMRQTPLTCSGHTRPVVDLAFSGITPYGYFLISACKGAGQHLPRLSGQHDGKPMLRQGDTGDWIGTFLGHKGAVWGATLNKDATKAATAAADFTAKVWDAVSGDELMTLAHKHIVKTVDFTQDSNYLLTGGQDKLLRIYDLNKPEAEPKEISGHTSGIKKALWCSEDKQILSADDKTVRLSIPNLKI

SEQ ID NO: 2210 - protein, 175 aa, Artificial Sequence
  Synthetic polypeptide
MAMRQTPLTCSGHTRPVVDLAFSGITPYGYFLISACKDGKPMLRQGDTGDWIGTFLGHKGAVWGATLNKDATKAATAAADFTAKVWDAVSGDELMTLAHKHIVKTVDFTQDSNYLLTGGQDKLLRIYDLNKPEAEPKEISGHTSGIKKALWCSEDKQILSADDKTVRLSIPNLKI

SEQ ID NO: 2211 - protein, 1401 aa, Artificial Sequence
  Synthetic polypeptide
MAYSWQTDPNPNESHEKQYEHQEFLFVNQPHSSSQVSLGFDQIVDEISGKIPHYESEIDENTFFVPTAPKWDSTGHSLNEAHQISLNEFTSKSRELSWHQVSKAPAIGFSPSVLPKPQNTNKECSWGSPIGKHHGADDSRFSILAPSFTSLDKINLEKELENENHNYHIGFESSIPPTNSSFSSDFMPKEENKRSGHVNIVEPSLMLLKGSLQPGMWESTWQKNIESIGCSIQLVEVPQSSNTSLASFCNKVKKIRERYHAADVNFNSGKIWSTTTAFPYQLFSKTKFNIHIFIDNSTQPLHFMPCANYLVKDLIAEILHFCTNDQLLPKDHILSVCGSEEFLQNDHCLGSHKMFQKDKSVIQLHLQKSREAPGKLSRKHEEDHSQFYLNQLLEFMHIWKVSRQCLLTLIRKYDFHLKYLLKTQENVYNIIEEVKKICSVLGCVETKQITDAVNELSLILQRKGENFYQSSETSAKGLIEKVTTELSTSIYQLINVYCNSFYADFQPVNVPRCTSYLNPGLPSHLSFTVYAAHNIPETWVHRINFPLEIKSLPRESMLTVKLFGIACATNNANLLAWTCLPLFPKEKSILGSMLFSMTLQSEPPVEMITPGVWDVSQPSPVTLQIDFPATGWEYMKPDSEENRSNLEEPLKECIKHIARLSQKQTPLLLSEEKKRYLWFYRFYCNNENCSLPLVLGSAPGWDERTVSEMHTILRRWTFSQPLEALGLLTSSFPDQEIRKVAVQQLDNLLNDELLEYLPQLVQAVKFEWNLESPLVQLLLHRSLQSIQVAHRLYWLLKNAENEAYFKSWYQKLLAALQFCAGKALNDEFSKEQKLIKILGDIGERVKSASDHQRQEVLKKEIGRLEEFFQDVNTCHLPLNPALCIKGIDHDACSYFTSNALPLKITFINANPMGKNISIIFKAGDDLRQDMLVLQLIQVMDNIWLQEGLDMQMIIYRCLSTGKDQGLVQMVPDAVTLAKIHRHSGLIGPLKENTIKKWFSQHNHLKADYEKALRNFFYSCAGWCVVTFILGVCDRHNDNIMLTKSGHMFHIDFGKFLGHAQTFGGIKRDRAPFIFTSEMEYFITEGGKNPQHFQDFVELCCRAYNIIRKHSQLLLNLLEMMLYAGLPELSGIQDLKYVYNNLRPQDTDLEATSHFTKKIKESLECFPVKLNNLIHTLAQMSAISPAKSTSQTFPQESCLLSTTRSIERATILGFSKKSSNLYLIQVTHSNNETSLTEKSFEQFSKLHSQLQKQFASLTLPEFPHWWHLPFTNSDHRRFRDLNHYMEQILNVSHEVTNSDCVLSFFLSEAVQQTVEESSPVYLGEKFPDKKPKVQLVISYEDVKLTILVKHMKNIHLPDGSAPSAHVEFYLLPYPSEVRRRKTKSVPKCTDPTYNEINTSTSL

SEQ ID NO: 2212 - protein, 1442 aa, Artificial Sequence
  Synthetic polypeptide
MAYSWQTDPNPNESHEKQYEHQEFLFVNQPHSSSQVSLGFDQIVDEISGKIPHYESEIDENTFFVPTAPKWDSTGHSLNEAHQISLNEFTSKSRELSWHQVSKAPAIGFSPSVLPKPQNTNKECSWGSPIGKHHGADDSRFSILAPSFTSLDKINLEKELENENHNYHIGFESSIPPTNSSFSSDFMPKEENKRSGHVNIVEPSLMLLKGSLQPGMWESTWQKNIESIGCSIQLVEVPQSSNTSLASFCNKVKKIRERYHAADVNFNSGKIWSTTTAFPYQLFSKTKFNIHIFIDNSTQPLHFMPCANYLVKDLIAEILHFCTNDQLLPKDHILSVCGSEEFLQNDHCLGSHKMFQKDKSVIQLHLQKSREAPGKLSRKHEEDHSQFYLNQLLEFMHIWKVSRQCLLTLIRKYDFHLKYLLKTQENVYNIIEEVKKICSVLGCVETKQITDAVNELSLILQRKGENFYQSSETSAKGLIEKVTTELSTSIYQLINVYCNSFYADFQPVNVPRCTSYLNPGLPSHLSFTVYAAHNIPETWVHSYKAFSFTCWLTYAGKKLCQVRNYRNIPDKKLFFFLVNWNETINFPLEIKSLPRESMLTVKLFGIACATNNANLLAWTCLPLFPKEKSILGSMLFSMTLQSEPPVEMITPGVWDVSQPSPVTLQIDFPATGWEYMKPDSEENRSNLEEPLKECIKHIARLSQKQTPLLLSEEKKRYLWFYRFYCNNENCSLPLVLGSAPGWDERTVSEMHTILRRWTFSQPLEALGLLTSSFPDQEIRKVAVQQLDNLLNDELLEYLPQLVQAVKFEWNLESPLVQLLLHRSLQSIQVAHRLYWLLKNAENEAYFKSWYQKLLAALQFCAGKALNDEFSKEQKLIKILGDIGERVKSASDHQRQEVLKKEIGRLEEFFQDVNTCHLPLNPALCIKGIDHDACSYFTSNALPLKITFINANPMGKNISIIFKAGDDLRQDMLVLQLIQVMDNIWLQEGLDMQMIIYRCLSTGKDQGLVQMVPDAVTLAKIHRHSGLIGPLKENTIKKWFSQHNHLKADYEKALRNFFYSCAGWCVVTFILGVCDRHNDNIMLTKSGHMFHIDFGKFLGHAQTFGGIKRDRAPFIFTSEMEYFITEGGKNPQHFQDFVELCCRAYNIIRKHSQLLLNLLEMMLYAGLPELSGIQDLKYVYNNLRPQDTDLEATSHFTKKIKESLECFPVKLNNLIHTLAQMSAISPAKSTSQTFPQESCLLSTTRSIERATILGFSKKSSNLYLIQVTHSNNETSLTEKSFEQFSKLHSQLQKQFASLTLPEFPHWWHLPFTNSDHRRFRDLNHYMEQILNVSHEVTNSDCVLSFFLSEAVQQTVEESSPVYLGEKFPDKKPKVQLVISYEDVKLTILVKHMKNIHLPDGSAPSAHVEFYLLPYPSEVRRRKTKSVPKCTDPTYNEINTSTSL

SEQ ID NO: 2213 - protein, 20 aa, Artificial Sequence
  Synthetic polypeptide
GFKFPDPWSAHGSAKWEIFG

SEQ ID NO: 2214 - protein, 85 aa, Artificial Sequence
  Synthetic polypeptide
MKQQTRVIKKNAFSPRWNETFTFIIHVPELALIRFVVEGQGLIAGNEFLGQYTLPLLCMNKGYRRIPLFSRMGESLEPASLFVYV

SEQ ID NO: 2215 - protein, 386 aa, Artificial Sequence
  Synthetic polypeptide
MADNLQATFGESLLSDMLDDFPDTLPSPEALKFKILVKNKKIGTLKETHERKGSDKRGKVEEWEEEVADGEEEEEEEEEEEEEEEDKFKESEVLESVLGDNQDKETGVKKLPGVMLFKKKKTRKLKIALALSDLVIYTKAEKFKSFQHSRLYQQFNENNSIGETQARKLSKLRVHEFIFHTRKFITRIYPKATRADSSNFNPQEFWNIGCQMVALNFQTPGLPMDLQNGKFLDNGGSGYILKPHFLRESKSYFNPSNIKEGMPITLTIRLISGIQLPLTHSSSNKGDSLVIIEVFGVPNDQMKQQTRVIKKNAFSPRWNETFTFIIHVPELALIRFVVEGQGLIAGNEFLGQYTLPLLCMNKGYRRIPLFSRMGESLEPASLFVYV

SEQ ID NO: 2216 - protein, 604 aa, Artificial Sequence
  Synthetic polypeptide
MEMRWFLSKIQDDFRGGKINLEKTQRLLEKLDIRCSYIHVKQIFKDNDRLKQGRITIEEFRAIYRIITHREEIIEIFNTYSENRKILLASNLAQFLTQEQYAAEMSKAIAFEIIQKYEPIEEVRKAHQMSLEGFTRYMDSRECLLFKNECRKVYQDMTHPLNDYFISSSHNTYLVSDQLLGPSDLWGYVSALVKGCRCLEIDCWDGAQNEPVVYHGYTLTSKLLFKTVIQAIHKYAFMTSDYPVVLSLENHCSTAQQEVMADNLQATFGESLLSDMLDDFPDTLPSPEALKFKILVKNKKIGTLKETHERKGSDKRGDNQDKETGVKKLPGVMLFKKKKTRKLKIALALSDLVIYTKAEKFKSFQHSRLYQQFNENNSIGETQARKLSKLRVHEFIFHTRKFITRIYPKATRADSSNFNPQEFWNIGCQMVALNFQTPGLPMDLQNGKFLDNGGSGYILKPHFLRESKSYFNPSNIKEGMPITLTIRLISGIQLPLTHSSSNKGDSLVIIEVFGVPNDQMKQQTRVIKKNAFSPRWNETFTFIIHVPELALIRFVVEGQGLIAGNEFLGQYTLPLLCMNKGYRRIPLFSRMGESLEPASLFVYV

SEQ ID NO: 2217 - protein, 409 aa, Artificial Sequence
  Synthetic polypeptide
MRWFLSKIQDDFRGGKINLEKTQRLLEKLDIRCSYIHVKQIFKTSDYPVVLSLENHCSTAQQEVMADNLQATFGESLLSDMLDDFPDTLPSPEALKFKILVKNKKIGTLKETHERKGSDKRGDNQDKETGVKKLPGVMLFKKKKTRKLKIALALSDLVIYTKAEKFKSFQHSRLYQQFNENNSIGETQARKLSKLRVHEFIFHTRKFITRIYPKATRADSSNFNPQEFWNIGCQMVALNFQTPGLPMDLQNGKFLDNGGSGYILKPHFLRESKSYFNPSNIKEGMPITLTIRLISGIQLPLTHSSSNKGDSLVIIEVFGVPNDQMKQQTRVIKKNAFSPRWNETFTFIIHVPELALIRFVVEGQGLIAGNEFLGQYTLPLLCMNKGYRRIPLFSRMGESLEPASLFVYV

SEQ ID NO: 2218 - protein, 602 aa, Artificial Sequence
  Synthetic polypeptide
MRWFLSKIQDDFRGGKINLEKTQRLLEKLDIRCSYIHVKQIFKDNDRLKQGRITIEEFRAIYRIITHREEIIEIFNTYSENRKILLASNLAQFLTQEQYAAEMSKAIAFEIIQKYEPIEEVRKAHQMSLEGFTRYMDSRECLLFKNECRKVYQDMTHPLNDYFISSSHNTYLVSDQLLGPSDLWGYVSALVKGCRCLEIDCWDGAQNEPVVYHGYTLTSKLLFKTVIQAIHKYAFMTSDYPVVLSLENHCSTAQQEVMADNLQATFGESLLSDMLDDFPDTLPSPEALKFKILVKNKKIGTLKETHERKGSDKRGDNQDKETGVKKLPGVMLFKKKKTRKLKIALALSDLVIYTKAEKFKSFQHSRLYQQFNENNSIGETQARKLSKLRVHEFIFHTRKFITRIYPKATRADSSNFNPQEFWNIGCQMVALNFQTPGLPMDLQNGKFLDNGGSGYILKPHFLRESKSYFNPSNIKEGMPITLTIRLISGIQLPLTHSSSNKGDSLVIIEVFGVPNDQMKQQTRVIKKNAFSPRWNETFTFIIHVPELALIRFVVEGQGLIAGNEFLGQYTLPLLCMNKGYRRIPLFSRMGESLEPASLFVYV

SEQ ID NO: 2219 - protein, 411 aa, Artificial Sequence
  Synthetic polypeptide
MEMRWFLSKIQDDFRGGKINLEKTQRLLEKLDIRCSYIHVKQIFKTSDYPVVLSLENHCSTAQQEVMADNLQATFGESLLSDMLDDFPDTLPSPEALKFKILVKNKKIGTLKETHERKGSDKRGDNQDKETGVKKLPGVMLFKKKKTRKLKIALALSDLVIYTKAEKFKSFQHSRLYQQFNENNSIGETQARKLSKLRVHEFIFHTRKFITRIYPKATRADSSNFNPQEFWNIGCQMVALNFQTPGLPMDLQNGKFLDNGGSGYILKPHFLRESKSYFNPSNIKEGMPITLTIRLISGIQLPLTHSSSNKGDSLVIIEVFGVPNDQMKQQTRVIKKNAFSPRWNETFTFIIHVPELALIRFVVEGQGLIAGNEFLGQYTLPLLCMNKGYRRIPLFSRMGESLEPASLFVYV

SEQ ID NO: 2220 - protein, 1042 aa, Artificial Sequence
  Synthetic polypeptide
MVCGCSALLPLPNPRPTMPATPNFLANPSSSSRWIPLQPMPVAWAFVQKTSALLWLLLLGTSLSPAWGQAKIPLETVKLWADTFGGDLYNTVTKYSGSLLLQKKYKDVESSLKIEEVDGLELVRKFSEDMENMLRRKVEAVQNLVEAAEEADLNHEFNESLVFDYYNSVLINERDEKGNFVELGAEFLLESNAHFSNLPVNTSISSVQLPTNVYNKDPDILNGVYMSEALNAVFVENFQRDPTLTWQYFGSATGFFRIYPGIKWTPDENGVITFDCRNRGWYIQAATSPKDIVILVDVSGSMKGLRMTIAKHTITTILDTLGENDFINIIAYNDYVHYIEPCFKGILVQADRDNREHFKLLVEELMVKGVGVVDQALREAFQILKQFQEAKQGSLCNQAIMLISDGAVEDYEPVFEKYNWPDCKVRVFTYLIGREVSFADRMKWIACNNKGYYTQISTLADTQENVMEYLHVLSRPMVINHDHDIIWTEAYMDSKLLSSQAQSLTLLTTVAMPVFSKKNETRSHGILLGVVGSDVALRELMKLAPRYKLGVHGYAFLNTNNGYILSHPDLRPLYREGKKLKPKPNYNSVDLSEVEWEDQAESLRTAMINRETGTLSMDVKVPMDKGKRVLFLTNDYFFTDISDTPFSLGVVLSRGHGEYILLGNTSVEEGLHDLLHPDLALAGDWIYCITDIDPDHRKLSQLEAMIRFLTRKDPDLECDEELVREVLFDAVVTAPMEAYWTALALNMSEESEHVVDMAFLGTRAGLLRSSLFVGSEKVSDRKFLTPEDEASVFTLDRFPLWYRQASEHPAGSFVFNLRWAEGPESAGEPMVVTASTAVAVTVDKRTAIAAAAGVQMKLEFLQRKFWAATRQCSTVDGPCTQSCEDSDLDCFVIDNNGFILISKRSRETGRFLGEVDGAVLTQLLSMGVFSQVTMYDYQAMCKPSSHHHSAAQPLVSPISAFLTATRWLLQELVLFLLEWSVWGSWYDRGAEAKSVFHHSHKHKKQDPLQPCDTEYPVFVYQPAIREANGIVECGPCQNGPVW

SEQ ID NO: 2221 - protein, 172 aa, Artificial Sequence
  Synthetic polypeptide
MKLEFLQRKFWAATRQDLDCFVIDNNGFILISKRSRETGRFLGEVDGAVLTQLLSMGVFSQVTMYDYQAMCKPSSHHHSAAQPLVSPISAFLTATRWLLQELVLFLLEWSVWGSWYDRGAEAKSVFHHSHKHKKQDPLQPCDTEYPVFVYQPAIREANGIVECGPCQNGPVW

SEQ ID NO: 2222 - protein, 1017 aa, Artificial Sequence
  Synthetic polypeptide
MVCGCSALLPLPNPRPTMPATPNFLANPSSSSRWIPLQPMPVAWAFVQKTSALLWLLLLGTSLSPAWGQAKIPLETVKLWADTFGGDLYNTVTKYSGSLLLQKKYKDVESSLKIEEVDGLELVRKFSEDMENMLRRKVEAVQNLVEAAEEADLNHEFNESLVFDYYNSVLINERDEKGNFVELGAEFLLESNAHFSNLPVNTSISSVQLPTNVYNKDPDILNGVYMSEALNAVFVENFQRDPTLTWQYFGSATGFFRIYPGIKWTPDENGVITFDCRNRGWYIQAATSPKDIVILVDVSGSMKGLRMTIAKHTITTILDTLGENDFINIIAYNDYVHYIEPCFKGILVQADRDNREHFKLLVEELMVKGVGVVDQALREAFQILKQFQEAKQGSLCNQAIMLISDGAVEDYEPVFEKYNWPDCKVRVFTYLIGREVSFADRMKWIACNNKGYYTQISTLADTQENVMEYLHVLSRPMVINHDHDIIWTEAYMDSKLLSSQAQSLTLLTTVAMPVFSKKNETRSHGILLGVVGSDVALRELMKLAPRYKYREGKKLKPKPNYNSVDLSEVEWEDQAESLRTAMINRETGTLSMDVKVPMDKGKRVLFLTNDYFFTDISDTPFSLGVVLSRGHGEYILLGNTSVEEGLHDLLHPDLALAGDWIYCITDIDPDHRKLSQLEAMIRFLTRKDPDLECDEELVREVLFDAVVTAPMEAYWTALALNMSEESEHVVDMAFLGTRAGLLRSSLFVGSEKVSDRKFLTPEDEASVFTLDRFPLWYRQASEHPAGSFVFNLRWAEGPESAGEPMVVTASTAVAVTVDKRTAIAAAAGVQMKLEFLQRKFWAATRQCSTVDGPCTQSCEDSDLDCFVIDNNGFILISKRSRETGRFLGEVDGAVLTQLLSMGVFSQVTMYDYQAMCKPSSHHHSAAQPLVSPISAFLTATRWLLQELVLFLLEWSVWGSWYDRGAEAKSVFHHSHKHKKQDPLQPCDTEYPVFVYQPAIREANGIVECGPCQNGPVW

SEQ ID NO: 2223 - protein, 978 aa, Artificial Sequence
  Synthetic polypeptide
MAVALGTRRRDRVKLWADTFGGDLYNTVTKYSGSLLLQKKYKDVESSLKIEEVDGLELVRKFSEDMENMLRRKVEAVQNLVEAAEEADLNHEFNESLVFDYYNSVLINERDEKGNFVELGAEFLLESNAHFSNLPVNTSISSVQLPTNVYNKDPDILNGVYMSEALNAVFVENFQRDPTLTWQYFGSATGFFRIYPGIKWTPDENGVITFDCRNRGWYIQAATSPKDIVILVDVSGSMKGLRMTIAKHTITTILDTLGENDFINIIAYNDYVHYIEPCFKGILVQADRDNREHFKLLVEELMVKGVGVVDQALREAFQILKQFQEAKQGSLCNQAIMLISDGAVEDYEPVFEKYNWPDCKVRVFTYLIGREVSFADRMKWIACNNKGYYTQISTLADTQENVMEYLHVLSRPMVINHDHDIIWTEAYMDSKLLSSQAQSLTLLTTVAMPVFSKKNETRSHGILLGVVGSDVALRELMKLAPRYKLGVHGYAFLNTNNGYILSHPDLRPLYREGKKLKPKPNYNSVDLSEVEWEDQAESLRTAMINRETGTLSMDVKVPMDKGKRVLFLTNDYFFTDISDTPFSLGVVLSRGHGEYILLGNTSVEEGLHDLLHPDLALAGDWIYCITDIDPDHRKLSQLEAMIRFLTRKDPDLECDEELVREVLFDAVVTAPMEAYWTALALNMSEESEHVVDMAFLGTRAGLLRSSLFVGSEKVSDRKFLTPEDEASVFTLDRFPLWYRQASEHPAGSFVFNLRWAEGPESAGEPMVVTASTAVAVTVDKRTAIAAAAGVQMKLEFLQRKFWAATRQCSTVDGPCTQSCEDSDLDCFVIDNNGFILISKRSRETGRFLGEVDGAVLTQLLSMGVFSQVTMYDYQAMCKPSSHHHSAAQPLVSPISAFLTATRWLLQELVLFLLEWSVWGSWYDRGAEAKSVFHHSHKHKKQDPLQPCDTEYPVFVYQPAIREANGIVECGPCQNGPVW

SEQ ID NO: 2224 - protein, 187 aa, Artificial Sequence
  Synthetic polypeptide
MKLEFLQRKFWAATRQCSTVDGPCTQSCEDSDLDCFVIDNNGFILISKRSRETGRFLGEVDGAVLTQLLSMGVFSQVTMYDYQAMCKPSSHHHSAAQPLVSPISAFLTATRWLLQELVLFLLEWSVWGSWYDRGAEAKSVFHHSHKHKKQDPLQPCDTEYPVFVYQPAIREANGIVECGPCQNGPVW

SEQ ID NO: 2225 - protein, 4 aa, Artificial Sequence
  Synthetic polypeptide
RASK

SEQ ID NO: 2226 - protein, 1049 aa, Artificial Sequence
  Synthetic polypeptide
MVCGCSALLPLPNPRPTMPATPNFLANPSSSSRWIPLQPMPVAWAFVQKTSALLWLLLLGTSLSPAWGQAKIPLETVKLWADTFGGDLYNTVTKYSGSLLLQKKYKDVESSLKIEEVDGLELVRKFSEDMENMLRRKVEAVQNLVEAAEEADLNHEFNESLVFDYYNSVLINERDEKGNFVELGAEFLLESNAHFSNLPVNTSISSVQLPTNVYNKDPDILNGVYMSEALNAVFVENFQRDPTLTWQYFGSATGFFRIYPGIKWTPDENGVITFDCRNRGWYIQAATSPKDIVILVDVSGSMKGLRMTIAKHTITTILDTLGENDFINIIAYNDYVHYIEPCFKGILVQADRDNREHFKLLVEELMVKGVGVVDQALREAFQILKQFQEAKQGSLCNQAIMLISDGAVEDYEPVFEKYNWPDCKVRVFTYLIGREVSFADRMKWIACNNKGYYTQISTLADTQENVMEYLHVLSRPMVINHDHDIIWTEAYMDSKLLSSQAQSLTLLTTVAMPVFSKKNETRSHGILLGVVGSDVALRELMKLAPRYKLGVHGYAFLNTNNGYILSHPDLRPLYREGKKLKPKPNYNSVDLSEVEWEDQAESLRTAMINRETGTLSMDVKVPMDKGKRVLFLTNDYFFTDISDTPFSLGVVLSRGHGEYILLGNTSVEEGLHDLLHPDLALAGDWIYCITDIDPDHRKLSQLEAMIRFLTRKDPDLECDEELVREVLFDAVVTAPMEAYWTALALNMSEESEHVVDMAFLGTRAGLLRSSLFVGSEKVSDRKFLTPEDEASVFTLDRFPLWYRQASEHPAGSFVFNLRWAEGPESAGEPMVVTASTAVAVTVDKRTAIAAAAGVQMKLEFLQRKFWAATRQCSTVDGPCTQSCEDSDLDCFVIDNNGFILISKRSRETGRFLGEVDGAVLTQLLSMGVFSQVTMYDYQAMCKPSSHHHSAAQPLVSPISAFLTATRWLLQELVLFLLEWSVWGSWYDRGAEAKSVFHHSHKHKKQDPLQPCDTEYPVFVYQPAIREANGIVECGPCQNNSALSKAAQFG

SEQ ID NO: 2227 - protein, 179 aa, Artificial Sequence
  Synthetic polypeptide
MKLEFLQRKFWAATRQDLDCFVIDNNGFILISKRSRETGRFLGEVDGAVLTQLLSMGVFSQVTMYDYQAMCKPSSHHHSAAQPLVSPISAFLTATRWLLQELVLFLLEWSVWGSWYDRGAEAKSVFHHSHKHKKQDPLQPCDTEYPVFVYQPAIREANGIVECGPCQNNSALSKAAQFG

SEQ ID NO: 2228 - protein, 1024 aa, Artificial Sequence
  Synthetic polypeptide
MVCGCSALLPLPNPRPTMPATPNFLANPSSSSRWIPLQPMPVAWAFVQKTSALLWLLLLGTSLSPAWGQAKIPLETVKLWADTFGGDLYNTVTKYSGSLLLQKKYKDVESSLKIEEVDGLELVRKFSEDMENMLRRKVEAVQNLVEAAEEADLNHEFNESLVFDYYNSVLINERDEKGNFVELGAEFLLESNAHFSNLPVNTSISSVQLPTNVYNKDPDILNGVYMSEALNAVFVENFQRDPTLTWQYFGSATGFFRIYPGIKWTPDENGVITFDCRNRGWYIQAATSPKDIVILVDVSGSMKGLRMTIAKHTITTILDTLGENDFINIIAYNDYVHYIEPCFKGILVQADRDNREHFKLLVEELMVKGVGVVDQALREAFQILKQFQEAKQGSLCNQAIMLISDGAVEDYEPVFEKYNWPDCKVRVFTYLIGREVSFADRMKWIACNNKGYYTQISTLADTQENVMEYLHVLSRPMVINHDHDIIWTEAYMDSKLLSSQAQSLTLLTTVAMPVFSKKNETRSHGILLGVVGSDVALRELMKLAPRYKYREGKKLKPKPNYNSVDLSEVEWEDQAESLRTAMINRETGTLSMDVKVPMDKGKRVLFLTNDYFFTDISDTPFSLGVVLSRGHGEYILLGNTSVEEGLHDLLHPDLALAGDWIYCITDIDPDHRKLSQLEAMIRFLTRKDPDLECDEELVREVLFDAVVTAPMEAYWTALALNMSEESEHVVDMAFLGTRAGLLRSSLFVGSEKVSDRKFLTPEDEASVFTLDRFPLWYRQASEHPAGSFVFNLRWAEGPESAGEPMVVTASTAVAVTVDKRTAIAAAAGVQMKLEFLQRKFWAATRQCSTVDGPCTQSCEDSDLDCFVIDNNGFILISKRSRETGRFLGEVDGAVLTQLLSMGVFSQVTMYDYQAMCKPSSHHHSAAQPLVSPISAFLTATRWLLQELVLFLLEWSVWGSWYDRGAEAKSVFHHSHKHKKQDPLQPCDTEYPVFVYQPAIREANGIVECGPCQNNSALSKAAQFG

SEQ ID NO: 2229 - protein, 985 aa, Artificial Sequence
  Synthetic polypeptide
MAVALGTRRRDRVKLWADTFGGDLYNTVTKYSGSLLLQKKYKDVESSLKIEEVDGLELVRKFSEDMENMLRRKVEAVQNLVEAAEEADLNHEFNESLVFDYYNSVLINERDEKGNFVELGAEFLLESNAHFSNLPVNTSISSVQLPTNVYNKDPDILNGVYMSEALNAVFVENFQRDPTLTWQYFGSATGFFRIYPGIKWTPDENGVITFDCRNRGWYIQAATSPKDIVILVDVSGSMKGLRMTIAKHTITTILDTLGENDFINIIAYNDYVHYIEPCFKGILVQADRDNREHFKLLVEELMVKGVGVVDQALREAFQILKQFQEAKQGSLCNQAIMLISDGAVEDYEPVFEKYNWPDCKVRVFTYLIGREVSFADRMKWIACNNKGYYTQISTLADTQENVMEYLHVLSRPMVINHDHDIIWTEAYMDSKLLSSQAQSLTLLTTVAMPVFSKKNETRSHGILLGVVGSDVALRELMKLAPRYKLGVHGYAFLNTNNGYILSHPDLRPLYREGKKLKPKPNYNSVDLSEVEWEDQAESLRTAMINRETGTLSMDVKVPMDKGKRVLFLTNDYFFTDISDTPFSLGVVLSRGHGEYILLGNTSVEEGLHDLLHPDLALAGDWIYCITDIDPDHRKLSQLEAMIRFLTRKDPDLECDEELVREVLFDAVVTAPMEAYWTALALNMSEESEHVVDMAFLGTRAGLLRSSLFVGSEKVSDRKFLTPEDEASVFTLDRFPLWYRQASEHPAGSFVFNLRWAEGPESAGEPMVVTASTAVAVTVDKRTAIAAAAGVQMKLEFLQRKFWAATRQCSTVDGPCTQSCEDSDLDCFVIDNNGFILISKRSRETGRFLGEVDGAVLTQLLSMGVFSQVTMYDYQAMCKPSSHHHSAAQPLVSPISAFLTATRWLLQELVLFLLEWSVWGSWYDRGAEAKSVFHHSHKHKKQDPLQPCDTEYPVFVYQPAIREANGIVECGPCQNNSALSKAAQFG

SEQ ID NO: 2230 - protein, 194 aa, Artificial Sequence
  Synthetic polypeptide
MKLEFLQRKFWAATRQCSTVDGPCTQSCEDSDLDCFVIDNNGFILISKRSRETGRFLGEVDGAVLTQLLSMGVFSQVTMYDYQAMCKPSSHHHSAAQPLVSPISAFLTATRWLLQELVLFLLEWSVWGSWYDRGAEAKSVFHHSHKHKKQDPLQPCDTEYPVFVYQPAIREANGIVECGPCQNNSALSKAAQFG

SEQ ID NO: 2231 - protein, 4 aa, Artificial Sequence
  Synthetic polypeptide
RASK

SEQ ID NO: 2232 - protein, 1072 aa, Artificial Sequence
  Synthetic polypeptide
MAVPGDAARVRDKPVHSGVSQAPTAGRDCHHRADPASPRDSGCRGCWGDLVLQPLRSSRKLSSALCAGSLSFLLALLVRLVRGEVGCDLEQCKEAAAAEEEEAAPGAEGGVFPGPRGGAPGGGARLSPWLQPSALLFSLLCAFFWMGLYLLRAGVRLPLAVALLAACCGGEALVQIGLGVGEDHLLSLPAAGVVLSCLAAATWLVLRLRLGVLMIALTSAVRTVSLISLERFKVAWRPYLAYLAGVLGILLARYVEQILPQSAEAAPREHLGSQLIAGTKEDIPVFKRRRRSSSVVSAEMSGCSSKSHRRTSLPCIPREQLMGHSEWDHKRGPRGSQSSGTSITVDIAVMGEAHGLITDLLADPSLPPNVCTSLRAVSNLLSTQLTFQAIHKPRVNPVTSLSENYTCSDSEESSEKDKLAIPKRLRRSLPPGLLRRVSSTWTTTTSATGLPTLEPAPVRRDRSTSIKLQEAPSSSPDSWNNPVMMTLTKSRSFTSSYAISAANHVKAKKQSRPGALAKISPLSSPCSSPLQGTPASSLVSKISAVQFPESADTTAKQSLGSHRALTYTQSAPDLSPQILTPPVICSSCGRPYSQGNPADEPLERSGVATRTPSRTDDTAQVTSDYETNNNSDSSDIVQNEDETECLREPLRKASACSTYAPETMMFLDKPILAPEPLVMDNLDSIMEQLNTWNFPIFDLVENIGRKCGRILSQVSYRLFEDMGLFEAFKIPIREFMNYFHALEIGYRDIPYHNRIHATDVLHAVWYLTTQPIPGLSTVINDHGSTSDSDSDSGFTHGHMGYVFSKTYNVTDDKYGCLSGNIPALELMALYVAAAMHDYDHPGRTNAFLVATSAPQAVLYNDRSVLENHHAAAAWNLFMSRPEYNFLINLDHVEFKHFRFLVIEAILATDLKKHFDFVAKFNGKVNDDVGIDWTNENDRLLVCQMCIKLADINGPAKCKELHLQWTDGIVNEFYEQGDEEASLGLPISPFMDRSAPQLANLQESFISHIVGPLCNSYDSAGLMPGKWVEDSDESGDTDDPEEEEEEAPAPNEEETCENNESPKTETKNHGFRC

SEQ ID NO: 2233 - protein, 1076 aa, Artificial Sequence
  Synthetic polypeptide
MAVPGDAARVRDKPVHSGVSQAPTAGRDCHHRADPASPRDSGCRGCWGDLVLQPLRSSRKLSSALCAGSLSFLLALLVRLVRGEVGCDLEQCKEAAAAEEEEAAPGAEGGVFPGPRGGAPGGGARLSPWLQPSALLFSLLCAFFWMGLYLLRAGVRLPLAVALLAACCGGEALVQIGLGVGEDHLLSLPAAGVVLSCLAAATWLVLRLRLGVLMIALTSAVRTVSLISLERFKVAWRPYLAYLAGVLGILLARYVEQILPQSAEAAPREHLGSQLIAGTKEDIPVFKRRRRSSSVVSAEMSGCSSKSHRRTSLPCIPREQLMGHSEWDHKRGPRGSQSSGTSITVDIAVMGEAHGLITDLLADPSLPPNVCTSLRAVSNLLSTQLTFQAIHKPRVNPVTSLSENYTCSDSEESSEKDKLAIPKRLRRSLPPGLLRRVSSTWTTTTSATGLPTLEPAPVRRDRSTSIKLQEAPSSSPDSWNNPVMMTLTKSRSFTSSYAISAANHVKAKKQSRPGALAKISPLSSPCSSPLQGTPASSLVSKISAVQFPESADTTAKQSLGSHRALTYTQSAPDLSPQILTPPVICSSCGRPYSQGNPADEPLERSGVATRTPSRTDDTAQVTSDYETNNNSDSSDIVQNEDETECLREPLRKASACSTYAPETMMFLDKPILAPEPLVMDNLDSIMEQLNTWNFPIFDLVENIGRKCGRILSQVSYRLFEDMGLFEAFKIPIREFMNYFHALEIGYRDIPYHNRIHATDVLHAVWYLTTQPIPGLSTVINDHGSTSDSDSDSGFTHGHMGYVFSKTYNVTDDKYGCLSGNIPALELMALYVAAAMHDYDHPGRTNAFLVATSAPQAVLYNDRSVLENHHAAAAWNLFMSRPEYNFLINLDHVEFKHFRFLVIEAILATDLKKHFDFVAKFNGKVNDDVGIDWTNENDRLLVCQMCIKLADINGPAKCKELHLQWTDGIVNEFYEQGDEEASLGLPISPFMDRSAPQLANLQESFISHIVGPLCNSYDSAGLMPGKWVEDSDESGDTDDPEEEEEEAPAPNEEETCENNESPKPQGQSCPRTPPASF

SEQ ID NO: 2234 - protein, 106 aa, Artificial Sequence
  Synthetic polypeptide
MAAVAAGGLVGKGRDISLAALQRHDPYINRIVDVASQVALYTFGHRANEWEKTDVEGTLFVYTRSASPKHGFTIMNRLSMENRTEPITKDLDFQLQDPFLLYRNAR

SEQ ID NO: 2235 - protein, 202 aa, Artificial Sequence
  Synthetic polypeptide
MSPCGRARRQTSRGAMAVLAWKFPRTRLPMGASALCVVVLCWLYIFPVYRLPNEKEIVQGVLQQGTAWRRNQTAARAFRKQMEDCCDPAHLFAMTKMNSPMGKSMWYDGEFLYSFTIDNSTYSLFPQATPFQLPLKKCAVVGNGGILKKSGCGRQIDEANFVMRCNLPPLSSEYTKDVGSKSQLVTANPSIIRQRWLRPKNE

SEQ ID NO: 2236 - protein, 59 aa, Artificial Sequence
  Synthetic polypeptide
MTGSFYTHSPLTIQLTLSSHRCNLPPLSSEYTKDVGSKSQLVTANPSIIRQRWLRPKNE

SEQ ID NO: 2237 - protein, 153 aa, Artificial Sequence
  Synthetic polypeptide
LFQDRRELAGYFAGLKMIFILKNLYQPPLWKQMEDCCDPAHLFAMTKMNSPMGKSMWYDGEFLYSFTIDNSTYSLFPQATPFQLPLKKCAVVGNGGILKKSGCGRQIDEANFVMRCNLPPLSSEYTKDVGSKSQLVTANPSIIRQRWLRPKNE

SEQ ID NO: 2238 - protein, 21 aa, Artificial Sequence
  Synthetic polypeptide
SQLVTANPSIIRQRWLRPKNE

SEQ ID NO: 2239 - protein, 179 aa, Artificial Sequence
  Synthetic polypeptide
PRTRLPMGASALCVVVLCWLYIFPVYRLPNEKEIVQGVLQQGTAWRRNQTAARAFRKQMEDCCDPAHLFAMTKMNSPMGKSMWYDGEFLYSFTIDNSTYSLFPQATPFQLPLKKCAVVGNGGILKKSGCGRQIDEANFVMRCNLPPLSSEYTKDVGSKSQLVTANPSIIRQRWLRPKNE

SEQ ID NO: 2240 - protein, 23 aa, Artificial Sequence
  Synthetic polypeptide
MNDDPSMEPGMVAGACKTSSLGG

SEQ ID NO: 2241 - protein, 64 aa, Artificial Sequence
  Synthetic polypeptide
MNDDPSMEAWWQAPVKPAPWEAEAGESLESGRRRLSEPRSCHCSPAWATRAKLHLKRKKKKEKE

SEQ ID NO: 2242 - protein, 27 aa, Artificial Sequence
  Synthetic polypeptide
MNDDPSMELGRQERNSISKEKKRKKKK

SEQ ID NO: 2243 - protein, 100 aa, Artificial Sequence
  Synthetic polypeptide
MNDDPSMEENGVERVCPESLLQSREYSSLPLPRHTSSTDGTITSSDPGLEILNMASCDLDRNSLCKKEEDTRSASPTIEAQALWEAEAGRSRGQKIEGPS

SEQ ID NO: 2244 - protein, 47 aa, Artificial Sequence
  Synthetic polypeptide
MASCDLDRNSLCKKEEDTRSASPTIEAQALWEAEAGRSRGQKIEGPS

SEQ ID NO: 2245 - protein, 7 aa, Artificial Sequence
  Synthetic polypeptide
LLWFPAA

SEQ ID NO: 2246 - protein, 495 aa, Artificial Sequence
  Synthetic polypeptide
MAAEEEAAAGGKVLREENQCIAPVVSSRVSPGTRPTAMGSFSSHMTEFPRKRKGSDSDPSQVEDGEHQVKMKAFREAHSQTEKRRRDKMNNLIEELSAMIPQCNPMARKLDKLTVLRMAVQHLRSLKGLTNSYVGSNYRPSFLQDNELRHLILKTAEGFLFVVGCERGKILFVSKSVSKILNYDQASLTGQSLFDFLHPKDVAKVKEQLSSFDISPREKLIDAKTGLQVHSNLHAGRTRVYSGSRRSFFCRIKSCKISVKEEHGCLPNSKKKEHRKFYTIHCTGYLRSWPPNIVGMEEERNSKKDNSNFTCLVAIGRLQPYIVPQNSGEINVKPTEFITRFAVNGKFVYVDQRATAILGYLPQELLGTSCYEYFHQDDHNNLTDKHKAVLQSKEKILTDSYKFRAKDGSFVTLKSQWFSFTNPWTKELEYIVSVNTLVLGHSEPGEASFLPCSSQSSEESSRQSCMSVPGMSTGTVLGAGSIGTDIANEILDLQR

SEQ ID NO: 2247 - protein, 492 aa, Artificial Sequence
  Synthetic polypeptide
MAAEEEAAAGGEVAGGEATAPGKVLREENQCIAPVVSSRVSPGTRPTAMGSFSSHMTEFPRKRKGSDSDPSQEAHSQTEKRRRDKMNNLIEELSAMIPQCNPMARKLDKLTVLRMAVQHLRSLKGLTNSYVGSNYRPSFLQDNELRHLILKTAEGFLFVVGCERGKILFVSKSVSKILNYDQASLTGQSLFDFLHPKDVAKVKEQLSSFDISPREKLIDAKTGLQVHSNLHAGRTRVYSGSRRSFFCRIKSCKISVKEEHGCLPNSKKKEHRKFYTIHCTGYLRSWPPNIVGMEEERNSKKDNSNFTCLVAIGRLQPYIVPQNSGEINVKPTEFITRFAVNGKFVYVDQRATAILGYLPQELLGTSCYEYFHQDDHNNLTDKHKAVLQSKEKILTDSYKFRAKDGSFVTLKSQWFSFTNPWTKELEYIVSVNTLVLGHSEPGEASFLPCSSQSSEESSRQSCMSVPGMSTGTVLGAGSIGTDIANEILDLQR

SEQ ID NO: 2248 - protein, 515 aa, Artificial Sequence
  Synthetic polypeptide
MAAEEEAAAGGKVLREENQCIAPVVSSRVSPGTRPTAMGSFSSHMTEFPRKRKGSDSDPSQSGIMTEKVVEKLSQNPLTYLLSTRIEISASSGSREAHSQTEKRRRDKMNNLIEELSAMIPQCNPMARKLDKLTVLRMAVQHLRSLKGLTNSYVGSNYRPSFLQDNELRHLILKTAEGFLFVVGCERGKILFVSKSVSKILNYDQASLTGQSLFDFLHPKDVAKVKEQLSSFDISPREKLIDAKTGLQVHSNLHAGRTRVYSGSRRSFFCRIKSCKISVKEEHGCLPNSKKKEHRKFYTIHCTGYLRSWPPNIVGMEEERNSKKDNSNFTCLVAIGRLQPYIVPQNSGEINVKPTEFITRFAVNGKFVYVDQRATAILGYLPQELLGTSCYEYFHQDDHNNLTDKHKAVLQSKEKILTDSYKFRAKDGSFVTLKSQWFSFTNPWTKELEYIVSVNTLVLGHSEPGEASFLPCSSQSSEESSRQSCMSVPGMSTGTVLGAGSIGTDIANEILDLQR

SEQ ID NO: 2249 - protein, 481 aa, Artificial Sequence
  Synthetic polypeptide
MAAEEEAAAGGKVLREENQCIAPVVSSRVSPGTRPTAMGSFSSHMTEFPRKRKGSDSDPSQEAHSQTEKRRRDKMNNLIEELSAMIPQCNPMARKLDKLTVLRMAVQHLRSLKGLTNSYVGSNYRPSFLQDNELRHLILKTAEGFLFVVGCERGKILFVSKSVSKILNYDQASLTGQSLFDFLHPKDVAKVKEQLSSFDISPREKLIDAKTGLQVHSNLHAGRTRVYSGSRRSFFCRIKSCKISVKEEHGCLPNSKKKEHRKFYTIHCTGYLRSWPPNIVGMEEERNSKKDNSNFTCLVAIGRLQPYIVPQNSGEINVKPTEFITRFAVNGKFVYVDQRATAILGYLPQELLGTSCYEYFHQDDHNNLTDKHKAVLQSKEKILTDSYKFRAKDGSFVTLKSQWFSFTNPWTKELEYIVSVNTLVLGHSEPGEASFLPCSSQSSEESSRQSCMSVPGMSTGTVLGAGSIGTDIANEILDLQR

SEQ ID NO: 2250 - protein, 529 aa, Artificial Sequence
  Synthetic polypeptide
MAAEEEAAAGGKVLREENQCIAPVVSSRVSPGTRPTAMGSFSSHMTEFPRKRKGSDSDPSQSGIMTEKVVEKLSQNPLTYLLSTRIEISASSGSRVEDGEHQVKMKAFREAHSQTEKRRRDKMNNLIEELSAMIPQCNPMARKLDKLTVLRMAVQHLRSLKGLTNSYVGSNYRPSFLQDNELRHLILKTAEGFLFVVGCERGKILFVSKSVSKILNYDQASLTGQSLFDFLHPKDVAKVKEQLSSFDISPREKLIDAKTGLQVHSNLHAGRTRVYSGSRRSFFCRIKSCKISVKEEHGCLPNSKKKEHRKFYTIHCTGYLRSWPPNIVGMEEERNSKKDNSNFTCLVAIGRLQPYIVPQNSGEINVKPTEFITRFAVNGKFVYVDQRATAILGYLPQELLGTSCYEYFHQDDHNNLTDKHKAVLQSKEKILTDSYKFRAKDGSFVTLKSQWFSFTNPWTKELEYIVSVNTLVLGHSEPGEASFLPCSSQSSEESSRQSCMSVPGMSTGTVLGAGSIGTDIANEILDLQR

SEQ ID NO: 2251 - protein, 444 aa, Artificial Sequence
  Synthetic polypeptide
MGSFSSHMTEFPRKRKGSDSDPSQEAHSQTEKRRRDKMNNLIEELSAMIPQCNPMARKLDKLTVLRMAVQHLRSLKGLTNSYVGSNYRPSFLQDNELRHLILKTAEGFLFVVGCERGKILFVSKSVSKILNYDQASLTGQSLFDFLHPKDVAKVKEQLSSFDISPREKLIDAKTGLQVHSNLHAGRTRVYSGSRRSFFCRIKSCKISVKEEHGCLPNSKKKEHRKFYTIHCTGYLRSWPPNIVGMEEERNSKKDNSNFTCLVAIGRLQPYIVPQNSGEINVKPTEFITRFAVNGKFVYVDQRATAILGYLPQELLGTSCYEYFHQDDHNNLTDKHKAVLQSKEKILTDSYKFRAKDGSFVTLKSQWFSFTNPWTKELEYIVSVNTLVLGHSEPGEASFLPCSSQSSEESSRQSCMSVPGMSTGTVLGAGSIGTDIANEILDLQR

SEQ ID NO: 2252 - protein, 540 aa, Artificial Sequence
  Synthetic polypeptide
MAAEEEAAAGGKVLREENQCIAPVVSSRVSPGTRPTAMGSFSSHMTEFPRKRKGSDSDPSQVEDGEHQVKMKAFREAHSQTEKRRRDKMNNLIEELSAMIPQCNPMARKLDKLTVLRMAVQHLRSLKGLTNSYVGSNYRPSFLQDNELRHLILKTAEGFLFVVGCERGKILFVSKSVSKILNYDQASLTGQSLFDFLHPKDVAKVKEQLSSFDISPREKLIDAKTGLQVHSNLHAGRTRVYSGSRRSFFCRIKSCKISVKEEHGCLPNSKKKEHRKFYTIHCTGYLRSWPPNIVGMEEERNSKKDNSNFTCLVAIGRLQPYIVPQNSGEINVKPTEFITRFAVNGKFVYVDQRATAILGYLPQELLGTSCYEYFHQDDHNNLTDKHKAVLQSKEKILTDSYKFRAKDGSFVTLKSQWFSFTNPWTKELEYIVSVNTLVLGHSEPGEASFLPCSSQSSEESSRQSCMSVPGMSTGTVLGAGSIGTDIANEILDLQRLQSSSYLDDSSPTGLMKDTHTVNCRSAQWLTPVIPTLWEAEAGRS

SEQ ID NO: 2253 - protein, 537 aa, Artificial Sequence
  Synthetic polypeptide
MAAEEEAAAGGEVAGGEATAPGKVLREENQCIAPVVSSRVSPGTRPTAMGSFSSHMTEFPRKRKGSDSDPSQEAHSQTEKRRRDKMNNLIEELSAMIPQCNPMARKLDKLTVLRMAVQHLRSLKGLTNSYVGSNYRPSFLQDNELRHLILKTAEGFLFVVGCERGKILFVSKSVSKILNYDQASLTGQSLFDFLHPKDVAKVKEQLSSFDISPREKLIDAKTGLQVHSNLHAGRTRVYSGSRRSFFCRIKSCKISVKEEHGCLPNSKKKEHRKFYTIHCTGYLRSWPPNIVGMEEERNSKKDNSNFTCLVAIGRLQPYIVPQNSGEINVKPTEFITRFAVNGKFVYVDQRATAILGYLPQELLGTSCYEYFHQDDHNNLTDKHKAVLQSKEKILTDSYKFRAKDGSFVTLKSQWFSFTNPWTKELEYIVSVNTLVLGHSEPGEASFLPCSSQSSEESSRQSCMSVPGMSTGTVLGAGSIGTDIANEILDLQRLQSSSYLDDSSPTGLMKDTHTVNCRSAQWLTPVIPTLWEAEAGRS

SEQ ID NO: 2254 - protein, 560 aa, Artificial Sequence
  Synthetic polypeptide
MAAEEEAAAGGKVLREENQCIAPVVSSRVSPGTRPTAMGSFSSHMTEFPRKRKGSDSDPSQSGIMTEKVVEKLSQNPLTYLLSTRIEISASSGSREAHSQTEKRRRDKMNNLIEELSAMIPQCNPMARKLDKLTVLRMAVQHLRSLKGLTNSYVGSNYRPSFLQDNELRHLILKTAEGFLFVVGCERGKILFVSKSVSKILNYDQASLTGQSLFDFLHPKDVAKVKEQLSSFDISPREKLIDAKTGLQVHSNLHAGRTRVYSGSRRSFFCRIKSCKISVKEEHGCLPNSKKKEHRKFYTIHCTGYLRSWPPNIVGMEEERNSKKDNSNFTCLVAIGRLQPYIVPQNSGEINVKPTEFITRFAVNGKFVYVDQRATAILGYLPQELLGTSCYEYFHQDDHNNLTDKHKAVLQSKEKILTDSYKFRAKDGSFVTLKSQWFSFTNPWTKELEYIVSVNTLVLGHSEPGEASFLPCSSQSSEESSRQSCMSVPGMSTGTVLGAGSIGTDIANEILDLQRLQSSSYLDDSSPTGLMKDTHTVNCRSAQWLTPVIPTLWEAEAGRS

SEQ ID NO: 2255 - protein, 526 aa, Artificial Sequence
  Synthetic polypeptide
MAAEEEAAAGGKVLREENQCIAPVVSSRVSPGTRPTAMGSFSSHMTEFPRKRKGSDSDPSQEAHSQTEKRRRDKMNNLIEELSAMIPQCNPMARKLDKLTVLRMAVQHLRSLKGLTNSYVGSNYRPSFLQDNELRHLILKTAEGFLFVVGCERGKILFVSKSVSKILNYDQASLTGQSLFDFLHPKDVAKVKEQLSSFDISPREKLIDAKTGLQVHSNLHAGRTRVYSGSRRSFFCRIKSCKISVKEEHGCLPNSKKKEHRKFYTIHCTGYLRSWPPNIVGMEEERNSKKDNSNFTCLVAIGRLQPYIVPQNSGEINVKPTEFITRFAVNGKFVYVDQRATAILGYLPQELLGTSCYEYFHQDDHNNLTDKHKAVLQSKEKILTDSYKFRAKDGSFVTLKSQWFSFTNPWTKELEYIVSVNTLVLGHSEPGEASFLPCSSQSSEESSRQSCMSVPGMSTGTVLGAGSIGTDIANEILDLQRLQSSSYLDDSSPTGLMKDTHTVNCRSAQWLTPVIPTLWEAEAGRS

SEQ ID NO: 2256 - protein, 574 aa, Artificial Sequence
  Synthetic polypeptide
MAAEEEAAAGGKVLREENQCIAPVVSSRVSPGTRPTAMGSFSSHMTEFPRKRKGSDSDPSQSGIMTEKVVEKLSQNPLTYLLSTRIEISASSGSRVEDGEHQVKMKAFREAHSQTEKRRRDKMNNLIEELSAMIPQCNPMARKLDKLTVLRMAVQHLRSLKGLTNSYVGSNYRPSFLQDNELRHLILKTAEGFLFVVGCERGKILFVSKSVSKILNYDQASLTGQSLFDFLHPKDVAKVKEQLSSFDISPREKLIDAKTGLQVHSNLHAGRTRVYSGSRRSFFCRIKSCKISVKEEHGCLPNSKKKEHRKFYTIHCTGYLRSWPPNIVGMEEERNSKKDNSNFTCLVAIGRLQPYIVPQNSGEINVKPTEFITRFAVNGKFVYVDQRATAILGYLPQELLGTSCYEYFHQDDHNNLTDKHKAVLQSKEKILTDSYKFRAKDGSFVTLKSQWFSFTNPWTKELEYIVSVNTLVLGHSEPGEASFLPCSSQSSEESSRQSCMSVPGMSTGTVLGAGSIGTDIANEILDLQRLQSSSYLDDSSPTGLMKDTHTVNCRSAQWLTPVIPTLWEAEAGRS

SEQ ID NO: 2257 - protein, 7 aa, Artificial Sequence
  Synthetic polypeptide
LLWFPAA

SEQ ID NO: 2258 - protein, 489 aa, Artificial Sequence
  Synthetic polypeptide
MGSFSSHMTEFPRKRKGSDSDPSQEAHSQTEKRRRDKMNNLIEELSAMIPQCNPMARKLDKLTVLRMAVQHLRSLKGLTNSYVGSNYRPSFLQDNELRHLILKTAEGFLFVVGCERGKILFVSKSVSKILNYDQASLTGQSLFDFLHPKDVAKVKEQLSSFDISPREKLIDAKTGLQVHSNLHAGRTRVYSGSRRSFFCRIKSCKISVKEEHGCLPNSKKKEHRKFYTIHCTGYLRSWPPNIVGMEEERNSKKDNSNFTCLVAIGRLQPYIVPQNSGEINVKPTEFITRFAVNGKFVYVDQRATAILGYLPQELLGTSCYEYFHQDDHNNLTDKHKAVLQSKEKILTDSYKFRAKDGSFVTLKSQWFSFTNPWTKELEYIVSVNTLVLGHSEPGEASFLPCSSQSSEESSRQSCMSVPGMSTGTVLGAGSIGTDIANEILDLQRLQSSSYLDDSSPTGLMKDTHTVNCRSAQWLTPVIPTLWEAEAGRS

SEQ ID NO: 2259 - protein, 126 aa, Artificial Sequence
  Synthetic polypeptide
MLQQTGNKKCWQRCEEKGTLVHCWWECKFIQLLWRTVWRFLKKLKIELPYDPAMPLLDIYPKERKSVYRRNICAPEFAAALFTATKIWKQLKCPSTNDWIKKMWYLYTMEYYSTIKKHEIQSFATT

SEQ ID NO: 2260 - protein, 279 aa, Artificial Sequence
  Synthetic polypeptide
MMSDASDMLAAALEQMDGIIAGSKALEYSNGIFDCQSPTSPFMGSLRALHLVEDLRGLLEMMETDEKEGLRCQIPDSTAETLVEWLQSQMTNGHLPGNGDVYQERLARLENDKESLVLQVSVLTDQVEAQGEKIRDLEFCLEEHREKVNATEEMLQQTGNKKCWQRCEEKGTLVHCWWECKFIQLLWRTVWRFLKKLKIELPYDPAMPLLDIYPKERKSVYRRNICAPEFAAALFTATKIWKQLKCPSTNDWIKKMWYLYTMEYYSTIKKHEIQSFATT

SEQ ID NO: 2261 - protein, 42 aa, Artificial Sequence
  Synthetic polypeptide
MLQQAIRNAGKDVKKREPLYTVGGNVNSYNCYGEQFGGSSKN

SEQ ID NO: 2262 - protein, 195 aa, Artificial Sequence
  Synthetic polypeptide
MMSDASDMLAAALEQMDGIIAGSKALEYSNGIFDCQSPTSPFMGSLRALHLVEDLRGLLEMMETDEKEGLRCQIPDSTAETLVEWLQSQMTNGHLPGNGDVYQERLARLENDKESLVLQVSVLTDQVEAQGEKIRDLEFCLEEHREKVNATEEMLQQAIRNAGKDVKKREPLYTVGGNVNSYNCYGEQFGGSSKN

SEQ ID NO: 2263 - protein, 35 aa, Artificial Sequence
  Synthetic polypeptide
KKRMLKKGNYGRQNMQKIKKKYLRKFKKLYKNKEK

SEQ ID NO: 2264 - protein, 118 aa, Artificial Sequence
  Synthetic polypeptide
MLDTEKELLKEKIKEALIQQSQEQKEILEKCLEEERQRNKEALVSAAKLEKEAVKDAVLKVVEEERKNLEKAHAEERELWKTEHAKDQEKVSQEIQKAIQEQRKISQHHTALTPKLTT

SEQ ID NO: 2265 - protein, 342 aa, Artificial Sequence
  Synthetic polypeptide
MDDDDFGGFEAAETFDGGSGETQTTSPAIPWAAFPAVSGVHLSPSSPEIVLDRDHSSSIGCLSSDAIISSPENTHAANSIVSQTIPKAQIQQSTHTHLDISLFPLGLTDEKSNGTIALVDDSEDPGANVSNIQLQQKISSLEIKLKVSEEEKQRIKQDVESLMEKHNVLEKGFLKEKEQEAISFQDRYKELQEKHKQELEDMRKAGHEALSIIVDEYKHQRLLEMLDTEKELLKEKIKEALIQQSQEQKEILEKCLEEERQRNKEALVSAAKLEKEAVKDAVLKVVEEERKNLEKAHAEERELWKTEHAKDQEKVSQEIQKAIQEQRKISQHHTALTPKLTT

SEQ ID NO: 2266 - protein, 378 aa, Artificial Sequence
  Synthetic polypeptide
MDDDDFGGFEAAETFDGGSGETQTTSPAIPWAAFPAVSGVHLSPSSPEIVLDRDHSSSIGCLSSDAIISSPENTHAANSIVSQTIPKAQIQQSTHTHLDISLFPLGLTDEKSNGTIALVDDSEDPGANVSNIQLQQKISSLEIKLKVSEEEKQRIKQDVESLMEKHNVLEKGFLKEKEQEAISFQDRYKELQEKHKQELEDMRKAGHEALSIIVDEYKALLQSSVKQQVEAIEKQYISAIEKQAHKCEELLNAQHQRLLEMLDTEKELLKEKIKEALIQQSQEQKEILEKCLEEERQRNKEALVSAAKLEKEAVKDAVLKVVEEERKNLEKAHAEERELWKTEHAKDQEKVSQEIQKAIQEQRKISQHHTALTPKLTT

SEQ ID NO: 2267 - protein, 348 aa, Artificial Sequence
  Synthetic polypeptide
MPMWNKVSGVHLSPSSPEIVLDRDHSSSIGCLSSDAIISSPENTHAANSIVSQTIPKAQIQQSTHTHLDISLFPLGLTDEKSNGTIALVDDSEDPGANVSNIQLQQKISSLEIKLKVSEEEKQRIKQDVESLMEKHNVLEKGFLKEKEQEAISFQDRYKELQEKHKQELEDMRKAGHEALSIIVDEYKALLQSSVKQQVEAIEKQYISAIEKQAHKCEELLNAQHQRLLEMLDTEKELLKEKIKEALIQQSQEQKEILEKCLEEERQRNKEALVSAAKLEKEAVKDAVLKVVEEERKNLEKAHAEERELWKTEHAKDQEKVSQEIQKAIQEQRKISQHHTALTPKLTT

SEQ ID NO: 2268 - protein, 77 aa, Artificial Sequence
  Synthetic polypeptide
ALVSAAKLEKEAVKDAVLKVVEEERKNLEKAHAEERELWKTEHAKDQEKVSQEIQKAIQEQRKISQHHTALTPKLTT

SEQ ID NO: 2269 - protein, 573 aa, Artificial Sequence
  Synthetic polypeptide
MNPFYFHAVNIILHCLVTLVLMYTCDKTVFKNRGLAFVTALLFAVHPIHTEAVAGIVGRADVLACLLFLLAFLSYNRSLDQGCVGGSFPSTVSPFFLLLSLFLGTCAMLVKETGITVFGVCLVYDLFSLSNKQDKSSNGALCPRSPQQPGSPQPSSLPGHPHRENGKQQRFPHKGAWGGCHSPLPPEPKSSGFPVSPRAVWSMMRFLTYSYLLAFNVWLLLAPVTLCYDWQVGSIPLVETIWDMRNLATIFLAVVMALLSLHCLAAFKRLEHKEVLVGLLFLVFPFIPASNLFFRVGFVVAERVLYMPSMGYCILFVHGLSKLCTWLNRCGATTLIVSTVLLLLLFSWKTVKQNEIWLSRESLFRSGVQTLPHNAKVHYNYANFLKDQGRNKEAIYHYRTALKLYPRHASALNNLGTLTRDTAEAKMYYQRALQLHPQHNRALFNLGNLLKSQEKKEEAITLLKDSIKYGPEFADAYSSLASLLAEQERFKEAEEIYQTGIKNCPDSSDLHNNYGVFLVDTGLPEKAVAHYQQAIKLSPSHHVAMVNLGRLYRSLGENSMAEEWYKRCGGSCL

SEQ ID NO: 2270 - protein, 743 aa, Artificial Sequence
  Synthetic polypeptide
MVVTTSARGGGGDRTPSRRRGCGLAPAGAAALLAGASCLCYGRSLQGEFVHDDVWAIVNNPDVRPGAPLRWGIFTNDFWGKGMAENTSHKSYRPLCVLTFKLNIFLTGMNPFYFHAVNIILHCLVTLVLMYTCDKTVFKNRGLAFVTALLFAVHPIHTEAVAGIVGRADVLACLLFLLAFLSYNRSLDQGCVGGSFPSTVSPFFLLLSLFLGTCAMLVKETGITVFGVCLVYDLFSLSNKQDKSSNGALCPRSPQQPGSPQPSSLPGHPHRENGKQQRFPHKGAWGGCHSPLPPEPKSSGFPVSPRAVWSMMRYLRASSNRNFLLTMRPFLKRAILVLSYVLVILYFRLWIMGGSMPLFSEQDNPASFSPYILTRFLTYSYLLAFNVWLLLAPVTLCYDWQVGSIPLVETIWDMRNLATIFLAVVMALLSLHCLAAFKRLEHKEVLVGLLFLVFPFIPASNLFFRVGFVVAERVLYMPSMGYCILFVHGLSKLCTWLNRCGATTLIVSTVLLLLLFSWKTVKQNEIWLSRESLFRSGVQTLPHNAKVHYNYANFLKDQGRNKEAIYHYRTALKLYPRHASALNNLGTLTRDTAEAKMYYQRALQLHPQHNRALFNLGNLLKSQEKKEEAITLLKDSIKYGPEFADAYSSLASLLAEQERFKEAEEIYQTGIKNCPDSSDLHNNYGVFLVDTGLPEKAVAHYQQAIKLSPSHHVAMVNLGRLYRSLGENSMAEEWYKRCGGSCL

SEQ ID NO: 2271 - protein, 705 aa, Artificial Sequence
  Synthetic polypeptide
MVVTTSARGGGGDRTPSRRRGCGLAPAGAAALLAGASCLCYGRSLQGEFVHDDVWAIVNNPDVRPGAPLRWGIFTNDFWGKGMAENTSHKSYRPLCVLTFKLNIFLTGMNPFYFHAVNIILHCLVTLVLMYTCDKTVFKNRGLAFVTALLFAVHPIHTEAVAGIVGRADVLACLLFLLAFLSYNRSLDQGCVGGSFPSTVSPFFLLLSLFLGTCAMLVKETGITVFGVCLVYDLFSLSNKQDKSSNGALCPRSPQQPGSPQPSSLPGHPHRENGKQQRFPHKGAWGGCHSPLPPEPKSSGFPVSPRAVWSMMRYLRASSNRNFLLTMRPFLKRAILVLSYVLVILYFRLWIMGGSMPLFSEQDNPASFSPYILTRFLTYSYLLAFNVWLLLAPVTLCYDWQVGSIPLVETIWDMRNLATIFLAVVMALLSLHCLAAFKRLEHKEVLVGLLFLVFPFIPASNLFFRVGFVVAERVLYMPSMGYCILFVHGLSKLCTWLNRCGATTLIVSTVLLLLLFSWKTVKQNEIWLSRESLFRLYPRHASALNNLGTLTRDTAEAKMYYQRALQLHPQHNRALFNLGNLLKSQEKKEEAITLLKDSIKYGPEFADAYSSLASLLAEQERFKEAEEIYQTGIKNCPDSSDLHNNYGVFLVDTGLPEKAVAHYQQAIKLSPSHHVAMVNLGRLYRSLGENSMAEEWYKRCGGSCL

SEQ ID NO: 2272 - protein, 681 aa, Artificial Sequence
  Synthetic polypeptide
MVVTTSARGGGGDRTPSRRRGCGLAPAGAAALLAGASCLCYGRSLQGEFVHDDVWAIVNNPDVRPGAPLRWGIFTNDFWGKGMAENTSHKSYRPLCVLTFKLNIFLTGMNPFYFHAVNIILHCLVTLVLMYTCDKTVFKNRGLAFVTALLFAVHPIHTEAVAGIVGRADVLACLLFLLAFLSYNRSLDQGCVGGSFPSTVSPFFLLLSLFLGTCAMLVKETGITVFGVCLVYDLFSLSNKQDKSSNGALCPRSPQQPGSPQPSSLPGHPHRENGKQQRFPHKGAWGGCHSPLPPEPKSSGFPVSPRAVWSMMRFLTYSYLLAFNVWLLLAPVTLCYDWQVGSIPLVETIWDMRNLATIFLAVVMALLSLHCLAAFKRLEHKEVLVGLLFLVFPFIPASNLFFRVGFVVAERVLYMPSMGYCILFVHGLSKLCTWLNRCGATTLIVSTVLLLLLFSWKTVKQNEIWLSRESLFRSGVQTLPHNAKVHYNYANFLKDQGRNKEAIYHYRTALKLYPRHASALNNLGTLTRDTAEAKMYYQRALQLHPQHNRALFNLGNLLKSQEKKEEAITLLKDSIKYGPEFADAYSSLASLLAEQERFKEAEEIYQTGIKNCPDSSDLHNNYGVFLVDTGLPEKAVAHYQQAIKLSPSHHVAMVNLGRLYRSLGENSMAEEWYKRCGGSCL

SEQ ID NO: 2273 - protein, 494 aa, Artificial Sequence
  Synthetic polypeptide
IKFSKLTCPERNESLSVEDQMEQSSLYFWDLLEGSEKAVVGTTYKHLKDLLSKLLNSGYFESIPVPKNAKEKEVPLEEEMLIQSEKKTQLSKTESVKESESLMEFAQPEIQPQEFLNRRYMTEVDYSNKQGEEQPWEADYARKPNLPKRWDMLTEPDGQEKKQESFKSWEASGKHQEVSKPAVSLEQRKQDTSKLRSTLPEEQKKQEISKSKPSPSQWKQDTPKSKAGYVQEEQKKQETPKLWPVQLQKEQDPKKQTPKSWTPSMQSEQNTTKSWTTPMCEEQDSKQPETPKSWENNVESQKHSLTSQSQISPKSWGVATASLIPNDQLLPRKLNTEPKDVPKPVHQPVGSSSTLPKDPVLRKEKLQDLMTQIQGTCNFMQESVLDFDKPSSAIPTSQPPSATPGSPVASKEQNLSSQSDFLQEPLQATSSPVTCSSNACLVTTDQASSGSETEFMTSETPEMQWLTPAIPALWEAEAGGSLEVRSSRPAWPTW

SEQ ID NO: 2274 - protein, 748 aa, Artificial Sequence
  Synthetic polypeptide
MEVQVSQASLGFELTSVEKSLREWSRLSREVIAWLCPSSPNFILNFPPPPSASSVSMVQLFSSPFGYQSPSGHSEEEREGNMKSAKPQVNHSQHGESQRALSPLQSTLSSAASPSQAYETYIENGLICLKHKIRNIEKKKLKLEDYKDRLKSGEHLNPDQLEAVEKYEEVLHNLEFAKELQKTFSGLSLDLLKAQKKAQRREHMLKLEAEKKKLRTILQVQYVLQNLTQEHVQKDFKGGLNGAVYLPSKELDYLIKFSKLTCPERNESLSVEDQMEQSSLYFWDLLEGSEKAVVGTTYKHLKDLLSKLLNSGYFESIPVPKNAKEKEVPLEEEMLIQSEKKTQLSKTESVKESESLMEFAQPEIQPQEFLNRRYMTEVDYSNKQGEEQPWEADYARKPNLPKRWDMLTEPDGQEKKQESFKSWEASGKHQEVSKPAVSLEQRKQDTSKLRSTLPEEQKKQEISKSKPSPSQWKQDTPKSKAGYVQEEQKKQETPKLWPVQLQKEQDPKKQTPKSWTPSMQSEQNTTKSWTTPMCEEQDSKQPETPKSWENNVESQKHSLTSQSQISPKSWGVATASLIPNDQLLPRKLNTEPKDVPKPVHQPVGSSSTLPKDPVLRKEKLQDLMTQIQGTCNFMQESVLDFDKPSSAIPTSQPPSATPGSPVASKEQNLSSQSDFLQEPLQATSSPVTCSSNACLVTTDQASSGSETEFMTSETPEMQWLTPAIPALWEAEAGGSLEVRSSRPAWPTW

SEQ ID NO: 2275 - protein, 415 aa, Artificial Sequence
  Synthetic polypeptide
MLIQSEKKTQLSKTESVKESESLMEFAQPEIQPQEFLNRRYMTEVDYSNKQGEEQPWEADYARKPNLPKRWDMLTEPDGQEKKQESFKSWEASGKHQEVSKPAVSLEQRKQDTSKLRSTLPEEQKKQEISKSKPSPSQWKQDTPKSKAGYVQEEQKKQETPKLWPVQLQKEQDPKKQTPKSWTPSMQSEQNTTKSWTTPMCEEQDSKQPETPKSWENNVESQKHSLTSQSQISPKSWGVATASLIPNDQLLPRKLNTEPKDVPKPVHQPVGSSSTLPKDPVLRKEKLQDLMTQIQGTCNFMQESVLDFDKPSSAIPTSQPPSATPGSPVASKEQNLSSQSDFLQEPLQATSSPVTCSSNACLVTTDQASSGSETEFMTSETPEMQWLTPAIPALWEAEAGGSLEVRSSRPAWPTW

SEQ ID NO: 2276 - protein, 667 aa, Artificial Sequence
  Synthetic polypeptide
MKSAKPQVNHSQHGESQRALSPLQSTLSSAASPSQAYETYIENGLICLKHKIRNIEKKKLKLEDYKDRLKSGEHLNPDQLEAVEKYEEVLHNLEFAKELQKTFSGLSLDLLKAQKKAQRREHMLKLEAEKKKLRTILQVQYVLQNLTQEHVQKDFKGGLNGAVYLPSKELDYLIKFSKLTCPERNESLSVEDQMEQSSLYFWDLLEGSEKAVVGTTYKHLKDLLSKLLNSGYFESIPVPKNAKEKEVPLEEEMLIQSEKKTQLSKTESVKESESLMEFAQPEIQPQEFLNRRYMTEVDYSNKQGEEQPWEADYARKPNLPKRWDMLTEPDGQEKKQESFKSWEASGKHQEVSKPAVSLEQRKQDTSKLRSTLPEEQKKQEISKSKPSPSQWKQDTPKSKAGYVQEEQKKQETPKLWPVQLQKEQDPKKQTPKSWTPSMQSEQNTTKSWTTPMCEEQDSKQPETPKSWENNVESQKHSLTSQSQISPKSWGVATASLIPNDQLLPRKLNTEPKDVPKPVHQPVGSSSTLPKDPVLRKEKLQDLMTQIQGTCNFMQESVLDFDKPSSAIPTSQPPSATPGSPVASKEQNLSSQSDFLQEPLQATSSPVTCSSNACLVTTDQASSGSETEFMTSETPEMQWLTPAIPALWEAEAGGSLEVRSSRPAWPTW

SEQ ID NO: 2277 - protein, 76 aa, Artificial Sequence
  Synthetic polypeptide
MEGTAGTITSNEWSSPTSPEGSTASGGSQALDKPIDNDAEGVWSPDIEQSFQEALAIYPPCGRRKIILSDEGKMYG

SEQ ID NO: 2278 - protein, 596 aa, Artificial Sequence
  Synthetic polypeptide
MANETQKVGAIHFPFPFTPYSIQEDFMAELYRVLEAGKIGIFESPTGTGKSLSLICGALSWLRDFEQKKREEEARLLETGTGPLHDEKDESLCLSSSCEGAAGTPRPAGEPAWVTQFVQKKEERDLVDRLKAEQARRKQREERLQQLQHRVQLKYAAKRLRQEEEERENLLRLSREMLETGPEAERLEQLESGEEELVLAEYESDEEKKVASRVDEDEDDLEEEHITKIYYCSRTHSQLAQFVHEVKKSPFGKDVRLVSLGSRQNLCVNEDVKSLGSVQLINDRCVDMQRSRHEKKKGAEEEKPKRRRQEKQAACPFYNHEQMGLLRDEALAEVKDMEQLLALGKEARACPYYGSRLAIPAAQLVVLPYQMLLHAATRQAAGIRLQDQVVIIDEAHNLIDTITGMHSVEVSGSQLCQAHSQLLQYVERYGKRLKAKNLMYLKQILYLLEKFVAVLGGNIKQNPNTQSLSQTGTELKTINDFLFQSQIDNINLFKVQRYCEKSMISRKLFGFTERYGAVFSSREQPKLAGFQQFLQSLQPRTTEALAAPADESQASTLRPASPLMHIQGFLAALTTANQDGRVILSRQVSSYENGED

SEQ ID NO: 2279 - protein, 570 aa, Artificial Sequence
  Synthetic polypeptide
MAELYRVLEAGKIGIFESPTGTGKSLSLICGALSWLRDFEQKKREEEARLLETGTGPLHDEKDESLCLSSSCEGAAGTPRPAGEPAWVTQFVQKKEERDLVDRLKAEQARRKQREERLQQLQHRVQLKYAAKRLRQEEEERENLLRLSREMLETGPEAERLEQLESGEEELVLAEYESDEEKKVASRVDEDEDDLEEEHITKIYYCSRTHSQLAQFVHEVKKSPFGKDVRLVSLGSRQNLCVNEDVKSLGSVQLINDRCVDMQRSRHEKKKGAEEEKPKRRRQEKQAACPFYNHEQMGLLRDEALAEVKDMEQLLALGKEARACPYYGSRLAIPAAQLVVLPYQMLLHAATRQAAGIRLQDQVVIIDEAHNLIDTITGMHSVEVSGSQLCQAHSQLLQYVERYGKRLKAKNLMYLKQILYLLEKFVAVLGGNIKQNPNTQSLSQTGTELKTINDFLFQSQIDNINLFKVQRYCEKSMISRKLFGFTERYGAVFSSREQPKLAGFQQFLQSLQPRTTEALAAPADESQASTLRPASPLMHIQGFLAALTTANQDGRVILSRQVSSYENGED

SEQ ID NO: 2280 - protein, 358 aa, Artificial Sequence
  Synthetic polypeptide
MSDEGGSNFRRVAIRRKSNPSYLPPGVPRPWSRPASHLGRVGTAAFKGQVPSGATGSSTCPKIALVPPCSTSSTTTLVGENVSEEEAQGINGNRPAKHSAASPKPQVPPKPLHLQNSPSSNIHQTPRHKALPSAKPRMEEIKPASASCVSKEKPSKVSDLISRFEGGSSLSNYSDLKKESAVNLNAPRTPGRHGLTTTPQQKLLSQHLPQRQGNDTDKTQGAQTCVANGVMAAQNQMECEEEKAATLSSDTSIQASEPLLDTHIVNGERDETATAPASPTTDSCDGNASDSSYRTPGIGPVLPLEERGAETETKVQERENGESPLELEQLDQHHEMKACSPSLTLPSELHLLSDQQQH

SEQ ID NO: 2281 - protein, 306 aa, Artificial Sequence
  Synthetic polypeptide
MGGCSSTCPKIALVPPCSTSSTTTLVGENVSEEEAQGINGNRPAKHSAASPKPQVPPKPLHLQNSPSSNIHQTPRHKALPSAKPRMEEIKPASASCVSKEKPSKVSDLISRFEGGSSLSNYSDLKKESAVNLNAPRTPGRHGLTTTPQQKLLSQHLPQRQGNDTDKTQGAQTCVANGVMAAQNQMECEEEKAATLSSDTSIQASEPLLDTHIVNGERDETATAPASPTTDSCDGNASDSSYRTPGIGPVLPLEERGAETETKVQERENGESPLELEQLDQHHEMKACSPSLTLPSELHLLSDQQQH

SEQ ID NO: 2282 - protein, 221 aa, Artificial Sequence
  Synthetic polypeptide
MEEIKPASASCVSKEKPSKVSDLISRFEGGSSLSNYSDLKKESAVNLNAPRTPGRHGLTTTPQQKLLSQHLPQRQGNDTDKTQGAQTCVANGVMAAQNQMECEEEKAATLSSDTSIQASEPLLDTHIVNGERDETATAPASPTTDSCDGNASDSSYRTPGIGPVLPLEERGAETETKVQERENGESPLELEQLDQHHEMKACSPSLTLPSELHLLSDQQQH

SEQ ID NO: 2283 - protein, 128 aa, Artificial Sequence
  Synthetic polypeptide
MAAQNQMECEEEKAATLSSDTSIQASEPLLDTHIVNGERDETATAPASPTTDSCDGNASDSSYRTPGIGPVLPLEERGAETETKVQERENGESPLELEQLDQHHEMKACSPSLTLPSELHLLSDQQQH

SEQ ID NO: 2284 - protein, 333 aa, Artificial Sequence
  Synthetic polypeptide
MNFKRVKPNIFLLNQSRLIISICEIMSTDQGSSTCPKIALVPPCSTSSTTTLVGENVSEEEAQGINGNRPAKHSAASPKPQVPPKPLHLQNSPSSNIHQTPRHKALPSAKPRMEEIKPASASCVSKEKPSKVSDLISRFEGGSSLSNYSDLKKESAVNLNAPRTPGRHGLTTTPQQKLLSQHLPQRQGNDTDKTQGAQTCVANGVMAAQNQMECEEEKAATLSSDTSIQASEPLLDTHIVNGERDETATAPASPTTDSCDGNASDSSYRTPGIGPVLPLEERGAETETKVQERENGESPLELEQLDQHHEMKACSPSLTLPSELHLLSDQQQH

SEQ ID NO: 2285 - protein, 28 aa, Artificial Sequence
  Synthetic polypeptide
GQKQKPRYKRGKMGKALWNWSSWTSTMR

SEQ ID NO: 2286 - protein, 73 aa, Artificial Sequence
  Synthetic polypeptide
MEALIPVINKLQDVFNTVGADIIQLPQIVVVGTQGTFLDNMNEPLCRLSSDLDVEMRSPGRELEERGEKKSRS

SEQ ID NO: 2287 - protein, 756 aa, Artificial Sequence
  Synthetic polypeptide
MAAPGAPAEYGYIRTVLGQQILGQLDSSSLALPSEAKLKLAGSSGRGGQTVKSLRIQEQVQQTLARKGRSSVGNGNLHRTSSVPEYVYNLHLVENDFVGGRSPVPKTYDMLKAGTTATYEGRWGRGTAQYSSQKSVEERSLRHPLRRLEISPDSSPERAHYTHSDYQYSQRSQAGHTLHHQESRRAALLVPPRYARSEIVGVSRAGTTSRQRHFDTYHRQYQHGSVSDTVFDSIPANPALLTYPRPGTSRSMGNLLEKENYLTAGLTVGQVRPLVPLQPVTQNRASRSSWHQSSFHSTRTLREAGPSVAVDSSGRRAHLTVGQAAAGGSGNLLTERSTFTDSQLGNADMEMTLERAVSMLEADHMLPSRISAAATFIQHECFQKSEARKRVNQLRGILKLLQLLKVQNEDVQRAVCGALRNLVFEDNDNKLEVAELNGVPRLLQVLKQTRDLETKKQITGLLWNLSSNDKLKNLMITEALLTLTENIIIPFSGWPEGDYPKANGLLDFDIFYNVTGCLRNMSSAGADGRKAMRRCDGLIDSLVHYVRGTIADYQPDDKATENCVCILHNLSYQLEAELPEKYSQNIYIQNRNIQTDNNKSIGCFGSRSRKVKEQYQDVPMPEEKSNPKGVEWLWHSIVIRMYLSLIAKSVRNYTQEASLGALQNLTAGSGPHRKPSCWRNWTGVYETSIYDLKKQKDTPLKFCAETDSQKLVKIRKLHKAKHEDFDHVLKVRICPRHSEHMAHSGMLTMKQRPMMN

SEQ ID NO: 2288 - protein, 800 aa, Artificial Sequence
  Synthetic polypeptide
MAAPGAPAEYGYIRTVLGQQILGQLDSSSLALPSEAKLKLAGSSGRGGQTVKSLRIQEQVQQTLARKGRSSVGNGNLHRTSSVPEYVYNLHLVENDFVGGRSPVPKTYDMLKAGTTATYEGRWGRGTAQYSSQKSVEERSLRHPLRRLEISPDSSPERAHYTHSDYQYSQRSQAGHTLHHQESRRAALLVPPRYARSEIVGVSRAGTTSRQRHFDTYHRQYQHGSVSDTVFDSIPANPALLTYPRPGTSRSMGNLLEKENYLTAGLTVGQVRPLVPLQPVTQNRASRSSWHQSSFHSTRTLREAGPSVAVDSSGRRAHLTVGQAAAGGSGNLLTERSTFTDSQLGNADMEMTLERAVSMLEADHMLPSRISAAATFIQHECFQKSEARKRVNQLRGILKLLQLLKVQNEDVQRAVCGALRNLVFEDNDNKLEVAELNGVPRLLQVLKQTRDLETKKQITDHTVNLRSRNGWPGAVAHACNPSTLGGQGGRITRSGVRDQPDQHGLLWNLSSNDKLKNLMITEALLTLTENIIIPFSGWPEGDYPKANGLLDFDIFYNVTGCLRNMSSAGADGRKAMRRCDGLIDSLVHYVRGTIADYQPDDKATENCVCILHNLSYQLEAELPEKYSQNIYIQNRNIQTDNNKSIGCFGSRSRKVKEQYQDVPMPEEKSNPKGVEWLWHSIVIRMYLSLIAKSVRNYTQEASLGALQNLTAGSGPHRKPSCWRNWTGVYETSIYDLKKQKDTPLKFCAETDSQKLVKIRKLHKAKHEDFDHVLKVRICPRHSEHMAHSGMLTMKQRPMMN

SEQ ID NO: 2289 - protein, 128 aa, Artificial Sequence
  Synthetic polypeptide
MAQLEGYCFSAALSCTFLVSCLLFSAFSRALREPYMDEIFHLPQAQRYCEGHFSLSQWDPMITTLPGLYLVSVGVVKPAIWIFAWSEHVVCSIGMLRFVNLLFSVGNFYLLYLLFHKVQPRNKLISYH

SEQ ID NO: 2290 - protein, 406 aa, Artificial Sequence
  Synthetic polypeptide
MDSRYNSTAGIGDLNQLSAAIPATRVEVSVSCRNLLDRDTFSKSDPICVLYVQGVGNKEWREFGRTEVIDNTLNPDFVRKFILDYFFEERENLRFDLYDVDSKSPNLSKHDFLGQVFCTLGEIVGSQGSRLEKPIVGIPGKKCGTIILTAEELNCCRDAVLMQFCANKLDKKDFFGKSDPFLVFYRSNEDGSFTICHKTEVVKNTLNPVWQAFKISVRALCNGDYDRTIKVEVYDWDRDGSHDFIGEFTTSYRELSRGQSQFNVYEVVNPKKKGKKKKYTNSGTVTLLSFLVETEVSFLDYIKGGTQINFTVAIDFTASNGNPAQPTSLHYMNPYQLNAYGMALKAVGEIVQDYDSDKMFPALGFGAKLPPDGRISHEFALLSDDCSPGRHLQCNLMRDPAQEPPC

SEQ ID NO: 2291 - protein, 75 aa, Artificial Sequence
  Synthetic polypeptide
MNPYQLNAYGMALKAVGEIVQDYDSDKMFPALGFGAKLPPDGRISHEFALLSDDCSPGRHLQCNLMRDPAQEPPC

SEQ ID NO: 2292 - protein, 394 aa, Artificial Sequence
  Synthetic polypeptide
MHFKCSSLYMLYLTEVETNWINLLDRDTFSKSDPICVLYVQGVGNKEWREFGRTEVIDNTLNPDFVRKFILDYFFEERENLRFDLYDVDSKSPNLSKHDFLGQVFCTLGEIVGSQGSRLEKPIVGIPGKKCGTIILTAEELNCCRDAVLMQFCANKLDKKDFFGKSDPFLVFYRSNEDGSFTICHKTEVVKNTLNPVWQAFKISVRALCNGDYDRTIKVEVYDWDRDGSHDFIGEFTTSYRELSRGQSQFNVYEVVNPKKKGKKKKYTNSGTVTLLSFLVETEVSFLDYIKGGTQINFTVAIDFTASNGNPAQPTSLHYMNPYQLNAYGMALKAVGEIVQDYDSDKMFPALGFGAKLPPDGRISHEFALLSDDCSPGRHLQCNLMRDPAQEPPC

SEQ ID NO: 2293 - protein, 1644 aa, Artificial Sequence
  Synthetic polypeptide
MAGVGPGGYAAEFVPPPECPVFEPSWEEFTDPLSFIGRIRPLAEKTGICKIRPPKDWQPPFACEVKSFRFTPRVQRLNELEAMTRVRLDFLDQLAKFWELQGSTLKIPVVERKILDLYALSKIVASKGGFEMVTKEKKWSKVGSRLGYLPGKGTGSLLKSHYERILYPYELFQSGVSLMGVQMPNLDLKEKVEPEVLSTDTQTSPEPGTRMNILPKRTRRVKTQSESGDVSRNTELKKLQIFGAGPKVVGLAMGTKDKEDEVTRRRKVTNRSDAFNMQMRQRKGTLSVNFVDLYVCMFCGRGNNEDKLLLCDGCDDSYHTFCLIPPLPDVPKGDWRCPKCVAEECSKPREAFGFEQAVREYTLQSFGEMADNFKSDYFNMPVHMVPTELVEKEFWRLVSSIEEDVIVEYGADISSKDFGSGFPVKDGRRKILPEEEEYALSGWNLNNMPVLEQSVLAHINVDISGMKVPWLYVGMCFSSFCWHIEDHWSYSINYLHWGEPKTWYGVPSHAAEQLEEVMRELAPELFESQPDLLHQLVTIMNPNVLMEHGVPVYRTNQCAGEFVVTFPRAYHSGFNQGYNFAEAVNFCTADWLPIGRQCVNHYRRLRRHCVFSHEELIFKMAADPECLDVGLAAMVCKELTLMTEEETRLRESVVQMGVLMSEEEVFELVPDDERQCSACRTTCFLSALTCSCNPERLVCLYHPTDLCPCPMQKKCLRYRYPLEDLPSLLYGVKVRAQSYDTWVSRVTEALSANFNHKKDLIELRVMLEDAEDRKYPENDLFRKLRDAVKEAETCASVAQLLLSKKQKHRQSPDSGRTRTKLTVEELKAFVQQLFSLPCVISQARQVKNLLDDVEEFHERAQEAMMDETPDSSKLQMLIDMGSSLYVELPELPRLKQELQQARWLDEVRLTLSDPQQVTLDVMKKLIDSGVGLAPHHAVEKAMAELQELLTVSERWEEKAKVCLQARPRHSVASLESIVNEAKNIPAFLPNVLSLKEALQKAREWTAKVEAIQSGSNYAYLEQLESLSAKGRPIPVRLEALPQVESQVAAARAWRERTGRTFLKKNSSHTLLQVLSPRTDIGVYGSGKNRRKKVKELIEKEKEKDLDLEPLSDLEEGLEETRDTAMVVAVFKEREQKEIEAMHSLRAANLAKMTMVDRIEEVKFCICRKTASGFMLQCELCKDWFHNSCVPLPKSSSQKKGSSWQAKEVKFLCPLCMRSRRPRLETILSLLVSLQKLPVRLPEGEALQCLTERAMSWQDRARQALATDELSSALAKLSVLSQRMVEQAAREKTEKIISAELQKAAANPDLQGHLPSFQQSAFNRVVSSVSSSPRQTMDYDDEETDSDEDIRETYGYDMKDTASVKSSSSLEPNLFCDEEIPIKSEEVVTHMWTAPSFCAEHAYSSASKSCSQGSSTPRKQPRKSPLVPRSLEPPVLELSPGAKAQLEELMMVGDLLEVSLDETQHIWRILQATHPPSEDRFLHIMEDDSMEEKPLKVKGKDSSEKKRKRKLEKVEQLFGEGKQKSKELKKMDKPRKKKLKLGADKSKELNKLAKKLAKEEERKKKKEKAAAAKVELVKESTEKKREKKVLDIPSKYDWSGAEESDDENAVCAAQNCQRPCKDKARQGVAHACNPSTLGGRGGRIT

SEQ ID NO: 2294 - protein, 1013 aa, Artificial Sequence
  Synthetic polypeptide
MKMWLLVSHLVIISITTCLAEFTWYRRYGHGVSEEDKGFGPIFEEQPINTIYPEESLEGKVSLNCRARASPFPVYKWRMNNGDVDLTSDRYSMVGGNLVINNPDKQKDAGIYYCLASNNYGMVRSTEATLSFGYLDPFPPEERPEVRVKEGKGMVLLCDPPYHFPDDLSYRWLLNEFPVFITMDKRRFVSQTNGNLYIANVEASDKGNYSCFVSSPSITKSVFSKFIPLIPIPERTTKPYPADIVVQFKDVYALMGQNVTLECFALGNPVPDIRWRKVLEPMPSTAEISTSGAVLKIFNIQLEDEGIYECEAENIRGKDKHQARIYVQAFPEWVEHINDTEVDIGSDLYWPCVATGKPIPTIRWLKNGYAYHKGELRLYDVTFENAGMYQCIAENTYGAIYANAELKILALAPTFEMNPMKKKILAAKGGRVIIECKPKAAPKPKFSWSKGTEWLVNSSRILIWEDGSLEINNITRNDGGIYTCFAENNRGKANSTGTLVITDPTRIILAPINADITVGENATMQCAASFDPALDLTFVWSFNGYVIDFNKENIHYQRNFMLDSNGELLIRNAQLKHAGRYTCTAQTIVDNSSASADLVVRGPPGPPGGLRIEDIRATSVALTWSRGSDNHSPISKYTIQTKTILSDDWKDAKTDPPIIEGNMEAARAVDLIPWMEYEFRVVATNTLGRGEPSIPSNRIKTDGAAPNVAPSDVGGGGGRNRELTITWAPLSREYHYGNNFGYIVAFKPFDGEEWKKVTVTNPDTGRYVHKDETMSPSTAFQVKVKAFNNKGDGPYSLVAVINSAQDAPSEAPTEVGVKVLSSSEISVHWEHVLEKIVESYQIRYWAAHDKEEAANRVQVTSQEYSARLENLLPDTQYFIEVGACNSAGCGPPSDMIEAFTKKAPPSQPPRIISSVRSGSRYIITWDHVVALSNESTVTGYKVLYRPDGQHDGKLYSTHKHSIEVPIPRDGEYVVEVRAHSDGGDGVVSQVKISGQTWWLMPIVPALWEAKVGG

SEQ ID NO: 2295 - protein, 1002 aa, Artificial Sequence
  Synthetic polypeptide
MKMWLLVSHLVIISITTCLAVSEEDKGFGPIFEEQPINTIYPEESLEGKVSLNCRARASPFPVYKWRMNNGDVDLTSDRYSMVGGNLVINNPDKQKDAGIYYCLASNNYGMVRSTEATLSFGYLDPFPPEERPEVRVKEGKGMVLLCDPPYHFPDDLSYRWLLNEFPVFITMDKRRFVSQTNGNLYIANVEASDKGNYSCFVSSPSITKSVFSKFIPLIPIPERTTKPYPADIVVQFKDVYALMGQNVTLECFALGNPVPDIRWRKVLEPMPSTAEISTSGAVLKIFNIQLEDEGIYECEAENIRGKDKHQARIYVQAFPEWVEHINDTEVDIGSDLYWPCVATGKPIPTIRWLKNGYAYHKGELRLYDVTFENAGMYQCIAENTYGAIYANAELKILALAPTFEMNPMKKKILAAKGGRVIIECKPKAAPKPKFSWSKGTEWLVNSSRILIWEDGSLEINNITRNDGGIYTCFAENNRGKANSTGTLVITDPTRIILAPINADITVGENATMQCAASFDPALDLTFVWSFNGYVIDFNKENIHYQRNFMLDSNGELLIRNAQLKHAGRYTCTAQTIVDNSSASADLVVRGPPGPPGGLRIEDIRATSVALTWSRGSDNHSPISKYTIQTKTILSDDWKDAKTDPPIIEGNMEAARAVDLIPWMEYEFRVVATNTLGRGEPSIPSNRIKTDGAAPNVAPSDVGGGGGRNRELTITWAPLSREYHYGNNFGYIVAFKPFDGEEWKKVTVTNPDTGRYVHKDETMSPSTAFQVKVKAFNNKGDGPYSLVAVINSAQDAPSEAPTEVGVKVLSSSEISVHWEHVLEKIVESYQIRYWAAHDKEEAANRVQVTSQEYSARLENLLPDTQYFIEVGACNSAGCGPPSDMIEAFTKKAPPSQPPRIISSVRSGSRYIITWDHVVALSNESTVTGYKVLYRPDGQHDGKLYSTHKHSIEVPIPRDGEYVVEVRAHSDGGDGVVSQVKISGQTWWLMPIVPALWEAKVGG

SEQ ID NO: 2296 - protein, 55 aa, Artificial Sequence
  Synthetic polypeptide
KHSIEVPIPRDGEYVVEVRAHSDGGDGVVSQVKISGQTWWLMPIVPALWEAKVGG

SEQ ID NO: 2297 - protein, 1020 aa, Artificial Sequence
  Synthetic polypeptide
MKMWLLVSHLVIISITTCLAEFTWYRRYGHGVSEEDKGFGPIFEEQPINTIYPEESLEGKVSLNCRARASPFPVYKWRMNNGDVDLTSDRYSMVGGNLVINNPDKQKDAGIYYCLASNNYGMVRSTEATLSFGYLDPFPPEERPEVRVKEGKGMVLLCDPPYHFPDDLSYRWLLNEFPVFITMDKRRFVSQTNGNLYIANVEASDKGNYSCFVSSPSITKSVFSKFIPLIPIPERTTKPYPADIVVQFKDVYALMGQNVTLECFALGNPVPDIRWRKVLEPMPSTAEISTSGAVLKIFNIQLEDEGIYECEAENIRGKDKHQARIYVQAFPEWVEHINDTEVDIGSDLYWPCVATGKPIPTIRWLKNGYAYHKGELRLYDVTFENAGMYQCIAENTYGAIYANAELKILALAPTFEMNPMKKKILAAKGGRVIIECKPKAAPKPKFSWSKGTEWLVNSSRILIWEDGSLEINNITRNDGGIYTCFAENNRGKANSTGTLVITDPTRIILAPINADITVGENATMQCAASFDPALDLTFVWSFNGYVIDFNKENIHYQRNFMLDSNGELLIRNAQLKHAGRYTCTAQTIVDNSSASADLVVRGPPGPPGGLRIEDIRATSVALTWSRGSDNHSPISKYTIQTKTILSDDWKDAKTDPPIIEGNMEAARAVDLIPWMEYEFRVVATNTLGRGEPSIPSNRIKTDGAAPNVAPSDVGGGGGRNRELTITWAPLSREYHYGNNFGYIVAFKPFDGEEWKKVTVTNPDTGRYVHKDETMSPSTAFQVKVKAFNNKGDGPYSLVAVINSAQDAPSEAPTEVGVKVLSSSEISVHWEHVLEKIVESYQIRYWAAHDKEEAANRVQVTSQEYSARLENLLPDTQYFIEVGACNSAGCGPPSDMIEAFTKKAPPSQPPRIISSVRSGSRYIITWDHVVALSNESTVTGYKVLYRPDGQHDGKLYSTHKHSIEVPIPRDGEYVVEVRAHSDGGDGVVSQVKISELEKTTLKFIWNQKRACIAKSILSQKN

SEQ ID NO: 2298 - protein, 1009 aa, Artificial Sequence
  Synthetic polypeptide
MKMWLLVSHLVIISITTCLAVSEEDKGFGPIFEEQPINTIYPEESLEGKVSLNCRARASPFPVYKWRMNNGDVDLTSDRYSMVGGNLVINNPDKQKDAGIYYCLASNNYGMVRSTEATLSFGYLDPFPPEERPEVRVKEGKGMVLLCDPPYHFPDDLSYRWLLNEFPVFITMDKRRFVSQTNGNLYIANVEASDKGNYSCFVSSPSITKSVFSKFIPLIPIPERTTKPYPADIVVQFKDVYALMGQNVTLECFALGNPVPDIRWRKVLEPMPSTAEISTSGAVLKIFNIQLEDEGIYECEAENIRGKDKHQARIYVQAFPEWVEHINDTEVDIGSDLYWPCVATGKPIPTIRWLKNGYAYHKGELRLYDVTFENAGMYQCIAENTYGAIYANAELKILALAPTFEMNPMKKKILAAKGGRVIIECKPKAAPKPKFSWSKGTEWLVNSSRILIWEDGSLEINNITRNDGGIYTCFAENNRGKANSTGTLVITDPTRIILAPINADITVGENATMQCAASFDPALDLTFVWSFNGYVIDFNKENIHYQRNFMLDSNGELLIRNAQLKHAGRYTCTAQTIVDNSSASADLVVRGPPGPPGGLRIEDIRATSVALTWSRGSDNHSPISKYTIQTKTILSDDWKDAKTDPPIIEGNMEAARAVDLIPWMEYEFRVVATNTLGRGEPSIPSNRIKTDGAAPNVAPSDVGGGGGRNRELTITWAPLSREYHYGNNFGYIVAFKPFDGEEWKKVTVTNPDTGRYVHKDETMSPSTAFQVKVKAFNNKGDGPYSLVAVINSAQDAPSEAPTEVGVKVLSSSEISVHWEHVLEKIVESYQIRYWAAHDKEEAANRVQVTSQEYSARLENLLPDTQYFIEVGACNSAGCGPPSDMIEAFTKKAPPSQPPRIISSVRSGSRYIITWDHVVALSNESTVTGYKVLYRPDGQHDGKLYSTHKHSIEVPIPRDGEYVVEVRAHSDGGDGVVSQVKISELEKTTLKFIWNQKRACIAKSILSQKN

SEQ ID NO: 2299 - protein, 62 aa, Artificial Sequence
  Synthetic polypeptide
KHSIEVPIPRDGEYVVEVRAHSDGGDGVVSQVKISELEKTTLKFIWNQKRACIAKSILSQKN

SEQ ID NO: 2300 - protein, 1014 aa, Artificial Sequence
  Synthetic polypeptide
MAGVGPGGYAAEFVPPPECPVFEPSWEEFTDPLSFIGRIRPLAEKTGICKIRPPKDWQPPFACEVKSFRFTPRVQRLNELEAMTRVRLDFLDQLAKFWELQGSTLKIPVVERKILDLYALSKIVASKGGFEMVTKEKKWSKVGSRLGYLPGKGTGSLLKSHYERILYPYELFQSGVSLMGVQMPNLDLKEKVEPEVLSTDTQTSPEPGTRMNILPKRTRRVKTQSESGDVSRNTELKKLQIFGAGPKVVGLAMGTKDKEDEVTRRRKVTNRSDAFNMQMRQRKGTLSVNFVDLYVCMFCGRGNNEDKLLLCDGCDDSYHTFCLIPPLPDVPKGDWRCPKCVAEECSKPREAFGFEQAVREYTLQSFGEMADNFKSDYFNMPVHMVPTELVEKEFWRLVSSIEEDVIVEYGADISSKDFGSGFPVKDGRRKILPEEEEYALSGWNLNNMPVLEQSVLAHINVDISGMKVPWLYVGMCFSSFCWHIEDHWSYSINYLHWGEPKTWYGVPSHAAEQLEEVMRELAPELFESQPDLLHQLVTIMNPNVLMEHGVPVYRTNQCAGEFVVTFPRAYHSGFNQGYNFAEAVNFCTADWLPIGRQCVNHYRRLRRHCVFSHEELIFKMAADPECLDVGLAAMVCKELTLMTEEETRLRESVVQMGVLMSEEEVFELVPDDERQCSACRTTCFLSALTCSCNPERLVCLYHPTDLCPCPMQKKCLRYRYPLEDLPSLLYGVKVRAQSYDTWVSRVTEALSANFNHKKDLIELRVMLEDAEDRKYPENDLFRKLRDAVKEAETCASVAQLLLSKKQKHRQSPDSGRTRTKLTVEELKAFVQQLFSLPCVISQARQVKNLLDDVEEFHERAQEAMMDETPDSSKLQMLIDMGSSLYVELPELPRLKQELQQARWLDEVRLTLSDPQQVTLDVMKKLIDSGVGLAPHHAVEKAMAELQELLTVSERWEEKAKVCLQARPRHSVASLESIVNEAKNIPAFLPNVLSLKEALQKAREWTAKVEAIQTL

SEQ ID NO: 2301 - protein, 633 aa, Artificial Sequence
  Synthetic polypeptide
MAGVGPGGYAAEFVPPPECPVFEPSWEEFTDPLSFIGRIRPLAEKTGICKIRPPKEYALSGWNLNNMPVLEQSVLAHINVDISGMKVPWLYVGMCFSSFCWHIEDHWSYSINYLHWGEPKTWYGVPSHAAEQLEEVMRELAPELFESQPDLLHQLVTIMNPNVLMEHGVPVYRTNQCAGEFVVTFPRAYHSGFNQGYNFAEAVNFCTADWLPIGRQCVNHYRRLRRHCVFSHEELIFKMAADPECLDVGLAAMVCKELTLMTEEETRLRESVVQMGVLMSEEEVFELVPDDERQCSACRTTCFLSALTCSCNPERLVCLYHPTDLCPCPMQKKCLRYRYPLEDLPSLLYGVKVRAQSYDTWVSRVTEALSANFNHKKDLIELRVMLEDAEDRKYPENDLFRKLRDAVKEAETCASVAQLLLSKKQKHRQSPDSGRTRTKLTVEELKAFVQQLFSLPCVISQARQVKNLLDDVEEFHERAQEAMMDETPDSSKLQMLIDMGSSLYVELPELPRLKQELQQARWLDEVRLTLSDPQQVTLDVMKKLIDSGVGLAPHHAVEKAMAELQELLTVSERWEEKAKVCLQARPRHSVASLESIVNEAKNIPAFLPNVLSLKEALQKAREWTAKVEAIQTL

SEQ ID NO: 2302 - protein, 38 aa, Artificial Sequence
  Synthetic polypeptide
MLRHPVRSLVQGLFGEIADSKATAGQVQEELGTSYARR

SEQ ID NO: 2303 - protein, 350 aa, Artificial Sequence
  Synthetic polypeptide
MLRHPVRSLVQVAYRRDEMWSEGRYEYERIPRERAPPRSHPSDGYNRLVNIVPKKPPLLDRPGEGSYNRYYSHVDYRDYDEGRSFSHDRRSGPPHRGDESGYRWTRDDHSASRQPEYRDMRDGFRRKSFYSSHYARERSPYKRDNTFFRESPVGRKDSPHSRSGSSVSSRSYSPERSKSYSFHQSQHRKSVRPGASYKRQNEGNPERDKERPVQSLKTSRDTSPSSGSAVSSSKVLDKPSRLTEKELAEAASKWAAEKLEKSDESNLPEISEYEAGSTAPLFTDQPEEPESNTTHGIELFEDSQLTTRSKAIASKTKEIEQQKEKSGGITLPDFKLYCKAIVTKNIMVLA

SEQ ID NO: 2304 - protein, 339 aa, Artificial Sequence
  Synthetic polypeptide
MAYRRDEMWSEGRYEYERIPRERAPPRSHPSDGYNRLVNIVPKKPPLLDRPGEGSYNRYYSHVDYRDYDEGRSFSHDRRSGPPHRGDESGYRWTRDDHSASRQPEYRDMRDGFRRKSFYSSHYARERSPYKRDNTFFRESPVGRKDSPHSRSGSSVSSRSYSPERSKSYSFHQSQHRKSVRPGASYKRQNEGNPERDKERPVQSLKTSRDTSPSSGSAVSSSKVLDKPSRLTEKELAEAASKWAAEKLEKSDESNLPEISEYEAGSTAPLFTDQPEEPESNTTHGIELFEDSQLTTRSKAIASKTKEIEQQKEKSGGITLPDFKLYCKAIVTKNIMVLA

SEQ ID NO: 2305 - protein, 277 aa, Artificial Sequence
  Synthetic polypeptide
MWSEGRYEYERIPRERAPPRSHPSDESGYRWTRDDHSASRQPEYRDMRDGFRRKSFYSSHYARERSPYKRDNTFFRESPVGRKDSPHSRSGSSVSSRSYSPERSKSYSFHQSQHRKSVRPGASYKRQNEGNPERDKERPVQSLKTSRDTSPSSGSAVSSSKVLDKPSRLTEKELAEAASKWAAEKLEKSDESNLPEISEYEAGSTAPLFTDQPEEPESNTTHGIELFEDSQLTTRSKAIASKTKEIEQQKEKSGGITLPDFKLYCKAIVTKNIMVLA

SEQ ID NO: 2306 - protein, 332 aa, Artificial Sequence
  Synthetic polypeptide
MWSEGRYEYERIPRERAPPRSHPSDGYNRLVNIVPKKPPLLDRPGEGSYNRYYSHVDYRDYDEGRSFSHDRRSGPPHRGDESGYRWTRDDHSASRQPEYRDMRDGFRRKSFYSSHYARERSPYKRDNTFFRESPVGRKDSPHSRSGSSVSSRSYSPERSKSYSFHQSQHRKSVRPGASYKRQNEGNPERDKERPVQSLKTSRDTSPSSGSAVSSSKVLDKPSRLTEKELAEAASKWAAEKLEKSDESNLPEISEYEAGSTAPLFTDQPEEPESNTTHGIELFEDSQLTTRSKAIASKTKEIEQQKEKSGGITLPDFKLYCKAIVTKNIMVLA

SEQ ID NO: 2307 - protein, 212 aa, Artificial Sequence
  Synthetic polypeptide
MRDGFRRKSFYSSHYARERSPYKRDNTFFRESPVGRKDSPHSRSGSSVSSRSYSPERSKSYSFHQSQHRNKERPVQSLKTSRDTSPSSGSAVSSSKVLDKPSRLTEKELAEAASKWAAEKLEKSDESNLPEISEYEAGSTAPLFTDQPEEPESNTTHGIELFEDSQLTTRSKAIASKTKEIEQQKEKSGGITLPDFKLYCKAIVTKNIMVLA

SEQ ID NO: 2308 - protein, 313 aa, Artificial Sequence
  Synthetic polypeptide
MWSEGRYEYERIPRERAPPRSHPSDGYNRLVNIVPKKPPLLDRPGEGSYNRYYSHVDYRDYDEGRSFSHDRRSGPPHRGDESGYRWTRDDHSASRQPEYRDMRDGFRRKSFYSSHYARERSPYKRDNTFFRESPVGRKDSPHSRSGSSVSSRSYSPERSKSYSFHQSQHRNKERPVQSLKTSRDTSPSSGSAVSSSKVLDKPSRLTEKELAEAASKWAAEKLEKSDESNLPEISEYEAGSTAPLFTDQPEEPESNTTHGIELFEDSQLTTRSKAIASKTKEIEQQKEKSGGITLPDFKLYCKAIVTKNIMVLA

SEQ ID NO: 2309 - protein, 284 aa, Artificial Sequence
  Synthetic polypeptide
MAYRRDEMWSEGRYEYERIPRERAPPRSHPSDESGYRWTRDDHSASRQPEYRDMRDGFRRKSFYSSHYARERSPYKRDNTFFRESPVGRKDSPHSRSGSSVSSRSYSPERSKSYSFHQSQHRKSVRPGASYKRQNEGNPERDKERPVQSLKTSRDTSPSSGSAVSSSKVLDKPSRLTEKELAEAASKWAAEKLEKSDESNLPEISEYEAGSTAPLFTDQPEEPESNTTHGIELFEDSQLTTRSKAIASKTKEIEQQKEKSGGITLPDFKLYCKAIVTKNIMVLA

SEQ ID NO: 2310 - protein, 265 aa, Artificial Sequence
  Synthetic polypeptide
MAYRRDEMWSEGRYEYERIPRERAPPRSHPSDESGYRWTRDDHSASRQPEYRDMRDGFRRKSFYSSHYARERSPYKRDNTFFRESPVGRKDSPHSRSGSSVSSRSYSPERSKSYSFHQSQHRNKERPVQSLKTSRDTSPSSGSAVSSSKVLDKPSRLTEKELAEAASKWAAEKLEKSDESNLPEISEYEAGSTAPLFTDQPEEPESNTTHGIELFEDSQLTTRSKAIASKTKEIEQQKEKSGGITLPDFKLYCKAIVTKNIMVLA

SEQ ID NO: 2311 - protein, 81 aa, Artificial Sequence
  Synthetic polypeptide
MNKPITPSTYVRCLNVGLIRKLSDFIDPQEGWKKLAVAIKKPSGDDRYNQFHISKKALTRCSLSILDFPASRTVSQINYYL

SEQ ID NO: 2312 - protein, 151 aa, Artificial Sequence
  Synthetic polypeptide
MGKDFRYYFQHPWSRMIVAYLVIFFNFLIFAEDPVSHSQTEANVIVVGNCFSFVTNKYPRGVGWRILKVLLWLLAILTGLIAGKFLFHQRLFGQLLRLKMFREDHGSWMTMFFSTILFLFIFSHIYNTILLMDGNMGIQEWSLDWNSFLVT

SEQ ID NO: 2313 - protein, 80 aa, Artificial Sequence
  Synthetic polypeptide
MATCHSHRTNSWQISVPSAFVWSVAPIKNVSRRSWVVDDNVLQHNSLSLHIFSHIQHDSSNGWEHGDPRMESGLELLSCN

SEQ ID NO: 2314 - protein, 137 aa, Artificial Sequence
  Synthetic polypeptide
MGKDFRYYFQHPWSRMIVAYLVIFFNFLIFAEDPVSHSQTEANVIVVGNCFSFVTNKYPRGVGWRILKVLLWLLAILTGLIAGKFLFHQRLFGQLLRLKMFREDHGSWMTMFFSTILFLFIFSHIYNTILLMDGNMG

SEQ ID NO: 2315 - protein, 145 aa, Artificial Sequence
  Synthetic polypeptide
MATCHSHRTNSWQISVPSAFVWSVAPIKNVSRRSWVVDDNVLQHNSLSLHIFSHIQHDSSNGWEHGVTRRREERRREKLWPLGEPIPRSSPSQGCDTLSGALQFLASSSFWVPLCSPVPAVEAACGTPGPVTASQGASTLLRTQS

SEQ ID NO: 2316 - protein, 210 aa, Artificial Sequence
  Synthetic polypeptide
MGKDFRYYFQHPWSRMIVAYLVIFFNFLIFAEDPVSHSQTEANVIVVGNCFSFVTNKYPRGVGWRILKVLLWLLAILTGLIAGKFLFHQRLFGQLLRLKMFREDHGSWMTMFFSTILFLFIFSHIYNTILLMDGNMGAYIITDYMGIRNESFMKLAAVGTWMGDFVTAWMVTDMMLQDKPYPDWGKSARAFWKKGNVRITLFCYPWSTAV

SEQ ID NO: 2317 - protein, 66 aa, Artificial Sequence
  Synthetic polypeptide
MGIRNESFMKLAAVGTWMGDFVTAWMVTDMMLQDKPYPDWGKSARAFWKKGNVRITLFCYPWSTAV

SEQ ID NO: 2318 - protein, 106 aa, Artificial Sequence
  Synthetic polypeptide
MATCHSHRTNSWQISVPSAFVWSVAPIKNVSRRSWVVDDNVLQHNSLSLHIFSHIQHDSSNGWEHGVTDMMLQDKPYPDWGKSARAFWKKGNVRITLFCYPWSTAV

SEQ ID NO: 2319 - protein, 73 aa, Artificial Sequence
  Synthetic polypeptide
MKKMSRNVLLQMEEEEDDDDGDIVLENLGQTIVPDLGSLESQHDFRTPEFQDYIIERIFLLPCCQEALCQFSC

SEQ ID NO: 2320 - protein, 94 aa, Artificial Sequence
  Synthetic polypeptide
MKKMSRNVLLQMEEEEDDDDGDIGDVPASRRPFLTPHTHLPSSLVLENLGQTIVPDLGSLESQHDFRTPEFQDYIIERIFLLPCCQEALCQFSC

SEQ ID NO: 2321 - protein, 55 aa, Artificial Sequence
  Synthetic polypeptide
MFCAAVLENLGQTIVPDLGSLESQHDFRTPEFQDYIIERIFLLPCCQEALCQFSC

SEQ ID NO: 2322 - protein, 72 aa, Artificial Sequence
  Synthetic polypeptide
MKKMSRNVLLQMEEEEDDDDGDIVLENLGQTIVPDLGSLESQHDFRTPEFDYIIERIFLLPCCQEALCQFSC

SEQ ID NO: 2323 - protein, 93 aa, Artificial Sequence
  Synthetic polypeptide
MKKMSRNVLLQMEEEEDDDDGDIGDVPASRRPFLTPHTHLPSSLVLENLGQTIVPDLGSLESQHDFRTPEFDYIIERIFLLPCCQEALCQFSC

SEQ ID NO: 2324 - protein, 54 aa, Artificial Sequence
  Synthetic polypeptide
MFCAAVLENLGQTIVPDLGSLESQHDFRTPEFDYIIERIFLLPCCQEALCQFSC

SEQ ID NO: 2325 - protein, 1654 aa, Artificial Sequence
  Synthetic polypeptide
MANSTGKAPPDERRKGLAFLDELRQFHHSRGSPFKKIPAVGGKELDLHGLYTRVTTLGGFAKVSEKNQWGEIVEEFNFPRSCSNAAFALKQYYLRYLEKYEKVHHFGEDDDEVPPGNPKPQLPIGAIPSSYNYQQHSVSDYLRQSYGLSMDFNSPNDYNKLVLSLLSGLPNEVDFAINVCTLLSNESKHVMQLEKDPKIITLLLANAGVFDDTLGSFSTVFGEEWKEKTDRDFVKFWKDIVDDNEVRDLISDRNKSHEGTSGEWIWESLFHPPRKLGINDIEGQRVLQIAVILRNLSFEEGNVKLLAANRTCLRFLLLSAHSHFISLRQLGLDTLGNIAAELLLDPVDFKTTHLMFHTVTKCLMSRDRFLKMRGMEILGNLCKAEDNGVLICEYVDQDSYREIICHLTLPDVLLVISTLEVLYMLTEMGDVACTKIAKVEKSIDMLVCLVSMDIQMFGPDALAAVKLIEHPSSSHQMLSEIRPQAIEQVQTQTHVASAPASRAVVAQHVAPPPGIVEIDSEKFACQWLNAHFEVNPDCSVSRAEMYSEYLSTCSKLARGGILTSTGFYKCLRTVFPNHTVKRVEDSSSNGQAHIHVVGVKRRAIPLPIQMYYQQQPVSTSVVRVDSVPDVSPAPSPAGIPHGSQTIGNHFQRTPVANQSSNLTATQMSFPVQGVHTVAQTVSRIPQNPSPHTHQQQNAPVTVIQSKAPIPCEVVKATVIQNSIPQTGVPVSIAVGGGPPQSSVVQNHSTGPQPVTVVNSQTLLHHPSVIPQQSPLHTVVPGQIPSGTPVTVIQQAVPQSHMFGRVQNIPACTSTVSQGQQLITTSPQPVQTSSQQTSAGSQSQDTVIIAPPQYVTTSASNIVSATSVQNFQVATGQMVTIAGVPSPQASRVGFQNIAPKPLPSQQVSSTVVQQPIQQPQQPTQQSVVIVSQPAQQGQTYAPAIHQIVLANPAALPAGQTVQLTGQPNITPSSSPSPVPATNNQVPTAMSSSSTPQSQGPPPTVSQMLSVKRQQQQQHSPAPPPQQVQVQVQQPQQVQMQVQPQQSNAGVGQPASGESSLIKQLLLPKRGPSTPGGKLILPAPQIPPPNNARAPSPQVVYQVASNQAAGFGVQGQTPAQQLLVGQQNVQLVPSAMPPSGGVQTVPISNLQILPGPLISNSPATIFQGTSGNQVTITVVPNTSFAPATVSQGNATQLIAPAGITMSGTQTGVGLPVQTLPATQASPAGQSSCTTATPPFKGDKIICQKEEEAKEATGLHVHERKIEVMENPSCRRGATNTSNGDTKENEMHVGSLLNGRKYSDSSLPPSNSGKIQSETNQCSLISNGPSLELGENGASGKQNSEQIDMQDIKSDLRKPLVNGICDFDKGDGSHLSKNIPNHKTSNHVGNGEISPMEPQGTLDITQQDTAKGDQLERISNGPVLTLGGSSVSSIQEASNAATQQFSGTDLLNGPLASSLNSDVPQQRPSVVVSPHSTTSVIQGHQIIAVPDSGSKVSHSPALSSDVRSTNGTAECKTVKRPAEDTDRETVAGIPNKVGVRIVTISDPNNAGCSATMVAVPAGADPSTVAKVAIESAVQQKQQHPPTYVQNVVPQMGLSSCRKTSSEPPMILHYGKLYNYFIIYYSVIIEIKCLINVMRLYHPKTISSLPGLWKNCPP

SEQ ID NO: 2326 - protein, 1505 aa, Artificial Sequence
  Synthetic polypeptide
MDFNSPNDYNKLVLSLLSGLPNEVDFAINVCTLLSNESKHVMQLEKDPKIITLLLANAGVFDDTLGSFSTVFGEEWKEKTDRDFVKFWKDIVDDNEVRDLISDRNKSHEGTSGEWIWESLFHPPRKLGINDIEGQRVLQIAVILRNLSFEEGNVKLLAANRTCLRFLLLSAHSHFISLRQLGLDTLGNIAAELLLDPVDFKTTHLMFHTVTKCLMSRDRFLKMRGMEILGNLCKAEDNGVLICEYVDQDSYREIICHLTLPDVLLVISTLEVLYMLTEMGDVACTKIAKVEKSIDMLVCLVSMDIQMFGPDALAAVKLIEHPSSSHQMLSEIRPQAIEQVQTQTHVASAPASRAVVAQHVAPPPGIVEIDSEKFACQWLNAHFEVNPDCSVSRAEMYSEYLSTCSKLARGGILTSTGFYKCLRTVFPNHTVKRVEDSSSNGQAHIHVVGVKRRAIPLPIQMYYQQQPVSTSVVRVDSVPDVSPAPSPAGIPHGSQTIGNHFQRTPVANQSSNLTATQMSFPVQGVHTVAQTVSRIPQNPSPHTHQQQNAPVTVIQSKAPIPCEVVKATVIQNSIPQTGVPVSIAVGGGPPQSSVVQNHSTGPQPVTVVNSQTLLHHPSVIPQQSPLHTVVPGQIPSGTPVTVIQQAVPQSHMFGRVQNIPACTSTVSQGQQLITTSPQPVQTSSQQTSAGSQSQDTVIIAPPQYVTTSASNIVSATSVQNFQVATGQMVTIAGVPSPQASRVGFQNIAPKPLPSQQVSSTVVQQPIQQPQQPTQQSVVIVSQPAQQGQTYAPAIHQIVLANPAALPAGQTVQLTGQPNITPSSSPSPVPATNNQVPTAMSSSSTPQSQGPPPTVSQMLSVKRQQQQQHSPAPPPQQVQVQVQQPQQVQMQVQPQQSNAGVGQPASGESSLIKQLLLPKRGPSTPGGKLILPAPQIPPPNNARAPSPQVVYQVASNQAAGFGVQGQTPAQQLLVGQQNVQLVPSAMPPSGGVQTVPISNLQILPGPLISNSPATIFQGTSGNQVTITVVPNTSFAPATVSQGNATQLIAPAGITMSGTQTGVGLPVQTLPATQASPAGQSSCTTATPPFKGDKIICQKEEEAKEATGLHVHERKIEVMENPSCRRGATNTSNGDTKENEMHVGSLLNGRKYSDSSLPPSNSGKIQSETNQCSLISNGPSLELGENGASGKQNSEQIDMQDIKSDLRKPLVNGICDFDKGDGSHLSKNIPNHKTSNHVGNGEISPMEPQGTLDITQQDTAKGDQLERISNGPVLTLGGSSVSSIQEASNAATQQFSGTDLLNGPLASSLNSDVPQQRPSVVVSPHSTTSVIQGHQIIAVPDSGSKVSHSPALSSDVRSTNGTAECKTVKRPAEDTDRETVAGIPNKVGVRIVTISDPNNAGCSATMVAVPAGADPSTVAKVAIESAVQQKQQHPPTYVQNVVPQMGLSSCRKTSSEPPMILHYGKLYNYFIIYYSVIIEIKCLINVMRLYHPKTISSLPGLWKNCPP

SEQ ID NO: 2327 - protein, 1264 aa, Artificial Sequence
  Synthetic polypeptide
MRGMEILGNLCKAEDNGVLICEYVDQDSYREIICHLTLPDVLLVISTLEVLYMLTEMGDVACTKIAKVEKSIAAVKLIEHPSSSHQMLSEIRPQAIEQVQTQTHVASAPASRAVVAQHVAPPPGIVEIDSEKFACQWLNAHFEVNPDCSVSRAEMYSEYLSTCSKLARGGILTSTGFYKCLRTVFPNHTVKRVEDSSSNGQAHIHVVGVKRRAIPLPIQMYYQQQPVSTSVVRVDSVPDVSPAPSPAGIPHGSQTIGNHFQRTPVANQSSNLTATQMSFPVQGVHTVAQTVSRIPQNPSPHTHQQQNAPVTVIQSKAPIPCEVVKATVIQNSIPQTGVPVSIAVGGGPPQSSVVQNHSTGPQPVTVVNSQTLLHHPSVIPQQSPLHTVVPGQIPSGTPVTVIQQAVPQSHMFGRVQNIPACTSTVSQGQQLITTSPQPVQTSSQQTSAGSQSQDTVIIAPPQYVTTSASNIVSATSVQNFQVATGQMVTIAGVPSPQASRVGFQNIAPKPLPSQQVSSTVVQQPIQQPQQPTQQSVVIVSQPAQQGQTYAPAIHQIVLANPAALPAGQTVQLTGQPNITPSSSPSPVPATNNQVPTAMSSSSTPQSQGPPPTVSQMLSVKRQQQQQHSPAPPPQQVQVQVQQPQQVQMQVQPQQSNAGVGQPASGESSLIKQLLLPKRGPSTPGGKLILPAPQIPPPNNARAPSPQVVYQVASNQAAGFGVQGQTPAQQLLVGQQNVQLVPSAMPPSGGVQTVPISNLQILPGPLISNSPATIFQGTSGNQVTITVVPNTSFAPATVSQGNATQLIAPAGITMSGTQTGVGLPVQTLPATQASPAGQSSCTTATPPFKGDKIICQKEEEAKEATGLHVHERKIEVMENPSCRRGATNTSNGDTKENEMHVGSLLNGRKYSDSSLPPSNSGKIQSETNQCSLISNGPSLELGENGASGKQNSEQIDMQDIKSDLRKPLVNGICDFDKGDGSHLSKNIPNHKTSNHVGNGEISPMEPQGTLDITQQDTAKGDQLERISNGPVLTLGGSSVSSIQEASNAATQQFSGTDLLNGPLASSLNSDVPQQRPSVVVSPHSTTSVIQGHQIIAVPDSGSKVSHSPALSSDVRSTNGTAECKTVKRPAEDTDRETVAGIPNKVGVRIVTISDPNNAGCSATMVAVPAGADPSTVAKVAIESAVQQKQQHPPTYVQNVVPQMGLSSCRKTSSEPPMILHYGKLYNYFIIYYSVIIEIKCLINVMRLYHPKTISSLPGLWKNCPP

SEQ ID NO: 2328 - protein, 262 aa, Artificial Sequence
  Synthetic polypeptide
MEPQGTLDITQQDTAKGDQLERISNGPVLTLGGSSVSSIQEASNAATQQFSGTDLLNGPLASSLNSDVPQQRPSVVVSPHSTTSVIQGHQIIAVPDSGSKVSHSPALSSDVRSTNGTAECKTVKRPAEDTDRETVAGIPNKVGVRIVTISDPNNAGCSATMVAVPAGADPSTVAKVAIESAVQQKQQHPPTYVQNVVPQMGLSSCRKTSSEPPMILHYGKLYNYFIIYYSVIIEIKCLINVMRLYHPKTISSLPGLWKNCPP

SEQ ID NO: 2329 - protein, 1655 aa, Artificial Sequence
  Synthetic polypeptide
MANSTGKAPPDERRKGLAFLDELRQFHHSRGSPFKKIPAVGGKELDLHGLYTRVTTLGGFAKVSEKNQWGEIVEEFNFPRSCSNAAFALKQYYLRYLEKYEKVHHFGEDDDEVPPGNPKPQLPIGAIPSSYNYQQHSVSDYLRQSYGLSMDFNSPNDYNKLVLSLLSGLPNEVDFAINVCTLLSNESKHVMQLEKDPKIITLLLANAGVFDDTLGSFSTVFGEEWKEKTDRDFVKFWKDIVDDNEVRDLISDRNKSHEGTSGEWIWESLFHPPRKLGINDIEGQRVLQIAVILRNLSFEEGNVKLLAANRTCLRFLLLSAHSHFISLRQLGLDTLGNIAAELLLDPVDFKTTHLMFHTVTKCLMSRDRFLKMRGMEILGNLCKAEDNGVLICEYVDQDSYREIICHLTLPDVLLVISTLEVLYMLTEMGDVACTKIAKVEKSIDMLVCLVSMDIQMFGPDALAAVKLIEHPSSSHQMLSEIRPQAIEQVQTQTHVASAPASRAVVAQHVAPPPGIVEIDSEKFACQWLNAHFEVNPDCSVSRAEMYSEYLSTCSKLARGGILTSTGFYKCLRTVFPNHTVKRVEDSSSNGQAHIHVVGVKRRAIPLPIQMYYQQQPVSTSVVRVDSVPDVSPAPSPAGIPHGSQTIGNHFQRTPVANQSSNLTATQMSFPVQGVHTVAQTVSRIPQNPSPHTHQQQNAPVTVIQSKAPIPCEVVKATVIQNSIPQTGVPVSIAVGGGPPQSSVVQNHSTGPQPVTVVNSQTLLHHPSVIPQQSPLHTVVPGQIPSGTPVTVIQQAVPQSHMFGRVQNIPACTSTVSQGQQLITTSPQPVQTSSQQTSAGSQSQDTVIIAPPQYVTTSASNIVSATSVQNFQVATGQMVTIAGVPSPQASRVGFQNIAPKPLPSQQVSSTVVQQPIQQPQQPTQQSVVIVSQPAQQGQTYAPAIHQIVLANPAALPAGQTVQLTGQPNITPSSSPSPVPATNNQVPTAMSSSSTPQSQGPPPTVSQMLSVKRQQQQQHSPAPPPQQVQVQVQQPQQVQMQVQPQQSNAGVGQPASGESSLIKQLLLPKRGPSTPGGKLILPAPQIPPPNNARAPSPQVVYQVASNQAAGFGVQGQTPAQQLLVGQQNVQLVPSAMPPSGGVQTVPISNLQILPGPLISNSPATIFQGTSGNQVTITVVPNTSFAPATVSQGNATQLIAPAGITMSGTQTGVGLPVQTLPATQASPAGQSSCTTATPPFKGDKIICQKEEEAKEATGLHVHERKIEVMENPSCRRGATNTSNGDTKENEMHVGSLLNGRKYSDSSLPPSNSGKIQSETNQCSLISNGPSLELGENGASGKQNSEQIDMQDIKSDLRKPLVNGICDFDKGDGSHLSKNIPNHKTSNHVGNGEISPMEPQGTLDITQQDTAKGDQLERISNGPVLTLGGSSVSSIQEASNAATQQFSGTDLLNGPLASSLNSDVPQQRPSVVVSPHSTTSVIQGHQIIAVPDSGSKVSHSPALSSDVRSTNGTAECKTVKRPAEDTDRETVAGIPNKVGVRIVTISDPNNAGCSATMVAVPAGADPSTVAKVAIESAVQQKQQHPPTYVQNVVPQNTPMPPSPAVQVQGQPNSSQPSPFSGSSQPGDPMRKPGQNFMCLWQSCKKWDHLVAGKEAQGSH

SEQ ID NO: 2330 - protein, 1506 aa, Artificial Sequence
  Synthetic polypeptide
MDFNSPNDYNKLVLSLLSGLPNEVDFAINVCTLLSNESKHVMQLEKDPKIITLLLANAGVFDDTLGSFSTVFGEEWKEKTDRDFVKFWKDIVDDNEVRDLISDRNKSHEGTSGEWIWESLFHPPRKLGINDIEGQRVLQIAVILRNLSFEEGNVKLLAANRTCLRFLLLSAHSHFISLRQLGLDTLGNIAAELLLDPVDFKTTHLMFHTVTKCLMSRDRFLKMRGMEILGNLCKAEDNGVLICEYVDQDSYREIICHLTLPDVLLVISTLEVLYMLTEMGDVACTKIAKVEKSIDMLVCLVSMDIQMFGPDALAAVKLIEHPSSSHQMLSEIRPQAIEQVQTQTHVASAPASRAVVAQHVAPPPGIVEIDSEKFACQWLNAHFEVNPDCSVSRAEMYSEYLSTCSKLARGGILTSTGFYKCLRTVFPNHTVKRVEDSSSNGQAHIHVVGVKRRAIPLPIQMYYQQQPVSTSVVRVDSVPDVSPAPSPAGIPHGSQTIGNHFQRTPVANQSSNLTATQMSFPVQGVHTVAQTVSRIPQNPSPHTHQQQNAPVTVIQSKAPIPCEVVKATVIQNSIPQTGVPVSIAVGGGPPQSSVVQNHSTGPQPVTVVNSQTLLHHPSVIPQQSPLHTVVPGQIPSGTPVTVIQQAVPQSHMFGRVQNIPACTSTVSQGQQLITTSPQPVQTSSQQTSAGSQSQDTVIIAPPQYVTTSASNIVSATSVQNFQVATGQMVTIAGVPSPQASRVGFQNIAPKPLPSQQVSSTVVQQPIQQPQQPTQQSVVIVSQPAQQGQTYAPAIHQIVLANPAALPAGQTVQLTGQPNITPSSSPSPVPATNNQVPTAMSSSSTPQSQGPPPTVSQMLSVKRQQQQQHSPAPPPQQVQVQVQQPQQVQMQVQPQQSNAGVGQPASGESSLIKQLLLPKRGPSTPGGKLILPAPQIPPPNNARAPSPQVVYQVASNQAAGFGVQGQTPAQQLLVGQQNVQLVPSAMPPSGGVQTVPISNLQILPGPLISNSPATIFQGTSGNQVTITVVPNTSFAPATVSQGNATQLIAPAGITMSGTQTGVGLPVQTLPATQASPAGQSSCTTATPPFKGDKIICQKEEEAKEATGLHVHERKIEVMENPSCRRGATNTSNGDTKENEMHVGSLLNGRKYSDSSLPPSNSGKIQSETNQCSLISNGPSLELGENGASGKQNSEQIDMQDIKSDLRKPLVNGICDFDKGDGSHLSKNIPNHKTSNHVGNGEISPMEPQGTLDITQQDTAKGDQLERISNGPVLTLGGSSVSSIQEASNAATQQFSGTDLLNGPLASSLNSDVPQQRPSVVVSPHSTTSVIQGHQIIAVPDSGSKVSHSPALSSDVRSTNGTAECKTVKRPAEDTDRETVAGIPNKVGVRIVTISDPNNAGCSATMVAVPAGADPSTVAKVAIESAVQQKQQHPPTYVQNVVPQNTPMPPSPAVQVQGQPNSSQPSPFSGSSQPGDPMRKPGQNFMCLWQSCKKWDHLVAGKEAQGSH

SEQ ID NO: 2331 - protein, 1265 aa, Artificial Sequence
  Synthetic polypeptide
MRGMEILGNLCKAEDNGVLICEYVDQDSYREIICHLTLPDVLLVISTLEVLYMLTEMGDVACTKIAKVEKSIAAVKLIEHPSSSHQMLSEIRPQAIEQVQTQTHVASAPASRAVVAQHVAPPPGIVEIDSEKFACQWLNAHFEVNPDCSVSRAEMYSEYLSTCSKLARGGILTSTGFYKCLRTVFPNHTVKRVEDSSSNGQAHIHVVGVKRRAIPLPIQMYYQQQPVSTSVVRVDSVPDVSPAPSPAGIPHGSQTIGNHFQRTPVANQSSNLTATQMSFPVQGVHTVAQTVSRIPQNPSPHTHQQQNAPVTVIQSKAPIPCEVVKATVIQNSIPQTGVPVSIAVGGGPPQSSVVQNHSTGPQPVTVVNSQTLLHHPSVIPQQSPLHTVVPGQIPSGTPVTVIQQAVPQSHMFGRVQNIPACTSTVSQGQQLITTSPQPVQTSSQQTSAGSQSQDTVIIAPPQYVTTSASNIVSATSVQNFQVATGQMVTIAGVPSPQASRVGFQNIAPKPLPSQQVSSTVVQQPIQQPQQPTQQSVVIVSQPAQQGQTYAPAIHQIVLANPAALPAGQTVQLTGQPNITPSSSPSPVPATNNQVPTAMSSSSTPQSQGPPPTVSQMLSVKRQQQQQHSPAPPPQQVQVQVQQPQQVQMQVQPQQSNAGVGQPASGESSLIKQLLLPKRGPSTPGGKLILPAPQIPPPNNARAPSPQVVYQVASNQAAGFGVQGQTPAQQLLVGQQNVQLVPSAMPPSGGVQTVPISNLQILPGPLISNSPATIFQGTSGNQVTITVVPNTSFAPATVSQGNATQLIAPAGITMSGTQTGVGLPVQTLPATQASPAGQSSCTTATPPFKGDKIICQKEEEAKEATGLHVHERKIEVMENPSCRRGATNTSNGDTKENEMHVGSLLNGRKYSDSSLPPSNSGKIQSETNQCSLISNGPSLELGENGASGKQNSEQIDMQDIKSDLRKPLVNGICDFDKGDGSHLSKNIPNHKTSNHVGNGEISPMEPQGTLDITQQDTAKGDQLERISNGPVLTLGGSSVSSIQEASNAATQQFSGTDLLNGPLASSLNSDVPQQRPSVVVSPHSTTSVIQGHQIIAVPDSGSKVSHSPALSSDVRSTNGTAECKTVKRPAEDTDRETVAGIPNKVGVRIVTISDPNNAGCSATMVAVPAGADPSTVAKVAIESAVQQKQQHPPTYVQNVVPQNTPMPPSPAVQVQGQPNSSQPSPFSGSSQPGDPMRKPGQNFMCLWQSCKKWDHLVAGKEAQGSH

SEQ ID NO: 2332 - protein, 263 aa, Artificial Sequence
  Synthetic polypeptide
MEPQGTLDITQQDTAKGDQLERISNGPVLTLGGSSVSSIQEASNAATQQFSGTDLLNGPLASSLNSDVPQQRPSVVVSPHSTTSVIQGHQIIAVPDSGSKVSHSPALSSDVRSTNGTAECKTVKRPAEDTDRETVAGIPNKVGVRIVTISDPNNAGCSATMVAVPAGADPSTVAKVAIESAVQQKQQHPPTYVQNVVPQNTPMPPSPAVQVQGQPNSSQPSPFSGSSQPGDPMRKPGQNFMCLWQSCKKWDHLVAGKEAQGSH

SEQ ID NO: 2333 - protein, 199 aa, Artificial Sequence
  Synthetic polypeptide
MKKAEMGRFSISPDEDSSSYSSNSDFNYSYPTKQAALKSHYADVDPENQNFLLESNLGKKKYETEFHPGTTSFGMSVFNLSNAIVGSGILGLSYAMANTGIALFIILLTFVSIFSLYSVHLLLKTANEGGSLLYEQLGYKAFGLVGKLAASGSITMQNIGAMSSYLFIVKYELPLVIQALTNIEDKTGLDIPNLKSKTF

SEQ ID NO: 2334 - protein, 331 aa, Artificial Sequence
  Synthetic polypeptide
MAAAAQSRVVRVLSMSRSAITAIATSVCHGPPCRQLHHALMPHGKGGRSSVSGIVATVFGATGFLGRYVVNHLGRMGSQVIIPYRCDKYDIMHLRPMGDLGQLLFLEWDARDKDSIRRVVQHSNVVINLIGRDWETKNFDFEDVFVKIPQAIAQLSKEAGVEKFIHVSHLNANIKSSSRYLRNKAVGEKVVRDAFPEAIIVKPSDIFGREDRFLNSFASMHRFGPIPLGSLGWKTVKQPVYVVDVSKGIVNAVKDPDANGKSFAFVGPSRYLLFHLVKYIFAVAHRLFLPFPLPLFAYRWVARVFEISPFEPWITRDKVERHLKQSQTSVE

SEQ ID NO: 2335 - protein, 90 aa, Artificial Sequence
  Synthetic polypeptide
VVDVSKGIVNAVKDPDANGKSFAFVGPSRYLLFHLVKYIFAVAHRLFLPFPLPLFAYRWVARVFEISPFEPWITRDKVERHLKQSQTSVE

SEQ ID NO: 2336 - protein, 90 aa, Artificial Sequence
  Synthetic polypeptide
MDQKAEVASQVEVVIFLKKKNQFRLLYSGLSSCSSHRLAYILGREMLITCAICISLSRWVARVFEISPFEPWITRDKVERHLKQSQTSVE

SEQ ID NO: 2337 - protein, 588 aa, Artificial Sequence
  Synthetic polypeptide
MVLRRMHRPRSCSYQLLLEHQRPSCIQGLRWTPLTNSEESLDFSESLEQASTERVLRAGRQLHRHLLATCPNLIRDRKYHLRLYRQCCSGRELVDGILALGLGVHSRSQVVGICQVLLDEGALCHVKHDWAFQDRDAQFYRFPGPEPEPVRTHEMEEELAEAVALLSQRGPDALLTVALRKPPGQRTDEELDLIFEELLHIKAVAHLSNSVKRELAAVLLFEPHSKAGTVLFSQGDKGTSWYIIWKGSVNVVTHGKGLVTTLHEGDDFGQLALVNDAPRAATIILREDNCHFLRVDKQDFNRIIKDVEAKTMRLEEHGKVVLVLERASQGAGPSRPPTPGRNRYTVMSGTPEKILELLLEAMGPDSSAHDPTETFLSDFLLTHRVFMPSAQLCAALLHHFHVEPAGGSEQERSTYVCNKRQQILRLVSQWVALYGSMLHTDPVATSFLQKLSDLVGRDTRLSNLLREQWPERRRCHRLENGCGNASPQMKAKPVLPSGPLHLSLSLEGSFSGSAWQDPSRSHLSQMLGSQTGPLPSPYPEHPPLSPTTLCLGVLCDFLQSTLAMWSCFLCLLAFCPLVSLPSHWRVDF

SEQ ID NO: 2338 - protein, 630 aa, Artificial Sequence
  Synthetic polypeptide
MKVGWPGESCWQVGLAVEDSPALGAPRVGALPDVVPEGTLLNMVLRRMHRPRSCSYQLLLEHQRPSCIQGLRWTPLTNSEESLDFSESLEQASTERVLRAGRQLHRHLLATCPNLIRDRKYHLRLYRQCCSGRELVDGILALGLGVHSRSQVVGICQVLLDEGALCHVKHDWAFQDRDAQFYRFPGPEPEPVRTHEMEEELAEAVALLSQRGPDALLTVALRKPPGQRTDEELDLIFEELLHIKAVAHLSNSVKRELAAVLLFEPHSKAGTVLFSQGDKGTSWYIIWKGSVNVVTHGKGLVTTLHEGDDFGQLALVNDAPRAATIILREDNCHFLRVDKQDFNRIIKDVEAKTMRLEEHGKVVLVLERASQGAGPSRPPTPGRNRYTVMSGTPEKILELLLEAMGPDSSAHDPTETFLSDFLLTHRVFMPSAQLCAALLHHFHVEPAGGSEQERSTYVCNKRQQILRLVSQWVALYGSMLHTDPVATSFLQKLSDLVGRDTRLSNLLREQWPERRRCHRLENGCGNASPQMKAKPVLPSGPLHLSLSLEGSFSGSAWQDPSRSHLSQMLGSQTGPLPSPYPEHPPLSPTTLCLGVLCDFLQSTLAMWSCFLCLLAFCPLVSLPSHWRVDF

SEQ ID NO: 2339 - protein, 477 aa, Artificial Sequence
  Synthetic polypeptide
MDDIADRMRMDAGEVTLVNHNSVFKTHLLPQTGFPEDQLSLSDQQILSSRQGHLDRSFTCSTRSAAYNPSYYSDNPSSDSFLGSGDLRTFGQSANGQWRNSTPSSSSSLQKSRNSRSLYLETRKTSSGLSNSFAGKSNHHCHVSAYEKSFPIKPVPSPSWSGSCRRSLLSPKKTQRRHVSTAEETVQEEEREIYRQLLQMVTGKQFTIAKPTTHFPLHLSRCLSSSKNTLKDSLFKNGNSCASQIIGSDTSSSGSASILTNQEQLSHSVYSLSSYTPDVAFGSKDSGTLHHPHHHHSVPHQPDNLAASNTQSEGSDSVILLKVKDSQTPTPSSTFFQAELWIKELTSVYDSRARERLRQIEEQKALALQLQNQRLQEREHSVHDSVELHLRVPLEKEIPVTVVQETQKKGHKLTDSEDEFPEITEEMEKEIKNVFRNGNQDEVLSEAFRLTITRKDIQTLNHLNWLNDEVGRSGSHL

SEQ ID NO: 2340 - protein, 34 aa, Artificial Sequence
  Synthetic polypeptide
MSILKFPERWQKSLHPPSMKLNNPSLQNPLEGKS

SEQ ID NO: 2341 - protein, 36 aa, Artificial Sequence
  Synthetic polypeptide
METVISSDSSPAVENEHPQVSRALAEEPSPSKHEIE

SEQ ID NO: 2342 - protein, 41 aa, Artificial Sequence
  Synthetic polypeptide
MFSLTGVMVISSDSSPAVENEHPQVSRALAEEPSPSKHEIE

SEQ ID NO: 2343 - protein, 28 aa, Artificial Sequence
  Synthetic polypeptide
MPDLISTKKMKKLASLVVCACGPSCSRG

SEQ ID NO: 2344 - protein, 416 aa, Artificial Sequence
  Synthetic polypeptide
MTTRQATKDPLLRGVSPTPSKIPVRSQKRTPFPTVTSCAVDQENQDPRRWVQKPPLNIQRPLVDSAGPRPKARHQAETSQRLVGISQPRNPLEELRPSPRGQNVGPGPPAQTEAPGTIEFVADPAALATILSGEGVKSCHLGRQPSLAKRVLVRGSQGGTTQRVQGVRASAYLAPRTPTHRLDPARASCFSRLEGPGPRGRTLCPQRLQALISPSGPSFHPSTRPSFQELRRETAGSSRTSVSQASGLLLETPVQPAFSLPKGEREVVTHSDEGGVASLGLAQRVPLRENREMSHTRDSHDSHLMPSPAPVAQPLPGHVVPCPSPFGRAQRVPSPGPPTLTSYSVLRRLTVQPKTRFTPMPSTPRVQQAQWLRGVSPQSCSEDPALPWARWLIPVIPALWEAEAGRSSEIGSSRPA

SEQ ID NO: 2345 - protein, 124 aa, Artificial Sequence
  Synthetic polypeptide
MSHTRDSHDSHLMPSPAPVAQPLPGHVVPCPSPFGRAQRVPSPGPPTLTSYSVLRRLTVQPKTRFTPMPSTPRVQQAQWLRGVSPQSCSEDPALPWARWLIPVIPALWEAEAGRSSEIGSSRPA

SEQ ID NO: 2346 - protein, 17 aa, Artificial Sequence
  Synthetic polypeptide
MLLFVEKCKKTEKRSID

SEQ ID NO: 2347 - protein, 6 aa, Artificial Sequence
  Synthetic polypeptide
MLLFVE

SEQ ID NO: 2348 - protein, 113 aa, Artificial Sequence
  Synthetic polypeptide
MAERGLEPSPAAVAALPPEVRAQLAELELELSEGDITQKGYEKKRSKLLSPYSPQTQETDSAVQKELRNQTPAPSAAQTSAPSKYHRTRSGGARDERYRSEFSLVRIYSEGKP

SEQ ID NO: 2349 - protein, 977 aa, Artificial Sequence
  Synthetic polypeptide
MAERGLEPSPAAVAALPPEVRAQLAELELELSEGDITQKGYEKKRSKLLSPYSPQTQETDSAVQKELRNQTPAPSAAQTSAPSKYHRTRSGGARDERYRSDIHTEAVQAALAKHKEQKMALPMPTKRRSTFVQSPADACTPPDTSSASEDEGSLRRQAALSAALQQSLQNAESWINRSIQGSSTSSSASSTLSHGEVKGTSGSLADVFANTRIENFSAPPDVTTTTSSSSSSSSIRPANIDLPPSGIVKGMHKGSNRSSLMDTADGVPVSSRVSTKIQQLLNTLKRPKRPPLKEFFVDDSEEIVEVPQPDPNQPKPEGRQMTPVKGEPLGVICNWPPALESALQRWGTTQAKCSCLTALDMTGKPVYTLTYGKLWSRSLKLAYTLLNKLGTKNEPVLKPGDRVALVYPNNDPVMFMVAFYGCLLAEVIPVPIEVPLTRKDAGGQQIGFLLGSCGIALALTSEVCLKGLPKTQNGEIVQFKGWPRLKWVVTDSKYLSKPPKDWQPHISPAGTEPAYIEYKTSKEGSVMGVTVSRLAMLSHCQALSQACNYSEGETIVNVLDFKKDAGLWHGMFANVMNKMHTISVPYSVMKTCPLSWVQRVHAHKAKVALVKCRDLHWAMMAHRDQRDVSLSSLRMLIVTDGANPWSVSSCDAFLSLFQSHGLKPEAICPCATSAEAMTVAIRRPGVPGAPLPGRAILSMNGLSYGVIRVNTEDKNSALTVQDVGHVMPGGMMCIVKPDGPPQLCKTDEIGEICVSSRTGGMMYFGLAGVTKNTFEVIPVNSAGSPVGDVPFIRSGLLGFVGPGSLVFVVGKMDGLLMVSGRRHNADDIVATGLAVESIKTVYRGRIAVFSVSVFYDERIVVVAEQRPDASEEDSFQWMSRVLQAIDSIHQVGVYCLALVPANTLPKTPLGGIHISQTKQLFLEGSLHPCNILMCPHTCVTNLPKPRQKQPECRLFALFAPGFPVPRRVFRQYCWMNI

SEQ ID NO: 2350 - protein, 30 aa, Artificial Sequence
  Synthetic polypeptide
MTSLLTTPSPRATPEAEAGGSLEPGRWRLQ

SEQ ID NO: 2351 - protein, 62 aa, Artificial Sequence
  Synthetic polypeptide
MAEGKAGGAAGLFAKQVQKKFSRAQEKVLQKLGKAVETKDERFEQSASNFYQQQAGCSGSRL

SEQ ID NO: 2352 - protein, 36 aa, Artificial Sequence
  Synthetic polypeptide
MVLQKLGKAVETKDERFEQSASNFYQQQAGCSGSRL

SEQ ID NO: 2353 - protein, 289 aa, Artificial Sequence
  Synthetic polypeptide
MAESAGASSFFPLVVLLLAGSGGSGPRGVQALLCACTSCLQANYTCETDGACMVSIFNLDGMEHHVRTCIPKVELVPAGKPFYCLSSEDLRNTHCCYTDYCNRIDLRVPSGHLKEPEHPSMWGPVELVGIIAGPVFLLFLIIIIVFLVINYHQRVYHNRQRLDMEDPSCEMCLSKDKTLQDLVYDLSTSGSGSGLPLFVQRTVARTIVLQEIIGKGRFGEVWRGRWRGGDVAVKIFSSREERSWFREAEIYQTVMLRHENILGFIAADNKAIQEAEAGELLEPRRRRLQ

SEQ ID NO: 2354 - protein, 237 aa, Artificial Sequence
  Synthetic polypeptide
MVSIFNLDGMEHHVRTCIPKVELVPAGKPFYCLSSEDLRNTHCCYTDYCNRIDLRVPSGHLKEPEHPSMWGPVELVGIIAGPVFLLFLIIIIVFLVINYHQRVYHNRQRLDMEDPSCEMCLSKDKTLQDLVYDLSTSGSGSGLPLFVQRTVARTIVLQEIIGKGRFGEVWRGRWRGGDVAVKIFSSREERSWFREAEIYQTVMLRHENILGFIAADNKAIQEAEAGELLEPRRRRLQ

SEQ ID NO: 2355 - protein, 424 aa, Artificial Sequence
  Synthetic polypeptide
MSIHFSSPVFTSRSAAFSGRGAQVRLSSARPGGLGSSSLYGLGASRPRVAVRSAYGGPVGAGIREVTINQSLLAPLRLDADPSLQRVRQEESEQIKTLNNKFASFIDKVRFLEQQNKLLETKWTLLQEQKSAKSSRLPDIFEAQIAGLRGQLEALQVDGGRLEAELRSMQDVVEDFKNKYEDEINHRTAAENEFVVLKKDVDAAYMSKVELEAKVDALNDEINFLRTLNETELTELQSQISDTSVVLSMDNSRSLDLDGIIAEVKAQYEEMAKCSRAEAEAWYQTKFETLQAQAGKHGDDLRNTRNEISEMNRAIQRLQAEIDNIKNQRAKLEAAIAEAEERGELALKDARAKQEELEAALQRGKQDMARQLREYQELMSVKLALDIEIATYRKLLEGEESRLAGDGVGAVNICVLEPVPHEYR

SEQ ID NO: 2356 - protein, 332 aa, Artificial Sequence
  Synthetic polypeptide
MSFTTRSTFSTNYRSLGSVQAPSYGARPVSSAASVYAGAGGSGSRISVSRSTSFRGGMGSGGLATGIAGGLAGMGGIQNEKETMQSLNDRLASYLDRVRSLETENRRLESKIREHLEKKGPQVRDWSHYFKIIEDLRAQIFANTVDNARIVLQIDNARLAADDFRVKYETELAMRQSVENDIHGLRKVIDDTNITRLQLETEIEALKEELLFMKKNHEEEVKGLQAQIASSGLTVEVDAPKSQDLAKIMADIRAQYDELARKNREELDKYWSQQIEESTTVVTTQSAEVGAAETTLTELRRTVQSLEIDLDSMRNLYLAHSRCPKKFPKVKG

SEQ ID NO: 2357 - protein, 41 aa, Artificial Sequence
  Synthetic polypeptide
AWGRTERCSWARWLTPVIPVLWEAEVGGLLEAKSLRPAWAT

SEQ ID NO: 2358 - protein, 15 aa, Artificial Sequence
  Synthetic polypeptide
AWGRTERCSWGGSHL

SEQ ID NO: 2359 - protein, 112 aa, Artificial Sequence
  Synthetic polypeptide
MFACSKFVSTPSLVKSTSQLLSRPLSAVVLKRPEILTDESLSSLAVSCPLTSLVSSRSFQTSAISRDIDTAAKFIGAGAATVGVAGSGAGIGTVFGSLIIGYASGQNEPVGL

SEQ ID NO: 2360 - protein, 169 aa, Artificial Sequence
  Synthetic polypeptide
MPELILYVAITLSVAERLVGPGHACAEPSFRSSRCSAPLCLLCSGSSSPATAPHPLKMFACSKFVSTPSLVKSTSQLLSRPLSAVVLKRPEILTDESLSSLAVSCPLTSLVSSRSFQTSAISRDIDTAAKFIGAGAATVGVAGSGAGIGTVFGSLIIGYASGQNEPVGL

SEQ ID NO: 2361 - protein, 128 aa, Artificial Sequence
  Synthetic polypeptide
MPELILSPATAPHPLKMFACSKFVSTPSLVKSTSQLLSRPLSAVVLKRPEILTDESLSSLAVSCPLTSLVSSRSFQTSAISRDIDTAAKFIGAGAATVGVAGSGAGIGTVFGSLIIGYASGQNEPVGL

SEQ ID NO: 2362 - protein, 23 aa, Artificial Sequence
  Synthetic polypeptide
MFACSKFVSTPSLGSGQNEPVGL

SEQ ID NO: 2363 - protein, 80 aa, Artificial Sequence
  Synthetic polypeptide
MPELILYVAITLSVAERLVGPGHACAEPSFRSSRCSAPLCLLCSGSSSPATAPHPLKMFACSKFVSTPSLGSGQNEPVGL

SEQ ID NO: 2364 - protein, 39 aa, Artificial Sequence
  Synthetic polypeptide
MPELILSPATAPHPLKMFACSKFVSTPSLGSGQNEPVGL

SEQ ID NO: 2365 - protein, 255 aa, Artificial Sequence
  Synthetic polypeptide
MTCPRNVTPNSYAEPLAAPGGGERYSRSAGMYMQSGSDFNCGVMRGCGLAPSLSKRDEGSSPSLALNTYPSYLSQLDSWGDPKAAYRLEQPVGRPLSSCSYPPSVKEENVCCMYSAEKRAKSGPEAALYSHPLPESCLGEHEVPVPSYYRASPSYSALDKTPHCSGANDFEAPFEQRASLNPRAEHLESPQLGGKVSFPETPKSDSQTPSPNEIKTEQSLAGPKGSPSESEKERAKAADSSPDTSDNEAKELQGP

SEQ ID NO: 2366 - protein, 60 aa, Artificial Sequence
  Synthetic polypeptide
VSFPETPKSDSQTPSPNEIKTEQSLAGPKGSPSESEKERAKAADSSPDTSDNEAKELQGP

SEQ ID NO: 2367 - protein, 275 aa, Artificial Sequence
  Synthetic polypeptide
MIMSSYLMDSNYIDPKFPPCEEYSQNSYIPEHSPEYYGRTRESGFQHHHQELYPPPPPRPSYPERQYSCTSLQGPGNSRGHGPAQAGHHHPEKSQSLCEPAPLSGASASPSPAPPACSQPAPDHPSSAASKQPIVYPWMKKIHVSTVNPNYNGGEPKRSRTAYTRQQVLELEKEFHYNRYLTRRRRIEIAHSLCLSERQIKIWFQNRRMKWKKDHRLPNTKVRSAPPAGAAPSTLSAATPGTSEDHSQSATPPEQQRAEDITRTARSMRAEAVSV

SEQ ID NO: 2368 - protein, 173 aa, Artificial Sequence
  Synthetic polypeptide
MATETVELHKLKLAELKQECLARGLETKGIKQDLIHRLQAYLEEHAEEEANEEDVLGDETEEEETKPIELPVKEEEPPEKTVDVAAEKKVVKITSEIPQTERMQKRAERFNVPVSLESKKAARAARFGISSVPTKVCCLYLRVHHNQMRFRNTVFLGCETCRYGGAAYICCRT

SEQ ID NO: 2369 - protein, 113 aa, Artificial Sequence
  Synthetic polypeptide
MEEETKPIELPVKEEEPPEKTVDVAAEKKVVKITSEIPQTERMQKRAERFNVPVSLESKKAARAARFGISSVPTKVCCLYLRVHHNQMRFRNTVFLGCETCRYGGAAYICCRT

SEQ ID NO: 2370 - protein, 12 aa, Artificial Sequence
  Synthetic polypeptide
SSLAALLDSAER

SEQ ID NO: 2371 - protein, 158 aa, Artificial Sequence
  Synthetic polypeptide
GYVMPDTHLKGVLRSLVEASSSGVSVLSLCEKGDAMIMEETGKIFKKEKEMKKGIAFPTSISVNNCVCHFSPLKSDQDYILKEGDLVKIDLGVHVDGFIANVAHTFVVDVAQGTQVTGRKADVIKAAHLCAEAALRLVKPGNQLPGRLRWENHLSLGD

SEQ ID NO: 2372 - protein, 177 aa, Artificial Sequence
  Synthetic polypeptide
MSGEDEQQEQTIAEDLVVTKYKMGGDIANRVLRSLVEASSSGVSVLSLCEKGDAMIMEETGKIFKKEKEMKKGIAFPTSISVNNCVCHFSPLKSDQDYILKEGDLVKIDLGVHVDGFIANVAHTFVVDVAQGTQVTGRKADVIKAAHLCAEAALRLVKPGNQLPGRLRWENHLSLGD

SEQ ID NO: 2373 - protein, 166 aa, Artificial Sequence
  Synthetic polypeptide
MSAERGPWQAPTRGRLLGGVLRSLVEASSSGVSVLSLCEKGDAMIMEETGKIFKKEKEMKKGIAFPTSISVNNCVCHFSPLKSDQDYILKEGDLVKIDLGVHVDGFIANVAHTFVVDVAQGTQVTGRKADVIKAAHLCAEAALRLVKPGNQLPGRLRWENHLSLGD

SEQ ID NO: 2374 - protein, 158 aa, Artificial Sequence
  Synthetic polypeptide
GYVMPDTHLKGVLRSLVEASSSGVSVLSLCEKGDAMIMEETGKIFKKEKEMKKGIAFPTSISVNNCVCHFSPLKSDQDYILKEGDLVKIDLGVHVDGFIANVAHTFVVDVAQGTQVTGRKADVIKAAHLCAEAALRLVKPGNQIGIYICPVHMQNLLS

SEQ ID NO: 2375 - protein, 177 aa, Artificial Sequence
  Synthetic polypeptide
MSGEDEQQEQTIAEDLVVTKYKMGGDIANRVLRSLVEASSSGVSVLSLCEKGDAMIMEETGKIFKKEKEMKKGIAFPTSISVNNCVCHFSPLKSDQDYILKEGDLVKIDLGVHVDGFIANVAHTFVVDVAQGTQVTGRKADVIKAAHLCAEAALRLVKPGNQIGIYICPVHMQNLLS

SEQ ID NO: 2376 - protein, 166 aa, Artificial Sequence
  Synthetic polypeptide
MSAERGPWQAPTRGRLLGGVLRSLVEASSSGVSVLSLCEKGDAMIMEETGKIFKKEKEMKKGIAFPTSISVNNCVCHFSPLKSDQDYILKEGDLVKIDLGVHVDGFIANVAHTFVVDVAQGTQVTGRKADVIKAAHLCAEAALRLVKPGNQIGIYICPVHMQNLLS

SEQ ID NO: 2377 - protein, 174 aa, Artificial Sequence
  Synthetic polypeptide
MPPKKDVPVKKPAGPSISKPAAKPAAAGAPPAKTKAEPAVPQAPQKTQEPPVDLSKVVIEFNKDQLEEFKEAFELFDRVGDGKILYSQCGDVMRALGQNPTNAEVLKVLGNPKSDELKSRRVDFETFLPMLQAVAKNRGQGTYEDYLEGFRVFDKEGNGKVMGAELRHVLTTLA

SEQ ID NO: 2378 - protein, 304 aa, Artificial Sequence
  Synthetic polypeptide
MDLHMMNCELLATCSALGYLEGDTYHKEPDCLESVKDLIRYLRHEDETRDVRQQLGAAQILQSDLLPILTQHHQDKPLFDAVIRLMVNLTQPALLCFGNLPKEPSFRHHFLQVLTYLQAYKEAFASEKAFGVLSETLYELLQLGWEERQEEDNLLIERILLLVRNILHVPADLDQEKIDDDASAHDQLLWAIHLSGLDDLLLFLASSSAEEQWSLHVLEIVSLMFRDQNPEQLAGVGQGRLAQERSADFAELEVLRQREMAEKKTRALQRGNRHSRFGGSYIVQGLKSIGERDLIFHKGLHNPG

SEQ ID NO: 2379 - protein, 305 aa, Artificial Sequence
  Synthetic polypeptide
MDLHMMNCELLATCSALGYLEGDTYHKEPDCLESVKDLIRYLRHEDETRDVRQQLGAAQILQSDLLPILTQHHQDKPLFDAVIRLMVNLTQPALLCFGNLPKEPSFRHHFLQVLTYLQAYKEAFASEKAFGVLSETLYELLQLGWEERQEEDNLLIERILLLVRNILHVPADLDQEKKIDDDASAHDQLLWAIHLSGLDDLLLFLASSSAEEQWSLHVLEIVSLMFRDQNPEQLAGVGQGRLAQERSADFAELEVLRQREMAEKKTRALQRGNRHSRFGGSYIVQGLKSIGERDLIFHKGLHNPG

SEQ ID NO: 2380 - protein, 685 aa, Artificial Sequence
  Synthetic polypeptide
MEMEANDHFNFTGLPPAPAASGLKPSPSSGEGLYTNGSPMNFPQQGKSLNGDVNVNGLSTVSHTTTSGILNSAPHSSSTSHLHHPSVAYDCLWNYSQYPSANPGSNLKDPPLLSQFSGGQYPLNGILGGSRQPSSPSHNTNLRAGSQEFWANGTQSPMGLNFDSQELYDSFPDQNFEEVGSGIHPDEAAEKEMTSVVAENGTGLVGSLELEEEQPELKMCGYNGSVPSVESLHQEVSVLVPDPTVSCLDDPSHLPDQLEDTPILSEDSLEPFNSLAPEPVSGGLYGIDDTELMGAEDKLPLEDSPVISALDCPSLNNATAFSLLADDSQTSTSIFASPTSPPVLGESVLQDNSFDLNNGSDAEQEEMETQSSDFPPSLTQPAPDQSSTIQLHPATSPAVSPTTSPAVSLVVSPAASPEISPEVCPAASTVVSPAVFSVVSPASSAVLPAVSLEVPLTASVTSPKASPVTSPAAAFPTASPANKDVSSFLETTADVEEITGEGLTASGSGDVMRRRIATPEEVRLPLQHGWRREVRIKKGSHRWQGETWYYGPCGKRMKQFPEVIKYLSRNVVHSVRREHFSFSPRMPVGDFFEERDTPEGLQWVQLSAEEIPSRIQAITGKRGRPRNTEKAKTKEVPKVKRGRGRPPKVKITELLNKTDNRPLKKLEAQGPGTVAHGCNPSSLRG

SEQ ID NO: 2381 - protein, 683 aa, Artificial Sequence
  Synthetic polypeptide
MEANDHFNFTGLPPAPAASGLKPSPSSGEGLYTNGSPMNFPQQGKSLNGDVNVNGLSTVSHTTTSGILNSAPHSSSTSHLHHPSVAYDCLWNYSQYPSANPGSNLKDPPLLSQFSGGQYPLNGILGGSRQPSSPSHNTNLRAGSQEFWANGTQSPMGLNFDSQELYDSFPDQNFEEVGSGIHPDEAAEKEMTSVVAENGTGLVGSLELEEEQPELKMCGYNGSVPSVESLHQEVSVLVPDPTVSCLDDPSHLPDQLEDTPILSEDSLEPFNSLAPEPVSGGLYGIDDTELMGAEDKLPLEDSPVISALDCPSLNNATAFSLLADDSQTSTSIFASPTSPPVLGESVLQDNSFDLNNGSDAEQEEMETQSSDFPPSLTQPAPDQSSTIQLHPATSPAVSPTTSPAVSLVVSPAASPEISPEVCPAASTVVSPAVFSVVSPASSAVLPAVSLEVPLTASVTSPKASPVTSPAAAFPTASPANKDVSSFLETTADVEEITGEGLTASGSGDVMRRRIATPEEVRLPLQHGWRREVRIKKGSHRWQGETWYYGPCGKRMKQFPEVIKYLSRNVVHSVRREHFSFSPRMPVGDFFEERDTPEGLQWVQLSAEEIPSRIQAITGKRGRPRNTEKAKTKEVPKVKRGRGRPPKVKITELLNKTDNRPLKKLEAQGPGTVAHGCNPSSLRG

SEQ ID NO: 2382 - protein, 715 aa, Artificial Sequence
  Synthetic polypeptide
MEMEANDHFNFTGLPPAPAASGLKPSPSSGEGLYTNGSPMNFPQQGKSLNGDVNVNGLSTVSHTTTSGILNSAPHSSSTSHLHHPSVAYDCLWNYSQYPSANPGSNLKDPPLLSQFSGGQYPLNGILGGSRQPSSPSHNTNLRAGSQEFWANGTQSPMGLNFDSQELYDSFPDQNFEVMPNGPPSFFTSPQTSPMLGSSIQTFAPSQEVGSGIHPDEAAEKEMTSVVAENGTGLVGSLELEEEQPELKMCGYNGSVPSVESLHQEVSVLVPDPTVSCLDDPSHLPDQLEDTPILSEDSLEPFNSLAPEPVSGGLYGIDDTELMGAEDKLPLEDSPVISALDCPSLNNATAFSLLADDSQTSTSIFASPTSPPVLGESVLQDNSFDLNNGSDAEQEEMETQSSDFPPSLTQPAPDQSSTIQLHPATSPAVSPTTSPAVSLVVSPAASPEISPEVCPAASTVVSPAVFSVVSPASSAVLPAVSLEVPLTASVTSPKASPVTSPAAAFPTASPANKDVSSFLETTADVEEITGEGLTASGSGDVMRRRIATPEEVRLPLQHGWRREVRIKKGSHRWQGETWYYGPCGKRMKQFPEVIKYLSRNVVHSVRREHFSFSPRMPVGDFFEERDTPEGLQWVQLSAEEIPSRIQAITGKRGRPRNTEKAKTKEVPKVKRGRGRPPKVKITELLNKTDNRPLKKLEAQGPGTVAHGCNPSSLRG

SEQ ID NO: 2383 - protein, 713 aa, Artificial Sequence
  Synthetic polypeptide
MEANDHFNFTGLPPAPAASGLKPSPSSGEGLYTNGSPMNFPQQGKSLNGDVNVNGLSTVSHTTTSGILNSAPHSSSTSHLHHPSVAYDCLWNYSQYPSANPGSNLKDPPLLSQFSGGQYPLNGILGGSRQPSSPSHNTNLRAGSQEFWANGTQSPMGLNFDSQELYDSFPDQNFEVMPNGPPSFFTSPQTSPMLGSSIQTFAPSQEVGSGIHPDEAAEKEMTSVVAENGTGLVGSLELEEEQPELKMCGYNGSVPSVESLHQEVSVLVPDPTVSCLDDPSHLPDQLEDTPILSEDSLEPFNSLAPEPVSGGLYGIDDTELMGAEDKLPLEDSPVISALDCPSLNNATAFSLLADDSQTSTSIFASPTSPPVLGESVLQDNSFDLNNGSDAEQEEMETQSSDFPPSLTQPAPDQSSTIQLHPATSPAVSPTTSPAVSLVVSPAASPEISPEVCPAASTVVSPAVFSVVSPASSAVLPAVSLEVPLTASVTSPKASPVTSPAAAFPTASPANKDVSSFLETTADVEEITGEGLTASGSGDVMRRRIATPEEVRLPLQHGWRREVRIKKGSHRWQGETWYYGPCGKRMKQFPEVIKYLSRNVVHSVRREHFSFSPRMPVGDFFEERDTPEGLQWVQLSAEEIPSRIQAITGKRGRPRNTEKAKTKEVPKVKRGRGRPPKVKITELLNKTDNRPLKKLEAQGPGTVAHGCNPSSLRG

SEQ ID NO: 2384 - protein, 15 aa, Artificial Sequence
  Synthetic polypeptide
DGRGRPGIMAPVGRG

SEQ ID NO: 2385 - protein, 147 aa, Artificial Sequence
  Synthetic polypeptide
MQPASAKWYDRRDYVFIEFCVEDSKDVNVNFEKSKLTFSCLGGSDNFKHLNEIDLFHCIDPNDSKHKRTDRSILCCLRKGESGQSWPRLTKERAKLNWLSVDFNNWKDWEDDSDEDMSNFDRFSEMMNNMGGDEDVDLPEVDGADDT

SEQ ID NO: 2386 - protein, 117 aa, Artificial Sequence
  Synthetic polypeptide
MQPASAKWYDRRDYVFIEFCVEDSKDVNVNFEKSKLTFSCLGGSDNFKHLNEIDLFHCIDPNDSKHKRTDRSILCCLRKGESGQSWPRLTKERAKMMNNMGGDEDVDLPEVDGADDT

SEQ ID NO: 2387 - protein, 114 aa, Artificial Sequence
  Synthetic polypeptide
MQPASAKWYDRRDYVFIEFCVEDSKDVNVNFEKSKLTFSCLGGSDNFKHLNEIDLFHCIDPNLNWLSVDFNNWKDWEDDSDEDMSNFDRFSEMMNNMGGDEDVDLPEVDGADDT

SEQ ID NO: 2388 - protein, 111 aa, Artificial Sequence
  Synthetic polypeptide
MQPASAKWYDRRDYVFIEFCVEDSKDVNVNFEKSKLTFSCLRKGESGQSWPRLTKERAKLNWLSVDFNNWKDWEDDSDEDMSNFDRFSEMMNNMGGDEDVDLPEVDGADDT

SEQ ID NO: 2389 - protein, 464 aa, Artificial Sequence
  Synthetic polypeptide
MRLFVSDGVPGCLPVLAAAGRARGRAEVLISTVGPEDCVVPFLTRPKVPVLQLDSGNYLFSTSAICRYFFLLSGWEQDDLTNQWLEWEATELQPALSAALYYLVVQGKKGEDVLGSVRRALTHIDHSLSRQNCPFLAGETESLADIVLWGALYPLLQDPAYLPEELSALHSWFQTLSTQEPCQRAAETVLKQQGVLALRPYLQKQPQPSPAEGRAVTNEPEEEELATLSEEEIAMAVTAWEKGLESLPPLRPQQNPVLPVAGERNVLITSALPYVNNVPHLGNIIGCVLSADVFARYSRLRQWNTLYLCGTDEYGTATETKALEEGLTPQEICDKYHIIHADIYRWFNISFDIFGRTTTPQQTKITQDIFQQLLKRGFVLQDTVEQLRCEHCARFLADRFVEGVCPFCGYEEARGDQCDKCGKLINAVELKKPQCKVCRSCPVVQSSQHLFLDLPKGYLGGPMT

SEQ ID NO: 2390 - protein, 230 aa, Artificial Sequence
  Synthetic polypeptide
MAVTAWEKGLESLPPLRPQQNPVLPVAGERNVLITSALPYVNNVPHLGNIIGCVLSADVFARYSRLRQWNTLYLCGTDEYGTATETKALEEGLTPQEICDKYHIIHADIYRWFNISFDIFGRTTTPQQTKITQDIFQQLLKRGFVLQDTVEQLRCEHCARFLADRFVEGVCPFCGYEEARGDQCDKCGKLINAVELKKPQCKVCRSCPVVQSSQHLFLDLPKGYLGGPMT

SEQ ID NO: 2391 - protein, 665 aa, Artificial Sequence
  Synthetic polypeptide
MRLFVSDGVPGCLPVLAAAGRARGRAEVLISTVGPEDCVVPFLTRPKVPVLQLDSGNYLFSTSAICRYFFLLSGWEQDDLTNQWLEWEATELQPALSAALYYLVVQGKKGEDVLGSVRRALTHIDHSLSRQNCPFLAGETESLADIVLWGALYPLLQDPAYLPEELSALHSWFQTLSTQEPCQRAAETVLKQQGVLALRPYLQKQPQPSPAEGRAVTNEPEEEELATLSEEEIAMAVTAWEKGLESLPPLRPQQNPVLPVAGERNVLITSALPYVNNVPHLGNIIGCVLSADVFARYSRLRQWNTLYLCGTDEYGTATETKALEEGLTPQEICDKYHIIHADIYRWFNISFDIFGRTTTPQQTKITQDIFQQLLKRGFVLQDTVEQLRCEHCARFLADRFVEGVCPFCGYEEARGDQCDKCGKLINAVELKKPQCKVCRSCPVVQSSQHLFLDLPKLEKRLEEWLGRTLPGSDWTPNAQFITRSWLRDGLKPRCITRDLKWGTPVPLEGFEDKVFYVWFDATIGYLSITANYTDQWERWWKNPEQVDLYQFMAKDNVPFHSLVFPCSALGAEDNYTLVSHLIATEYLNYEDGKFSKSRGVGVFGDMAQDTGIPADIWRFYLLYIRPEGQDSAFSWTDLLLKNNSELLNNLGNFINRSSRPAWPTW

SEQ ID NO: 2392 - protein, 431 aa, Artificial Sequence
  Synthetic polypeptide
MAVTAWEKGLESLPPLRPQQNPVLPVAGERNVLITSALPYVNNVPHLGNIIGCVLSADVFARYSRLRQWNTLYLCGTDEYGTATETKALEEGLTPQEICDKYHIIHADIYRWFNISFDIFGRTTTPQQTKITQDIFQQLLKRGFVLQDTVEQLRCEHCARFLADRFVEGVCPFCGYEEARGDQCDKCGKLINAVELKKPQCKVCRSCPVVQSSQHLFLDLPKLEKRLEEWLGRTLPGSDWTPNAQFITRSWLRDGLKPRCITRDLKWGTPVPLEGFEDKVFYVWFDATIGYLSITANYTDQWERWWKNPEQVDLYQFMAKDNVPFHSLVFPCSALGAEDNYTLVSHLIATEYLNYEDGKFSKSRGVGVFGDMAQDTGIPADIWRFYLLYIRPEGQDSAFSWTDLLLKNNSELLNNLGNFINRSSRPAWPTW

SEQ ID NO: 2393 - protein, 21 aa, Artificial Sequence
  Synthetic polypeptide
ELLNNLGNFINRSSRPAWPTW

SEQ ID NO: 2394 - protein, 237 aa, Artificial Sequence
  Synthetic polypeptide
MAGAPDERRRGPAAGEQLQQQHVSCQVFPERLAQGNPQQGFFSSFFTSNQKCQLRLLKTLETNPYVKLLLDAMKHSGCAVNKDRHFSCEDCNGNVSGGFDASTSQIVLCQNNIHNQAHMNRVVTHELIHAFDHCRAHVDWFTNIRHLACSEVRAANLSGDCSLVNEIFRLHFGLKQHHQLQIDCKNKPAILRGPTDPLKEATAPTVPRRHPKYCECPTAEVGKGDPPLPHTPPHWRN

SEQ ID NO: 2395 - protein, 14 aa, Artificial Sequence
  Synthetic polypeptide
IEDHMKPRVEDQPG

SEQ ID NO: 2396 - protein, 12 aa, Artificial Sequence
  Synthetic polypeptide
MRHFPGYGQRVM

SEQ ID NO: 2397 - protein, 13 aa, Artificial Sequence
  Synthetic polypeptide
IRRHFPGYGQRVM

SEQ ID NO: 2398 - protein, 60 aa, Artificial Sequence
  Synthetic polypeptide
MAEGGAADLDTQRSDIATLLKTSLRKGDTWVVHACNPALWEAEEGGSLELRSSRPAWAPW

SEQ ID NO: 2399 - protein, 82 aa, Artificial Sequence
  Synthetic polypeptide
ERRIWTPSGLTSRRCSKPRSGKGTPGWFTPVTQHFGRPRREDHLNSGVPDQPGHHGETPSLQKYKKISWAWWHACGPSYSGG

SEQ ID NO: 2400 - protein, 130 aa, Artificial Sequence
  Synthetic polypeptide
MAEGGAADLDTQRSDIATLLKTSLRKGDTWYLVDSRWFKQWKKYVGFDSWDKYQMGDQNVYPGPIDNSGLLKDGDAQSLKEHLIDELDYILLPTEGWNKLVSWYTLMEGQEPIARKDTQAAYGEAHMVRN

SEQ ID NO: 2401 - protein, 27 aa, Artificial Sequence
  Synthetic polypeptide
ERRIWTPSGLTSRRCSKPRSGKGTPGT

SEQ ID NO: 2402 - protein, 76 aa, Artificial Sequence
  Synthetic polypeptide
MGDQNVYPGPIDNSGLLKDGDAQSLKEHLIDELDYILLPTEGWNKLVSWYTLMEGQEPIARKDTQAAYGEAHMVRN

SEQ ID NO: 2403 - protein, 301 aa, Artificial Sequence
  Synthetic polypeptide
MAEGGAADLDTQRSDIATLLKTSLRKGDTWYLVDSRWFKQWKKYVGFDSWDKYQMGDQNVYPGPIDNSGLLKDGDAQSLKEHLIDELDYILLPTEGWNKLVSWYTLMEGQEPIARKVVEQGMFVKHCKVEVYLTELKLCENGNMNNVVTRRFSKADTIDTIEKEIRKIFSIPDEKETRLWNKYMSNTFEPLNKPDSTIQDAGLYQGQVLVIEQKNEDGTWPRGPSTPNVKNSNYCLPSYTAYKNYDYSEPGRNNEQPGLCGLSNLGNTCFMNSAIQVQPSNPSQKPKTYPKSCSFYFLYST

SEQ ID NO: 2404 - protein, 330 aa, Artificial Sequence
  Synthetic polypeptide
MAEGGAADLDTQRSDIATLLKTSLRKGDTWYLVDSRWFKQWKKYVGFDSWDKYQMGDQNVYPGPIDNSGLLKDGDAQSLKEHLIDELDYILLPTEGWNKLVSWYTLMEGQEPIARKVVEQGMFVKHCKVEVYLTELKLCENGNMNNVVTRRFSKADTIDTIEKEIRKIFSIPDEKETRLWNKYMSNTFEPLNKPDSTIQDAGLYQGQVLVIEQKNEDGTWPRGPSTPKSPGASNFSTLPKISPSSLSNNYNNMNNRNVKNSNYCLPSYTAYKNYDYSEPGRNNEQPGLCGLSNLGNTCFMNSAIQVQPSNPSQKPKTYPKSCSFYFLYST

SEQ ID NO: 2405 - protein, 305 aa, Artificial Sequence
  Synthetic polypeptide
MAEGGAADLDTQRSDIATLLKTSLRKGDTWYLVDSRWFKQWKKYVGFDSWDKYQMGDQNVYPGPIDNSGLLKDGDAQSLKEHLIDELDYILLPTEGWNKLVSWYTLMEGQEPIARKVVEQGMFVKHCKVEVYLTELKLCENGNMNNVVTRRFSKADTIDTIEKEIRKIFSIPDEKETRLWNKYMSNTFEPLNKPDSTIQDAGLYQGQVLFIVLVIEQKNEDGTWPRGPSTPNVKNSNYCLPSYTAYKNYDYSEPGRNNEQPGLCGLSNLGNTCFMNSAIQVQPSNPSQKPKTYPKSCSFYFLYST

SEQ ID NO: 2406 - protein, 1521 aa, Artificial Sequence
  Synthetic polypeptide
MSGTSSPEAVKKLLENMQSDLRALSLECKKKFPPVKEAAESGIIKVKTIAARNTEILAALKENSSEVVQPFLMGCGTKEPKITQLCLAAIQRLMSHEVVSETAAGNIINMLWQLMENSLEELKLLQTVLVLLTTNTVVHDEALSKAIVLCFRLHFTKDNITNNTAAATVRQVVTVVFERMVAEDERHRDIIEQPVLVQGNSNRRSVSTLKPCAKDAYMLFQDLCQLVNADAPYWLVGMTEMTRTFGLELLESVLNDFPQVFLQHQEFSFLLKERVCPLVIKLFSPNIKFRQGSSTSSSPAPVEKPYFPICMRLLRVVSVLIKQFYSLLVTECEIFLSLLVKFLDADKPQWLRAVAVESIHRFCVQPQLLRSFCQSYDMKQHSTKVFRDIVNALGSFIQSLFLVPPTGNPATSNQAGNNNLGGSVSAPANSGMVGIGGGVTLLPAFEYRGTWIPILTITVQGSAKATYLEMLDKVEPPTIPEGYAMSVAFHCLLDLVRGITSMIEGELGELETECQTTTEEGSSPTQSTEQQDLQSTSDQMDKEIVSRAVWEEMVNACWCGLLAALSLLLDASTDEAATENILKAELTMAALCGRLGLVTSRDAFITAICKGSLPPHYALTVLNTTTAATLSNKSYSVQGQSVMMISPSSESHQQVVAVGQPLAVQPQGTVMLTSKNIQCMRTLLNLAHCHGAVLGTSWQLVLATLQHLVWILGLKPSSGGALKPGRAVEGPSTVLTTAVMTDLPVISNILSRLFESSQYLDDVSLHHLINALCSLSLEAMDMAYGNNKEPSLFAVAKLLETGLVNMHRIEILWRPLTGHLLEKVCQHPNSRMREWGAEALTSLIKAGLTFNHDPPLSQNQRLQLLLLNPLKEMSNINHPDIRLKQLECVLQILQSQGDSLGPGWPLVLGVMGAIRNDQGESLIRTAFQCLQLVVTDFLPTMPCTCLQIVVDVAGSFGLHNQELNISLTSIGLLWNISDYFFQRGETIEKELNKEEAAQQKQAEEKGVVLNRPFHPAPPFDCLWLCLYAKLGELCVDPRPAVRKSAGQTLFSTIGAHGTLLQHSTWHTVIWKVLFHLLDRVRESSTTADKEKIESGGGNILIHHSRDTAEKQWAETWVLTLAGVARIFNTRRYLLQPLGDFSRAWDVLLDHIQSAALSKNNEVSLAALKSFQEILQIVSPVRDSDKPETPPVVNVPVPVLIGPISGMSRPFVRTDSIGEKLGRYSSSEPPIVTDELEDLNLWWAAWNTWYRIGSESTKPPITFDKLTFIPSQPFLTALIQIFPALYQHIKTGFNMDDLQKLGVILHSAISVPISSDASPFILPSYTEAVLTSLQEAVLTALDVLQKAICVGPENMQIMYPAIFDQLLAFVEFSCKPPQYGQLETKHIANAKYNQIQLFAPAEWVALNYVPFAERSLEVVVDLYQKTACHKAVVNEKVLQNIIKTLRVPLSLKYSCPSESTWKLAVSSLLRVLSIGLPVARQHASSGKFDSMWPELANTFEDFLFTKRVIVRIKSLKMNECLE

SEQ ID NO: 2407 - protein, 1520 aa, Artificial Sequence
  Synthetic polypeptide
MSGTSSPEAVKKLLENMQSDLRALSLECKKKFPPVKEAAESGIIKVKTIAARNTEILAALKENSSEVVQPFLMGCGTKEPKITQLCLAAIQRLMSHEVVSETAAGNIINMLWQLMENSLEELKLLQTVLVLLTTNTVVHDEALSKAIVLCFRLHFTKDNITNNTAAATVRQVVTVVFERMVAEDERHRDIIEQPVLVQGNSNRRSVSTLKPCAKDAYMLFQDLCQLVNADAPYWLVGMTEMTRTFGLELLESVLNDFPQVFLQHQEFSFLLKERVCPLVIKLFSPNIKFRQGSSTSSSPAPVEKPYFPICMRLLRVVSVLIKQFYSLLVTECEIFLSLLVKFLDADKPQWLRAVAVESIHRFCVQPQLLRSFCQSYDMKQHSTKVFRDIVNALGSFIQSLFLVPPTGNPATSNQAGNNNLGGSVSAPANSGMVGIGGGVTLLPAFEYRGTWIPILTITVQGSAKATYLEMLDKVEPPTIPEGYAMSVAFHCLLDLVRGITSMIEGELGELETECQTTTEEGSSPTQSTEQQDLQSTSDQMDKEIVSRAVWEEMVNACWCGLLAALSLLLDASTDEAATENILKAELTMAALCGRLGLVTSRDAFITAICKGSLPPHYALTVLNTTTAATLSNKSYSVQGQSVMMISPSSESHQQVVAVGQPLAVQPQGTVMLTSKNIQCMRTLLNLAHCHGAVLGTSWQLVLATLQHLVWILGLKPSSGGALKPGRAVEGPSTVLTTAVMTDLPVISNILSRLFESSQYLDDVSLHHLINALCSLSLEAMDMAYGNNKEPSLFAVAKLLETGLVNMHRIEILWRPLTGHLLEVCQHPNSRMREWGAEALTSLIKAGLTFNHDPPLSQNQRLQLLLLNPLKEMSNINHPDIRLKQLECVLQILQSQGDSLGPGWPLVLGVMGAIRNDQGESLIRTAFQCLQLVVTDFLPTMPCTCLQIVVDVAGSFGLHNQELNISLTSIGLLWNISDYFFQRGETIEKELNKEEAAQQKQAEEKGVVLNRPFHPAPPFDCLWLCLYAKLGELCVDPRPAVRKSAGQTLFSTIGAHGTLLQHSTWHTVIWKVLFHLLDRVRESSTTADKEKIESGGGNILIHHSRDTAEKQWAETWVLTLAGVARIFNTRRYLLQPLGDFSRAWDVLLDHIQSAALSKNNEVSLAALKSFQEILQIVSPVRDSDKPETPPVVNVPVPVLIGPISGMSRPFVRTDSIGEKLGRYSSSEPPIVTDELEDLNLWWAAWNTWYRIGSESTKPPITFDKLTFIPSQPFLTALIQIFPALYQHIKTGFNMDDLQKLGVILHSAISVPISSDASPFILPSYTEAVLTSLQEAVLTALDVLQKAICVGPENMQIMYPAIFDQLLAFVEFSCKPPQYGQLETKHIANAKYNQIQLFAPAEWVALNYVPFAERSLEVVVDLYQKTACHKAVVNEKVLQNIIKTLRVPLSLKYSCPSESTWKLAVSSLLRVLSIGLPVARQHASSGKFDSMWPELANTFEDFLFTKRVIVRIKSLKMNECLE

SEQ ID NO: 2408 - protein, 1514 aa, Artificial Sequence
  Synthetic polypeptide
MSGTSSPEAVKKLLENMQSDLRALSLECKKKFPPVKEAAESGIIKVKTIAARNTEILAALKENSSEVVQPFLMGCGTKEPKITQLCLAAIQRLMSHEVVSETAAGNIINMLWQLMENSLEELKLLQTVLVLLTTNTVVHDEALSKAIVLCFRLHFTKDNITNNTAAATVRQVVTVVFERMVAEDERHRDIIEQPVLVQGNSNRRSVSTLKPCAKDAYMLFQDLCQLVNADAPYWLVGMTEMTRTFGLELLESVLNDFPQVFLQHQEFSFLLKERVCPLVIKLFSPNIKFRQGSSTSSSPAPVEKPYFPICMRLLRVVSVLIKQFYSLLVTECEIFLSLLVKFLDADKPQWLRAVAVESIHRFCVQPQLLRSFCQSYDMKQHSTKVFRDIVNALGSFIQSLFLVPPTGNPATSNQAGNNNLGGSVSAPANSGMVGIGGGVTLLPAFEYRGTWIPILTITVQGSAKATYLEMLDKVEPPTIPEGYAMSVAFHCLLDLVRGITSMIEGELGELETECQTTTEEGSSPTQSTEQQDLQSTSDQMDKEIVSRAVWEEMVNACWCGLLAALSLLLDASTDEAATENILKAELTMAALCGRLGLVTSRDAFITAICKGSLPPHYALTVLNTTTAATLSNKSYSVQGQSVMMISPSSESHQQVVAVGQPLAVQPQGTVMLTSKNIQCMRTLLNLAHCHGAVLGTSWQLVLATLQHLVWILGLKPSSGGALKPGRAVEGPSTVLTTAVMTDLPVISNILSRLFESSQYLDDVSLHHLINALCSLSLEAMDMAYGNNKEPSLFAVAKLLETGLVNMHRIEILWRPLTGHLLEVCQHPNSRMREWGAEALTSLIKAGLTFNHDPPLSQNQRLQLLLLNPLKEMSNINHPDIRLKQLECVLQILQSQGDSLGPGWPLVLGVMGAIRNDQGESLIRTAFQCLQLVVTDFLPTMPCTCLQIVVDVAGSFGLHNQELNISLTSIGLLWNISDYFFQRGETIEKELNKEEAAQQKQAEEKGVVLNRPFHPAPPFDCLWLCLYAKLGELCVDPRPAVRKSAGQTLFSTIGAHGTLLQHSTWHTVIWKVLFHLLDRVRESSTTADKEKIESGGGNILIHHSRDTAEKQWAETWVLTLAGVARIFNTRRYLLQPLGDFSRAWDVLLDHIQSAALSKNNEVSLAALKSFQEILQIVSPVRDSDKPETPPVVNVPVPVLIGPISGMSRPFVRTDSIGEKLGRYSSSEPPIVTDELEDLNLWWAAWNTWYRIGSESTKPPITFDKLTFIPSQPFLTALIQIFPALYQHIKTGFNMDDLQKLGVILHSAISVPISSDASPFILPSYTEAVLTSLQEAVLTALDVLQKAICVGPENMQIMYPAIFDQLLAFVEFSCKPPQYGQLETKHIANAKYNQAEWVALNYVPFAERSLEVVVDLYQKTACHKAVVNEKVLQNIIKTLRVPLSLKYSCPSESTWKLAVSSLLRVLSIGLPVARQHASSGKFDSMWPELANTFEDFLFTKRVIVRIKSLKMNECLE

SEQ ID NO: 2409 - protein, 1491 aa, Artificial Sequence
  Synthetic polypeptide
MSGTSSPEAVKKLLENMQSDLRALSLECKKKFPPVKEAAESGIIKVKTIAARNTEILAALKENSSEVVQPFLMGCGTKEPKITQLCLAAIQRLMSHEVVSETAAGNIINMLWQLMENSLEELKLLQTVLVLLTTNTVVHDEALSKAIVLCFRLHFTKDNITNNTAAATVRQVVTVVFERMVAEDERHRDIIEQPVLVQGNSNRRSVSTLKPCAKDAYMLFQDLCQLVNADAPYWLVGMTEMTRTFGLELLESVLNDFPQVFLQHQEFSFLLKERVCPLVIKLFSPNIKFRQGSSTSSSPAPVEKPYFPICMRLLRVVSVLIKQFYSLLVTECEIFLSLLVKFLDADKPQWLRAVAVESIHRFCVQPQLLRSFCQSYDMKQHSTKVFRDIVNALGSFIQSLFLVPPTGNPATSNQAGNNNLGGSVSAPANSGMVGIGGGVTLLPAFEYRGTWIPILTITVQGSAKATYLEMLDKVEPPTIPEGYAMSVAFHCLLDLVRGITSMIEGELGELETECQTTTEEGSSPTQSTEQQDLQSTSDQMDKEIVSRAVWEEMVNACWCGLLAALSLLLDASTDEAATENILKAELTMAALCGRLGLVTSRDAFITAICKAYSVQGQSVMMISPSSESHQQVVAVGQPLAVQPQGTVMLTSKNIQCMRTLLNLAHCHGAVLGTSWQLVLATLQHLVWILGLKPSSGGALKPGRAVEGPSTVLTTAVMTDLPVISNILSRLFESSQYLDDVSLHHLINALCSLSLEAMDMAYGNNKEPSLFAVAKLLETGLVNMHRIEILWRPLTGHLLEVCQHPNSRMREWGAEALTSLIKAGLTFNHDPPLSQNQRLQLLLLNPLKEMSNINHPDIRLKQLECVLQILQSQGDSLGPGWPLVLGVMGAIRNDQGESLIRTAFQCLQLVVTDFLPTMPCTCLQIVVDVAGSFGLHNQELNISLTSIGLLWNISDYFFQRGETIEKELNKEEAAQQKQAEEKGVVLNRPFHPAPPFDCLWLCLYAKLGELCVDPRPAVRKSAGQTLFSTIGAHGTLLQHSTWHTVIWKVLFHLLDRVRESSTTADKEKIESGGGNILIHHSRDTAEKQWAETWVLTLAGVARIFNTRRYLLQPLGDFSRAWDVLLDHIQSAALSKNNEVSLAALKSFQEILQIVSPVRDSDKPETPPVVNVPVPVLIGPISGMSRPFVRTDSIGEKLGRYSSSEPPIVTDELEDLNLWWAAWNTWYRIGSESTKPPITFDKLTFIPSQPFLTALIQIFPALYQHIKTGFNMDDLQKLGVILHSAISVPISSDASPFILPSYTEAVLTSLQEAVLTALDVLQKAICVGPENMQIMYPAIFDQLLAFVEFSCKPPQYGQLETKHIANAKYNQAEWVALNYVPFAERSLEVVVDLYQKTACHKAVVNEKVLQNIIKTLRVPLSLKYSCPSESTWKLAVSSLLRVLSIGLPVARQHASSGKFDSMWPELANTFEDFLFTKRVIVRIKSLKMNECLE

SEQ ID NO: 2410 - protein, 453 aa, Artificial Sequence
  Synthetic polypeptide
MLTRVKSAVANFMGGIMAGSSGSEHGGGSCGGSDLPLRFPYGRPEFLGLSQDEVECSADHIARPILILKETRRLPWATGYAEVINAGKSTHNEDQASCEVLTVKKKAGAVTSTPNRNSSKRRSSLPNGEGLQLKENSESEGVSCHYWSLFDGHAGSGAAVVASRLLQHHITEQLQDIVDILKNSAVLPPTCLGEEPENTPANSRTLTRAASLRGGVGAPGSPSTPPTRFFTEKKIPHECLVIGALESAFKEMDLQIERERSSYNISGGCTALIVICLLGKLYVANAGDSRAIIIRNGEIIPMSSEFTPETERQRLQYLAFMQPHLLGNEFTHLEFPRRVQRKELGKKMLYRDFNMTGWAYKTIEDEDLKFPLIYGEGKKARVMATIGVTRGLGDHDLKVHDSNIYIKPFLSSAPEFFKVRFPPPLASEFPGVLLKYAAQICTIKTLTGRIFES

SEQ ID NO: 2411 - protein, 406 aa, Artificial Sequence
  Synthetic polypeptide
MASPLPSGFPARRNSRLDVFLRRHLPPEVYDAVRAYEPCIVVSNSENHILKYVVLSDRLVYLTENPPKSIRRVVALRDVVAIDLIDDYPEFLSSPDREISQHIRIIYSSTVLKKECKKSNSVRKFLFPFHHTKANNKKVKEEKNGLAFWRSKESRSLKESPLRDQQESSTPSKDSTLCPRPGLKKLSLHGQGAFRPLPSPSRRSSQSAPTTGKAVSEPSCTTNTKEPQGLPDHNSISEIPFKCNGNGNEFYLGNSLLDSPSQSNSNLEKKESELHLYVISTTSSIFLHLKSSWNNYIIKATLLQDPFYASEFSPAIGSQKPYRDMDEAGNHHSEQTIAGTRNQTLHVLTHRWELNNENTWTQEGGHHTPGPVVGWGKGGGIALGNIPNVNDELMGAAHQHGTCIHM

SEQ ID NO: 2412 - protein, 205 aa, Artificial Sequence
  Synthetic polypeptide
NSRLDVFLRRHLPPEVYDAVRAYEPCIVVSNSENHILKYVVLSDRLVYLTENPPKSIRRVVALRDVVAIDLIDDYPEFLSSPDREISQHIRIIYSSTVLKKECKKSNSVRKFLFPFHHTKANNKKVKEEKNGLAFWRSKESRSLKESPLRKLLFYKIPSMLVSSVLLLEVKSHIGTWMKLETIILSKLLQGRETKHYMFSLIGGN

SEQ ID NO: 2413 - protein, 922 aa, Artificial Sequence
  Synthetic polypeptide
MDEQALLGLNPNADSDFRQRALAYFEQLKISPDAWQVCAEALAQRTYSDDHVKFFCFQVLEHQVKYKYSELTTVQQQLIRETLISWLQAQMLNPQPEKTFIRNKAAQVFALLFVTEYLTKWPKFFFDILSVVDLNPRGVDLYLRILMAIDSELVDRDVVHTSEEARRNTLIKDTMREQCIPNLVESWYQILQNYQFTNSEVTCQCLEVVGAYVSWIDLSLIANDRFINMLLGHMSIEVLREEACDCLFEVVNKGMDPVDKMKLVESLCQVLQSAGFFSIDQEEDVDFLARFSKLVNGMGQSLIVSWSKLIKNGDIKNAQEALQAIETKVALMLQLLIHEDDDISSNIIGFCYDYLHILKQLTVLSDQQKANVEAIMLAVMKKLTYDEEYNFENEGEDEAMFVEYRKQLKLLLDRLAQVSPELLLASVRRVFSSTLQNWQTTRFMEVEVAIRLLYMLAEALPVSHGAHFSGDVSKASALQDMMRTLVTSGVSSYQHTSVTLEFFETVVRYEKFFTVEPQHIPCVLMAFLDHRGLRHSSAKVRSRTAYLFSRFVKSLNKQMNPFIEDILNRIQDLLELSPPENGHQSLLSSDDQLFIYETAGVLIVNSEYPAERKQALMRNLLTPLMEKFKILLEKLMLAQDEERQASLADCLNHAVGFASRTSKAFSNKQTVKQCGCSEVYLDCLQTFLPALSCPLQKDILRSGVRTFLHRMIICLEEEVLPFIPSASEHMLKDCEAKDLQEFIPLINQITAKFKIQVSPFLQQMFMPLLHAIFEVLLRPAEENDQSAALEKQMLRRSYFAFLQTVTGSGMSEVIANQGAENVERVLVTVIQGAVEYPDPIAQKTCFIILSKLVELWGGKDGPVGFADFVYKHIVPACFLAPLKQTFDLADAQTVLALSECAVTLKTIHLKRAEAQELLEPRK

SEQ ID NO: 2414 - protein, 148 aa, Artificial Sequence
  Synthetic polypeptide
MQSTSNHLWLLSDILGQGATANVFRGRHKKTGDLFAIKVFNNISFLRPVDVQMREFEVLKKLNHKNIVKLFAIEEETTTRHKVLIMEFCPCGSLYTVLEEPSNAYGLPESEFLIVLRDVDMTPKAQIPEIHKLDFISIKHFWASEDIR

SEQ ID NO: 2415 - protein, 20 aa, Artificial Sequence
  Synthetic polypeptide
MPNKTDLSLGRVSFFIRTMK

SEQ ID NO: 2416 - protein, 452 aa, Artificial Sequence
  Synthetic polypeptide
MGTQEGWCLLLCLALSGAAETKPHPAEGQWRAVDVVLDCFLAKDGAHRGALASSEDRARASLVLKQVPVLDDGSLEDFTDFQGGTLAQDDPPIIFEASVDLVQIPQAEALLHADCSGKEVTCEISRYFLQMTETTVKTAAWFMANMQVSGGGPSISLVMKTPRVTKNEALWHPTLNLPLSPQGTVRTAVEFQVMTQTQSLSFLLGSSASLDCGFSMAPGLDLISVEWRLQHKGRGQLVYSWTAGQGQAVRKGATLEPAQLGMARDASLTLPGLTIQDEGTYICQITTSLYRAQQIIQLNIQASPKVRLSLANEALLPTLICDIAGYYPLDVVVTWTREELGGSPAQVSGASFSSLRQSVAGTYSISSSLTAEPGSAGATYTCQVTHISLEEPLGASTQVVPPERRTALGVIFASSLFLLALMFLGLQRRQEVPFTCRHDSEAFPAMWNCKSN

SEQ ID NO: 2417 - protein, 155 aa, Artificial Sequence
  Synthetic polypeptide
MSAPAQPPAEGTEGTAPGGGPPGPPPNMTSNRRLQQTQAQVEEVVDIIRVNVDKVLERDQKLSELDDRADALQAGASQFESSAAKLKRKYWWKNCKMMIMLGAICAIIVVVIVSRPSVITSILVSGKEAEETAPERQLHEKDQDVADFEVGRRRP

SEQ ID NO: 2418 - protein, 116 aa, Artificial Sequence
  Synthetic polypeptide
MSAPAQPPAEGTEGTAPGGGPPGPPPNMTSNRRLQQTQAQVEEVVDIIRVNVDKVLERDQKLSELDDRADALQAGASQFESSAAKLKRKYWWKNCKMMIMLGAICAIIVVVIVSLE

SEQ ID NO: 2419 - protein, 160 aa, Artificial Sequence
  Synthetic polypeptide
MSPRRTLPRPLSLCLSLCLCLCLAAALGSAQSGSCRDKKNCKVVFSQQELRKRLTPLQYHVTQEKGTESAFEGEYTHHKDPGIYKCVVCGTPLFKSETKFDSGSGWPSFHDVINSEAITFTDDFSYGMHRVETSCSQKLPWLLPPLATTTPVSQQPSTLR

SEQ ID NO: 2420 - protein, 153 aa, Artificial Sequence
  Synthetic polypeptide
MSAFNLLHLVTKSQPVALRACGLPSGSCRDKKNCKVVFSQQELRKRLTPLQYHVTQEKGTESAFEGEYTHHKDPGIYKCVVCGTPLFKSETKFDSGSGWPSFHDVINSEAITFTDDFSYGMHRVETSCSQKLPWLLPPLATTTPVSQQPSTLR

SEQ ID NO: 2421 - protein, 43 aa, Artificial Sequence
  Synthetic polypeptide
PAAAAWPFHEPAADPPAPPLALPLPLPLPLPGRGSGKCAVRVV

SEQ ID NO: 2422 - protein, 22 aa, Artificial Sequence
  Synthetic polypeptide
TEEAANTPAVPCHSGERDRKCL

SEQ ID NO: 2423 - protein, 96 aa, Artificial Sequence
  Synthetic polypeptide
MSARGEGAGQPSTSAQGQPAAPAPQKRGRGRPRKQQQEPTGEPSPKRPRGRPKGSKNKSPSKAAQKKAEATGEKRPRGRPRKWSQVCLYQQRENRL

SEQ ID NO: 2424 - protein, 59 aa, Artificial Sequence
  Synthetic polypeptide
EPTGEPSPKRPRGRPKGSKNKSPSKAAQKKAEATGEKRPRGRPRKWSQVCLYQQRENRL

SEQ ID NO: 2425 - protein, 222 aa, Artificial Sequence
  Synthetic polypeptide
MGKVKVGVNGFGRIGRLVTRAAFNSGKVDIVAINDPFIDLNYMVYMFQYDSTHGKFHGTVKAENGKLVINGNPITIFQERDPSKIKWGDAGAEYVVESTGVFTTMEKAGAHLQGGAKRVIISAPSADAPMFVMGVNHEKYDNSLKIISNASCTTNCLAPLAKVIHDNFGIVEGLMSPQSMPFRIWRCFLNYPWASSFSFFVVFPLPNLKSFKLTANQVKCKM

SEQ ID NO: 2426 - protein, 147 aa, Artificial Sequence
  Synthetic polypeptide
MEEMRDPSKIKWGDAGAEYVVESTGVFTTMEKAGAHLQGGAKRVIISAPSADAPMFVMGVNHEKYDNSLKIISNASCTTNCLAPLAKVIHDNFGIVEGLMSPQSMPFRIWRCFLNYPWASSFSFFVVFPLPNLKSFKLTANQVKCKM

SEQ ID NO: 2427 - protein, 180 aa, Artificial Sequence
  Synthetic polypeptide
MVYMFQYDSTHGKFHGTVKAENGKLVINGNPITIFQERDPSKIKWGDAGAEYVVESTGVFTTMEKAGAHLQGGAKRVIISAPSADAPMFVMGVNHEKYDNSLKIISNASCTTNCLAPLAKVIHDNFGIVEGLMSPQSMPFRIWRCFLNYPWASSFSFFVVFPLPNLKSFKLTANQVKCKM

SEQ ID NO: 2428 - protein, 40 aa, Artificial Sequence
  Synthetic polypeptide
MADPDPRYPRSSIEDDFNYGSSVASATVHIRMARCGGMCL

SEQ ID NO: 2429 - protein, 29 aa, Artificial Sequence
  Synthetic polypeptide
MAAAWPPPPCTSEWPGVVACVCNPSYSGG

SEQ ID NO: 2430 - protein, 836 aa, Artificial Sequence
  Synthetic polypeptide
MDRSGFGEISSPVIREAEVTRTARKQSAQKRVLLQASQDENFGNTTPRNQVIPRTPSSFRQPFTPTSRSLLRQPDISCILGTGGKSPRLTQSSGFFGNLSMVTNLDDSNWAAAFSSQRSGLFTNTEPHSITEDVTISAVMLREDDPGEAASMSMFSDFLQSFLKHSSSTVFDLVEEYENICGSQVNILSKIVSRATPGLQKFSKTASMLWLLQQEMVTWRLLASLYRDRIQSALEEESVFAVTAVNASEKTVVEALFQRDSLVRQSQLVVDWLESIAKDEIGEFSDNIEFYAKSVYWENTLHTLKQRQLTSYVGSVRPLVTELDPDAPIRQKMPLDDLDREDEVRLLKYLFTLIRAGMTEEAQRLCKRCGQAWRAATLEGWKLYHDPNVNGGTELEPVEGNPYRRIWKISCWRMAEDELFNRYERAIYAALSGNLKQLLPVCDTWEDTVWAYFRVMVDSLVEQEIQTSVATLDETEELPREYLGANWTLEKVFEELQATDKKRVLEENQEHYHIVQKFLILGDIDGLMDEFSKWLSKSRNNLPGHLLRFMTHLILFFRTLGLQTKEEVSIEVLKTYIQLLIREKHTNLIAFYTCHLPQDLAVAQYALFLESVTEFEQRHHCLELAKEADLDVATITKTVVENIRKKDNGEFSHHDLAPALDTGTTEEDRLKIDVIDWLVFDPAQRAEALKQGNAIMRKFLASKKHEAAKEVFVKIPQDSIAEIYNQCEEQGMESPLPAEDDNAIREHLCIRAYLEAHETFNEWFKHMNSVPQKPALIPQPTFTEKVAHEHKEKKYEMDFGIWKGHLDALTADVKEKMYNVLLFVDGGWMVDVREKN

SEQ ID NO: 2431 - protein, 597 aa, Artificial Sequence
  Synthetic polypeptide
MSMFSDFLQSFLKHSSSTVFDLVEEYENICGSQVNILSKIVSRATPGLQKFSKTASMLWLLQQEMVTWRLLASLYRDRIQSALEEESVFAVTAVNASEKTVVEALFQRDSLVRQSQLVVDWLESIAKDEIGEFSDNIEFYAKSVYWENTLHTLKQRQLTSYVGSVRPLVTELDPDAPIRQKMPLDDLDREDEVRLLKYLFTLIRAGMTEEAQRLCKRCGQAWRAATLEGWKLYHDPNVNGGTELEPVEGNPYRRIWKISCWRMAEDELFNRYERAIYAALSGNLKQLLPVCDTWEDTVWAYFRVMVDSLVEQEIQTSVATLDETEELPREYLGANWTLEKVFEELQATDKKRVLEENQEHYHIVQKFLILGDIDGLMDEFSKWLSKSRNNLPGHLLRFMTHLILFFRTLGLQTKEEVSIEVLKTYIQEDRLKIDVIDWLVFDPAQRAEALKQGNAIMRKFLASKKHEAAKEVFVKIPQDSIAEIYNQCEEQGMESPLPAEDDNAIREHLCIRAYLEAHETFNEWFKHMNSVPQKPALIPQPTFTEKVAHEHKEKKYEMDFGIWKGHLDALTADVKEKMYNVLLFVDGGWMVDVREKN

SEQ ID NO: 2432 - protein, 807 aa, Artificial Sequence
  Synthetic polypeptide
MKILVILHQETRLSLELLAHFDSLVLSTNLLFIVTPTSRSLLRQPDISCILGTGGKSPRLTQSSGFFGNLSMVTNLDDSNWAAAFSSQRSGLFTNTEPHSITEDVTISAVMLREDDPGEAASMSMFSDFLQSFLKHSSSTVFDLVEEYENICGSQVNILSKIVSRATPGLQKFSKTASMLWLLQQEMVTWRLLASLYRDRIQSALEEESVFAVTAVNASEKTVVEALFQRDSLVRQSQLVVDWLESIAKDEIGEFSDNIEFYAKSVYWENTLHTLKQRQLTSYVGSVRPLVTELDPDAPIRQKMPLDDLDREDEVRLLKYLFTLIRAGMTEEAQRLCKRCGQAWRAATLEGWKLYHDPNVNGGTELEPVEGNPYRRIWKISCWRMAEDELFNRYERAIYAALSGNLKQLLPVCDTWEDTVWAYFRVMVDSLVEQEIQTSVATLDETEELPREYLGANWTLEKVFEELQATDKKRVLEENQEHYHIVQKFLILGDIDGLMDEFSKWLSKSRNNLPGHLLRFMTHLILFFRTLGLQTKEEVSIEVLKTYIQLLIREKHTNLIAFYTCHLPQDLAVAQYALFLESVTEFEQRHHCLELAKEADLDVATITKTVVENIRKKDNGEFSHHDLAPALDTGTTEEDRLKIDVIDWLVFDPAQRAEALKQGNAIMRKFLASKKHEAAKEVFVKIPQDSIAEIYNQCEEQGMESPLPAEDDNAIREHLCIRAYLEAHETFNEWFKHMNSVPQKPALIPQPTFTEKVAHEHKEKKYEMDFGIWKGHLDALTADVKEKMYNVLLFVDGGWMVDVREKN

SEQ ID NO: 2433 - protein, 134 aa, Artificial Sequence
  Synthetic polypeptide
MADGVDHIDIYADVGEEFNQEAEYGGHDQIDLYDDVISPSANNGDAPEDRDYMDTLPPTVGDDVGKGAAPNVVYTYTGKRIALYIGNLTWWTTDEDLTEAVHSLGVNDILEIKFFENRANGQSKGKKWKQPKCP

SEQ ID NO: 2434 - protein, 93 aa, Artificial Sequence
  Synthetic polypeptide
MKALIVLGLVLLSVTVQGKVFERCELARTLKRLGMDGYRGISLANWMCLAKWESGYNTRATNYNAGDRSTDYGIFQINSRYWCNDGKTPGAFL

SEQ ID NO: 2435 - protein, 172 aa, Artificial Sequence
  Synthetic polypeptide
MFKRMAEFGPDSGGRVKGVTIVKPIVYGNVARYFGKKREEDGHTHQWTVYVKPYRNEDMSAYVKKIQFKLHESYGNPLRVVTKPPYEITETGWGEFEIIIKIFFIDPNERPVTLYHLLKLFQSDTNAMLGKKTVVSEFYDEMIFQDPTAMMQQLLTTSRQLTLGAYKHETES

SEQ ID NO: 2436 - protein, 118 aa, Artificial Sequence
  Synthetic polypeptide
MFKRMAEFGPDSGGRVKGVTIVKPIVYGNVARYFGKKREEDGHTHQWTVYVKPYRNEVTLYHLLKLFQSDTNAMLGKKTVVSEFYDEMIFQDPTAMMQQLLTTSRQLTLGAYKHETES

SEQ ID NO: 2437 - protein, 114 aa, Artificial Sequence
  Synthetic polypeptide
MSAYVKKIQFKLHESYGNPLRVVTKPPYEITETGWGEFEIIIKIFFIDPNERPVTLYHLLKLFQSDTNAMLGKKTVVSEFYDEMIFQDPTAMMQQLLTTSRQLTLGAYKHETES

SEQ ID NO: 2438 - protein, 175 aa, Artificial Sequence
  Synthetic polypeptide
MFKRMAEFGPDSGGRVKGVTIVKPIVYGNVARYFGKKREEDGHTHQWTVYVKPYRNEDMSAYVKKIQFKLHESYGNPLRVVTKPPYEITETGWGEFEIIIKIFFIDPNERPVTLYHLLKLFQSDTNAMLGKKTVVSEFYDEMIFQDPTAMMQQLLTTSRQLTLGAYKHETEYITL

SEQ ID NO: 2439 - protein, 121 aa, Artificial Sequence
  Synthetic polypeptide
MFKRMAEFGPDSGGRVKGVTIVKPIVYGNVARYFGKKREEDGHTHQWTVYVKPYRNEVTLYHLLKLFQSDTNAMLGKKTVVSEFYDEMIFQDPTAMMQQLLTTSRQLTLGAYKHETEYITL

SEQ ID NO: 2440 - protein, 117 aa, Artificial Sequence
  Synthetic polypeptide
MSAYVKKIQFKLHESYGNPLRVVTKPPYEITETGWGEFEIIIKIFFIDPNERPVTLYHLLKLFQSDTNAMLGKKTVVSEFYDEMIFQDPTAMMQQLLTTSRQLTLGAYKHETEYITL

SEQ ID NO: 2441 - protein, 384 aa, Artificial Sequence
  Synthetic polypeptide
MTVTYSSKVANATFFGFHRLLLKWRGSIYKLLYREFIVFAVLYTAISLVYRLLLTGVQKRYFEKLSIYCDRYAEQIPVTFVLGFYVTLVVNRWWNQFVNLPWPDRLMFLISSSVHGSDEHGRLLRRTLMRYVNLTSLLIFRSVSTAVYKRFPTMDHVVEAGFMTTDERKLFNHLKSPHLKYWVPFIWFGNLATKARNEGRIRDSVDLQSLMTEMNRYRSWCSLLFGYDWVGIPLVYTQVVTLAVYTFFFACLIGRQFLDPTKGYAGHDLDLYIPIFTLLQFFFYAGWLKVAEQLINPFGEDDDDFETNWCIDRNLQVSLLAVDEMHMSLPKMKKDIYWDDSAARPPYTLAAADYCIPSFLGSTVQMGRPHQILCKMKQDVIKKQ

SEQ ID NO: 2442 - protein, 171 aa, Artificial Sequence
  Synthetic polypeptide
MTTDERKLFNHLKSPHLKYWVPFIWFGNLATKARNEGRIRDSVDLQSLMTEMNRYRSWCSLLFGYDWVGIPLVYTQVAEQLINPFGEDDDDFETNWCIDRNLQVSLLAVDEMHMSLPKMKKDIYWDDSAARPPYTLAAADYCIPSFLGSTVQMGRPHQILCKMKQDVIKKQ

SEQ ID NO: 2443 - protein, 278 aa, Artificial Sequence
  Synthetic polypeptide
MFLISSSVHGSDEHGRLLRRTLMRYVNLTSLLIFRSVSTAVYKRFPTMDHVVEAGFMTTDERKLFNHLKSPHLKYWVPFIWFGNLATKARNEGRIRDSVDLQSLMTEMNRYRSWCSLLFGYDWVGIPLVYTQVVTLAVYTFFFACLIGRQFLDPTKGYAGHDLDLYIPIFTLLQFFFYAGWLKVAEQLINPFGEDDDDFETNWCIDRNLQVSLLAVDEMHMSLPKMKKDIYWDDSAARPPYTLAAADYCIPSFLGSTVQMGRPHQILCKMKQDVIKKQ

SEQ ID NO: 2444 - protein, 221 aa, Artificial Sequence
  Synthetic polypeptide
MAQNLKDLAGRLPAGPRGMGTALKLLLGAGAVAYGVRESVFTVEGGHRAIFFNRIGGVQQDTILAEGLHFRIPWFQYPIIYDIRARPRKISSPTGSKDLQMVNISLRVLSRPNAQELPSMYQRLGLDYEERVLPSIVNEVLKSVVAKFNASQLITQRAQVSLLIRRELTERAKDFSLILDDVAITELSFSREYTAAVEAKQVATQEAEAGESLEPRRRKLQ

SEQ ID NO: 2445 - protein, 257 aa, Artificial Sequence
  Synthetic polypeptide
MAQNLKDLAGRLPAGPRGMGTALKLLLGAGAVAYGVRESVFTVEGGHRAIFFNRIGGVQQDTILAEGLHFSGCCENLQQHTNCCFPEGQENLSLSVVVERSRPKNAWIPWFQYPIIYDIRARPRKISSPTGSKDLQMVNISLRVLSRPNAQELPSMYQRLGLDYEERVLPSIVNEVLKSVVAKFNASQLITQRAQVSLLIRRELTERAKDFSLILDDVAITELSFSREYTAAVEAKQVATQEAEAGESLEPRRRKLQ

SEQ ID NO: 2446 - protein, 232 aa, Artificial Sequence
  Synthetic polypeptide
MAQNLKDLAGRLPAGPRGMGTALKLLLGAGAVAYGVRESVFTVEGGHRAIFFNRIGGVQQDTILAEGLHFRVVPGCTPLHRAYREEHEGENAWERVFGLDQPLLTSISDLQMVNISLRVLSRPNAQELPSMYQRLGLDYEERVLPSIVNEVLKSVVAKFNASQLITQRAQVSLLIRRELTERAKDFSLILDDVAITELSFSREYTAAVEAKQVATQEAEAGESLEPRRRKLQ

SEQ ID NO: 2447 - protein, 165 aa, Artificial Sequence
  Synthetic polypeptide
MAKLRVAYEYTEAEDKSIRLGLFLIISGVVSLFIFGFCWLSPALQDLQATEANCTVLSVQQIGEVFECTFTCGADCRGTSQYPCVQVYVNNSESNSRALLHSDEHQLLTNPKCSYIPPCKRENQKNLESVMNWQQYWKDEIGSQPFTCYFNQHQRLIGRRDLPCL

SEQ ID NO: 2448 - protein, 18 aa, Artificial Sequence
  Synthetic polypeptide
APISLPVREKIRRIWKVS

SEQ ID NO: 2449 - protein, 78 aa, Artificial Sequence
  Synthetic polypeptide
MASSAEGDEGTVVALAGVLQSGFQELSLNKLATSLGASEQALRLIISIFLVHSPKAARVIRSCASPAQNPSGASIPGW

SEQ ID NO: 2450 - protein, 64 aa, Artificial Sequence
  Synthetic polypeptide
MNPVPQMEMQKSPVFCVAHAGSCRPELFLFGHLGSSPRVLESEKSRIGVLAYSVPVSGMSLSAA

SEQ ID NO: 2451 - protein, 75 aa, Artificial Sequence
  Synthetic polypeptide
TTLPRSRTTARSPIIRPRQQGHSPVQPQGPGKTDRMGRRFFSVCLPLRRLMQEDRLSPGVEVQPKQHSETPSPKI

SEQ ID NO: 2452 - protein, 245 aa, Artificial Sequence
  Synthetic polypeptide
MPGPRVWGKYLWRSPHSKGCPGAMWWLLLWGVLQACPTRGSVLLAQELPQQLTSPGYPEPYGKGQESSTDIKAPEGFAVRLVFQDFDLEPSQDCAGDSVTISFVGSDPSQFCGQQGSPLGRPPGQREFVSSGRSLRLTFRTQPSSENKTAHLHKGFLALYQTVAVNYSQPISEASRGSEAINAPGDNPAKVQNHCQEPYYQAAAAGALTCATPGTWKDRQDGEEVLQCMPATQEADARGSLEPRS

SEQ ID NO: 2453 - protein, 276 aa, Artificial Sequence
  Synthetic polypeptide
MPGPRVWGKYLWRSPHSKGCPGAMWWLLLWGVLQACPTRGSVLLAQELPQQLTSPGYPEPYGKGQESSTDIKAPEGFAVRLVFQDFDLEPSQDCAGDSVTISFVGSDPSQFCGQQGSPLGRPPGQREFVSSGRSLRLTFRTQPSSENKTAHLHKGFLALYQTVAVNYSQPISEASRGSEAINAPGDNPAKVQNHCQEPYYQAAAAASTPSLFLCLSSFTPQGHSPVQPQGPGKTDRMGRRFFSVCLPLRRLMQEDRLSPGVEVQPKQHSETPSPKI

SEQ ID NO: 2454 - protein, 203 aa, Artificial Sequence
  Synthetic polypeptide
MPGPRVWGKYLWRSPHSKGCPGAMWWLLLWGVLQACPTRGSVLLAQELPQQLTSPGYPEPYGKGQESSTDIKAPEGFAVRLVFQDFDLEPSQDCAGDSVTISFVGSDPSQFCGQQGSPLGRPPGQREFVSSGRSLRLTFRTQPSSENKTAHLHKGFLALYQTVGALTCATPGTWKDRQDGEEVLQCMPATQEADARGSLEPRS

SEQ ID NO: 2455 - protein, 75 aa, Artificial Sequence
  Synthetic polypeptide
TTLPRSRTTARSPIIRPRQQGHSPVQPQGPGKTDRMGRRFFSVCLEAEVAVSRDRASTLQSGQQERNSISKKKKK

SEQ ID NO: 2456 - protein, 260 aa, Artificial Sequence
  Synthetic polypeptide
MPGPRVWGKYLWRSPHSKGCPGAMWWLLLWGVLQACPTRGSVLLAQELPQQLTSPGYPEPYGKGQESSTDIKAPEGFAVRLVFQDFDLEPSQDCAGDSVTISFVGSDPSQFCGQQGSPLGRPPGQREFVSSGRSLRLTFRTQPSSENKTAHLHKGFLALYQTVAVNYSQPISEASRGSEAINAPGDNPAKVQNHCQEPYYQAAAAGALTCATPGTWKDRQDGEEVLQCMPGGGGCSEPRSRKYAPVWATRAKLDIKKKKK

SEQ ID NO: 2457 - protein, 276 aa, Artificial Sequence
  Synthetic polypeptide
MPGPRVWGKYLWRSPHSKGCPGAMWWLLLWGVLQACPTRGSVLLAQELPQQLTSPGYPEPYGKGQESSTDIKAPEGFAVRLVFQDFDLEPSQDCAGDSVTISFVGSDPSQFCGQQGSPLGRPPGQREFVSSGRSLRLTFRTQPSSENKTAHLHKGFLALYQTVAVNYSQPISEASRGSEAINAPGDNPAKVQNHCQEPYYQAAAAASTPSLFLCLSSFTPQGHSPVQPQGPGKTDRMGRRFFSVCLEAEVAVSRDRASTLQSGQQERNSISKKKKK

SEQ ID NO: 2458 - protein, 218 aa, Artificial Sequence
  Synthetic polypeptide
MPGPRVWGKYLWRSPHSKGCPGAMWWLLLWGVLQACPTRGSVLLAQELPQQLTSPGYPEPYGKGQESSTDIKAPEGFAVRLVFQDFDLEPSQDCAGDSVTISFVGSDPSQFCGQQGSPLGRPPGQREFVSSGRSLRLTFRTQPSSENKTAHLHKGFLALYQTVGALTCATPGTWKDRQDGEEVLQCMPGGGGCSEPRSRKYAPVWATRAKLDIKKKKK

SEQ ID NO: 2459 - protein, 137 aa, Artificial Sequence
  Synthetic polypeptide
MTLLLLPLLLASLLASCSCNKANKHKPWIEAEYQGIVMENDNTVLLNPPLFALDKDAPLRYAGEICGFRLHGSGVPFEAVILDKATGEGLIRAKEPVDCEAQKEHTFTIQAYDCGEGPDGANTKKSHKMEIVMTPTS

SEQ ID NO: 2460 - protein, 100 aa, Artificial Sequence
  Synthetic polypeptide
MENDNTVLLNPPLFALDKDAPLRYAGEICGFRLHGSGVPFEAVILDKATGEGLIRAKEPVDCEAQKEHTFTIQAYDCGEGPDGANTKKSHKMEIVMTPTS

SEQ ID NO: 2461 - protein, 120 aa, Artificial Sequence
  Synthetic polypeptide
MVVITNKHKPWIEAEYQGIVMENDNTVLLNPPLFALDKDAPLRYAGEICGFRLHGSGVPFEAVILDKATGEGLIRAKEPVDCEAQKEHTFTIQAYDCGEGPDGANTKKSHKMEIVMTPTS

SEQ ID NO: 2462 - protein, 149 aa, Artificial Sequence
  Synthetic polypeptide
MVLGCELSGSTRVVVGVEALLTGASSPLPGVGPANKHKPWIEAEYQGIVMENDNTVLLNPPLFALDKDAPLRYAGEICGFRLHGSGVPFEAVILDKATGEGLIRAKEPVDCEAQKEHTFTIQAYDCGEGPDGANTKKSHKMEIVMTPTS

SEQ ID NO: 2463 - protein, 41 aa, Artificial Sequence
  Synthetic polypeptide
MSDKLKKDLCYHNSDSPEYQDSSFSLIVAFTCLHTGNSSWL

SEQ ID NO: 2464 - protein, 42 aa, Artificial Sequence
  Synthetic polypeptide
MSDKLKKDLCYHNSDSPEYQDSSFSLIVAFTTNQHTLFILSP

SEQ ID NO: 2465 - protein, 57 aa, Artificial Sequence
  Synthetic polypeptide
MSDKLKKDLCYHNSDSPEYQDSSFSLIVAFTENQNHGILKTTDDLTKPTDVPHLESH

SEQ ID NO: 2466 - protein, 49 aa, Artificial Sequence
  Synthetic polypeptide
MSDKLKKDLCYHNSDSPEYQDSSFSLIVAFTMTQPAGPHQMQAPQPWTF

SEQ ID NO: 2467 - protein, 21 aa, Artificial Sequence
  Synthetic polypeptide
MSDKLKKDLCYCLHTGNSSWL

SEQ ID NO: 2468 - protein, 22 aa, Artificial Sequence
  Synthetic polypeptide
MSDKLKKDLCYTNQHTLFILSP

SEQ ID NO: 2469 - protein, 29 aa, Artificial Sequence
  Synthetic polypeptide
MSDKLKKDLCYMTQPAGPHQMQAPQPWTF

SEQ ID NO: 2470 - protein, 13 aa, Artificial Sequence
  Synthetic polypeptide
MSDKLKKDLCYDW

SEQ ID NO: 2471 - protein, 153 aa, Artificial Sequence
  Synthetic polypeptide
MPVLGVASKLRQPAVGSKPVHTALPIPNLGTTGSQHCSSRPLELTETESSMLSCQLALKSTCEFGEKKPLQGKAKEKEDSKIYTDWANHYLAKSGHKRLIKDLQQDIADGVLLAEIIQIIANEKVEDINGCPRSQSQMQLPLKGLWPEQGRNT

SEQ ID NO: 2472 - protein, 141 aa, Artificial Sequence
  Synthetic polypeptide
MPVLGVASKLRQPAVGSKPVHTALPIPNLGTTGSQHCSSRPLELTETESSMLSCQLALKSTCEFGEKKPLQGKAKEKEDSKIYTDWANHYLAKSGHKRLIKDLQQDIADGVLLAEIIQIIANEKVEDINGCPRSQSQMNWK

SEQ ID NO: 2473 - protein, 681 aa, Artificial Sequence
  Synthetic polypeptide
MPVLGVASKLRQPAVGSKPVHTALPIPNLGTTGSQHCSSRPLELTETESSMLSCQLALKSTCEFGEKKPLQGKAKEKEDSKIYTDWANHYLAKSGHKRLIKDLQQDIADGVLLAEIIQIIANEKVEDINGCPRSQSQMIENVDVCLSFLAARGVNVQGLSAEEIRNGNLKAILGLFFSLSRYKQQQHHQQQYYQSLVELQQRVTHASPPSEASQAKTQQDMQSSLAARYATQSNHSGIATSQKKPTRLPGPSRVPAAGSSSKVQGASNLNRRSQSFNSIDKNKPPNYANGNEKDSSKGPQSSSGVNGNVQPPSTAGQPPASAIPSPSASKPWRSKSMNVKHSATSTMLTVKQSSTATSPTPSSDRLKPPVSEGVKTAPSGQKSMLEKFKLVNARTALRPPQPPSSGPSDGGKDDDAFSESGEMEGFNSGLNSGGSTNSSPKVSPKLAPPKAGSKNLSNKKSLLQPKEKEEKNRDKNKVCTEKPVKEEKDQVTEMAPKKTSKIASLIPKGSKTTAAKKESLIPSSSGIPKPGSKVPTVKQTISPGSTASKESEKFRTTKGSPSQSLSKPITMEKASASSCPAPLEGREAGQASPSGSCTMTVAQSSGQSTGNGAVQLPQQQQHSHPNTATVAPFIYRAHSENEGTALPSADSCTSPTKMDLSYSKTAKQCLEEISAPLCLSL

SEQ ID NO: 2474 - protein, 725 aa, Artificial Sequence
  Synthetic polypeptide
MPVLGVASKLRQPAVGSKPVHTALPIPNLGTTGSQHCSSRPLELTETESSMLSCQLALKSTCEFGEKKPLQGKAKEKEDSKIYTDWANHYLAKSGHKRLIKDLQQDIADGVLLAEIIQIIANEKVEDINGCPRSQSQMIENVDVCLSFLAARGVNVQGLSAEEIRNGNLKAILGLFFSLSRYKQQQHHQQQYYQSLVELQQRVTHASPPSEASQAKTQQDMQSSLAARYATQSNHSGIATSQKKPTRLPGPSRVPAAGSSSKVQGASNLNRRSQSFNSIDKNKPPNYANGNEKDSSKGPQSSSGVNGNVQPPSTAGQPPASAIPSPSASKPWRSKSMNVKHSATSTMLTVKQSSTATSPTPSSDRLKPPVSEGVKTAPSGQKSMLEKFKLVNARTALRPPQPPSSGPSDGGKDDDAFSESGEMEGFNSGLNSGGSTNSSPKVSPKLAPPKAGSKNLSNKKSLLQPKEKEEKNRDKNKVCTEKPVKEEKDQVTEMAPKKTSKIASLIPKGSKTTAAKKESLIPSSSGIPKPGSKVPTVKQTISPGSTASKESEKFRTTKGSPSQSLSKPITMEKASASSCPAPLEGREAGQASPSGSCTMTVAQSSGQSTGNGAVQLPQQQQHSHPNTATVAPFIYRAHSENEGTALPSADSCTSPTKMDLSYSKTAKQCLEEISAQKVKLLERLDCGVSGKHLPEENGVGMTTIYDLKQPKDKLLKVSIESDEQN

SEQ ID NO: 2475 - protein, 192 aa, Artificial Sequence
  Synthetic polypeptide
MATGGYRTSSGLGGSTTDFLEEWKAKREKMRAKQNPPGPAPPGGGSSDAAGKPPAGALGTPAAAAANELNNNLPGGAPAAPAVPGPGGVNCAVGSAMLTRAAPGPRRSEDEPPAASASAAPPPQRDEEEPDGVPEKGKSSGPSARKGKGQIEKRKLREKRRSTGVVNIPAAEEGERETKDAHTQKKGQMKIQ

SEQ ID NO: 2476 - protein, 70 aa, Artificial Sequence
  Synthetic polypeptide
GGSGHPGGRRCQRAQQQPPGRRAGRTCRPRSRGRELRGRLRHADAGGPRPAAVGGRAPSRLCLGCTAAPA

SEQ ID NO: 2477 - protein, 179 aa, Artificial Sequence
  Synthetic polypeptide
MATGGYRTSSGLGGSTTDFLEEWKAKREKMRAKQNPPGPAPPGGGSSDAAGKPPAGALGTPAAAAANELNNNLPGGAPAAPAVPGPGGVNCAVGSAMLTRAAPGPRRSEDEPPAASASAAPPPQRDEEEPDGVPEKGKSSGPSARKGKGQIEKRKLREKRRSTGVVNIPAAEGSPAPGP

SEQ ID NO: 2478 - protein, 70 aa, Artificial Sequence; identical to SEQ ID NO: 2476
  Synthetic polypeptide

SEQ ID NO: 2479 - protein, 954 aa, Artificial Sequence
  Synthetic polypeptide
MPPNINWKEIMKVDPDDLPRQEELADNLLISLSKVEVNELKSEKQENVIHLFRITQSLMKMKAQEVELALEEVEKAGEEQAKFENQLKTKVMKLENELEMAQQSAGGRDTRFLRNEICQLEKQLEQKDRELEDMEKELEKEKKVNEQLALRNEEAENENSKLRRENKRLKKKNEQLCQDIIDYQKQIDSQKETLLSRRGEDSDYRSQLSKKNYELIQYLDEIQTLTEANEKIEVQNQEMRKNLEESVQEMEKMTDEYNRMKAIVHQTDNVIDQLKKENDHYQLQVQELTDLLKSKNEEDDPIMVAVNAKVEEWKLILSSKDDEIIEYQQMLHNLREKLKNAQLDADKSNVMALQQGIQERDSQIKMLTEQVEQYTKEMEKNTCIIEDLKNELQRNKGASTLSQQTHMKIQSTLDILKEKTKEAERTAELAEADAREKDKELVEALKRLKDYESGVYGLEDAVVEIKNCKNQIKIRDREIEILTKEINKLELKISDFLDENEALRERVGLEPKTMIDLTEFRNSKHLKQQQYRAENQILLKEIESLEEERLDLKKKIRQMAQERGKRSATSGLTTEDLNLTENISQGDRISERKLDLLSLKNMSEAQSKNEFLSRELIEKERDLERSRTVIAKFQNKLKELVEENKQLEEGMKEILQAIKEMQKDPDVKGGETSLIIPSLERLVNAIESKNAEGIFDASLHLKAQVDQLTGRNEELRQELRESRKEAINYSQQLAKANLKIDHLEKETSLLRQSEGSNVVFKGIDLPDGIAPSSASIINSQNEYLIHLLQELENKEKKLKNLEDSLEDYNRKFAVIRHQQSLLYKEYLSEKETWKTESKTIKEEKRKLEDQVQQDAIKVKEYNNLLNALQMDSDEMKKILAENSRKITVLQVNEKSLIRQYTTLVELERQLRKENEKQKNELLSMEAEVCEKIGCLQRFKLGVVAHACNPSYLGH

SEQ ID NO: 2480 - protein, 956 aa, Artificial Sequence
  Synthetic polypeptide
MPPNINWKEIMKVDPDDLPRQEELADNLLISLSKVEVNELKSEKQENVIHLFRITQSLMKMKAQEVELALEEVEKAGEEQAKFENQLKTKVMKLENELEMAQQSAGGRDTRFLRNEICQLEKQLEQKDRELEDMEKELEKEKKVNEQLALRNEEAENENSKLRRENKRLKKKNEQLCQDIIDYQKQIDSQKETLLSRRGEDSDYRSQLSKKNYELIQYLDEIQTLTEANEKIEVQNQEMRKNLEESVQEMEKMTDEYNRMKAIVHQTDNVIDQLKKENDHYQLQVQELTDLLKSKNEEDDPIMVAVNAKVEEWKLILSSKDDEIIEYQQMLHNLREKLKNAQLDADKSNVMALQQGIQERDSQIKMLTEQVEQYTKEMEKNTCIIEDLKNELQRNKGASTLSQQTHMKIQSTLDILKEKTKEAERTAELAEADAREKDKELVEALKRLKDYESGVYGLEDAVVEIKNCKNQIKIRDREIEILTKEINKLELKISDFLDENEALRERVGLEPKTMIDLTEFRNSKHLKQQQYRAENQILLKEASIESLEEERLDLKKKIRQMAQERGKRSATSGLTTEDLNLTENISQGDRISERKLDLLSLKNMSEAQSKNEFLSRELIEKERDLERSRTVIAKFQNKLKELVEENKQLEEGMKEILQAIKEMQKDPDVKGGETSLIIPSLERLVNAIESKNAEGIFDASLHLKAQVDQLTGRNEELRQELRESRKEAINYSQQLAKANLKIDHLEKETSLLRQSEGSNVVFKGIDLPDGIAPSSASIINSQNEYLIHLLQELENKEKKLKNLEDSLEDYNRKFAVIRHQQSLLYKEYLSEKETWKTESKTIKEEKRKLEDQVQQDAIKVKEYNNLLNALQMDSDEMKKILAENSRKITVLQVNEKSLIRQYTTLVELERQLRKENEKQKNELLSMEAEVCEKIGCLQRFKLGVVAHACNPSYLGH

SEQ ID NO: 2481 - protein, 707 aa, Artificial Sequence
  Synthetic polypeptide
DHYQLQVQELTDLLKSKNEEDDPIMVAVNAKVEEWKLILSSKDDEIIEYQQMLHNLREKLKNAQLDADKSNVMALQQGIQERDSQIKMLTEQVEQYTKEMEKNTCIIEDLKNELQRNKGASTLSQQTHMKIQSTLDILKEKTKEAERTAELAEADAREKDKELVEALKRLKDYESGVYGLEDAVVEIKNCKNQIKIRDREIEILTKEINKLELKISDFLDENEALRERVGLEPKTMIDLTEFRNSKHLKQQQYRAENQILLKEIESLEEERLDLKKKIRQMAQERGKRSATSGLTTEDLNLTENISQGDRISERKLDLLSLKNMSEAQSKNEIIAQEFLIKEAECRNADIELEHHRSQAEQNEFLSRELIEKERDLERSRTVIAKFQNKLKELVEENKQLEEGMKEILQAIKEMQKDPDVKGGETSLIIPSLERLVNAIESKNAEGIFDASLHLKAQVDQLTGRNEELRQELRESRKEAINYSQQLAKANLKIDHLEKETSLLRQSEGSNVVFKGIDLPDGIAPSSASIINSQNEYLIHLLQELENKEKKLKNLEDSLEDYNRKFAVIRHQQSLLYKEYLSEKETWKTESKTIKEEKRKLEDQVQQDAIKVKEYNNLLNALQMDSDEMKKILAENSRKITVLQVNEKSLIRQYTTLVELERQLRKENEKQKNELLSMEAEVCEKIGCLQRFKLGVVAHACNPSYLGH

SEQ ID NO: 2482 - protein, 75 aa, Artificial Sequence
  Synthetic polypeptide
MKKTQTWILTCIYLQLLLFNPLVKTEGICRNRVTNNVKDVTKLVANLPKDYMITLKYVPGMDVLILSASWMLICI

SEQ ID NO: 2483 - protein, 24 aa, Artificial Sequence
  Synthetic polypeptide
MITLKYVPGMDVLILSASWMLICI

SEQ ID NO: 2484 - protein, 219 aa, Artificial Sequence
  Synthetic polypeptide
MYRQRFLYSLYRHTHWVRCAKFSPDGRLIVSCSEDKTIKIWDTTNKQCVNNFSDSVGFANFVDFNPSGTCIASAGSDQTVKVWDVRVNKLLQHYQVHSGGVNCISFHPSGNYLITASSDGTLKILDLLEGRLIYTLQGHTGPVFTVSFSKGGELFASGGADTQVLLWRTNFDELHCKGLTKRNLKRLHFDSPPHLLDIYPRTPHPHEEKVETVELISYH

SEQ ID NO: 2485 - protein, 349 aa, Artificial Sequence
  Synthetic polypeptide
MASATEDPVLERYFKGHKAAITSLDLSPNGKQLATASWDTFLMLWNFKPHARAYRYVGHKDVVTSVQFSPHGNLLASASRDRTVRLWIPDKRGKFSEFKAHTAPVRSVDFSADGQFLATASEDKSIKVWSMYRQRFLYSLYRHTHWVRCAKFSPDGRLIVSCSEDKTIKIWDTTNKQCVNNFSDSVGFANFVDFNPSGTCIASAGSDQTVKVWDVRVNKLLQHYQVHSGGVNCISFHPSGNYLITASSDGTLKILDLLEGRLIYTLQGHTGPVFTVSFSKGGELFASGGADTQVLLWRTNFDELHCKGLTKRNLKRLHFDSPPHLLDIYPRTPHPHEEKVETVELISYH

SEQ ID NO: 2486 - protein, 307 aa, Artificial Sequence
  Synthetic polypeptide
MLWNFKPHARAYRYVGHKDVVTSVQFSPHGNLLASASRDRTVRLWIPDKRGKFSEFKAHTAPVRSVDFSADGQFLATASEDKSIKVWSMYRQRFLYSLYRHTHWVRCAKFSPDGRLIVSCSEDKTIKIWDTTNKQCVNNFSDSVGFANFVDFNPSGTCIASAGSDQTVKVWDVRVNKLLQHYQVHSGGVNCISFHPSGNYLITASSDGTLKILDLLEGRLIYTLQGHTGPVFTVSFSKGGELFASGGADTQVLLWRTNFDELHCKGLTKRNLKRLHFDSPPHLLDIYPRTPHPHEEKVETVELISYH

SEQ ID NO: 2487 - protein, 232 aa, Artificial Sequence
  Synthetic polypeptide
MYRQRFLYSLYRHTHWVRCAKFSPDGRLIVSCSEDKTIKIWDTTNKQCVNNFSDSVGFANFVDFNPSGTCIASAGSDQTVKVWDVRVNKLLQHYQVHSGGVNCISFHPSGNYLITASSDGTLKILDLLEGRLIYTLQGHTGPVFTVSFSKGGELFASGGADTQVLLWRTNFDELHCKGLTKRNLKRLHFDSPPHLLDIYPRTPHPHEEKVETVEVRWLMFVIPALWKAEVGG

SEQ ID NO: 2488 - protein, 362 aa, Artificial Sequence
  Synthetic polypeptide
MASATEDPVLERYFKGHKAAITSLDLSPNGKQLATASWDTFLMLWNFKPHARAYRYVGHKDVVTSVQFSPHGNLLASASRDRTVRLWIPDKRGKFSEFKAHTAPVRSVDFSADGQFLATASEDKSIKVWSMYRQRFLYSLYRHTHWVRCAKFSPDGRLIVSCSEDKTIKIWDTTNKQCVNNFSDSVGFANFVDFNPSGTCIASAGSDQTVKVWDVRVNKLLQHYQVHSGGVNCISFHPSGNYLITASSDGTLKILDLLEGRLIYTLQGHTGPVFTVSFSKGGELFASGGADTQVLLWRTNFDELHCKGLTKRNLKRLHFDSPPHLLDIYPRTPHPHEEKVETVEVRWLMFVIPALWKAEVGG

SEQ ID NO: 2489 - protein, 320 aa, Artificial Sequence
  Synthetic polypeptide
MLWNFKPHARAYRYVGHKDVVTSVQFSPHGNLLASASRDRTVRLWIPDKRGKFSEFKAHTAPVRSVDFSADGQFLATASEDKSIKVWSMYRQRFLYSLYRHTHWVRCAKFSPDGRLIVSCSEDKTIKIWDTTNKQCVNNFSDSVGFANFVDFNPSGTCIASAGSDQTVKVWDVRVNKLLQHYQVHSGGVNCISFHPSGNYLITASSDGTLKILDLLEGRLIYTLQGHTGPVFTVSFSKGGELFASGGADTQVLLWRTNFDELHCKGLTKRNLKRLHFDSPPHLLDIYPRTPHPHEEKVETVEVRWLMFVIPALWKAEVGG

SEQ ID NO: 2490 - protein, 29 aa, Artificial Sequence
  Synthetic polypeptide
MGKNKLLHPSLVLLLLVLLPTDASVSGKP

SEQ ID NO: 2491 - protein, 161 aa, Artificial Sequence
  Synthetic polypeptide
MMKFKPNQTRTYDREGFKKRAACLCFRSEQEDEVLLVSSSRYPDQWIVPGGGMEPEEEPGGAAVREVYEEAGVKGKLGRLLGIFEQNQDRKHRTYVYVLTVTEILEDWEDSVNIGRKREWFKVEDAIKEGRKRERGKKERKKERKKERKKERKRKKERKER

SEQ ID NO: 2492 - protein, 160 aa, Artificial Sequence
  Synthetic polypeptide
MMKFKPNQTRTYDREGFKKRAACLCFRSEQEDEVLLVSSSRYPDQWIVPGGGMEPEEEPGGAAVREVYEEAGVKGKLGRLLGIFENQDRKHRTYVYVLTVTEILEDWEDSVNIGRKREWFKVEDAIKEGRKRERGKKERKKERKKERKKERKRKKERKER

SEQ ID NO: 2493 - protein, 108 aa, Artificial Sequence
  Synthetic polypeptide
MEPEEEPGGAAVREVYEEAGVKGKLGRLLGIFENQDRKHRTYVYVLTVTEILEDWEDSVNIGRKREWFKVEDAIKEGRKRERGKKERKKERKKERKKERKRKKERKER

SEQ ID NO: 2494 - protein, 109 aa, Artificial Sequence
  Synthetic polypeptide
MEPEEEPGGAAVREVYEEAGVKGKLGRLLGIFEQNQDRKHRTYVYVLTVTEILEDWEDSVNIGRKREWFKVEDAIKEGRKRERGKKERKKERKKERKKERKRKKERKER

SEQ ID NO: 2495 - protein, 76 aa, Artificial Sequence
  Synthetic polypeptide
MAVAAVKWVMSKRTILKHLFPVQNGALYCVCHKSTYSPLPDDYNCNVELALTSDGRTIVCYHPSVDIPYEHTKHLE

SEQ ID NO: 2496 - protein, 76 aa, Artificial Sequence
  Synthetic polypeptide
MGDVKENYLETFISSPKFGRTCADGALYCVCHKSTYSPLPDDYNCNVELALTSDGRTIVCYHPSVDIPYEHTKHLE

SEQ ID NO: 2497 - protein, 103 aa, Artificial Sequence
  Synthetic polypeptide
MEARDKQVLRSLRLELGAEVLVEGLVLQYLYQEGILTENHIQEINAQTTGLRKTMLLLDILPSRGPKAFDTFLDSLQEFPWVREKLKKAREEAMTDLPAGTRI

SEQ ID NO: 2498 - protein, 148 aa, Artificial Sequence
  Synthetic polypeptide
MVVSTFTDMDTFPNNFPPGGDSGLTGSQSEFQKMLIDERLRCEHHKANYQTLKAEHTRLQNEHVKLQNELKHLFNEKQTQQEKLQLLLEELRGELVEKTKDLEEMKLQILTPQKLELLRAQIQQELETPMRERFRNLDEIRRGKLHLL

SEQ ID NO: 2499 - protein, 115 aa, Artificial Sequence
  Synthetic polypeptide
MLIDERLRCEHHKANYQTLKAEHTRLQNEHVKLQNELKHLFNEKQTQQEKLQLLLEELRGELVEKTKDLEEMKLQILTPQKLELLRAQIQQELETPMRERFRNLDEIRRGKLHLL

SEQ ID NO: 2500 - protein, 407 aa, Artificial Sequence
  Synthetic polypeptide
MPGSDTALTVDRTYSYPGRHHRCKSRVERHDMNTLSLPLNIRRGGSDTNLNFDVPDGILDFHKVKLTADSLKQKILKVTEQIKIEQTSRDGNVAEYLKLVNNADKQQAGRIKQVFEKKNQKSAHSIAQLQKKLEQYHRKLREIEQNGASRSSKDISKDHLKDIHRSLKDAHVKSRTAPHCMESSKSGMPGVSLTPPVFVFNKSREFANLIRNKFGSADNIAHLKNSLEEFRPEASARAYGGSATIVNKPKYGSDDECSSGTSGSADSNGNQSFGAGGASTLDSQGKLAVILEELREIKDTQAQLAEDIEALKVQFKREYGFISQTLQEERYRYERLEDQLHDLTDLHQHETANLKQELASIEEKVAYQAYERSRDIQAECRGLRGPRDPKGGHSHRMEASGPLDHHV

SEQ ID NO: 2501 - protein, 376 aa, Artificial Sequence
  Synthetic polypeptide
MNTLSLPLNIRRGGSDTNLNFDVPDGILDFHKVKLTADSLKQKILKVTEQIKIEQTSRDGNVAEYLKLVNNADKQQAGRIKQVFEKKNQKSAHSIAQLQKKLEQYHRKLREIEQNGASRSSKDISKDHLKDIHRSLKDAHVKSRTAPHCMESSKSGMPGVSLTPPVFVFNKSREFANLIRNKFGSADNIAHLKNSLEEFRPEASARAYGGSATIVNKPKYGSDDECSSGTSGSADSNGNQSFGAGGASTLDSQGKLAVILEELREIKDTQAQLAEDIEALKVQFKREYGFISQTLQEERYRYERLEDQLHDLTDLHQHETANLKQELASIEEKVAYQAYERSRDIQAECRGLRGPRDPKGGHSHRMEASGPLDHHV

SEQ ID NO: 2502 - protein, 161 aa, Artificial Sequence
  Synthetic polypeptide
MELVQVLKRGLQQITGHGGLRGYLRVFFRTNDAKVGTLVGEDKYGNKYYEDNKQFFGRHRWVVYTTEMNGKNTFWDVDGSMVPPEWCPALSCSMEWPMWQELKIIFNASQQKTEVLSPTSHKEMNSANNRVNETAVLVRNAIAAFRRDSGIEDPTNGCLDS

SEQ ID NO: 2503 - protein, 346 aa, Artificial Sequence
  Synthetic polypeptide
MESAITLWQFLLQLLLDQKHEHLICWTSNDGEFKLLKAEEVAKLWGLRKNKTNMNYDKLSRALRYYYDKNIIKKVIGQKFVYKFVSFPEILKMDPHAVEISRESLLLQDSDCKASPEGREAHKHGLAALRSTSRNEYIHSGLYSSFTINSLQNPPDAFKAIKTEKLEEPPEDSPPVEEVRTVIRFVTNKTDKHVTRPVVSLPSTSEAAAASAFLASSVSAKISSLMLPNAASISSASPFSSRSPSLSPNSPLPSEHRSLFLEAACHDSDSLEPLNLSSGSKTKSPSLPPKAKKPKGLEISAPPLVLSGTDIGSIALNSPALPSGSLTPAFFTAQANPEQGPNSSIL

SEQ ID NO: 2504 - protein, 15 aa, Artificial Sequence
  Synthetic polypeptide
PQRIHPLRPVLVLHH

SEQ ID NO: 2505 - protein, 36 aa, Artificial Sequence
  Synthetic polypeptide
MHDSNNVEKDITPSELPANPVLIIPTCHGRDPVGDN

SEQ ID NO: 2506 - protein, 30 aa, Artificial Sequence
  Synthetic polypeptide
VEKDITPSELPANPVLIIPTCHGRDPVGDN

SEQ ID NO: 2507 - protein, 26 aa, Artificial Sequence
  Synthetic polypeptide
FTYQKFLCRNMIVPSVGHHLWSSLSF

SEQ ID NO: 2508 - protein, 121 aa, Artificial Sequence
  Synthetic polypeptide
MVSNFFHVIQVFEKSATLISKTEHIGFVIYSWRKSTTHLGSRRKFAISIYLSEVSLQKYDCPFSGTSFVVFSLFLICAMAGDVVYADIKTVRTSPLELAFPLQRSGPITRVAEQQSSGIAE

SEQ ID NO: 2509 - protein, 271 aa, Artificial Sequence
  Synthetic polypeptide
MPEFLEDPSVLTKDKLKSELVANNVTLPAGEQRKDVYVQLYLQHLTARNRPPLPAGTNSKGPPDFSSDEEREPTPVLGSGAAAAGRSRAAVGRKATKKTDKPRQEDKDDLDVTELTNEDLLDQLVKYGVNPGPIVGTTRKLYEKKLLKLREQGTESRSSTPLPTISSSAENTRQNGSNDSDRYSDNEEDSKIELKLEKREPLKGRAKTPVTLKQRRVEHNQVQWLTPVIPALWEAQVGGSPEVRRPAWPTWQNPVSTENTKKSAKCAGACL

SEQ ID NO: 2510 - protein, 178 aa, Artificial Sequence
  Synthetic polypeptide
KATKKTDKPRQEDKDDLDVTELTNEDLLDQLVKYGVNPGPIVGTTRKLYEKKLLKLREQGTESRSSTPLPTISSSAENTRQNGSNDSDRYSDNEEDSKIELKLEKREPLKGRAKTPVTLKQRRVEHNQVQWLTPVIPALWEAQVGGSPEVRRPAWPTWQNPVSTENTKKSAKCAGACL

SEQ ID NO: 2511 - protein, 192 aa, Artificial Sequence
  Synthetic polypeptide
MDAKARNCLLQHREALEKDIKTSYIMDHMISDGFLTISEEEKVRNEPTQQQRAAMLIKMILKKDNDSYVSFYNALLHEGYKDLAALLHDGIPVVSSSSGKDSVSGITSYVRTVLCEGGVPQRPVVFVTRKKLVNAIQQKLSKLKGEPGWVTIHGMAGCGKSVLAAEAVRDHSLLEGQARWLMLVIPAEAWIT

SEQ ID NO: 2512 - protein, 181 aa, Artificial Sequence
  Synthetic polypeptide
MDAKARNCLLQHREALEKDIKTSYIMDHMISDGFLTISEEEKVRNEPTQQQRAAMLIKMILKKDNDSYVSFYNALLHEGYKDLAALLHDGIPVVSSSSVRTVLCEGGVPQRPVVFVTRKKLVNAIQQKLSKLKGEPGWVTIHGMAGCGKSVLAAEAVRDHSLLEGQARWLMLVIPAEAWIT

SEQ ID NO: 2513 - protein, 1111 aa, Artificial Sequence
  Synthetic polypeptide
MDAKARNCLLQHREALEKDIKTSYIMDHMISDGFLTISEEEKVRNEPTQQQRAAMLIKMILKKDNDSYVSFYNALLHEGYKDLAALLHDGIPVVSSSSGKDSVSGITSYVRTVLCEGGVPQRPVVFVTRKKLVNAIQQKLSKLKGEPGWVTIHGMAGCGKSVLAAEAVRDHSLLEGCFPGGVHWVSVGKQDKSGLLMKLQNLCTRLDQDESFSQRLPLNIEEAKDRLRILMLRKHPRSLLILDDVWDSWVLKAFDSQCQILLTTRDKSVTDSVMGPKYVVPVESSLGKEKGLEILSLFVNMKKADLPEQAHSIIKECKGSPLVVSLIGALLRDFPNRWEYYLKQLQNKQFKRIRKSSSYDYEALDEAMSISVEMLREDIKDYYTDLSILQKDVKVPTKVLCILWDMETEEVEDILQEFVNKSLLFCDRNGKSFRYYLHDLQVDFLTEKNCSQLQDLHKKIITQFQRYHQPHTLSPDQEDCMYWYNFLAYHMASAKMHKELCALMFSLDWIKAKTELVGPAHLIHEFVEYRHILDEKDCAVSENFQEFLSLNGHLLGRQPFPNIVQLGLCEPETSEVYQQAKLQAKQEVDNGMLYLEWINKKNITNLSRLVVRPHTDAVYHACFSEDGQRIASCGADKTLQVFKAETGEKLLEIKAHEDEVLCCAFSTDDRFIATCSVDKKVKIWNSMTGELVHTYDEHSEQVNCCHFTNSSHHLLLATGSSDCFLKLWDLNQKECRNTMFGHTNSVNHCRFSPDDKLLASCSADGTLKLWDATSANERKSINVKQFFLNLEDPQEDMEVIVKCCSWSADGARIMVAAKNKIFLFDIHTSGLLGEIHTGHHSTIQYCDFSPQNHLAVVALSQYCVELWNTDSRSKVADCRGHLSWVHGVMFSPDGSSFLTSSDDQTIRLWETKKVCKNSAVMLKQEVDVVFQENEVMVLAVDHIRRLQLINGRTGQIDYLTEAQVSCCCLSPHLQYIAFGDENGAIEILELVNNRIFQSRFQHKKTVWHIQFTADEKTLISSSDDAEIQVWNWQLDKCIFLRGHQETVKDFRLLKNSRLLSWSFDGTVKVWNIITGNKEKDFVCHQGTVLSCDISHDATKFSSTSADKTAKT

SEQ ID NO: 2514 - protein, 1068 aa, Artificial Sequence
  Synthetic polypeptide
MDAKARNCLLQHREALEKDIKTSYIMDHMISDGFLTISEEEKVRNEPTQQQRAAMLIKMILKKDNDSYVSFYNALLHEGYKDLAALLHDGIPVVSSSSGKDSVSGITSYVRTVLCEGGVPQRPVVFVTRKKLVNAIQQKLSKLKGEPGWVTIHGMAGCGKSVLAAEAVRDHSLLEGCFPGGVHWVSVGKQDKSGLLMKLQNLCTRLDQDESFSQRLPLNIEEAKDRLRILMLRKHPRSLLILDDVWDSWVLKAFDSQCQILLTTRDKSVTDSVMGPKYVVPVESSLGKEKGLEILSLFVNMKKADLPEQAHSIIKECKGSPLVVSLIGALLRDFPNRWEYYLKQLQNKQFKRIRKSSSYDYEALDEAMSISVEMLREDIKDYYTDLSILQKDVKVPTKVLCILWDMETEEVEDILQEFVNKSLLFCDRNGKSFRYYLHDLQVDFLTEKNCSQLQDLHKKIITQFQRYHQPHTLSPDQEDCMYWYNFLAYHMASAKMHKELCALMFSLDWIKAKTELVGPAHLIHEFVEYRHILDEKDCAVSENFQEFLSLNGHLLGRQPFPNIVQLGLCEPETSEVYQQAKLQAKQEVDNGMLYLEWINKKNITNLSRLVVRPHTDAVYHACFSEDGQRIASCGADKTLQVFKAETGEKLLEIKAHEDEVLCCAFSTDDRFIATCSVDKKVKIWNSMTGELVHTYDEHSEQVNCCHFTNSSHHLLLATGSSDCFLKLWDLNQKECRNTMFGHTNSVNHCRFSPDDKLLASCSADGTLKLWDATSANERKSINVKQFFLNLEDPQEDMEVIVKCCSWSADGARIMVAAKNKIFLWNTDSRSKVADCRGHLSWVHGVMFSPDGSSFLTSSDDQTIRLWETKKVCKNSAVMLKQEVDVVFQENEVMVLAVDHIRRLQLINGRTGQIDYLTEAQVSCCCLSPHLQYIAFGDENGAIEILELVNNRIFQSRFQHKKTVWHIQFTADEKTLISSSDDAEIQVWNWQLDKCIFLRGHQETVKDFRLLKNSRLLSWSFDGTVKVWNIITGNKEKDFVCHQGTVLSCDISHDATKFSSTSADKTAKT

SEQ ID NO: 2515 - protein, 1057 aa, Artificial Sequence
  Synthetic polypeptide
MDAKARNCLLQHREALEKDIKTSYIMDHMISDGFLTISEEEKVRNEPTQQQRAAMLIKMILKKDNDSYVSFYNALLHEGYKDLAALLHDGIPVVSSSSVRTVLCEGGVPQRPVVFVTRKKLVNAIQQKLSKLKGEPGWVTIHGMAGCGKSVLAAEAVRDHSLLEGCFPGGVHWVSVGKQDKSGLLMKLQNLCTRLDQDESFSQRLPLNIEEAKDRLRILMLRKHPRSLLILDDVWDSWVLKAFDSQCQILLTTRDKSVTDSVMGPKYVVPVESSLGKEKGLEILSLFVNMKKADLPEQAHSIIKECKGSPLVVSLIGALLRDFPNRWEYYLKQLQNKQFKRIRKSSSYDYEALDEAMSISVEMLREDIKDYYTDLSILQKDVKVPTKVLCILWDMETEEVEDILQEFVNKSLLFCDRNGKSFRYYLHDLQVDFLTEKNCSQLQDLHKKIITQFQRYHQPHTLSPDQEDCMYWYNFLAYHMASAKMHKELCALMFSLDWIKAKTELVGPAHLIHEFVEYRHILDEKDCAVSENFQEFLSLNGHLLGRQPFPNIVQLGLCEPETSEVYQQAKLQAKQEVDNGMLYLEWINKKNITNLSRLVVRPHTDAVYHACFSEDGQRIASCGADKTLQVFKAETGEKLLEIKAHEDEVLCCAFSTDDRFIATCSVDKKVKIWNSMTGELVHTYDEHSEQVNCCHFTNSSHHLLLATGSSDCFLKLWDLNQKECRNTMFGHTNSVNHCRFSPDDKLLASCSADGTLKLWDATSANERKSINVKQFFLNLEDPQEDMEVIVKCCSWSADGARIMVAAKNKIFLWNTDSRSKVADCRGHLSWVHGVMFSPDGSSFLTSSDDQTIRLWETKKVCKNSAVMLKQEVDVVFQENEVMVLAVDHIRRLQLINGRTGQIDYLTEAQVSCCCLSPHLQYIAFGDENGAIEILELVNNRIFQSRFQHKKTVWHIQFTADEKTLISSSDDAEIQVWNWQLDKCIFLRGHQETVKDFRLLKNSRLLSWSFDGTVKVWNIITGNKEKDFVCHQGTVLSCDISHDATKFSSTSADKTAKT

SEQ ID NO: 2516 - protein, 1100 aa, Artificial Sequence
  Synthetic polypeptide
MDAKARNCLLQHREALEKDIKTSYIMDHMISDGFLTISEEEKVRNEPTQQQRAAMLIKMILKKDNDSYVSFYNALLHEGYKDLAALLHDGIPVVSSSSVRTVLCEGGVPQRPVVFVTRKKLVNAIQQKLSKLKGEPGWVTIHGMAGCGKSVLAAEAVRDHSLLEGCFPGGVHWVSVGKQDKSGLLMKLQNLCTRLDQDESFSQRLPLNIEEAKDRLRILMLRKHPRSLLILDDVWDSWVLKAFDSQCQILLTTRDKSVTDSVMGPKYVVPVESSLGKEKGLEILSLFVNMKKADLPEQAHSIIKECKGSPLVVSLIGALLRDFPNRWEYYLKQLQNKQFKRIRKSSSYDYEALDEAMSISVEMLREDIKDYYTDLSILQKDVKVPTKVLCILWDMETEEVEDILQEFVNKSLLFCDRNGKSFRYYLHDLQVDFLTEKNCSQLQDLHKKIITQFQRYHQPHTLSPDQEDCMYWYNFLAYHMASAKMHKELCALMFSLDWIKAKTELVGPAHLIHEFVEYRHILDEKDCAVSENFQEFLSLNGHLLGRQPFPNIVQLGLCEPETSEVYQQAKLQAKQEVDNGMLYLEWINKKNITNLSRLVVRPHTDAVYHACFSEDGQRIASCGADKTLQVFKAETGEKLLEIKAHEDEVLCCAFSTDDRFIATCSVDKKVKIWNSMTGELVHTYDEHSEQVNCCHFTNSSHHLLLATGSSDCFLKLWDLNQKECRNTMFGHTNSVNHCRFSPDDKLLASCSADGTLKLWDATSANERKSINVKQFFLNLEDPQEDMEVIVKCCSWSADGARIMVAAKNKIFLFDIHTSGLLGEIHTGHHSTIQYCDFSPQNHLAVVALSQYCVELWNTDSRSKVADCRGHLSWVHGVMFSPDGSSFLTSSDDQTIRLWETKKVCKNSAVMLKQEVDVVFQENEVMVLAVDHIRRLQLINGRTGQIDYLTEAQVSCCCLSPHLQYIAFGDENGAIEILELVNNRIFQSRFQHKKTVWHIQFTADEKTLISSSDDAEIQVWNWQLDKCIFLRGHQETVKDFRLLKNSRLLSWSFDGTVKVWNIITGNKEKDFVCHQGTVLSCDISHDATKFSSTSADKTAKT

SEQ ID NO: 2517 - protein, 204 aa, Artificial Sequence
  Synthetic polypeptide
MFTSTGSSGLYKAPLSKSLLLVPSALSLLLALLLPHCQKLFVYDLHAVKNDFQMSGLCYDSKMFQVHQVLCIPSWMAKFFSWTLEPIFSSSEPTSEARIGMGATLDIQRQQRMELLDRQLMFSQFAQGRRQRQQQGGMINWNRLFPPLRQRQNVNYQGGRQSEPAAPPLEVSEEQASDTWYETLLRCWAATVNRSVFHLQHDTQ

SEQ ID NO: 2518 - protein, 338 aa, Artificial Sequence
  Synthetic polypeptide
MFTSTGSSGLYKAPLSKSLLLVPSALSLLLALLLPHCQKLFVYDLHAVKNDFQIWRLICGRIICLDLKDTFCSSLLIYNFRIFERRYGSRKFASFLLGSWVLSALFDFLLIEAMQYFFGITAASNLPSGFLAPVFALFVPFYCSIPRVQVAQILGPLSITNKTLIYILGLQLFTSGSYIWIVAISGLMSGLCYDSKMFQVHQVLCIPSWMAKFFSWTLEPIFSSSEPTSEARIGMGATLDIQRQQRMELLDRQLMFSQFAQGRRQRQQQGGMINWNRLFPPLRQRQNVNYQGGRQSEPAAPPLEVSEEQASDTWYETLLRCWAATVNRSVFHLQHDTQ

SEQ ID NO: 2519 - protein, 303 aa, Artificial Sequence
  Synthetic polypeptide
MCFFFSLQEEFLDKHTLMRVLSSGGKLGSRGEGAQLCCWMLLFSWRVSGGQQTRRLCRRAFCWSPVPSPSCSPSSCLTARSSLCMTFTQSRTTSSLAPVFALFVPFYCSIPRVQVAQILGPLSITNKTLIYILGLQLFTSGSYIWIVAISGLMSGLCYDSKMFQVHQVLCIPSWMAKFFSWTLEPIFSSSEPTSEARIGMGATLDIQRQQRMELLDRQLMFSQFAQGRRQRQQQGGMINWNRLFPPLRQRQNVNYQGGRQSEPAAPPLEVSEEQASDTWYETLLRCWAATVNRSVFHLQHDTQ

SEQ ID NO: 2520 - protein, 91 aa, Artificial Sequence
  Synthetic polypeptide
MALRLLRRAARGAAAAALLRLKASLAADIPRLGYSSSSHHKYIPRRAVLYVPGNDEKKIKKIPSLNVDCAVLDCEDGVAANKKDTIKKMKR

SEQ ID NO: 2521 - protein, 183 aa, Artificial Sequence
  Synthetic polypeptide
MAGFWVGTAPLVAAGRRGRWPPQQLMLSAALRTLKHVLYYSRQCLMVSRNLGSVGYDPNEKTFDKILVANRGEIACRVIRTCKKMGIKTVAIHSDVDASSDMDEAGNHHSQQTITGTENKTLHVLTHRWELNNEDTWTQGREHHTLCPVVGLGDGGGIALGEIPNVNDELMGAAKQHETCIPM

SEQ ID NO: 2522 - protein, 157 aa, Artificial Sequence
  Synthetic polypeptide
MAGFWVGTAPLVAAGRRGRWPPQQLMLSAALRTLKTFDKILVANRGEIACRVIRTCKKMGIKTVAIHSDVDASSDMDEAGNHHSQQTITGTENKTLHVLTHRWELNNEDTWTQGREHHTLCPVVGLGDGGGIALGEIPNVNDELMGAAKQHETCIPM

SEQ ID NO: 2523 - protein, 1 aa, Artificial Sequence
  Synthetic polypeptide
M

SEQ ID NO: 2524 - protein, 342 aa, Artificial Sequence
  Synthetic polypeptide
MRPPGFRNFLLLASSLLFAGLSAVPQSFSPSLRSWPGAACRLSRAESERRCRAPGQPPGAALCHGRGRCDCGVCICHVTEPGMFFGPLCECHEWVCETYDGSTCAGHGKCDCGKCKCDQGWYGDACQYPTNCDLTKKKSNQMCKNSQDIICSNAGTCHCGRCKCDNSDGSGLVYGKFCECDDRECIDDETEEICGGHGKCYCGNCYCKAGWHGDKCEFQCDITPWESKRRCTSPDGKICSNRGTCVCGECTCHDVDPTGDWGDIHGDTCECDERDCRAVYDRYSDDFCSGHGQCNCGRCDCKAGWYGKKCEHPQSCTLSAEESIRKCQGSSDLPCSGRGLEE

SEQ ID NO: 2525 - protein, 201 aa, Artificial Sequence
  Synthetic polypeptide
MCKNSQDIICSNAGTCHCGRCKCDNSDGSGLVYGKFCECDDRECIDDETEEICGGHGKCYCGNCYCKAGWHGDKCEFQCDITPWESKRRCTSPDGKICSNRGTCVCGECTCHDVDPTGDWGDIHGDTCECDERDCRAVYDRYSDDFCSGHGQCNCGRCDCKAGWYGKKCEHPQSCTLSAEESIRKCQGSSDLPCSGRGLEE

SEQ ID NO: 2526 - protein, 249 aa, Artificial Sequence
  Synthetic polypeptide
MNLVAVMGAFNKGHGKCDCGKCKCDQGWYGDACQYPTNCDLTKKKSNQMCKNSQDIICSNAGTCHCGRCKCDNSDGSGLVYGKFCECDDRECIDDETEEICGGHGKCYCGNCYCKAGWHGDKCEFQCDITPWESKRRCTSPDGKICSNRGTCVCGECTCHDVDPTGDWGDIHGDTCECDERDCRAVYDRYSDDFCSGHGQCNCGRCDCKAGWYGKKCEHPQSCTLSAEESIRKCQGSSDLPCSGRGLEE

SEQ ID NO: 2527 - protein, 71 aa, Artificial Sequence
  Synthetic polypeptide
MVKPVPLFRRTDFKLLLCNHKDLFFLRVSKLLDCFSPKSMWFLWNIFSKGTHMLQCLCGKSLKKNKNPTVR

SEQ ID NO: 2528 - protein, 1058 aa, Artificial Sequence
  Synthetic polypeptide
MATAATEEPFPFHGLLPKKETGAASFLCRYPEYDGRGVLIAVLDTGVDPGAPGMQVTTDGKPKIVDIIDTTGSGDVNTATEVEPKDGEIVGLSGRVLKIPASWTNPSGKYHIGIKNGYDFYPKALKERIQKERKEKIWDPVHRVALAEACRKQEEFDVANNGSSQANKLIKEELQSQVELLNSFEKKYSDPGPVYDCLVWHDGEVWRACIDSNEDGDLSKSTVLRNYKEAQEYGSFGTAEMLNYSVNIYDDGNLLSIVTSGGAHGTHVASIAAGHFPEEPERNGVAPGAQILSIKIGDTRLSTMETGTGLIRAMIEVINHKCDLVNYSYGEATHWPNSGRICEVINEAVWKHNIIYVSSAGNNGPCLSTVGCPGGTTSSVIGVGAYVSPDMMVAEYSLREKLPANQYTWSSRGPSADGALGVSISAPGGAIASVPNWTLRGTQLMNGTSMSSPNACGGIALILSGLKANNIDYTVHSVRRALENTAVKADNIEVFAQGHGIIQVDKAYDYLVQNTSFANKLGFTVTVGNNRGIYLRDPVQVAAPSDHGVGIEPVFPENTENSEKISLQLHLALTSNSSWVQCPSHLELMNQCRHINIRVDPRGLREGLHYTEVCGYDIASPNAGPLFRVPITAVIAAKVNESSHYDLAFTDVHFKPGQIRRHFIEVPEGATWAEVTVCSCSSEVSAKFVLHAVQLVKQRAYRSHEFYKFCSLPEKGTLTEAFPVLGGKAIEFCIARWWASLSDVNIDYTISFHGIVCTAPQLNIHASEGINRFDVQSSLKYEDLAPCITLKNWVQTLRPVSAKTKPLGSRDVLPNNRQLYEMVLTYNFHQPKSGEVTPSCPLLCELLYESEFDSQLWIIFDQNKRQMGSGDAYPHQYSLKLEKGDYTIRLQIRHEQISDLERLKDLPFIVSHRLSNTLSLDIHENHSFALLGKKKSSNLTLPPKYNQPFFVTSLPDDKIPKGAGPGCYLAGSLTLSKTELGKKADVIPVHYYLIPPPTKTKNGSKDKEKDSEKEKDLKEEFTEALRDLKIQWMTKMTGIIKSDDEFWQVCGQSRILRH

SEQ ID NO: 2529 - protein, 1071 aa, Artificial Sequence
  Synthetic polypeptide
MATAATEEPFPFHGLLPKKETGAASFLCRYPEYDGRGVLIAVLDTGVDPGAPGMQVTTDGKPKIVDIIDTTGSGDVNTATEVEPKDGEIVGLSGRVLKIPASWTNPSGKYHIGIKNGYDFYPKALKERIQKERKEKIWDPVHRVALAEACRKQEEFDVANNGSSQANKLIKEELQSQVELLNSFEKKYSDPGPVYDCLVWHDGEVWRACIDSNEDGDLSKSTVLRNYKEAQEYGSFGTAEMLNYSVNIYDDGNLLSIVTSGGAHGTHVASIAAGHFPEEPERNGVAPGAQILSIKIGDTRLSTMETGTGLIRAMIEVINHKCDLVNYSYGEATHWPNSGRICEVINEAVWKHNIIYVSSAGNNGPCLSTVGCPGGTTSSVIGVGAYVSPDMMVAEYSLREKLPANQYTWSSRGPSADGALGVSISAPGGAIASVPNWTLRGTQLMNGTSMSSPNACGGIALILSGLKANNIDYTVHSVRRALENTAVKADNIEVFAQGHGIIQVDKAYDYLVQNTSFANKLGFTVTVGNNRGIYLRDPVQVAAPSDHGVGIEPVFPENTENSEKISLQLHLALTSNSSWVQCPSHLELMNQCRHINIRVDPRGLREGLHYTEVCGYDIASPNAGPLFRVPITAVIAAKVNESSHYDLAFTDVHFKPGQIRRHFIEVPEGATWAEVTVCSCSSEVSAKFVLHAVQLVKQRAYRSHEFYKFCSLPEKGTLTEAFPVLGGKAIEFCIARWWASLSDVNIDYTISFHGIVCTAPQLNIHASEGINRFDVQSSLKYEDLAPCITLKNWVQTLRPVSAKTKPLGSRDVLPNNRQLYEMVLTYNFHQPKSGEVTPSCPLLCELLYESEFDSQLWIIFDQNKRQMGSGDAYPHQYSLKLEKGDYTIRLQIRHEQISDLERLKDLPFIVSHRLSNTLSLDIHENHSFALLGKKKSSNLTLPPKYNQPFFVTSLPDDKIPKGAGPGCYLAGSLTLSKTELGKKAGQSAAKRQGKFKKDVIPVHYYLIPPPTKTKNGSKDKEKDSEKEKDLKEEFTEALRDLKIQWMTKMTGIIKSDDEFWQVCGQSRILRH

SEQ ID NO: 2530 - protein, 220 aa, Artificial Sequence
  Synthetic polypeptide
MDDSTEREQSRLTSCLKKREEMKLKECVSILPRKESPSVRSSKDGKLLAATLLLALLSCCLTVVSFYQVAALQGDLASLRAELQGHHAEKLPAGAGAPKAGLEEAPAVTAGLKIFEPPAPGEGNSSQNSRNKRAVQGPEETVTQDCLQLIADSETPTIQKGTWMKLETIILSKLSHVLTHRWELNNENTWIQEGEHHTPGPVVGWGEGGGIALGDIPTVK

SEQ ID NO: 2531 - protein, 127 aa, Artificial Sequence
  Synthetic polypeptide
MAVFPATARGQLGIRNAARWPWVLAVGQSGLADEGILEVSKARDIPVVIDADGLWLVAQQPALIHGYRKAVLTPNHVEFSRLYDAVLRGPMDSDDSHGSVLRLSQALGNVTVVQKGERDILSNGQQE

SEQ ID NO: 2532 - protein, 148 aa, Artificial Sequence
  Synthetic polypeptide
MLPDGPGSSLWGNPGLQTSDSPNAVHEVEKWLPRLHALVVGPGLGRDDALLRNVQGILEVSKARDIPVVIDADGLWLVAQQPALIHGYRKAVLTPNHVEFSRLYDAVLRGPMDSDDSHGSVLRLSQALGNVTVVQKGERDILSNGQQE

SEQ ID NO: 2533 - protein, 258 aa, Artificial Sequence
  Synthetic polypeptide
MVTRAGAGTAVAGAVVVALLSAALALYGPPLDAVLERAFSLRKAHSIKDMENTLQLVRNIIPPLSSTKHKGQDGRIGVVGGCQEYTGAPYFAAISALKVGADLSHVFCASAAAPVIKAYSPELIVHPVLDSPNAVHEVEKWLPRLHALVVGPGLGRDDALLRNVQGILEVSKARDIPVVIDADGLWLVAQQPALIHGYRKAVLTPNHVEFSRLYDAVLRGPMDSDDSHGSVLRLSQALGNVTVVQKGERDILSNGQQE

SEQ ID NO: 2534 - protein, 15 aa, Artificial Sequence
  Synthetic polypeptide
GICTPKAKKKKCPNH

SEQ ID NO: 2535 - protein, 16 aa, Artificial Sequence
  Synthetic polypeptide
MGTREAGLAHRVLCHR

SEQ ID NO: 2536 - protein, 369 aa, Artificial Sequence
  Synthetic polypeptide
MLRTTRGPGLGPPLLQAALGLGRAGWHWPAGRAASGGRGRAWLQPTGRETGVQVYNSLTGRKEPLIVAHAEAASWYSCGPTVYDHAHLGHACSYVRFDIIRRILTKVFGCSIVMVMGITDVDDKIIKRANEMNISPASLASLYEEDFKQDMAALKVLPPTVYLRVTENIPQIISFIEGIIARGNAYSTAKGNVYFDLKSRGDKYGKLVGVVPGPVGEPADSDKRHASDFALWKAAKPQEVFWASPWGPGRPGWHIECSAIASMVFGSQLDIHSGGIDLAFPHHENEIAQCEVFHQCEQWGNYFLHSGHLHAKGKEEKMSKSLKNYITIKGFRTSLEEVTAYMVGIARELLELEMDPGDVTELLQPHDKS

SEQ ID NO: 2537 - protein, 65 aa, Artificial Sequence
  Synthetic polypeptide
MLSPANGEQLHLVNYVEDYLDSIESLPFDLQRNVSLMREIDAKYQGTVAHSCNPSTMGDRGGRIT

SEQ ID NO: 2538 - protein, 55 aa, Artificial Sequence
  Synthetic polypeptide
MLSPANGEQLHLVNYVEDYLDSIESLPFDLQRNVSLMREIDAKYQELAGRGITCL

SEQ ID NO: 2539 - protein, 208 aa, Artificial Sequence
  Synthetic polypeptide
MSFVECPYHSPAERLVAEADEGGPSAITGMGLCFRCLLFSFSGRSGVEGGRVDLNVFGSLGLQPWIGSSRCWGGPCSSALRCGWFSSWPPPSKSAIPIGGGSRGAGRVSRWPPPHWLEAWRVSPLPLSPLSPATFGRGFIAVAVIPGLWARGRGCSSDRLPRPAGPARRQFQAASLLTRGWGRAWPWKRTVAHSCNPSTMGDRGGRIT

SEQ ID NO: 2540 - protein, 198 aa, Artificial Sequence
  Synthetic polypeptide
MSFVECPYHSPAERLVAEADEGGPSAITGMGLCFRCLLFSFSGRSGVEGGRVDLNVFGSLGLQPWIGSSRCWGGPCSSALRCGWFSSWPPPSKSAIPIGGGSRGAGRVSRWPPPHWLEAWRVSPLPLSPLSPATFGRGFIAVAVIPGLWARGRGCSSDRLPRPAGPARRQFQAASLLTRGWGRAWPWKQLAGRGITCL

SEQ ID NO: 2541 - protein, 331 aa, Artificial Sequence
  Synthetic polypeptide
MNSAEQTVTWLITLGVLESPKKTISDPEGFLQASLKDGVVLCRLLERLLPGTIEKVYPEPRSESECLSNIREFLRGCGASLRLETFDANDLYQGQNFNKVLSSLVTLNKVTADIGLGSDSVCARPSSHRIKSFDSLGSQSLHTRTSKLFQGQYRSLDMTDNSNNQLVVRAKFNFQQTNEDELSFSKGDVIHVTRVEEGGWWEGTLNGRTGWFPSNYVREVKASEKPVSPKSGTLKSPPKGFDTTAINKSYYNVVLQNILETENEYSKELQTVLSTYLRPLQTSEKLSSANISYLMGNLEEICSFQQMLVQSLEECTKNTKLNNSPHEEIPS

SEQ ID NO: 2542 - protein, 302 aa, Artificial Sequence
  Synthetic polypeptide
MNSAEQTVTWLITLGVLESPKKTISDPEGFLQASLKDGVVLCRLLERLLPGTIEKTFDANDLYQGQNFNKVLSSLVTLNKVTADIGLGSDSVCARPSSHRIKSFDSLGSQSLHTRTSKLFQGQYRSLDMTDNSNNQLVVRAKFNFQQTNEDELSFSKGDVIHVTRVEEGGWWEGTLNGRTGWFPSNYVREVKASEKPVSPKSGTLKSPPKGFDTTAINKSYYNVVLQNILETENEYSKELQTVLSTYLRPLQTSEKLSSANISYLMGNLEEICSFQQMLVQSLEECTKNTKLNNSPHEEIPS

SEQ ID NO: 2543 - protein, 352 aa, Artificial Sequence
  Synthetic polypeptide
MNSAEQTVTWLITLGVLESPKKTISDPEGFLQASLKDGVVLCRLLERLLPGTIEKVYPEPRSESECLSNIREFLRGCGASLRLELLFPPSQPPQHLVTTILLSASTFDANDLYQGQNFNKVLSSLVTLNKVTADIGLGSDSVCARPSSHRIKSFDSLGSQSLHTRTSKLFQGQYRSLDMTDNSNNQLVVRAKFNFQQTNEDELSFSKGDVIHVTRVEEGGWWEGTLNGRTGWFPSNYVREVKASEKPVSPKSGTLKSPPKGFDTTAINKSYYNVVLQNILETENEYSKELQTVLSTYLRPLQTSEKLSSANISYLMGNLEEICSFQQMLVQSLEECTKNTKLNNSPHEEIPS

SEQ ID NO: 2544 - protein, 259 aa, Artificial Sequence
  Synthetic polypeptide
MNSAEQTVTWLITLGVLESPKKTISDPEGFLQASLKDGVVLCRLLERLLPGTIEKVYPEPRSESECLSNIREFLRGCGASLRLEDMTDNSNNQLVVRAKFNFQQTNEDELSFSKGDVIHVTRVEEGGWWEGTLNGRTGWFPSNYVREVKASEKPVSPKSGTLKSPPKGFDTTAINKSYYNVVLQNILETENEYSKELQTVLSTYLRPLQTSEKLSSANISYLMGNLEEICSFQQMLVQSLEECTKNTKLNNSPHEEIPS

SEQ ID NO: 2545 - protein, 174 aa, Artificial Sequence
  Synthetic polypeptide
MTDNSNNQLVVRAKFNFQQTNEDELSFSKGDVIHVTRVEEGGWWEGTLNGRTGWFPSNYVREVKASEKPVSPKSGTLKSPPKGFDTTAINKSYYNVVLQNILETENEYSKELQTVLSTYLRPLQTSEKLSSANISYLMGNLEEICSFQQMLVQSLEECTKNTKLNNSPHEEIPS

SEQ ID NO: 2546 - protein, 249 aa, Artificial Sequence
  Synthetic polypeptide
MKTFDANDLYQGQNFNKVLSSLVTLNKVTADIGLGSDSVCARPSSHRIKSFDSLGSQSLHTRTSKLFQGQYRSLDMTDNSNNQLVVRAKFNFQQTNEDELSFSKGDVIHVTRVEEGGWWEGTLNGRTGWFPSNYVREVKASEKPVSPKSGTLKSPPKGFDTTAINKSYYNVVLQNILETENEYSKELQTVLSTYLRPLQTSEKLSSANISYLMGNLEEICSFQQMLVQSLEECTKNTKLNNSPHEEIPS

SEQ ID NO: 2547 - protein, 96 aa, Artificial Sequence
  Synthetic polypeptide
MGSCSSQSVQKTRRGRKVVLQNILETENEYSKELQTVLSTYLRPLQTSEKLSSANISYLMGNLEEICSFQQMLVQSLEECTKNTKLNNSPHEEIPS

SEQ ID NO: 2548 - protein, 55 aa, Artificial Sequence
  Synthetic polypeptide
MATPDQKSPNVLLQNLCCRILGRSEGVWKKVIPAMMDDFEGSSLQWRKELQMWWQ

SEQ ID NO: 2549 - protein, 162 aa, Artificial Sequence
  Synthetic polypeptide
MAHITINQYLQQVYEAIDSRDGASCAELVSFKHPHVANPRLQMASPEEKCQQVLEPPYDEMFAAHLRCTYAVGNHDFIEAYKCQTVIVQSFLRAFQAHKEENWALPVMYAVALDLRVFANNRFQMRKNIQQKTPRLRLYKCWNYVTRVLNSPLDSASNLEHA

SEQ ID NO: 2550 - protein, 160 aa, Artificial Sequence
  Synthetic polypeptide
MRLTDVVQQLVYEAIDSRDGASCAELVSFKHPHVANPRLQMASPEEKCQQVLEPPYDEMFAAHLRCTYAVGNHDFIEAYKCQTVIVQSFLRAFQAHKEENWALPVMYAVALDLRVFANNRFQMRKNIQQKTPRLRLYKCWNYVTRVLNSPLDSASNLEHA

SEQ ID NO: 2551 - protein, 216 aa, Artificial Sequence
  Synthetic polypeptide
MAHITINQYLQQVYEAIDSRDGASCAELVSFKHPHVANPRLQMASPEEKCQQVLEPPYDEMFAAHLRCTYAVGNHDFIEAYKCQTVIVQYPLSFMAAVPHRTHAVDYLGLETRKHWASCSFLQLERNDSVLEQKLVSALSLGTSFLRAFQAHKEENWALPVMYAVALDLRVFANNRFQMRKNIQQKTPRLRLYKCWNYVTRVLNSPLDSASNLEHA

SEQ ID NO: 2552 - protein, 210 aa, Artificial Sequence
  Synthetic polypeptide
MAHITINQYLQQVYEAIDSRDGASCAELVSFKHPHVANPRLQMASPEEKCQQVLEPPYDEMFAAHLRCTYAVGNHDFIEAYKCQTVIVQSFLRAFQAHKEENWALPVMYAVALDLRVFANNKPEAFHHQAETKSPKETRRLGRQSNPARQNSDRHCLTPVPGAKKSAGPSHPICKVVRTGGGPGPPPWASSNEELVPLPTRWMSEAKQGT

SEQ ID NO: 2553 - protein, 208 aa, Artificial Sequence
  Synthetic polypeptide
MRLTDVVQQLVYEAIDSRDGASCAELVSFKHPHVANPRLQMASPEEKCQQVLEPPYDEMFAAHLRCTYAVGNHDFIEAYKCQTVIVQSFLRAFQAHKEENWALPVMYAVALDLRVFANNKPEAFHHQAETKSPKETRRLGRQSNPARQNSDRHCLTPVPGAKKSAGPSHPICKVVRTGGGPGPPPWASSNEELVPLPTRWMSEAKQGT

SEQ ID NO: 2554 - protein, 264 aa, Artificial Sequence
  Synthetic polypeptide
MAHITINQYLQQVYEAIDSRDGASCAELVSFKHPHVANPRLQMASPEEKCQQVLEPPYDEMFAAHLRCTYAVGNHDFIEAYKCQTVIVQYPLSFMAAVPHRTHAVDYLGLETRKHWASCSFLQLERNDSVLEQKLVSALSLGTSFLRAFQAHKEENWALPVMYAVALDLRVFANNKPEAFHHQAETKSPKETRRLGRQSNPARQNSDRHCLTPVPGAKKSAGPSHPICKVVRTGGGPGPPPWASSNEELVPLPTRWMSEAKQGT

SEQ ID NO: 2555 - protein, 329 aa, Artificial Sequence
  Synthetic polypeptide
MLYKQLRQACEDHVQAQILPFREDSLDSVLFLKKINTCWQDHCRQMIMIRSIFLFLDRTYVLQNSTLPSIWDMGLELFRTHIISDKMVQSKTIDGILLLIERERSGEAVDRSLLRSLLGMLSDLQVYKDSFELKFLEETNCLYAAEGQRLMQEREVPEYLNHVSKRLEEEGDRVITYLDHSTQKPLIACVEKQLLGEHLTAILQKGLDHLLDENRVPDLAQMYQLFSRVRGGQQALLQHWSEYIKTFGTAIVINPEKDKDMVQDLLDFKDKVDHVIEVCFQKNERFVNLMKESFETFINKRPNKPAELIGERGQRELKYDDTRLTVDYC

SEQ ID NO: 2556 - protein, 429 aa, Artificial Sequence
  Synthetic polypeptide
MADEAPRKGSFSALVGRTNGLTKPAALAAAPAKPGGAGGSKKLVIKNFRDRPRLPDNYTQDTWRKLHEAVRAVQSSTSIRYNLEELYQAVENLCSHKVSPMLYKQLRQACEDHVQAQILPFREDSLDSVLFLKKINTCWQDHCRQMIMIRSIFLFLDRTYVLQNSTLPSIWDMGLELFRTHIISDKMVQSKTIDGILLLIERERSGEAVDRSLLRSLLGMLSDLQVYKDSFELKFLEETNCLYAAEGQRLMQEREVPEYLNHVSKRLEEEGDRVITYLDHSTQKPLIACVEKQLLGEHLTAILQKGLDHLLDENRVPDLAQMYQLFSRVRGGQQALLQHWSEYIKTFGTAIVINPEKDKDMVQDLLDFKDKVDHVIEVCFQKNERFVNLMKESFETFINKRPNKPAELIGERGQRELKYDDTRLTVDYC

SEQ ID NO: 2557 - protein, 365 aa, Artificial Sequence
  Synthetic polypeptide
MKVLGRSFFWVLFPVLPWAVQAVEHEEVAQRVIKLHRGRGVAAMQSRQWVRDSCRKLSGLLRQKNAVLNKLKTAIGAVEKDVGLSDEEKLFQVHTFEIFQKELNESENSVFQAVYGLQRALQGDYKDVVNMKESSRQRLEALREAAIKEETEYMELLAAEKHQVEALKNMQHQNQSLSMLDEILEDVRKAADRLEEEIEEHAFDDNKSVKGVNFEAVLRVEEEEANSKQNITKREVEDDLGLSMLIDSQNNQYILTKPRDSTIPRADHHFIKDIVTIGMLSLPCGWLCTAIGLPTMFGYIICGVLLGPSGLNSIKSIVQVETLGEFGVFFTLFLVGLEFSPEKLRKVSPPHCKFLRNSGTSPEHL

SEQ ID NO: 2558 - protein, 350 aa, Artificial Sequence
  Synthetic polypeptide
MKVLGRSFFWVLFPVLPWAVQAVEHEEVAQRVIKLHRGRGVAAMQSRQWVRDSCRKLSGLLRQKNAVLNKLKTAIGAVEKDVGLSDEEKLFQVHTFEIFQKELNESENSVFQAVYGLQRALQGDYKDVVNMKESSRQRLEALREAAIKEETEYMELLAAEKHQVEALKNMQHQNQSLSMLDEILEDVRKAADRLEEEIEEHAFDDNKSVKGVNFEAVLRVEEEEANSKQNITKREVEDDLGLSMLIDSQNNQYILTKPRDSTIPRADHHFIKDIVTIGMLSLPCGWLCTAIGLPTMFGYIICGVLLGPSGLNSIKSIVQVETLGEFGVFFTLFLVGLEFSPEKLRKWNQS

SEQ ID NO: 2559 - protein, 454 aa, Artificial Sequence
  Synthetic polypeptide
MKVLGRSFFWVLFPVLPWAVQAVEHEEVAQRVIKLHRGRGVAAMQSRQWVRDSCRKLSGLLRQKNAVLNKLKTAIGAVEKDVGLSDEEKLFQVHTFEIFQKELNESENSVFQAVYGLQRALQGDYKDVVNMKESSRQRLEALREAAIKEETEYMELLAAEKHQVEALKNMQHQNQSLSMLDEILEDVRKAADRLEEEIEEHAFDDNKSVKGVNFEAVLRVEEEEANSKQNITKREVEDDLGLSMLIDSQNNQYILTKPRDSTIPRADHHFIKDIVTIGMLSLPCGWLCTAIGLPTMFGYIICGVLLGPSGLNSIKSIVQVETLGEFGVFFTLFLVGLEFSPEKLRKVWKISLQGPCYMTLLMIAFGLLWGHLLRIKPTQSVFISTCLSLSSTPLVSRFLMGSARGDKEGDIDYSTVLLGMLVTQDVQLGLFMAVMPTLIQAGASASSRVYSFYL

SEQ ID NO: 2560 - protein, 462 aa, Artificial Sequence
  Synthetic polypeptide
MKVLGRSFFWVLFPVLPWAVQAVEHEEVAQRVIKLHRGRGVAAMQSRQWVRDSCRKLSGLLRQKNAVLNKLKTAIGAVEKDVGLSDEEKLFQVHTFEIFQKELNESENSVFQAVYGLQRALQGDYKDVVNMKESSRQRLEALREAAIKEETEYMELLAAEKHQVEALKNMQHQNQSLSMLDEILEDVRKAADRLEEEIEEHAFDDNKSVKGVNFEAVLRVEEEEANSKQNITKREVEDDLGLSMLIDSQNNQYILTKPRDSTIPRADHHFIKDIVTIGMLSLPCGWLCTAIGLPTMFGYIICGVLLGPSGLNSIKSIVQVETLGEFGVFFTLFLVGLEFSPEKLRKVWKISLQGPCYMTLLMIAFGLLWGHLLRIKPTQSVFISTCLSLSSTPLVSRFLMGSARGDKEGDIDYSTVLLGMLVTQDVQLGLFMAVMPTLIQAGASASSRTSHRHHSRRQLCAC

SEQ ID NO: 2561 - protein, 463 aa, Artificial Sequence
  Synthetic polypeptide
MKVLGRSFFWVLFPVLPWAVQAVEHEEVAQRVIKLHRGRGVAAMQSRQWVRDSCRKLSGLLRQKNAVLNKLKTAIGAVEKDVGLSDEEKLFQVHTFEIFQKELNESENSVFQAVYGLQRALQGDYKDVVNMKESSRQRLEALREAAIKEETEYMELLAAEKHQVEALKNMQHQNQSLSMLDEILEDVRKAADRLEEEIEEHAFDDNKSVKGVNFEAVLRVEEEEANSKQNITKREVEDDLGLSMLIDSQNNQYILTKPRDSTIPRADHHFIKDIVTIGMLSLPCGWLCTAIGLPTMFGYIICGVLLGPSGLNSIKSIVQVETLGEFGVFFTLFLVGLEFSPEKLRKVWKISLQGPCYMTLLMIAFGLLWGHLLRIKPTQSVFISTCLSLSSTPLVSRFLMGSARGDKEGDIDYSTVLLGMLVTQDVQLGLFMAVMPTLIQAGASASSRTSHRHHRRRQLCACY

SEQ ID NO: 2562 - protein, 463 aa, Artificial Sequence
  Synthetic polypeptide
MKVLGRSFFWVLFPVLPWAVQAVEHEEVAQRVIKLHRGRGVAAMQSRQWVRDSCRKLSGLLRQKNAVLNKLKTAIGAVEKDVGLSDEEKLFQVHTFEIFQKELNESENSVFQAVYGLQRALQGDYKDVVNMKESSRQRLEALREAAIKEETEYMELLAAEKHQVEALKNMQHQNQSLSMLDEILEDVRKAADRLEEEIEEHAFDDNKSVKGVNFEAVLRVEEEEANSKQNITKREVEDDLGLSMLIDSQNNQYILTKPRDSTIPRADHHFIKDIVTIGMLSLPCGWLCTAIGLPTMFGYIICGVLLGPSGLNSIKSIVQVETLGEFGVFFTLFLVGLEFSPEKLRKVWKISLQGPCYMTLLMIAFGLLWGHLLRIKPTQSVFISTCLSLSSTPLVSRFLMGSARGDKEGDIDYSTVLLGMLVTQDVQLGLFMAVMPTLIQAGASASSRTSHRHRRRRQLCAGY

SEQ ID NO: 2563 - protein, 109 aa, Artificial Sequence
  Synthetic polypeptide
MRSEKEGAGGLRAAVAARGPSGREKLSALEVQFHRDSQQQEAETPPTSSSGCGGGAGKPREEKRTALSKVVIRRLPPGLTKEQLEEQLRPLPAHDYFEFFAADLSGSHL

SEQ ID NO: 2564 - protein, 142 aa, Artificial Sequence
  Synthetic polypeptide
MRSEKEGAGGLRAAVAARGPSGREKLSALEVQFHRDSQQQEAETPPTSSSGCGGGAGKPREEKRTALSKVVIRRLPPGLTKEQLEEQLRPLPAHDYFEFFAADLSLYPHLYSRAYINFRNPDDILLFRDRFDGYIFLDSKAL

SEQ ID NO: 2565 - protein, 148 aa, Artificial Sequence
  Synthetic polypeptide
MRSEKEGAGGLRAAVAARGPSGREKLSALEVQFHRDSQQQEAETPPTSSSGCGGGAGKPREEKRTALSKVVIRRLPPGLTKEQLEEQLRPLPAHDYFEFFAADLSLYPHLYSRAYINFRNPDDILLFRDRFDGYIFLDSKARHGGRRL

SEQ ID NO: 2566 - protein, 228 aa, Artificial Sequence
  Synthetic polypeptide
MEKCSVGGLELTEQTPALLGNMAMATSLMDIGDSFGHPACPLVSRSRNSPVEDDDDDDDVVFIESIQPPSISAPAIADQRNFIFASSKNEKPQGNYSVIPPSSRDLASQKGNISETIVIDDEEDIETNGGAEKKSSCFIEWGLPGTKNKTNDLDFSTSSLSRSKTKTGVRPFNPGRMNVAGDLFQNGEFATHHSPGWVQWHTPVMSSLCEAKEEGSLEARSLNPASVT

SEQ ID NO: 2567 - protein, 218 aa, Artificial Sequence
  Synthetic polypeptide
MTEQTPALLGNMAMATSLMDIGDSFGHPACPLVSRSRNSPVEDDDDDDDVVFIESIQPPSISAPAIADQRNFIFASSKNEKPQGNYSVIPPSSRDLASQKGNISETIVIDDEEDIETNGGAEKKSSCFIEWGLPGTKNKTNDLDFSTSSLSRSKTKTGVRPFNPGRMNVAGDLFQNGEFATHHSPGWVQWHTPVMSSLCEAKEEGSLEARSLNPASVT

SEQ ID NO: 2568 - protein, 49 aa, Artificial Sequence
  Synthetic polypeptide
MSDLEDDETPQLSAHALAALQEFYAEQKQQIEPGEDDKYNIGIIEENWL

SEQ ID NO: 2569 - protein, 85 aa, Artificial Sequence
  Synthetic polypeptide
MAPWTLWRCCQRVVGWVPVLFITFVVVWSYYAYVVELCVFTIFGNEENGKTVVYLVAFHLFFVMFVWSYWMTIFTSPASPSKEVI

SEQ ID NO: 2570 - protein, 22 aa, Artificial Sequence
  Synthetic polypeptide
MFVWSYWMTIFTSPASPSKEVI

SEQ ID NO: 2571 - protein, 135 aa, Artificial Sequence
  Synthetic polypeptide
MAAAAGSCARVAAWGGKLRRGLAVSRQAVRSPGPLAAAVAGAALAGAGAAWHHSRVSVAARDGSFTVSAQKNVEHGIIYIGKPSLRKQRFMQFSSLEHEGEYYMTPRDFLFSVMFEQMEHQTSHLTTRPIIFLVS

SEQ ID NO: 2572 - protein, 124 aa, Artificial Sequence
  Synthetic polypeptide
MAAAAGSCARVAAWGGKLRRGLAVSRQAVRSPGPLAAAVAGAALAGAGAAWHHSRVSVAARDGSFTVSAQKNVEHGIIYIGKPSLRKQRFMQFSSLEHEGEYYMTPRDFLFSVMFEQMEHSSEN

SEQ ID NO: 2573 - protein, 103 aa, Artificial Sequence
  Synthetic polypeptide
MAPLGEVGNYFGVQDAVPFGNVPVLPVDSPVLLSDHLGQSEAGGLPRGPAVTDLDHLKGILRRRQLYCRTGFHLEIFPNGTIQGTRKDHSRFDGEQKFEGNRT

SEQ ID NO: 2574 - protein, 435 aa, Artificial Sequence
  Synthetic polypeptide
MLCVGRLGGLGARAAALPPRRAGRGSLEAGIRARRVSTSWSPVGAAFNVKPQGSRLDLFGERRGLFGVPELSAPEGFHIAQEKALRKTELLVDRACSTPPGPQTVLIFDELSDSLCRVADLADFVKIAHPEPAFREAAEEACRSIGTMVEKLNTNVDLYQSLQKLLADKKLVDSLDPETRRVAELFMFDFEISGIHLDKEKRKRAVDLNVKILDLSSTFLMGTNFPNKIEKHLLPEHIRRNFTSAGDHIIIDGLHAESPDDLVREAAYKIFLYPNAGQLKCLEELLSSRDLLAKLVGYSTFSHRALQGTIAKNPETVMQFLEKLSDKLSERTLKDFEMIRGMKMKLNPQNSEVMPWDPPYYSGVIRAERYNIEPSLYCPFFSLGACMEGLNILLNRLLGISLYAEQPAKGEVWSEDVRKLCLEEFLAPSRCLTDV

SEQ ID NO: 2575 - protein, 55 aa, Artificial Sequence
  Synthetic polypeptide
MEHIRTTKVEQVKLLDRFSTSNKSLTGTLYLTATHLLFIDSHQKETWAGCGGSRL

SEQ ID NO: 2576 - protein, 436 aa, Artificial Sequence
  Synthetic polypeptide
MDYDFKVKLSSERERVEDLFEYEGCKVGRGTYGHVYKAKRKDGKDDKDYALKQIEGTGISMSACREIALLRELKHPNVISLQKVFLSHADRKVWLLFDYAEHDLWHIIKFHRASKANKKPVQLPRGMVKSLLYQILDGIHYLHANWVLHRDLKPANILVMGEGPERGRVKIADMGFARLFNSPLKPLADLDPVVVTFWYRAPELLLGARHYTKAIDIWAIGCIFAELLTSEPIFHCRQEDIKTSNPYHHDQLDRIFNVMGFPADKDWEDIKKMPEHSTLMKDFRRNTYTNCSLIKYMEKHKVKPDSKAFHLLQKLLTMDPIKRITSEQAMQDPYFLEDPLPTSDVFAGCQIPYPKREFLTEEEPDDKGDKKNQQQQQGNNHTNGTGHPGNQDSSHTQGPPLKKVRVVPPTTTSGGLIMTSDYQLSGTKPTISPRCI

SEQ ID NO: 2577 - protein, 449 aa, Artificial Sequence
  Synthetic polypeptide
MPLVKRNIEPRHLCRGALPEGITSELECVTNSTLAAIIRQLSSLSKHAEDIFGELFNEANNFYIRANSLQDRIDRLAVKVTQLDSTVEEVSLQDINMKKAFKSSTVQDQQVVSKNSIPNPVADIYNQSDKPPPLNILTPYRDDKKDGLKFYTDPSYFFDLWKEKMLQDTEDKRKEKRRQKREKHKLNPNRNQQVNVRKVRTRKEEWERRKMGIEFMSDAKKLEQAGSAKEDRVPSGSHASDVTDYSYPATPNHSLHPQPVTPSYAAGDVPPHGPASQAAEHEYRPPSASARHMALNRPQQPPPPPPPQAPEGSQASAPMAPADYGMLPAQIIEYYNPSGPPPPPPPPVIPSAQTAFVSPLQMPMQPPFPASASSTHAAPPHPPSTGLLVTAPPPPGPPPPPPGPPGPGSSLSSSPMHGPPVAEAKRQEPAQPPISDARSDLLAAIRMVK

SEQ ID NO: 2578 - protein, 452 aa, Artificial Sequence
  Synthetic polypeptide
MPLVKRNIEPRHLCRGALPEGITSELECVTNSTLAAIIRQLSSLSKHAEDIFGELFNEANNFYIRANSLQDRIDRLAVKVTQLDSTVEEVSLQDINMKKAFKSSTVQDQQVVSKNSIPNPVADIYNQSDKPPPLNILTPYRDDKKDGLKFYTDPSYFFDLWKEKMLQDTEDKRKEKRRQKEQKRIDGTTREVKKVRKARNRRQEWNMMAYDKELRPDNRLSQSVYHGASSEGSLSPDTRSHASDVTDYSYPATPNHSLHPQPVTPSYAAGDVPPHGPASQAAEHEYRPPSASARHMALNRPQQPPPPPPPQAPEGSQASAPMAPADYGMLPAQIIEYYNPSGPPPPPPPPVIPSAQTAFVSPLQMPMQPPFPASASSTHAAPPHPPSTGLLVTAPPPPGPPPPPPGPPGPGSSLSSSPMHGPPVAEAKRQEPAQPPISDARSDLLAAIRMVK

SEQ ID NO: 2579 - protein, 149 aa, Artificial Sequence
  Synthetic polypeptide
MDPPAVVAESVSSLTIADAFIAAGESSAPTPPRPALPRRFICSFPDCSANYSKAWKLDAHLCKHTGERPFVCDYEGCGKAFIRDYHLSRHILTHTGEKPFVCAANGCDQKFNTKSNLKKHFERKHENQQKQYIPGAVAQAYNRSLRPGI

SEQ ID NO: 2580 - protein, 19 aa, Artificial Sequence
  Synthetic polypeptide
QYIPGAVAQAYNRSLRPGI

SEQ ID NO: 2581 - protein, 183 aa, Artificial Sequence
  Synthetic polypeptide
MDPPAVVAESVSSLTIADAFIAAGESSAPTPPRPALPRRFICSFPDCSANYSKAWKLDAHLCKHTGERPFVCDYEGCGKAFIRDYHLSRHILTHTGEKPFVCAANGCDQKFNTKSNLKKHFERKHENQQKQYICSFEDCKKTFKKHQQLKIHQCQHTNEPLFKKNCNHPQLMRRSSSVEKNDS

SEQ ID NO: 2582 - protein, 53 aa, Artificial Sequence
  Synthetic polypeptide
QYICSFEDCKKTFKKHQQLKIHQCQHTNEPLFKKNCNHPQLMRRSSSVEKNDS

SEQ ID NO: 2583 - protein, 28 aa, Artificial Sequence
  Synthetic polypeptide
MEEDQELERTLDMKSESSGVESAVPLTG

SEQ ID NO: 2584 - protein, 46 aa, Artificial Sequence
  Synthetic polypeptide
MEEDQELERKAIEELLKEAKRGKTRAETMGPMGCLFNMKMMRMRTL

SEQ ID NO: 2585 - protein, 16 aa, Artificial Sequence
  Synthetic polypeptide
MPALARDGGQLPLLGP

SEQ ID NO: 2586 - protein, 16 aa, Artificial Sequence
  Synthetic polypeptide
MPALARDGGQLPLLGS

SEQ ID NO: 2587 - protein, 238 aa, Artificial Sequence
  Synthetic polypeptide
MNSGGGLPPPSAAASPSSSSLAAAVAVVAPPGVGGVPGGAAVGVKLKYCRYYAKDKTCFYGEECQFLHEDPAAGAAPGLGLHSNSVPLALAGAPVAGFPPGAVAGGGAGPPPGPKKPDLGDPGTGAAAGGGGSSGGLDGPRLAIPGMDGGALTDTSLTDSYFSTSFIGVNGFGSPVETKYPLMQRMTNSSSSPSLLNDSAKPYSAHDPLTSPASSLFNDFGALNISQRRKHLLPVNHQ

SEQ ID NO: 2588 - protein, 92 aa, Artificial Sequence
  Synthetic polypeptide
MDGGALTDTSLTDSYFSTSFIGVNGFGSPVETKYPLMQRMTNSSSSPSLLNDSAKPYSAHDPLTSPASSLFNDFGALNISQRRKHLLPVNHQ

SEQ ID NO: 2589 - protein, 83 aa, Artificial Sequence
  Synthetic polypeptide
MNARGLGSELKDSIPVTELSASGPFESHDLLRKGFSCVKNELLPSHPLELSEKNVSGAEVDSPEYTYKYVSMIIKAQLIIFEN

SEQ ID NO: 2590 - protein, 89 aa, Artificial Sequence
  Synthetic polypeptide
MNARGLGSELKDSIPVTELSASGPFESHDLLRKGFSCVKNELLPSHPLELSEKNFQLNQDKMNFSTLRNIQGLFAPLKLQMEFKAVQQF

SEQ ID NO: 2591 - protein, 56 aa, Artificial Sequence
  Synthetic polypeptide
DEKYNHIDESEMKKVEKSVNEVMEWMNNVMNAQAKKSLDQDPVVRAQEIKTKIKFS

SEQ ID NO: 2592 - protein, 751 aa, Artificial Sequence
  Synthetic polypeptide
MSVVGLDVGSQSCYIAVARAGGIETIANEFSDRCTPSVISFGSKNRTIGVAAKNQQITHANNTVSNFKRFHGRAFNDPFIQKEKENLSYDLVPLKNGGVGIKVPSFFTDAERRSVLDAAQIVGLNCLRLMNDMTAVALNYGIYKQDLPSLDEKPRIVVFVDMGHSAFQVSACAFNKGKLKVLGTAFDPFLGGKNFDEKLVEHFCAEFKTKYKLDAKSKIRALLRLYQECEKLKKLMSSNSTDLPLNIECFMNDKDVSGKMNRSQFEELCAELLQKIEVPLYSLLEQTHLKVEDVSAVEIVGGATRIPAVKERIAKFFGKDISTTLNADEAVARGCALQCAILSPAFKVREFSVTDAVPFPISLIWNHDSEDTEGVHEVFSRNHAAPFSKVLTFLRRGPFELEAFYSDPQGVPYPEAKIGRFVVQNVSAQKDGEKSRVKVKVRVNTHGIFTISTASMVEKVPTEENEMSSEADMECLNQRPPENPDTDKNVQQDNSEAGTQPQVQTDAQQTSQSPPSPELTSEENKIPDADKANEKKVDQPPEAKKPKIKVVNVELPIEANLVWQLGKDLLNMYIETEGKMIMQDKLEKERNDAKNAVEEYVYEFRDKLCGPYEKFICEQDHQNFLRLLTETEDWLYEEGEDQAKQAYVDKLEELMKIGTPVKVRFQEAEERPKMFEELGQRLQHYAKIAADFRNKDEKYNHIDESEMKKVEKSVNEVMEWMNNVMNAQAKKSLDQDPVVRAQEIKTKIKFS

SEQ ID NO: 2593 - protein, 792 aa, Artificial Sequence
  Synthetic polypeptide
MSVVGLDVGSQSCYIAVARAGGIETIANEFSDRCTPSVISFGSKNRTIGVAAKNQQITHANNTVSNFKRFHGRAFNDPFIQKEKENLSYDLVPLKNGGVGIKVMYMGEEHLFSVEQITAMLLTKLKETAENSLKKPVTDCVISVPSFFTDAERRSVLDAAQIVGLNCLRLMNDMTAVALNYGIYKQDLPSLDEKPRIVVFVDMGHSAFQVSACAFNKGKLKVLGTAFDPFLGGKNFDEKLVEHFCAEFKTKYKLDAKSKIRALLRLYQECEKLKKLMSSNSTDLPLNIECFMNDKDVSGKMNRSQFEELCAELLQKIEVPLYSLLEQTHLKVEDVSAVEIVGGATRIPAVKERIAKFFGKDISTTLNADEAVARGCALQCAILSPAFKVREFSVTDAVPFPISLIWNHDSEDTEGVHEVFSRNHAAPFSKVLTFLRRGPFELEAFYSDPQGVPYPEAKIGRFVVQNVSAQKDGEKSRVKVKVRVNTHGIFTISTASMVEKVPTEENEMSSEADMECLNQRPPENPDTDKNVQQDNSEAGTQPQVQTDAQQTSQSPPSPELTSEENKIPDADKANEKKVDQPPEAKKPKIKVVNVELPIEANLVWQLGKDLLNMYIETEGKMIMQDKLEKERNDAKNAVEEYVYEFRDKLCGPYEKFICEQDHQNFLRLLTETEDWLYEEGEDQAKQAYVDKLEELMKIGTPVKVRFQEAEERPKMFEELGQRLQHYAKIAADFRNKDEKYNHIDESEMKKVEKSVNEVMEWMNNVMNAQAKKSLDQDPVVRAQEIKTKIKFS

SEQ ID NO: 2594 - protein, 748 aa, Artificial Sequence
  Synthetic polypeptide
MSVVGLDVGSQSCYIAVARAGGIETIANEFSDRCTPSVISFGSKNRTIGVAAKNQQITHANNTVSNFKRFHGRAFNDPFIQKEKENLSYDLVPLKNGGVGIKVMYMGEEHLFSVEQITAMLLTKLKETAENSLKKPVTDCVISVPSFFTDAERRSVLDAAQIVGLNCLRLMNDMTAVALNYGIYKQDLPSLDEKPRIVVFVDMGHSAFQVSACAFNKGKLKVLGTAFDPFLGGKNFDEKLVEHFCAEFKTKYKLDAKSKIRALLRLYQECEKLKKLMSSNSTDLPLNIECFMNDKDVSGKMNRSQFEELCAELLQKIEVPLYSLLEQTHLKVEDVSAVEIVGGATRIPAVKERIAKFFGKDISTTLNADEAVARGCALQCAILSPAFKVREFSVTDAVPFPISLIWNHDSEDTEGVHEVFSRNHAAPFSKVLTFLRRGPFELEAFYSDPQGVPYPEAKIGRFVVQNVSAQKDGEKSRVKVKVRVNTHGIFTISTASMVEKVPTEENEMSSEADMECLNQRPPENPDTDANEKKVDQPPEAKKPKIKVVNVELPIEANLVWQLGKDLLNMYIETEGKMIMQDKLEKERNDAKNAVEEYVYEFRDKLCGPYEKFICEQDHQNFLRLLTETEDWLYEEGEDQAKQAYVDKLEELMKIGTPVKVRFQEAEERPKMFEELGQRLQHYAKIAADFRNKDEKYNHIDESEMKKVEKSVNEVMEWMNNVMNAQAKKSLDQDPVVRAQEIKTKIKFS

SEQ ID NO: 2595 - protein, 794 aa, Artificial Sequence
  Synthetic polypeptide
MATAAVLRGPAAHWVESFQKAREEGSGSGTWRGRWRRRSVISFGSKNRTIGVAAKNQQITHANNTVSNFKRFHGRAFNDPFIQKEKENLSYDLVPLKNGGVGIKVMYMGEEHLFSVEQITAMLLTKLKETAENSLKKPVTDCVISVPSFFTDAERRSVLDAAQIVGLNCLRLMNDMTAVALNYGIYKQDLPSLDEKPRIVVFVDMGHSAFQVSACAFNKGKLKVLGTAFDPFLGGKNFDEKLVEHFCAEFKTKYKLDAKSKIRALLRLYQECEKLKKLMSSNSTDLPLNIECFMNDKDVSGKMNRSQFEELCAELLQKIEVPLYSLLEQTHLKVEDVSAVEIVGGATRIPAVKERIAKFFGKDISTTLNADEAVARGCALQCAILSPAFKVREFSVTDAVPFPISLIWNHDSEDTEGVHEVFSRNHAAPFSKVLTFLRRGPFELEAFYSDPQGVPYPEAKIGRFVVQNVSAQKDGEKSRVKVKVRVNTHGIFTISTASMVEKVPTEENEMSSEADMECLNQRPPENPDTDKNVQQDNSEAGTQPQVQTDAQQTSQSPPSPELTSEENKIPDADKANEKKVDQPPEAKKPKIKVVNVELPIEANLVWQLGKDLLNMYIETEGKMIMQDKLEKERNDAKNAVEEYVYEFRDKLCGPYEKFICEQDHQNFLRLLTETEDWLYEEGEDQAKQAYVDKLEELMKIGTPVKVRFQEAEERPKMFEELGQRLQHYAKIAADFRNKDEKYNHIDESEMKKVEKSVNEVMEWMNNVMNAQAKKSLDQDPVVRAQEIKTKIKFS

SEQ ID NO: 2596 - protein, 611 aa, Artificial Sequence
  Synthetic polypeptide
MYMGEEHLFSVEQITAMLLTKLKETAENSLKKPVTDCVISVLGTAFDPFLGGKNFDEKLVEHFCAEFKTKYKLDAKSKIRALLRLYQECEKLKKLMSSNSTDLPLNIECFMNDKDVSGKMNRSQFEELCAELLQKIEVPLYSLLEQTHLKVEDVSAVEIVGGATRIPAVKERIAKFFGKDISTTLNADEAVARGCALQCAILSPAFKVREFSVTDAVPFPISLIWNHDSEDTEGVHEVFSRNHAAPFSKVLTFLRRGPFELEAFYSDPQGVPYPEAKIGRFVVQNVSAQKDGEKSRVKVKVRVNTHGIFTISTASMVEKVPTEENEMSSEADMECLNQRPPENPDTDKNVQQDNSEAGTQPQVQTDAQQTSQSPPSPELTSEENKIPDADKANEKKVDQPPEAKKPKIKVVNVELPIEANLVWQLGKDLLNMYIETEGKMIMQDKLEKERNDAKNAVEEYVYEFRDKLCGPYEKFICEQDHQNFLRLLTETEDWLYEEGEDQAKQAYVDKLEELMKIGTPVKVRFQEAEERPKMFEELGQRLQHYAKIAADFRNKDEKYNHIDESEMKKVEKSVNEVMEWMNNVMNAQAKKSLDQDPVVRAQEIKTKIKFS

SEQ ID NO: 2597 - protein, 120 aa, Artificial Sequence
  Synthetic polypeptide
MFSQVPRTPASGCYYLNSMTPEGQEMYLRFDQTTRRSPYRMSRILARHQLVTKIQQEIEAKEACDWLRAAGFPQYAQLYEDSQFPINIVAVKNDHDFLEKDLVEPLCSLGYVFISSVKMD

SEQ ID NO: 2598 - protein, 112 aa, Artificial Sequence
  Synthetic polypeptide
MLEPSSVLHANVNQAPLWCLVLRWCRECKDTVCGGKQKSRVNHTFQRREIEAKEACDWLRAAGFPQYAQLYEDSQFPINIVAVKNDHDFLEKDLVEPLCSLGYVFISSVKMD

SEQ ID NO: 2599 - protein, 105 aa, Artificial Sequence
  Synthetic polypeptide
MTSKRKPCQTQLRRSISEQLRDSTARAWDLLWKNVRERRLAEIEAKEACDWLRAAGFPQYAQLYEDSQFPINIVAVKNDHDFLEKDLVEPLCSLGYVFISSVKMD

SEQ ID NO: 2600 - protein, 71 aa, Artificial Sequence
  Synthetic polypeptide
MFSQVPRTPASGCYYLNSMTPEGQEMYLRFDQTTRRSPYRMSRILARHQLVTKIQQEVEKILKWMWDLKGS

SEQ ID NO: 2601 - protein, 72 aa, Artificial Sequence
  Synthetic polypeptide
MSLWVDKYRPCSLGRLDYHKEQAAQLRNLQASRKNSSEIIIRQLPHPLGGLTLWWVFMLALRVSLAGSNTDT

SEQ ID NO: 2602 - protein, 71 aa, Artificial Sequence
  Synthetic polypeptide
MSLWVDKYRPCSLGRLDYHKEQAAQLRNLASRKNSSEIIIRQLPHPLGGLTLWWVFMLALRVSLAGSNTDT

SEQ ID NO: 2603 - protein, 336 aa, Artificial Sequence
  Synthetic polypeptide
MSLWVDKYRPCSLGRLDYHKEQAAQLRNLVQCGDFPHLLVYGPSGAGKKTRIMCILRELYGVGVEKLRIEHQTITTPSKKKIEISTIASNYHLEVNPSDAGNSDRVVIQEMLKTVAQSQQLETNSQRDFKVVLLTEVDKLTKDAQHALRRTMEKYMSTCRLILCCNSTSKVIPPIRSRCLAVRVPAPSIEDICHVLSTVCKKEGLNLPSQLAHRLAEKSCRNLRKALLMCEACRVQQYPFTADQEIPETDWEVYLRETANAIVSQQTPQRLLEVRGRLYELLTHCIPPEIIMKARTQCSGAILEAETGPSPDTKPTGTLILDFPASGTVRINFCSL

SEQ ID NO: 2604 - protein, 2409 aa, Artificial Sequence
  Synthetic polypeptide
MASEKPGPGPGLEPQPVGLIAVGAAGGGGGGSGGGGTGGSGMGELRGASGSGSVMLPAGMINPSVPIRNIRMKFAVLIGLIQVGEVSNRDIVETVLNLLVGGEFDLEMNFIIQDAESITCMTELLEHCDVTCQAEIWSMFTAILRKSVRNLQTSTEVGLIEQVLLKMSAVDDMIADLLVDMLGVLASYSITVKELKLLFSMLRGESGIWPRHAVKLLSVLNQMPQRHGPDTFFNFPGCSAAAIALPPIAKWPYQNGFTLNTWFRMDPLNNINVDKDKPYLYCFRTSKGVGYSAHFVGNCLIVTSLKSKGKGFQHCVKYDFQPRKWYMISIVHIYNRWRNSEIRCYVNGQLVSYGDMAWHVNTNDSYDKCFLGSSETADANRVFCGQLGAVYVFSEALNPAQIFAIHQLGPGYKSTFKFKSESDIHLAEHHKQVLYDGKLASSIAFTYNAKATDAQLCLESSPKENASIFVHSPHALMLQDVKAIVTHSIHSAIHSIGGIQVLFPLFAQLDNRQLNDSQVETTVCATLLAFLVELLKSSVAMQEQMLGGKGFLVIGYLLEKSSRVHITRAVLEQFLSFAKYLDGLSHGAPLLKQLCDHILFNPAIWIHTPAKVQLSLYTYLSAEFIGTATIYTTIRRVGTVLQLMHTLKYYYWVINPADSSGITPKGLDGPRPSQKEIISLRAFMLLFLKQLILKDRGVKEDELQSILNYLLTMHEDENIHDVLQLLVALMSEHPASMIPAFDQRNGIRVIYKLLASKSESIWVQALKVLGYFLKHLGHKRKVEIMHTHSLFTLLGERLMLHTNTVTVTTYNTLYEILTEQVCTQVVHKPHPEPDSTVKIQNPMILKVVATLLKNSTPSAELMEVRRLFLSDMIKLFSNSRENRRCLLQCSVWQDWMFSLGYINPKNSEEQKITEMVYNIFRILLYHAIKYEWGGWRVWVDTLSIAHSKVTYEAHKEYLAKMYEEYQRQEEENIKKGKKGNVSTISGLSSQTTGAKGGMEIREIEDLSQSQSPESETDYPVSTDTRDLLMSTKVSDDILGNSDRPGSGVHVEVHDLLVDIKAEKVEATEVKLDDMDLSPETLVGGENGALVEVESLLDNVYSAAVEKLQNNVHGSVGIIKKNEEKDNGPLITLADEKEDLPNSSTSFLFDKIPKQEEKLLPELSSNHIIPNIQDTQVHLGVSDDLGLLAHMTGSVDLTCTSSIIEEKEFKIHTTSDGMSSISERDLASSTKGLEYAEMTATTLETESSSSKIVPNIDAGSIISDTERSDDGKESGKEIRKIQTTTTTQAVQGRSITQQDRDLRVDLGFRGMPMTEEQRRQFSPGPRTTMFRIPEFKWSPMHQRLLTDLLFALETDVHVWRSHSTKSVMDFVNSNENIIFVHNTIHLISQMVDNIIIACGGILPLLSAATSPTGSKTELENIEVTQGMSAETAVTFLSRLMAMVDVLVFASSLNFSEIEAEKNMSSGGLMRQCLRLVCCVAVRNCLECRQRQRDRGNKSSHGSSKPQEVPQSVTATAASKTPLENVPGNLSPIKDPDRLLQDVDINRLRAVVFRDVDDSKQAQFLALAVVYFISVLMVSKYRDILEPQRETTRTGSQPGRNIRQEINSPTSTVVVIPSIPHPSLNHGFLAKLIPEQSFGHSFYKETPAAFPDTIKEKETPTPGEDIQVESSIPHTDSGIGEEQVASILNGAELETSTGPDAMSELLSTLSSEVKKSQESLTENPSETLKPATSISSISQTKGINVKEILKSLVAAPVEIAECGPEPIPYPDPALKRETQAILPMQFHSFDRSVVVPVKKPPPGSLAVTTVGATTAGSGLPTGSTSNIFAATGATPKSMINTTGAVDSGSSSSSSSSSFVNGATSKNLPAVQTVAPMPEDSAENMSITAKLERALEKVAPLLREIFVDFAPFLSRTLLGSHGQELLIEGLVCMKSSTSVVELVMLLCSQEWQNSIQKNAGLAFIELINEGRLLCHAMKDHIVRVANEAEFILNRQRAEDVHKHAEFESQCAQYAADRREEEKMCDHLISAAKHRDHVTANQLKQKILNILTNKHGAWGAVSHSQLHDFWRLDYWEDDLRRRRRFVRNAFGSTHAEALLKAAIEYGTEEDVVKSKKTFRSQAIVNQNAETELMLEGDDDAVSLLQEKEIDNLAGPVVLSTPAQLIAPVVVAKGTLSITTTEIYFEVDEDDSAFKKIDTKVLAYTEGLHGKWMFSEIRAVFSRRYLLQNTALEVFMANRTSVMFNFPDQATVKKVVYSLPRVGVGTSYGLPQARRISLATPRQLYKSSNMTQRWQRREISNFEYLMFLNTIAGRTYNDLNQYPVFPWVLTNYESEELDLTLPGNFRDLSKPIGALNPKRAVFYAERYETWEDDQSPPYHYNTHYSTATSTLSWLVRILCPRHYLLPINEICFGF

SEQ ID NO: 2605 - protein, 2409 aa, Artificial Sequence
  Synthetic polypeptide
MASEKPGPGPGLEPQPVGLIAVGAAGGGGGGSGGGGTGGSGMGELRGASGSGSVMLPAGMINPSVPIRNIRMKFAVLIGLIQVGEVSNRDIVETVLNLLVGGEFDLEMNFIIQDAESITCMTELLEHCDVTCQAEIWSMFTAILRKSVRNLQTSTEVGLIEQVLLKMSAVDDMIADLLVDMLGVLASYSITVKELKLLFSMLRGESGIWPRHAVKLLSVLNQMPQRHGPDTFFNFPGCSAAAIALPPIAKWPYQNGFTLNTWFRMDPLNNINVDKDKPYLYCFRTSKGVGYSAHFVGNCLIVTSLKSKGKGFQHCVKYDFQPRKWYMISIVHIYNRWRNSEIRCYVNGQLVSYGDMAWHVNTNDSYDKCFLGSSETADANRVFCGQLGAVYVFSEALNPAQIFAIHQLGPGYKSTFKFKSESDIHLAEHHKQVLYDGKLASSIAFTYNAKATDAQLCLESSPKENASIFVHSPHALMLQDVKAIVTHSIHSAIHSIGGIQVLFPLFAQLDNRQLNDSQVETTVCATLLAFLVELLKSSVAMQEQMLGGKGFLVIGYLLEKSSRVHITRAVLEQFLSFAKYLDGLSHGAPLLKQLCDHILFNPAIWIHTPAKVQLSLYTYLSAEFIGTATIYTTIRRVGTVLQLMHTLKYYYWVINPADSSGITPKGLDGPRPSQKEIISLRAFMLLFLKQLILKDRGVKEDELQSILNYLLTMHEDENIHDVLQLLVALMSEHPASMIPAFDQRNGIRVIYKLLASKSESIWVQALKVLGYFLKHLGHKRKVEIMHTHSLFTLLGERLMLHTNTVTVTTYNTLYEILTEQVCTQVVHKPHPEPDSTVKIQNPMILKVVATLLKNSTPSAELMEVRRLFLSDMIKLFSNSRENRRCLLQCSVWQDWMFSLGYINPKNSEEQKITEMVYNIFRILLYHAIKYEWGGWRVWVDTLSIAHSKVTYEAHKEYLAKMYEEYQRQEEENIKKGKKGNVSTISGLSSQTTGAKGGMEIREIEDLSQSQSPESETDYPVSTDTRDLLMSTKVSDDILGNSDRPGSGVHVEVHDLLVDIKAEKVEATEVKLDDMDLSPETLVGGENGALVEVESLLDNVYSAAVEKLQNNVHGSVGIIKKNEEKDNGPLITLADEKEDLPNSSTSFLFDKIPKQEEKLLPELSSNHIIPNIQDTQVHLGVSDDLGLLAHMTGSVDLTCTSSIIEEKEFKIHTTSDGMSSISERDLASSTKGLEYAEMTATTLETESSSSKIVPNIDAGSIISDTERSDDGKESGKEIRKIQTTTTTQAVQGRSITQQDRDLRVDLGFRGMPMTEEQRRQFSPGPRTTMFRIPEFKWSPMHQRLLTDLLFALETDVHVWRSHSTKSVMDFVNSNENIIFVHNTIHLISQMVDNIIIACGGILPLLSAATSPTVSKTELENIEVTQGMSAETAVTFLSRLMAMVDVLVFASSLNFSEIEAEKNMSSGGLMRQCLRLVCCVAVRNCLECRQRQRDRGNKSSHGSSKPQEVPQSVTATAASKTPLENVPGNLSPIKDPDRLLQDVDINRLRAVVFRDVDDSKQAQFLALAVVYFISVLMVSKYRDILEPQRETTRTGSQPGRNIRQEINSPTSTVVVIPSIPHPSLNHGFLAKLIPEQSFGHSFYKETPAAFPDTIKEKETPTPGEDIQVESSIPHTDSGIGEEQVASILNGAELETSTGPDAMSELLSTLSSEVKKSQESLTENPSETLKPATSISSISQTKGINVKEILKSLVAAPVEIAECGPEPIPYPDPALKRETQAILPMQFHSFDRSVVVPVKKPPPGSLAVTTVGATTAGSGLPTGSTSNIFAATGATPKSMINTTGAVDSGSSSSSSSSSFVNGATSKNLPAVQTVAPMPEDSAENMSITAKLERALEKVAPLLREIFVDFAPFLSRTLLGSHGQELLIEGLVCMKSSTSVVELVMLLCSQEWQNSIQKNAGLAFIELINEGRLLCHAMKDHIVRVANEAEFILNRQRAEDVHKHAEFESQCAQYAADRREEEKMCDHLISAAKHRDHVTANQLKQKILNILTNKHGAWGAVSHSQLHDFWRLDYWEDDLRRRRRFVRNAFGSTHAEALLKAAIEYGTEEDVVKSKKTFRSQAIVNQNAETELMLEGDDDAVSLLQEKEIDNLAGPVVLSTPAQLIAPVVVAKGTLSITTTEIYFEVDEDDSAFKKIDTKVLAYTEGLHGKWMFSEIRAVFSRRYLLQNTALEVFMANRTSVMFNFPDQATVKKVVYSLPRVGVGTSYGLPQARRISLATPRQLYKSSNMTQRWQRREISNFEYLMFLNTIAGRTYNDLNQYPVFPWVLTNYESEELDLTLPGNFRDLSKPIGALNPKRAVFYAERYETWEDDQSPPYHYNTHYSTATSTLSWLVRILCPRHYLLPINEICFGF

SEQ ID NO: 2606 - protein, 2406 aa, Artificial Sequence
  Synthetic polypeptide
MASEKPGPGPGLEPQPVGLIAVGAAGGGGGGSGGGGTGGSGMGELRGASGSGSVMLPAGMINPSVPIRNIRMKFAVLIGLIQVGEVSNRDIVETVLNLLVGGEFDLEMNFIIQDAESITCMTELLEHCDVTCQAEIWSMFTAILRKSVRNLQTSTEVGLIEQVLLKMSAVDDMIADLLVDMLGVLASYSITVKELKLLFSMLRGESGIWPRHAVKLLSVLNQMPQRHGPDTFFNFPGCSAAAIALPPIAKWPYQNGFTLNTWFRMDPLNNINVDKDKPYLYCFRTSKGVGYSAHFVGNCLIVTSLKSKGKGFQHCVKYDFQPRKWYMISIVHIYNRWRNSEIRCYVNGQLVSYGDMAWHVNTNDSYDKCFLGSSETADANRVFCGQLGAVYVFSEALNPAQIFAIHQLGPGYKSTFKFKSESDIHLAEHHKQVLYDGKLASSIAFTYNAKATDAQLCLESSPKENASIFVHSPHALMLQDVKAIVTHSIHSAIHSIGGIQVLFPLFAQLDNRQLNDSQVETTVCATLLAFLVELLKSSVAMQEQMLGGKGFLVIGYLLEKSSRVHITRAVLEQFLSFAKYLDGLSHGAPLLKQLCDHILFNPAIWIHTPAKVQLSLYTYLSAEFIGTATIYTTIRRVGTVLQLMHTLKYYYWVINPADSSGITPKGLDGPRPSQKEIISLRAFMLLFLKQLILKDRGVKEDELQSILNYLLTMHEDENIHDVLQLLVALMSEHPASMIPAFDQRNGIRVIYKLLASKSESIWVQALKVLGYFLKHLGHKRKVEIMHTHSLFTLLGERLMLHTNTVTVTTYNTLYEILTEQVCTQVVHKPHPEPDSTVKIQNPMILKVVATLLKNSTPSAELMEVRRLFLSDMIKLFSNSRENRRCLLQCSVWQDWMFSLGYINPKNSEEQKITEMVYNIFRILLYHAIKYEWGGWRVWVDTLSIAHSKVTYEAHKEYLAKMYEEYQRQEEENIKKGKKGNVSTISGLSSQTTGAKGGMEIREIEDLSQSQSPESETDYPVSTDTRDLLMSTKVSDDILGNSDRPGSGVHVEVHDLLVDIKAEKVEATEVKLDDMDLSPETLVGGENGALVEVESLLDNVYSAAVEKLQNNVHGSVGIIKKNEEKDNGPLITLADEKEDLPNSSTSFLFDKIPKQEEKLLPELSSNHIIPNIQDTQVHLGVSDDLGLLAHMTGSVDLTCTSSIIEEKEFKIHTTSDGMSSISERDLASSTKGLEYAEMTATTLETESSSSKIVPNIDAGSIISDTERSDDGKESGKEIRKIQTTTTTQAVQGRSITQQDRDLRVDLGFRGMPMTEEQRRQFSPGPRTTMFRIPEFKWSPMHQRLLTDLLFALETDVHVWRSHSTKSVMDFVNSNENIIFVHNTIHLISQMVDNIIIACGGILPLLSAATSPTTELENIEVTQGMSAETAVTFLSRLMAMVDVLVFASSLNFSEIEAEKNMSSGGLMRQCLRLVCCVAVRNCLECRQRQRDRGNKSSHGSSKPQEVPQSVTATAASKTPLENVPGNLSPIKDPDRLLQDVDINRLRAVVFRDVDDSKQAQFLALAVVYFISVLMVSKYRDILEPQRETTRTGSQPGRNIRQEINSPTSTVVVIPSIPHPSLNHGFLAKLIPEQSFGHSFYKETPAAFPDTIKEKETPTPGEDIQVESSIPHTDSGIGEEQVASILNGAELETSTGPDAMSELLSTLSSEVKKSQESLTENPSETLKPATSISSISQTKGINVKEILKSLVAAPVEIAECGPEPIPYPDPALKRETQAILPMQFHSFDRSVVVPVKKPPPGSLAVTTVGATTAGSGLPTGSTSNIFAATGATPKSMINTTGAVDSGSSSSSSSSSFVNGATSKNLPAVQTVAPMPEDSAENMSITAKLERALEKVAPLLREIFVDFAPFLSRTLLGSHGQELLIEGLVCMKSSTSVVELVMLLCSQEWQNSIQKNAGLAFIELINEGRLLCHAMKDHIVRVANEAEFILNRQRAEDVHKHAEFESQCAQYAADRREEEKMCDHLISAAKHRDHVTANQLKQKILNILTNKHGAWGAVSHSQLHDFWRLDYWEDDLRRRRRFVRNAFGSTHAEALLKAAIEYGTEEDVVKSKKTFRSQAIVNQNAETELMLEGDDDAVSLLQEKEIDNLAGPVVLSTPAQLIAPVVVAKGTLSITTTEIYFEVDEDDSAFKKIDTKVLAYTEGLHGKWMFSEIRAVFSRRYLLQNTALEVFMANRTSVMFNFPDQATVKKVVYSLPRVGVGTSYGLPQARRISLATPRQLYKSSNMTQRWQRREISNFEYLMFLNTIAGRTYNDLNQYPVFPWVLTNYESEELDLTLPGNFRDLSKPIGALNPKRAVFYAERYETWEDDQSPPYHYNTHYSTATSTLSWLVRILCPRHYLLPINEICFGF

SEQ ID NO: 2607 - protein, 202 aa, Artificial Sequence
  Synthetic polypeptide
MFSEIRAVFSRRYLLQNTALEVFMANRTSVMFNFPDQATVKKVVYSLPRVGVGTSYGLPQARRISLATPRQLYKSSNMTQRWQRREISNFEYLMFLNTIAGRTYNDLNQYPVFPWVLTNYESEELDLTLPGNFRDLSKPIGALNPKRAVFYAERYETWEDDQSPPYHYNTHYSTATSTLSWLVRILCPRHYLLPINEICFGF

SEQ ID NO: 2608 - protein, 450 aa, Artificial Sequence
  Synthetic polypeptide
MEQEPQNGEPAEIKIIREAYKKAFLFVNKGLNTDELGQKEEAKNYYKQGIGHLLRGISISSKESEHTGPGWESARQMQQKMKETLQNVRTRLEILEKGLATSLQNDLQEVPKLYPEFPPKDMCEKLPEPQSFSSAPQHAEVNGNTSTPSAGAVAAPASLSLPSQSCPAEAPPAYTPQAAEGHYTVSYGTDSGEFSSVGEEFYRNHSQPPPLETLGLDADELILIPNGVQIFFVNPAGEVSAPSYPGYLRIVRFLDNSLDTVLNRPPGFLQVCDWLYPLVPDRSPVLKCTAGAYMFPDTMLQAAGCFVGVVLSSELPEDDRELFEDLLRQMSDLRLQANWNRAEEENEFQIPGRTRPSSDQLKEASGTDVKQLDQGNKDVRHKGKRGKRAKDTSSEEVNLSHIVPCEPVPEEKPKELPEWSEKVAHNILSVRPADQQHHIVLSGILRNAEF

SEQ ID NO: 2609 - protein, 112 aa, Artificial Sequence
  Synthetic polypeptide
MAAGFKTVEPLEYYRRFLKENCRPDGRELGEFRTTTVNIGSISTADGSALVKLGNTTVICGVKAEFAAPSTDAPDKGYVGFWEAKTAGSLQPSSSRPAWETKETPYLQKKSS

SEQ ID NO: 2610 - protein, 57 aa, Artificial Sequence
  Synthetic polypeptide
MIRAFPTTTPRSLHLFTSSTFLARALPGAFPTGACEERLSVPESTPFTAVLKFAAEE

SEQ ID NO: 2611 - protein, 39 aa, Artificial Sequence
  Synthetic polypeptide
MSKVSFKITLTSDPRLPYKVLSVPESTPFTAVLKFAAEE

SEQ ID NO: 2612 - protein, 6 aa, Artificial Sequence
  Synthetic polypeptide
QVEGFL

SEQ ID NO: 2613 - protein, 303 aa, Artificial Sequence
  Synthetic polypeptide
MPNVLLPPKESNLFKRILKCYEQKQYKNGLKFCKMILSNPKFAEHGETLAMKGLTLNCLGKKEEAYEFVRKGLRNDVKSHVCWHVYGLLQRSDKKYDEAIKCYRNALKLDKDNLQILRDLSLLQIQMRDLEGYRETRYQLLQLRPTQRASWIGYAIAYHLLKDYDMALKLLEEFRQTQQVPPNKIDYEYSELILYQNQVMREADLLQESLEHIEMYEKQICDKLLVEEIKGEILLKLGRLKEASEVFKNLIDRNAENWCYYEGLEKALQISTLEERLQIYEEISKQHPKAITPRRLPLTLVPG

SEQ ID NO: 2614 - protein, 1544 aa, Artificial Sequence
  Synthetic polypeptide
MQSRLLLLGAPGGHGGPASRRMRLLLRQVVQRRPGGDRQRPEVRLLHAGSGADTGDTVNIGDVSYKLKIPKNPELVPQNYISDSLAQSVVQHLRWIMQKDLLGQDVFLIGPPGPLRRSIAMQYLELTKREVEYIALSRDTTETDLKQRREIRAGTAFYIDQCAVRAATEGRTLILEGLEKAERNVLPVLNNLLENREMQLEDGRFLMSAERYDKLLRDHTKKELDSWKIVRVSENFRVIALGLPVPRYSGNPLDPPLRSRFQARDIYYLPFKDQLKLLYSIGANVSAEKVSQLLSFATTLCSQESSTLGLPDFPLDSLAAAVQILDSFPMMPIKHAIQWLYPYSILLGHEGKMAVEGVLKRFELQDSGSSLLPKEIVKVEKMMENHVSQASVTIRIADKEVTIKVPAGTRLLSQPCASDRFIQTLSHKQLQAEMMQSHMVKDICLIGGKGCGKTVIAKNFADTLGYNIEPIMLYQDMTARDLLQQRYTLPNGDTAWRSSPLVNAALEGKLVLLDGIHRVNAGTLAVLQRLIHDRELSLYDGSRLLREDRYMRLKEELQLSDEQLQKRSIFPIHPSFRIIALAEPPVIGSTAHQWLGPEFLTMFFFHYMKPLVKSEEIQVIKEKVPNVPQEALDKLLSFTHKLRETQDPTAQSLAASLSTRQLLRISRRLSQYPNENLHSAVTKACLSRFLPSLARSALEKNLADATIEINTDDNLEPELKDYKCEVTSGTLRIGAVSAPIYNAHEKMKVPDVLFYDNIQHVIVMEDMLKDFLLGEHLLLVGNQGVGKNKIVDRFLHLLNRPREYIQLHRDTTVQTLTLQPSVKDGLIVYEDSPLVKAVKLGHILVVDEADKAPTNVTCILKTLVENGEMILADGRRIVANSANVNGRENVVVIHPDFRMIVLANRPGFPFLGNDFFGTLGDIFSCHAVDNPKPHSELEMLRQYGPNVPEPILQKLVAAFGELRSLADQGIINYPYSTREVVNIVKHLQKFPTEGLSSVVRNVFDFDSYNNDMREILINTLHKYGIPIGAKPTSVQLAKELTLPEQTFMGYWTIGQARSGMQKLLCPVETHHIDIKGPALINIQEYPIERHEERSLNFTEECASWRIPLDEINIICDIATSHENEQNTLYVVTCNPASLYFMNMTGKSGFFVDFFDIFPRTANGVWHPFVTVAPLGSPLKGQVVLHEQQSNVILLLDTTGRALHRLILPSEKFTSKKPFWWNKEEAETYKMCKEFSHKNWLVFYKEKGNSLTVLDVLEGRTHTISLPINLKTVFLVAEDKWLLVESKTNQKYLLTKPAHIESEGSGVCQLYVLKEEPPSTGFGVTQETEFSIPHKISSDQLSSEHLSSAVEQKIASPNRILSDEKNYATIVVGFPDLMSPSEVYSWKRPSSLHKRSGTDTSFYRGKKKRGTPKQSNCVTLLDTNQVVRILPPGEVPLKDIYPKDVTPPQTSGYIEVTDLQSKKLRYIPIPRSESLSPYTTWLSTISDTDALLAEWDKSGVVTVDMGGHIRLWETGLERLQRSLMEWRNMIGQDDRNMQNWPTEES

SEQ ID NO: 2615 - protein, 408 aa, Artificial Sequence
  Synthetic polypeptide
MQSRLLLLGAPGGHGGPASRRMRLLLRQVVQRRPGGDRQRPEVRLLHAGSGADTGDTVNIGDVSYKLKIPKNPELVPQNYISDSLAQSVVQHLRWIMQKDLLGQDVFLIGPPGPLRRSIAMQYLELTKREVEYIALSRDTTETDLKQRREIRAGTAFYIDQCAVRAATEGRTLILEGLEKAERNVLPVLNNLLENREMQLEDGRFLMSAERYDKLLRDHTKKELDSWKIVRVSENFRVIALGLPVPRYSGNPLDPPLRSRFQARDIYYLPFKDQLKLLYSIGANVSAEKVSQLLSFATTLCSQESSTLGLPDFPLDSLAAAVQILDSFPMMPIKHAIQWLYPYSILLGHEGKMAVEGVLKLPALASQSAEIAASAWPPPRLGSEERLCLAARRLGREEPLCLAAQSGK

SEQ ID NO: 2616 - protein, 377 aa, Artificial Sequence
  Synthetic polypeptide
MQSRLLLLGAPGGHGGPASRRMRLLLRQVVQRRPGGDRQRPEVRLLHAGSGADTGDTVNIGDVSYKLKIPKNPELVPQNYISDSLAQSVVQHLRWIMQKDLLGQDVFLIGPPGPLRRSIAMQYLELTKREVEYIALSRDTTETDLKQRREIRAGTAFYIDQCAVRAATEGRTLILEGLEKAERNVLPVLNNLLENREMQLEDGRFLMSAERYDKLLRDHTKKELDSWKIVRVSENFRVIALGLPVPRYSGNPLDPPLRSRFQARDIYYLPFKDQLKLLYSIGANVSAEKVSQLLSFATTLCSQESSTLGLPDFPLDSLAAAVQILDSFPMMPIKHAIQWLYPYSILLGHEGKMAVEGVLKPKLDCTAAISAHCNLPA

SEQ ID NO: 2617 - protein, 84 aa, Artificial Sequence
  Synthetic polypeptide
MQSRLLLLGAPGGHGGPASRRMRLLLRQVVQRRPGGDRQRPEVRLLHAGSGADTGDTVNIGDVSYKLKIPKNPELVPQNYNGTV

SEQ ID NO: 2618 - protein, 468 aa, Artificial Sequence
  Synthetic polypeptide
MAGAGGQHHPPGAAGGAAAGAGAAVTSAAASAGPGEDSSDSEAEQEGPQKLIRKVSTSGQIRTKTSIKEGQLLKQTSSFQRWKKRYFKLRGRTLYYAKDSKSLIFDEVDLSDASVAEASTKNANNSFTIITPFRRLMLCAENRKEMEDWISSLKSVQTREPYEVAQFNVEHFSGMHNWYACSHARPTFCNVCRESLSGVTSHGLSCEVCKFKAHKRCAVRATNNCKWTTLASIGKDIIEDEDGVAMPHQWLEGNLPVSAKCAVCDKTCGSVLRLQDWKCLWCKTMVHTACKDLYHPICPLGQCKVSIIPPIALNSTDSDGFCRATFSFCVSPLLVFVNSKSGDNQGVKFLRRFKQLLNPAQVFDLMNGGPHLGLRLFQKFDNFRILVCGGDGSVGWVLSEIDKLNLNKQCQLGVLPLGTGNDLARVLGWGGSYDDDTQLPQILEKLERASTKMLDRTEKNGKVRMHCT

SEQ ID NO: 2619 - protein, 332 aa, Artificial Sequence
  Synthetic polypeptide
MLCAENRKEMEDWISSLKSVQTREPYEVAQFNVEHFSGMHNWYACSHARPTFCNVCRESLSGVTSHGLSCEVCKFKAHKRCAVRATNNCKWTTLASIGKDIIEDEDGVAMPHQWLEGNLPVSAKCAVCDKTCGSVLRLQDWKCLWCKTMVHTACKDLYHPICPLGQCKVSIIPPIALNSTDSDGFCRATFSFCVSPLLVFVNSKSGDNQGVKFLRRFKQLLNPAQVFDLMNGGPHLGLRLFQKFDNFRILVCGGDGSVGWVLSEIDKLNLNKQCQLGVLPLGTGNDLARVLGWGGSYDDDTQLPQILEKLERASTKMLDRTEKNGKVRMHCT

SEQ ID NO: 2620 - protein, 223 aa, Artificial Sequence
  Synthetic polypeptide
MWNISQGCTTGTPAPTPDPPSVTCAERVFLESPPMACPAKVHTACKDLYHPICPLGQCKVSIIPPIALNSTDSDGFCRATFSFCVSPLLVFVNSKSGDNQGVKFLRRFKQLLNPAQVFDLMNGGPHLGLRLFQKFDNFRILVCGGDGSVGWVLSEIDKLNLNKQCQLGVLPLGTGNDLARVLGWGGSYDDDTQLPQILEKLERASTKMLDRTEKNGKVRMHCT

SEQ ID NO: 2621 - protein, 1081 aa, Artificial Sequence
  Synthetic polypeptide
MAGAGGQHHPPGAAGGAAAGAGAAVTSAAASAGPGEDSSDSEAEQEGPQKLIRKVSTSGQIRTKTSIKEGQLLKQTSSFQRWKKRYFKLRGRTLYYAKDSKSLIFDEVDLSDASVAEASTKNANNSFTIITPFRRLMLCAENRKEMEDWISSLKSVQTREPYEVAQFNVEHFSGMHNWYACSHARPTFCNVCRESLSGVTSHGLSCEVCKFKAHKRCAVRATNNCKWTTLASIGKDIIEDEDGVAMPHQWLEGNLPVSAKCAVCDKTCGSVLRLQDWKCLWCKTMVHTACKDLYHPICPLGQCKVSIIPPIALNSTDSDGFCRATFSFCVSPLLVFVNSKSGDNQGVKFLRRFKQLLNPAQVFDLMNGGPHLGLRLFQKFDNFRILVCGGDGSVGWVLSEIDKLNLNKQCQLGVLPLGTGNDLARVLGWGGSYDDDTQLPQILEKLERASTKMLDRWSIMTYELKLPPKASLLPGPPEASEEFYMTIYEDSVATHLTKILNSDEHAVVISSAKTLCETVKDFVAKVEKTYDKTLENAVVADAVASKCSVLNEKLEQLLQALHTDSQAAPVLPGLSPLIVEEDAVESSSEESLGESKEQLGDDVTKPSSQKAVKPREIMLRANSLKKAVRQVIEEAGKVMDDPTVHPCEPANQSSDYDSTETDESKEEAKDDGAKESITVKTAPRSPDARASYGHSQTDSVPGPAVAASKENLPVLNTRIICPGLRAGLAASIAGSSIINKMLLANIDPFGATPFIDPDLDSVDGYSEKCVMNNYFGIGLDAKISLEFNNKREEHPEKCRSRTKNLMWYGVLGTRELLQRSYKNLEQRVQLECDGQYIPLPSLQGIAVLNIPSYAGGTNFWGGTKEDDIFAAPSFDDKILEVVAIFDSMQMAVSRVIKLQHHRIAQCRTVKITIFGDEGVPVQVDGEAWVQPPGIIKIVHKNRAQMLTRDRAFESTLKSWEDKQKCDSGKPVLRTHLYIHHAIDLATEEVSQMQLCSQAAEELITRICDAATIHCLLEQELAHAVNACSHALNKANPRCPESLTRDTATEIAINVKALYNETESLLVGRVPLPGQQNKTLSQ

SEQ ID NO: 2622 - protein, 945 aa, Artificial Sequence
  Synthetic polypeptide
MLCAENRKEMEDWISSLKSVQTREPYEVAQFNVEHFSGMHNWYACSHARPTFCNVCRESLSGVTSHGLSCEVCKFKAHKRCAVRATNNCKWTTLASIGKDIIEDEDGVAMPHQWLEGNLPVSAKCAVCDKTCGSVLRLQDWKCLWCKTMVHTACKDLYHPICPLGQCKVSIIPPIALNSTDSDGFCRATFSFCVSPLLVFVNSKSGDNQGVKFLRRFKQLLNPAQVFDLMNGGPHLGLRLFQKFDNFRILVCGGDGSVGWVLSEIDKLNLNKQCQLGVLPLGTGNDLARVLGWGGSYDDDTQLPQILEKLERASTKMLDRWSIMTYELKLPPKASLLPGPPEASEEFYMTIYEDSVATHLTKILNSDEHAVVISSAKTLCETVKDFVAKVEKTYDKTLENAVVADAVASKCSVLNEKLEQLLQALHTDSQAAPVLPGLSPLIVEEDAVESSSEESLGESKEQLGDDVTKPSSQKAVKPREIMLRANSLKKAVRQVIEEAGKVMDDPTVHPCEPANQSSDYDSTETDESKEEAKDDGAKESITVKTAPRSPDARASYGHSQTDSVPGPAVAASKENLPVLNTRIICPGLRAGLAASIAGSSIINKMLLANIDPFGATPFIDPDLDSVDGYSEKCVMNNYFGIGLDAKISLEFNNKREEHPEKCRSRTKNLMWYGVLGTRELLQRSYKNLEQRVQLECDGQYIPLPSLQGIAVLNIPSYAGGTNFWGGTKEDDIFAAPSFDDKILEVVAIFDSMQMAVSRVIKLQHHRIAQCRTVKITIFGDEGVPVQVDGEAWVQPPGIIKIVHKNRAQMLTRDRAFESTLKSWEDKQKCDSGKPVLRTHLYIHHAIDLATEEVSQMQLCSQAAEELITRICDAATIHCLLEQELAHAVNACSHALNKANPRCPESLTRDTATEIAINVKALYNETESLLVGRVPLPGQQNKTLSQ

SEQ ID NO: 2623 - protein, 836 aa, Artificial Sequence
  Synthetic polypeptide
MWNISQGCTTGTPAPTPDPPSVTCAERVFLESPPMACPAKVHTACKDLYHPICPLGQCKVSIIPPIALNSTDSDGFCRATFSFCVSPLLVFVNSKSGDNQGVKFLRRFKQLLNPAQVFDLMNGGPHLGLRLFQKFDNFRILVCGGDGSVGWVLSEIDKLNLNKQCQLGVLPLGTGNDLARVLGWGGSYDDDTQLPQILEKLERASTKMLDRWSIMTYELKLPPKASLLPGPPEASEEFYMTIYEDSVATHLTKILNSDEHAVVISSAKTLCETVKDFVAKVEKTYDKTLENAVVADAVASKCSVLNEKLEQLLQALHTDSQAAPVLPGLSPLIVEEDAVESSSEESLGESKEQLGDDVTKPSSQKAVKPREIMLRANSLKKAVRQVIEEAGKVMDDPTVHPCEPANQSSDYDSTETDESKEEAKDDGAKESITVKTAPRSPDARASYGHSQTDSVPGPAVAASKENLPVLNTRIICPGLRAGLAASIAGSSIINKMLLANIDPFGATPFIDPDLDSVDGYSEKCVMNNYFGIGLDAKISLEFNNKREEHPEKCRSRTKNLMWYGVLGTRELLQRSYKNLEQRVQLECDGQYIPLPSLQGIAVLNIPSYAGGTNFWGGTKEDDIFAAPSFDDKILEVVAIFDSMQMAVSRVIKLQHHRIAQCRTVKITIFGDEGVPVQVDGEAWVQPPGIIKIVHKNRAQMLTRDRAFESTLKSWEDKQKCDSGKPVLRTHLYIHHAIDLATEEVSQMQLCSQAAEELITRICDAATIHCLLEQELAHAVNACSHALNKANPRCPESLTRDTATEIAINVKALYNETESLLVGRVPLPGQQNKTLSQ

SEQ ID NO: 2624 - protein, 197 aa, Artificial Sequence
  Synthetic polypeptide
MNTRNRVVNSGLGASPASRPTRDPQDPSGRQGELSPVEDQREGLEAAPKGPSRESVVHAGQRRTSAYTLIAPNINRRNEIQRIAEQELANLEKWKEQNRAKPVHLVPRRLGGSQSETEVRQKQQLQLMQSKYKQKLKREESVRIKKEAEEAELQKMKAIQREKSNKLEEKKRLQENLRREAFREHQQYGLEPNSQYL

SEQ ID NO: 2625 - protein, 70 aa, Artificial Sequence
  Synthetic polypeptide
MQSKYKQKLKREESVRIKKEAEEAELQKMKAIQREKSNKLEEKKRLQENLRREAFREHQQYGLEPNSQYL

SEQ ID NO: 2626 - protein, 139 aa, Artificial Sequence
  Synthetic polypeptide
MAARGVIAPVGESLRYAEYLQPSAKRPDADVDQQRLVRSLIAVGLGVAALAFAGRYAFRIWKPLEQVITETAKKISTPSFSSYYKGGFEQKMSRREAGLILGVSPSAGKAKIRTAHRRVMILNHPDKERDNLQESAWIH

SEQ ID NO: 2627 - protein, 245 aa, Artificial Sequence
  Synthetic polypeptide
MSDNKERKSQGFPKEDNQDTSSLADAVEKVAKQQQSQASEIEKNKKVLFNLKNELHELEKEIAAISAETKETERQIYQQDSAIENTKLHCDSLETQIKSLHSENVKLKFDIETAQEDFEEHMIKYNAYYAKIKAHKNSLGEVESKWSFMTELHEKRDFVKKLKTMKEELMQDLQNPGGNRITQVQEDITNLKDKIITVKESIIEKTCFLEEEKKTHEKLRKEIEAKRDDPIEACTTHSPSRSIKF

SEQ ID NO: 2628 - protein, 227 aa, Artificial Sequence
  Synthetic polypeptide
MSDNKERKSQGFPKEDNQDTSSLADAVEKVAKQQQSQASEIEKNKKVLFNLKNELHELEKEIAAISAETKETERQIYQQDSAIENTKLHCDSLETQIKSLHSENVKLKFDIETAQEDFEEHMIKYNAYYAKIKAHKNSLGEVESKWSFMTELHEKRDFVKKLKTMKEELMQDLQNPGGNRITQVQEDITNLKDKIITVKESIIEKTCFLEEEKKTHEKLRKEIEGHG

SEQ ID NO: 2629 - protein, 497 aa, Artificial Sequence
  Synthetic polypeptide
MAEAALLLLPEAAAERDAREKLALWDRRPDTTAPLTDRQTDSVLELKAAAENLPVPAELPIEDLCSLTSQSLPIELTSVVPESTEDILLKGFTSLGMEEERIETAQQFFSWFAKLQTQMDQDEGTKYRQMRDYLSGFQEQCDAILNDVNSALQHLESLQKQYLFVSNKTGTLHEACEQLLKEQSELVDLAENIQQKLSYFNELETINTKLNSPTLSVNSDGFIPMLAKLDDCITYISSHPNFKDYPIYLLKFKQCLSKALHLMKTYTVNTLQTLTSQLLKRDPSSVPNADNAFTLFYVKFRAAAPKVRTLIEQIELRSEKIPEYQQLLNDIHQCYLDQRELLLGPSIACTVAELTSQNNRDHCALVRSGCAFMVHVCQDEHQLYNEFFTKPTSKLDELLEKLCVSLYDVFRPLIIHVIHLETLSELCGILKNEVLEDHVQNNAEQLGAFAAGVKQMLEDVQERLVYRTHIYIQTDITGYKPAPGDLAYPDKLVMMEV

SEQ ID NO: 2630 - protein, 216 aa, Artificial Sequence [sequence omitted]

SEQ ID NO: 2631 - protein, 149 aa, Artificial Sequence
  Synthetic polypeptide
MVSNHYFLLCVNLPLREIHTPGPSPSCLGDSLAETTLSEDTTDSVGSASPHGSSEKSSSFSLSSTEVHMVRPGYSHRVSLPTSPGILATSPYPETDSAFFEPSHLTSAADEGAVQVSRRTISSNSFSPEVFVLPVDVEKHLIDGDCQKH

SEQ ID NO: 2632 - protein, 59 aa, Artificial Sequence
  Synthetic polypeptide
MVSNHYFLLCVNLPLREIHTPGAVQVSRRTISSNSFSPEVFVLPVDVEKHLIDGDCQKH

SEQ ID NO: 2633 - protein, 81 aa, Artificial Sequence
  Synthetic polypeptide
MVRPGYSHRVSLPTSPGILATSPYPETDSAFFEPSHLTSAADEGAVQVSRRTISSNSFSPEVFVLPVDVEKHLIDGDCQKH

SEQ ID NO: 2634 - protein, 220 aa, Artificial Sequence
  Synthetic polypeptide
MVSQSTVRQDSPVEPWEGISDHSGIIDGSPRLLNTDHPPCQLDIRLMRHKAVWINPQDVQQQPQDLQSQVPAAGNSGTHFVTDAASPSGPSPSCLGDSLAETTLSEDTTDSVGSASPHGSSEKSSSFSLSSTEVHMVRPGYSHRVSLPTSPGILATSPYPETDSAFFEPSHLTSAADEGAVQVSRRTISSNSFSPEVFVLPVDVEKVSFQHLIDGDCQKH

SEQ ID NO: 2635 - protein, 153 aa, Artificial Sequence
  Synthetic polypeptide
MVSNHYFLLCVNLPLREIHTPGPSPSCLGDSLAETTLSEDTTDSVGSASPHGSSEKSSSFSLSSTEVHMVRPGYSHRVSLPTSPGILATSPYPETDSAFFEPSHLTSAADEGAVQVSRRTISSNSFSPEVFVLPVDVEKVSFQHLIDGDCQKH

SEQ ID NO: 2636 - protein, 63 aa, Artificial Sequence
  Synthetic polypeptide
MVSNHYFLLCVNLPLREIHTPGAVQVSRRTISSNSFSPEVFVLPVDVEKVSFQHLIDGDCQKH

SEQ ID NO: 2637 - protein, 85 aa, Artificial Sequence
  Synthetic polypeptide
MVRPGYSHRVSLPTSPGILATSPYPETDSAFFEPSHLTSAADEGAVQVSRRTISSNSFSPEVFVLPVDVEKVSFQHLIDGDCQKH

SEQ ID NO: 2638 - protein, 663 aa, Artificial Sequence
  Synthetic polypeptide
MATPGSEPQPFVPALSVATLHPLHHPHHHHHHHQHHGGTGAPGGAGGGGGGSGGFNLPLNRGLERALEEAANSGGLNLSARKLKEFPRTAAPGHDLSDTVQADLSKNRLVEVPMELCHFVSLEILNLYHNCIRVIPEAIVNLQMLTYLNLSRNQLSALPACLCGLPLKVLIASNNKLGSLPEEIGQLKQLMELDVSCNEITALPQQIGQLKSLRELNVRRNYLKVLPQELVDLSLVKFDFSCNKVLVIPICFREMKQLQVLLLENNPLQSPPAQICTKGKVHIFKYLSIQACQIKTADSLYLHTMERPHLHQHVEDGKKDSDSGVGSDNGDKRLSATEPSDEDTVSLNVPMSNIMEEEQIIKEDSCHRLSPVKGEFHQEFQPEPSLLGDSTNSGEERDQFTDRADGLHSEFMNYKARAEDCEELLRIEEDVHWQTEGIISSSKDQDMDIAMIEQLREAVDLLQDPNGLSTDITERSVLNLYPMGSAEALELQDSALNGQIQLETSPVCEVQSDLTLQSNGSQYSPNEIRENSPAVSPTTNSTAPFGLKPRSVFLRPQRNLESIDPQFTIRRKMEQMREEKELVEQLRESIEMRLKVSLHEDLGAALMDGVVLCHLVNHIRPRSVASIHVPSPAVPKLSMAKCRRNVENFLEACRKLGVPEKRK

SEQ ID NO: 2639 - protein, 698 aa, Artificial Sequence
  Synthetic polypeptide
MATPGSEPQPFVPALSVATLHPLHHPHHHHHHHQHHGGTGAPGGAGGGGGGSGGFNLPLNRGLERALEEAANSGGLNLSARKLKEFPRTAAPGHDLSDTVQADLSKNRLVEVPMELCHFVSLEILNLYHNCIRVIPEAIVNLQMLTYLNLSRNQLSALPACLCGLPLKVLIASNNKLGSLPEEIGQLKQLMELDVSCNEITALPQQIGQLKSLRELNVRRNYLKVLPQELVDLSLVKFDFSCNKVLVIPICFREMKQLQVLLLENNPLQSPPAQICTKGKVHIFKYLSIQACQIKTADSLYLHTMERPHLHQHVEDGKKDSDSGVGSDNGDKRLSATEPSDEDTVSLNVPMSNIMEEEQIIKEDSCHRLSPVKGEFHQEFQPEPSLLGDSTNSGEERDQFTDRADGLHSEFMNYKARAEDCEELLRIEEDVHWQTEGIISSSKDQDMDIAMIEQLREAVDLLQDPNGLSTDITERSVLNLYPMGSAEALELQDSALNGQIQLETSPVCEVQSDLTLQSNGSQYSPNEIRENSPAVSPTTNSTAPFGLKPRSDPALILPPISFNTLTQAQTWDSSSYSVPSEGDSDNVFLRPQRNLESIDPQFTIRRKMEQMREEKELVEQLRESIEMRLKVSLHEDLGAALMDGVVLCHLVNHIRPRSVASIHVPSPAVPKLSMAKCRRNVENFLEACRKLGVPEKRK

SEQ ID NO: 2640 - protein, 182 aa, Artificial Sequence
  Synthetic polypeptide
MAASMFYGRLVAVATLRNHRPRTAQRAAAQVLGSSGLFNNHGLQVQQQQQRNLSLHEYMSMELLQEAGVSVPKGYVAKSPDEAYAIAKKLGSKDVVIKAQVLAGGRGKGTFESGLKGGVKIVFSPEEAKAVSSQMIGKKLFTKQTGEKGRICNQVLVCERKYPRREYYFAITMERSFQHCSQ

SEQ ID NO: 2641 - protein, 48 aa, Artificial Sequence
  Synthetic polypeptide
MIGKKLFTKQTGEKGRICNQVLVCERKYPRREYYFAITMERSFQHCSQ

SEQ ID NO: 2642 - protein, 124 aa, Artificial Sequence
  Synthetic polypeptide
MSMELLQEAGVSVPKGYVAKSPDEAYAIAKKLGSKDVVIKAQVLAGGRGKGTFESGLKGGVKIVFSPEEAKAVSSQMIGKKLFTKQTGEKGRICNQVLVCERKYPRREYYFAITMERSFQHCSQ

SEQ ID NO: 2643 - protein, 112 aa, Artificial Sequence
  Synthetic polypeptide
SGRGHPSEPPASDGPAGCCSGSKDVVIKAQVLAGGRGKGTFESGLKGGVKIVFSPEEAKAVSSQMIGKKLFTKQTGEKGRICNQVLVCERKYPRREYYFAITMERSFQHCSQ

SEQ ID NO: 2644 - protein, 142 aa, Artificial Sequence
  Synthetic polypeptide
MTASAQPRGRRPGVGVGVVVTSCKHPRCVLLGKRKGSVGAGSFQLPGGHLEFGETWEECAQRETWEEAALHLKNVHFASVVNSFIEKENYHYVTILMKGEVDVTHDSEPKNVEPEKNENTERRSLSVNLEVGPPQIWNLPVS

SEQ ID NO: 2645 - protein, 217 aa, Artificial Sequence
  Synthetic polypeptide
MAASSSGEKEKERLGGGLGVAGGNSTRERLLSALEDLEVLSRELIEMLAISRNQKLLQAGEENQVLELLIHRDGEFQELMKLALNQGKIHHEMQVLEKEVEKRDSDIQQLQKQLKEAEQILATAVYQAKEKLKSIEKARKGAISSEEIIKYAHRISASNAVCAPLTWVPGDPRRPYPTDLEMRSGLLGQMNNPSTNGVNGHLPGDALAAGRLPDFAF

SEQ ID NO: 2646 - protein, 171 aa, Artificial Sequence
  Synthetic polypeptide
MLAISRNQKLLQAGEENQVLELLIHRDGEFQELMKLALNQGKIHHEMQVLEKEVEKRDSDIQQLQKQLKEAEQILATAVYQAKEKLKSIEKARKGAISSEEIIKYAHRISASNAVCAPLTWVPGDPRRPYPTDLEMRSGLLGQMNNPSTNGVNGHLPGDALAAGRLPDFAF

SEQ ID NO: 2647 - protein, 195 aa, Artificial Sequence
  Synthetic polypeptide
MKLLWWCDWLPERSHVFTQRELIEMLAISRNQKLLQAGEENQVLELLIHRDGEFQELMKLALNQGKIHHEMQVLEKEVEKRDSDIQQLQKQLKEAEQILATAVYQAKEKLKSIEKARKGAISSEEIIKYAHRISASNAVCAPLTWVPGDPRRPYPTDLEMRSGLLGQMNNPSTNGVNGHLPGDALAAGRLPDFAF

SEQ ID NO: 2648 - protein, 27 aa, Artificial Sequence
  Synthetic polypeptide
MAASSSGPGVVAHAYNPSTLGGQGGRI

SEQ ID NO: 2649 - protein, 609 aa, Artificial Sequence
  Synthetic polypeptide
MPPKTPRKTAATAAAAAAEPPAPPPPPPPEEDPEQDSGPEDLPLVRLEFEETEEPDFTALCQKLKIPDHVRERAWLTWEKVSSVDGVLGGYIQKKKELWGICIFIAAVDLDEMSFTFTELQKNIEISVHKFFNLLKEIDTSTKVDNAMSRLLKKYDVLFALFSKLERTCELIYLTQPSSSISTEINSALVLKVSWITFLLAKGEVLQMEDDLVISFQLMLCVLDYFIKLSPPMLLKEPYKTAVIPINGSPRTPRRGQNRSARIAKQLENDTRIIEVLCKEHECNIDEVKNVYFKNFIPFMNSLGLVTSNGLPEVENLSKRYEEIYLKNKDLDARLFLDHDKTLQTDSIDSFETQRTPRKSNLDEEVNVIPPHTPVRTVMNTIQQLMMILNSASDQPSENLISYFNNCTVNPKESILKRVKDIGYIFKEKFAKAVGQGCVEIGSQRYKLGVRLYYRVMESMLKSEEERLSIQNFSKLLNDNIFHMSLLACALEVVMATYSRSTSQNLDSGTDLSFPWILNVLNLKAFDFYKVIESFIKAEGNLTREMIKHLERCEHRIMESLAWLSVQWLTPIIPALWKAEAGGSPEIRSLRAAWPKWRNPISTKNTKLA

SEQ ID NO: 2650 - protein, 64 aa, Artificial Sequence
  Synthetic polypeptide
MAEHPPLLDTTQILSSDISLLSAPIVSADGTQQTGNSLMPWTVIYFSSFGVHSTCKSVCHTVAV

SEQ ID NO: 2651 - protein, 53 aa, Artificial Sequence
  Synthetic polypeptide
MAEHPPLLDTTQILSSDISLLSAPIVSADGTQQYLQECVPHGSCLRKDFYINE

SEQ ID NO: 2652 - protein, 88 aa, Artificial Sequence
  Synthetic polypeptide
MGEKNGDAKTFWMELEDDGKVDFIFEQVQNVLQSLKQKIKDGSATNKEYIQAMILVNEATIINSSTSIKGTQEAAVGGSLEPRKSSLQ

SEQ ID NO: 2653 - protein, 100 aa, Artificial Sequence
  Synthetic polypeptide
MGEKNGDAKTFWMELEDDGKVDFIFEQVQNVLQSLKQKIKDGSATNKEYIQAMILVNEATIINSSTSIKGASQKEVNAQSSGTQEAAVGGSLEPRKSSLQ

SEQ ID NO: 2654 - protein, 234 aa, Artificial Sequence
  Synthetic polypeptide
MAQASPPRPERVLGASSPEARPAQEALLLPTGVFQVAEKMEKRTCALCPKDVEYNVLYFAQSENIAAHENCLLYSSGLVECEDQDPLNPDRSFDVESVKKEIQRGRKLKCKFCHKRGATVGCDLKNCNKNYHFFCAKKDDAVPQSDGVRGIYKLLCQQHAQFPIIAQSAKFSGVKRKRGRKKPLSGNHVQPPETMKCNTFIRQVKEEHGRHTVYTAQVTGAPTSQKSPLKNLSM

SEQ ID NO: 2655 - protein, 52 aa, Artificial Sequence
  Synthetic polypeptide
AAPAREGARRQQPGGPARAGGAPPSHRCILQDLWNVRIRIHLILIEVLMWNQ

SEQ ID NO: 2656 - protein, 195 aa, Artificial Sequence
  Synthetic polypeptide
MEKRTCALCPKDVEYNVLYFAQSENIAAHENCLLYSSGLVECEDQDPLNPDRSFDVESVKKEIQRGRKLKCKFCHKRGATVGCDLKNCNKNYHFFCAKKDDAVPQSDGVRGIYKLLCQQHAQFPIIAQSAKFSGVKRKRGRKKPLSGNHVQPPETMKCNTFIRQVKEEHGRHTVYTAQVTGAPTSQKSPLKNLSM

SEQ ID NO: 2657 - protein, 40 aa, Artificial Sequence
  Synthetic polypeptide
MAENPSLENHRIKSFKNKGRDVETMRRHRNEVTVELRKEK

SEQ ID NO: 2658 - protein, 178 aa, Artificial Sequence
  Synthetic polypeptide
MATSVLCCLRCCRDGGTGHIPLKEMPAVQLDTQHMGTDVVIVKNGRRICGTGGCLASAPLHQNKSYFEFKIQSTGIWGIGVATQKVNLNQIPLGRDMHSLVMRNDGALYHNNEEKNRLPANSLPQEGDVVGITYDHVELNVYLNGKNMHCPASGIRGTVYPVVYGVVVRACSPSYLRG

SEQ ID NO: 2659 - protein, 139 aa, Artificial Sequence
  Synthetic polypeptide
MATSVLCCLRCCRDGGTGHIPLKEMPAVQLDTQHMGIWGIGVATQKVNLNQIPLGRDMHSLVMRNDGALYHNNEEKNRLPANSLPQEGDVVGITYDHVELNVYLNGKNMHCPASGIRGTVYPVVYGVVVRACSPSYLRG

SEQ ID NO: 2660 - protein, 26 aa, Artificial Sequence
  Synthetic polypeptide
MDPKAGGGGEEDDCVDSGAETGGFSK

SEQ ID NO: 2661 - protein, 172 aa, Artificial Sequence
  Synthetic polypeptide
MSLYRSVVWFAKGLREYTKSGYESACKDFVPHDLEVQIPGRVFLVTGGNSGIGKATALEIAKRGGTVHLVCRDQAPAEDARGEIIRESGNQNIFLHIVDLSDPKQIWKFVENFKQEHKLHVLINNAGCMVNKRELTEDGLEKNFAANTLGVYILTTGLIPVLEKEHDPRVNL

SEQ ID NO: 2662 - protein, 123 aa, Artificial Sequence
  Synthetic polypeptide
MNLHVKTLSLMTWRSRFLEESFWSLEETAALAKQLPLKSPSENIFLHIVDLSDPKQIWKFVENFKQEHKLHVLINNAGCMVNKRELTEDGLEKNFAANTLGVYILTTGLIPVLEKEHDPRVNL

SEQ ID NO: 2663 - protein, 78 aa, Artificial Sequence
  Synthetic polypeptide
MDKYDVIKAIGQGAFGKAYLAKGKSDSKHCVIKEINFEKPLHLLLGLLLPRSLPADLPASRSHLFKAELYHTSRILPL

SEQ ID NO: 2664 - protein, 724 aa, Artificial Sequence
  Synthetic polypeptide
MERHQPRLHHPAQGSAAGTPYPSSASLRGCRESKMPRRKGPQHPPPPSGPEEPGEKRPKFHLNIRTLTDDMLDKFASIRIPGSKKERPPLPNLKTAFASSDCSAAPLEMMENFPKPLSENELLELFEKMMEDMNLNEDKKAPLREKDFSIKKEMVMQYINTASKTGSLKRSRQISPQEFIHELKMGSADERLVTCLESLRVSLTSNPVSWVESFGHEGLGLLLDILEKLISGKIQEKVVKKNQHKVIQCLKALMNTQYGLERIMSEERSLSLLAKAVDPRHPNMMTDVVKLLSAVCIVGEESILEEVLEALTSAGEEKKIDRFFCIVEGLRHNSVQLQVACMQLINALVTSPDDLDFRLHIRNEFMRCGLKEILPNLKCIKNDGLDIQLKVFDEHKEEDLFELSHRLEDIRAELDEAYDVYNMVWSTVKETRAEGYFISILQHLLLIRNDYFIRQQYFKLIDECVSQIVLHRDGMDPDFTYRKRLDLDLTQFVDICIDQAKLEEFEEKASELYKKFEKEFTDHQETQAELQKKEAKINELQAELQAFKSQFGALPADCNIPLPPSKEGGTGHSALPPPPPLPSGGGVPPPPPPPPPPPLPGMRMPFSGPVPPPPPLGFLGGQNSPPLPILPFGLKPKKEFKPEISMRRLNWLKIRPHEMTENCFWIKVNENKYENVDLLCKLENTFCCQQKENHQTTKINREEERNKGYTKQLENDQQNDRSKC

SEQ ID NO: 2665 - protein, 713 aa, Artificial Sequence
  Synthetic polypeptide
MERHQPRLHHPAQGSAAGTPYPSSASLRGCRESKMPRRKGPQHPPPPSGPEEPGEKRPKFLDKFASIRIPGSKKERPPLPNLKTAFASSDCSAAPLEMMENFPKPLSENELLELFEKMMEDMNLNEDKKAPLREKDFSIKKEMVMQYINTASKTGSLKRSRQISPQEFIHELKMGSADERLVTCLESLRVSLTSNPVSWVESFGHEGLGLLLDILEKLISGKIQEKVVKKNQHKVIQCLKALMNTQYGLERIMSEERSLSLLAKAVDPRHPNMMTDVVKLLSAVCIVGEESILEEVLEALTSAGEEKKIDRFFCIVEGLRHNSVQLQVACMQLINALVTSPDDLDFRLHIRNEFMRCGLKEILPNLKCIKNDGLDIQLKVFDEHKEEDLFELSHRLEDIRAELDEAYDVYNMVWSTVKETRAEGYFISILQHLLLIRNDYFIRQQYFKLIDECVSQIVLHRDGMDPDFTYRKRLDLDLTQFVDICIDQAKLEEFEEKASELYKKFEKEFTDHQETQAELQKKEAKINELQAELQAFKSQFGALPADCNIPLPPSKEGGTGHSALPPPPPLPSGGGVPPPPPPPPPPPLPGMRMPFSGPVPPPPPLGFLGGQNSPPLPILPFGLKPKKEFKPEISMRRLNWLKIRPHEMTENCFWIKVNENKYENVDLLCKLENTFCCQQKENHQTTKINREEERNKGYTKQLENDQQNDRSKC

SEQ ID NO: 2666 - protein, 654 aa, Artificial Sequence
  Synthetic polypeptide
MERHQPRLHHPAQGSAAGTPYPSSASLRGCRESKMPRRKGPQHPPPPSGPEEPGEKRPKFEDMNLNEDKKAPLREKDFSIKKEMVMQYINTASKTGSLKRSRQISPQEFIHELKMGSADERLVTCLESLRVSLTSNPVSWVESFGHEGLGLLLDILEKLISGKIQEKVVKKNQHKVIQCLKALMNTQYGLERIMSEERSLSLLAKAVDPRHPNMMTDVVKLLSAVCIVGEESILEEVLEALTSAGEEKKIDRFFCIVEGLRHNSVQLQVACMQLINALVTSPDDLDFRLHIRNEFMRCGLKEILPNLKCIKNDGLDIQLKVFDEHKEEDLFELSHRLEDIRAELDEAYDVYNMVWSTVKETRAEGYFISILQHLLLIRNDYFIRQQYFKLIDECVSQIVLHRDGMDPDFTYRKRLDLDLTQFVDICIDQAKLEEFEEKASELYKKFEKEFTDHQETQAELQKKEAKINELQAELQAFKSQFGALPADCNIPLPPSKEGGTGHSALPPPPPLPSGGGVPPPPPPPPPPPLPGMRMPFSGPVPPPPPLGFLGGQNSPPLPILPFGLKPKKEFKPEISMRRLNWLKIRPHEMTENCFWIKVNENKYENVDLLCKLENTFCCQQKENHQTTKINREEERNKGYTKQLENDQQNDRSKC

SEQ ID NO: 2667 - protein, 678 aa, Artificial Sequence
  Synthetic polypeptide
MERHQPRLHHPAQGSAAGTPYPSSASLRGCRESKMPRRKGPQHPPPPSGPEEPGEKRPKFLDKFASIRIPGSKKERPPLPNLKTAFASSDCSAAPLEMMENFPKPLSENELLELFEKMMGSLKRSRQISPQEFIHELKMGSADERLVTCLESLRVSLTSNPVSWVESFGHEGLGLLLDILEKLISGKIQEKVVKKNQHKVIQCLKALMNTQYGLERIMSEERSLSLLAKAVDPRHPNMMTDVVKLLSAVCIVGEESILEEVLEALTSAGEEKKIDRFFCIVEGLRHNSVQLQVACMQLINALVTSPDDLDFRLHIRNEFMRCGLKEILPNLKCIKNDGLDIQLKVFDEHKEEDLFELSHRLEDIRAELDEAYDVYNMVWSTVKETRAEGYFISILQHLLLIRNDYFIRQQYFKLIDECVSQIVLHRDGMDPDFTYRKRLDLDLTQFVDICIDQAKLEEFEEKASELYKKFEKEFTDHQETQAELQKKEAKINELQAELQAFKSQFGALPADCNIPLPPSKEGGTGHSALPPPPPLPSGGGVPPPPPPPPPPPLPGMRMPFSGPVPPPPPLGFLGGQNSPPLPILPFGLKPKKEFKPEISMRRLNWLKIRPHEMTENCFWIKVNENKYENVDLLCKLENTFCCQQKENHQTTKINREEERNKGYTKQLENDQQNDRSKC

SEQ ID NO: 2668 - protein, 48 aa, Artificial Sequence
  Synthetic polypeptide
MASSSGAGAAAAAAAANLNAVRETMDDNMNNRLDTAEEQSISKLEYQN

SEQ ID NO: 2669 - protein, 49 aa, Artificial Sequence
  Synthetic polypeptide
MASSSGAGAAAAAAAANLNAVRETMDADNMNNRLDTAEEQSISKLEYQN

SEQ ID NO: 2670 - protein, 24 aa, Artificial Sequence
  Synthetic polypeptide
MNIHMKRKTIKPCKMCLLPLRLLP

SEQ ID NO: 2671 - protein, 805 aa, Artificial Sequence
  Synthetic polypeptide
MEPPSCIQDEPFPHPLEPEPGVSAQPGPGKPSDKRFRLWYVGGSCLDHRTTLPMLPWLMAEIRRRSQKPEAGGCGAPAAREVILVLSAPFLRCVPAPGAGASGGTSPSATQPNPAVFIFEHKAQHISRFIHNSHDLTYFAYLIKAQPDDPESQMACHVFRATDPSQVPDVISSIRQLSKAAMKEDAKPSKDNEDAFYNSQKFEVLYCGKVTVTHKKAPSSLIDDCMEKFSLHEQQRLKIQGEQRGPDPGEDLADLEVVVPGSPGDCLPEEADGTDTHLGLPAGASQPALTSSRVCFPERILEDSGFDEQQEFRSRCSSVTGVQRRVHEGSQKSQPRRRHASAPSHVQPSDSEKNRTMLFQVGRFEINLISPDTKSVVLEKNFKDISSCSQGIKHVDHFGFICRESPEPGLSQYICYVFQCASESLVDEVMLTLKQAFSTAAALQSAKTQIKLCEACPMHSLHKLCERIEGLYPPRAKLVIQRHLSSLTDNEQADIFERVQKMKPVSDQEENELVILHLRQLCEAKQKTHVHIGEGPSTISNSTIPENATSSGRFKLDILKNKAKRSLTSSLENIFSRGANRMRGRLGSVDSFERSNSLASEKDYSPGDSPPGTPPASPPSSAWQTFPEEDSDSPQFRRRAHTFSHPPSSTKRKLNLQDGRAQGVRSPLLRQSSSEQCSNLSSVRRMYKESNSSSSLPSLHTSFSAPSFTAPSFLKSFYQNSGRLSPQYENEIRQDTASESSDGEGRKRTSSTCSNESLSVGGTSVTPRRISWRQRIFLRVASPMNKSPSAMQQQANLHMDPFNLK

SEQ ID NO: 2672 - protein, 742 aa, Artificial Sequence
  Synthetic polypeptide
MEPPSCIQDEPFPHPLEPEPGVSAQPGPGKPSDKRFRLWYVGGSCLDHRTTLPMLPWLMAEIRRRSQKPEAGGCGAPAAREVILVLSAPFLRCVPAPGAGASGGTSPSATQPNPAVFIFEHKAQHISRFIHNSHDLTYFAYLIKAQPDDPESQMACHVFRATDPSQVPDVISSIRQLSKAAMKEDAKPSKDNEDAFYNSQKFEVLYCGKVTVTHKKAPSSLIDDCMEKFSLHEQQRLKIQGEQRGPDPGEDLADLEVVVPGSPGDCLPEEADGTDTHLGLPAGASQPALTSSRVCFPERILEDSGFDEQQEFRSRCSSVTGVQRRVHEGSQKSQPRRRHASAPSHVQPSDSEKNRTMLFQVGRFEINLISPDTKSVVLEKNFKDISSCSQGIKHVDHFGFICRESPEPGLSQYICYVFQCASESLVDEVMLTLKQAFSTAAALQSAKTQIKLCEACPMHSLHKLCERIEGLYPPRAKLVIQRHLSSLTDNEQADIFERVQKMKPVSDQEENELVILHLRQLCEAKQKTHVHIGEGPSTISNSTIPENATSSGRFKLDILKNKAKRSLTSSLENIFSRGANRMRGRLGSVDSFERSNSLASEKDYSPGDSPPGTPPASPPSSAWQTFPEEDSDSPQFRRRAHTFSHPPSSTKRKLNLQDGRAQGVRSPLLRQSSSEQCSDGEGRKRTSSTCSNESLSVGGTSVTPRRISWRQRIFLRVASPMNKSPSAMQQQANLHMDPFNLK

SEQ ID NO: 2673 - protein, 22 aa, Artificial Sequence
  Synthetic polypeptide
MNKSPSAMQQQANLHMDPFNLK

SEQ ID NO: 2674 - protein, 797 aa, Artificial Sequence
  Synthetic polypeptide
MEPPSCIQDEPFPHPLEPEPGVSAQPGPGKPSDKRFRLWYVGGSCLDHRTTLPMLPWLMAEIRRRSQKPEAGGCGAPAAREVILVLSAPFLRCVPAPGAGASGGTSPSATQPNPAVFIFEHKAQHISRFIHNSHDLTYFAYLIKAQPDDPESQMACHVFRATDPSQVPDVISSIRQLSKAAMKEDAKPSKDNEDAFYNSQKFEVLYCGKVTVTHKKAPSSLIDDCMEKFSLHEQQRLKIQGEQRGPDPGEDLADLEVVVPGSPGDCLPEEADGTDTHLGLPAGASQPALTSSRVCFPERILEDSGFDEQQEFRSRCSSVTGVQRRVHEGSQKSQPRRRHASAPSHVQPSDSEKNRTMLFQVGRFEINLISPDTKSVVLEKNFKDISSCSQGIKHVDHFGFICRESPEPGLSQYICYVFQCASESLVDEVMLTLKQAFSTAAALQSAKTQIKLCEACPMHSLHKLCERIEGLYPPRAKLVIQRHLSSLTDNEQADIFERVQKMKPVSDQEENELVILHLRQLCEAKQKTHVHIGEGPSTISNSTIPENATSSGRFKLDILKNKAKRSLTSSLENIFSRGANRMRGRLGSVDSFERSNSLASEKDYSPGDSPPGTPPASPPSSAWQTFPEEDSDSPQFRRRAHTFSHPPSSTKRKLNLQDGRAQGVRSPLLRQSSSEQCSNLSSVRRMYKESNSSSSLPSLHTSFSAPSFTAPSFLKSFYQNSGRLSPQYENEISDGEGRKRTSSTCSNESLSVGGTSVTPRRISWRQRIFLRVASPMNKSPSAMQQQANLHMDPFNLK

SEQ ID NO: 2675 - protein, 254 aa, Artificial Sequence
  Synthetic polypeptide
DNEQADIFERVQKMKPVSDQEENELVILHLRQLCEAKQKTHVHIGEGPSTISNSTIPENATSSGRFKLDILKNKAKRSLTSSLENIFSRGANRMRGRLGSVDSFERSNSLASEKDYSPGDSPPGTPPASPPSSAWQTFPEEDSDSPQFRRRAHTFSHPPSSTKRKLNLQDGRAQGVRSPLLRQSSSEQCSDGEGRKRTSSTCSNESLSVGGTSVTPRRISWRQRIFLRVASPMNKSPSAMQQQANLHMDPFNLK

SEQ ID NO: 2676 - protein, 801 aa, Artificial Sequence
  Synthetic polypeptide
MEPPSCIQDEPFPHPLEPEPGVSAQPGPGKPSDKRFRLWYVGGSCLDHRTTLPMLPWLMAEIRRRSQKPEAGGCGAPAAREVILVLSAPFLRCVPAPGAGASGGTSPSATQPNPAVFIFEHKAQHISRFIHNSHDLTYFAYLIKAQPDDPESQMACHVFRATDPSQVPDVISSIRQLSKAAMKEDAKPSKDNEDAFYNSQKFEVLYCGKVTVTHKKAPSSLIDDCMEKFSLHEQQRLKIQGEQRGPDPGEDLADLEVVVPGSPGDCLPEEADGTDTHLGLPAGASQPALTSSRVCFPERILEDSGFDEQQEFRSRCSSVTGVQRRVHEGSQKSQPRRRHASAPSHVQPSDSEKNRTMLFQVGRFEINLISPDTKSVVLEKNFKDISSCSQGIKHVDHFGFICRESPEPGLSQYICYVFQCASESLVDEVMLTLKQAFSTAAALQSAKTQIKLCEACPMHSLHKLCERIEGLYPPRAKLVIQRHLSSLTDNEQADIFERVQKMKPVSDQEENELVILHLRQLCEAKQKTHVHIGEGPSTISNSTIPENATSSGRFKLDILKNKAKRSLTSSLENIFSRGANRMRGRLGSVDSFERSNSLASEKDYSPGDSPPGTPPASPPSSAWQTFPEEDSDSPQFRRRAHTFSHPPSSTKRKLNLQDGRAQGVRSPLLRQSSSEQCSNLSSVRRMYKESNSSSSLPSLHTSFSAPSFTAPSFLKSFYQNSGRLSPQYENEIRQDTASESSDGEGRKRTSSTCSNESLSVGGTSVTPRRISWRQRIFLRVASPMNKSPSAMQQQESRNLPM

SEQ ID NO: 2677 - protein, 738 aa, Artificial Sequence
  Synthetic polypeptide
MEPPSCIQDEPFPHPLEPEPGVSAQPGPGKPSDKRFRLWYVGGSCLDHRTTLPMLPWLMAEIRRRSQKPEAGGCGAPAAREVILVLSAPFLRCVPAPGAGASGGTSPSATQPNPAVFIFEHKAQHISRFIHNSHDLTYFAYLIKAQPDDPESQMACHVFRATDPSQVPDVISSIRQLSKAAMKEDAKPSKDNEDAFYNSQKFEVLYCGKVTVTHKKAPSSLIDDCMEKFSLHEQQRLKIQGEQRGPDPGEDLADLEVVVPGSPGDCLPEEADGTDTHLGLPAGASQPALTSSRVCFPERILEDSGFDEQQEFRSRCSSVTGVQRRVHEGSQKSQPRRRHASAPSHVQPSDSEKNRTMLFQVGRFEINLISPDTKSVVLEKNFKDISSCSQGIKHVDHFGFICRESPEPGLSQYICYVFQCASESLVDEVMLTLKQAFSTAAALQSAKTQIKLCEACPMHSLHKLCERIEGLYPPRAKLVIQRHLSSLTDNEQADIFERVQKMKPVSDQEENELVILHLRQLCEAKQKTHVHIGEGPSTISNSTIPENATSSGRFKLDILKNKAKRSLTSSLENIFSRGANRMRGRLGSVDSFERSNSLASEKDYSPGDSPPGTPPASPPSSAWQTFPEEDSDSPQFRRRAHTFSHPPSSTKRKLNLQDGRAQGVRSPLLRQSSSEQCSDGEGRKRTSSTCSNESLSVGGTSVTPRRISWRQRIFLRVASPMNKSPSAMQQQESRNLPM

SEQ ID NO: 2678 - protein, 18 aa, Artificial Sequence
  Synthetic polypeptide
MNKSPSAMQQQESRNLPM

SEQ ID NO: 2679 - protein, 793 aa, Artificial Sequence
  Synthetic polypeptide
MEPPSCIQDEPFPHPLEPEPGVSAQPGPGKPSDKRFRLWYVGGSCLDHRTTLPMLPWLMAEIRRRSQKPEAGGCGAPAAREVILVLSAPFLRCVPAPGAGASGGTSPSATQPNPAVFIFEHKAQHISRFIHNSHDLTYFAYLIKAQPDDPESQMACHVFRATDPSQVPDVISSIRQLSKAAMKEDAKPSKDNEDAFYNSQKFEVLYCGKVTVTHKKAPSSLIDDCMEKFSLHEQQRLKIQGEQRGPDPGEDLADLEVVVPGSPGDCLPEEADGTDTHLGLPAGASQPALTSSRVCFPERILEDSGFDEQQEFRSRCSSVTGVQRRVHEGSQKSQPRRRHASAPSHVQPSDSEKNRTMLFQVGRFEINLISPDTKSVVLEKNFKDISSCSQGIKHVDHFGFICRESPEPGLSQYICYVFQCASESLVDEVMLTLKQAFSTAAALQSAKTQIKLCEACPMHSLHKLCERIEGLYPPRAKLVIQRHLSSLTDNEQADIFERVQKMKPVSDQEENELVILHLRQLCEAKQKTHVHIGEGPSTISNSTIPENATSSGRFKLDILKNKAKRSLTSSLENIFSRGANRMRGRLGSVDSFERSNSLASEKDYSPGDSPPGTPPASPPSSAWQTFPEEDSDSPQFRRRAHTFSHPPSSTKRKLNLQDGRAQGVRSPLLRQSSSEQCSNLSSVRRMYKESNSSSSLPSLHTSFSAPSFTAPSFLKSFYQNSGRLSPQYENEISDGEGRKRTSSTCSNESLSVGGTSVTPRRISWRQRIFLRVASPMNKSPSAMQQQESRNLPM

SEQ ID NO: 2680 - protein, 250 aa, Artificial Sequence
  Synthetic polypeptide
DNEQADIFERVQKMKPVSDQEENELVILHLRQLCEAKQKTHVHIGEGPSTISNSTIPENATSSGRFKLDILKNKAKRSLTSSLENIFSRGANRMRGRLGSVDSFERSNSLASEKDYSPGDSPPGTPPASPPSSAWQTFPEEDSDSPQFRRRAHTFSHPPSSTKRKLNLQDGRAQGVRSPLLRQSSSEQCSDGEGRKRTSSTCSNESLSVGGTSVTPRRISWRQRIFLRVASPMNKSPSAMQQQESRNLPM

SEQ ID NO: 2681 - protein, 195 aa, Artificial Sequence
  Synthetic polypeptide
MEGQRWLPLEANPEVTNQFLKQLGLHPNWQFVDVYGMDPELLSMVPRPVCAVLLLFPITEKYEVFRTEEEEKIKSQGQDVTSSVYFMKQTISNACGTIGLIHAIANNKDKMHFESGSTLKKFLEESVSMSPEERARYLENYDAIRVTHETSAHEGQTEAPSIDEKVDLHFIALVHVDGHLYELASILQPMDQGII

SEQ ID NO: 2682 - protein, 193 aa, Artificial Sequence
  Synthetic polypeptide
TEEEEKIKSQGQDVTSSVYFMKQTISNACGTIGLIHAIANNKDKMHFESGSTLKKFLEESVSMSPEERARYLENYDAIRVTHETSAHEGQTESSSPSSSQPHSSHCRTKASSLCHHASLPWVKRNHVGPAKATSPSLRLRRWRPFLRLPSLGLHSVAPSIDEKVDLHFIALVHVDGHLYELASILQPMDQGII

SEQ ID NO: 2683 - protein, 197 aa, Artificial Sequence
  Synthetic polypeptide
MEGQRWLPLEANPEVTNQFLKQLGLHPNWQFVDVYGMDPELLSMVPRPVCAVLLLFPITEKYEVFRTEEEEKIKSQGQDVTSSVYFMKQTISNACGTIGLIHAIANNKDKMHFESGSTLKKFLEESVSMSPEERARYLENYDAIRVTHETSAHEGQTEAPSIDEKVDLHFIALVHVDGHLYELGNFHSHPNLQQPPS

SEQ ID NO: 2684 - protein, 195 aa, Artificial Sequence
  Synthetic polypeptide
TEEEEKIKSQGQDVTSSVYFMKQTISNACGTIGLIHAIANNKDKMHFESGSTLKKFLEESVSMSPEERARYLENYDAIRVTHETSAHEGQTESSSPSSSQPHSSHCRTKASSLCHHASLPWVKRNHVGPAKATSPSLRLRRWRPFLRLPSLGLHSVAPSIDEKVDLHFIALVHVDGHLYELGNFHSHPNLQQPPS

SEQ ID NO: 2685 - protein, 128 aa, Artificial Sequence
  Synthetic polypeptide
MKKIRICHIFTFYSWMSYDVLFQRTELGALEIWRQLICAHVCICVGWLYLRDRVCSKKDIILRTEQNSGRTILIKAVTEKNFETKDFRASLENGVLLCDLINKLKPGVIKKINRLSTPIAGLEFYPIN

SEQ ID NO: 2686 - protein, 76 aa, Artificial Sequence
  Synthetic polypeptide
MEGLEEAEANCSVAFAEAQRWVEAVTEKNFETKDFRASLENGVLLCDLINKLKPGVIKKINRLSTPIAGLEFYPIN

SEQ ID NO: 2687 - protein, 238 aa, Artificial Sequence
  Synthetic polypeptide
MPSWIGAVILPLLGLLLSLPAGADVKARSCGEVRQAYGAKGFSLADIPYQEIAGEHLRICPQEYTCCTTEMEDKLSQQSKLEFENLVEETSHFVRTTFVSRHKKFDEFFRELLENAEKSLNDMFVRTYGMLYMQNSEVFQDLFTELKRYYTGGNVNLEEMLNDFWARLLERMFQLINPQYHFSEDYLECVSKYTDQLKPFGDVPRKLKIQVTRAFIAARTFVQGLTVGREVANRVSKT

SEQ ID NO: 2688 - protein, 392 aa, Artificial Sequence
  Synthetic polypeptide
MSPLWWGFLLSCLGCKILPGAQGQFPRVCMTVDSLVNKECCPRLGAESANVCGSQQGRGQCTEVRADTRPWSGPYILRNQDDRELWPRKFFHRTCKCTGNFAGYNCGDCKFGWTGPNCERKKPPVIRQNIHSLSPQEREQFLGALDLAKKRVHPDYVITTQHWLGLLGPNGTQPQFANCSVYDFFVWLHYYSVRDTLLGPGRPYRAIDFSHQGPAFVTWHRYHLLCLERDLQRLIGNESFALPYWNFATGRNECDVCTDQLFGAARPDDPTLISRNSRFSSWETVCDSLDDYNHLVTLCNGTYEGLLRRNQMGRNSMKLPTLKDIRDCLSLQKFDNPPFFQNSTFSFRLGMVFMPVILVLWEASAGGLLESRSLRPPGQQSKTLSLQKNIKK

SEQ ID NO: 2689 - protein, 202 aa, Artificial Sequence
  Synthetic polypeptide
YSVRDTLLGPGRPYRAIDFSHQGPAFVTWHRYHLLCLERDLQRLIGNESFALPYWNFATGRNECDVCTDQLFGAARPDDPTLISRNSRFSSWETVCDSLDDYNHLVTLCNGTYEGLLRRNQMGRNSMKLPTLKDIRDCLSLQKFDNPPFFQNSTFSFRLGMVFMPVILVLWEASAGGLLESRSLRPPGQQSKTLSLQKNIKK

SEQ ID NO: 2690 - protein, 222 aa, Artificial Sequence
  Synthetic polypeptide
MQAEAADWFSSMPFQKHVYYPLASGPEGPDVAVAAAAAGAASMACAPPSAASGPLPFFQFRPRLESVDWRRLSAIDVDKVAGAVDVLTLQENIMNITFCKLEDEKCPHCQSGVDPVLLKLIRLAQFTIEYLLHSQEFLTSQLHTLEERLRLSHCDGEQSKKLLTKQAGEIKTLKEECKRRKKMISTQQLMIEAKANYYQRYILKYLQMKYIISRIYFRVIQG

SEQ ID NO: 2691 - protein, 268 aa, Artificial Sequence
  Synthetic polypeptide
MQAEAADWFSSMVRGGRPGRPRRGCRAGENRGFPGPPAPQPARPPSPPPAALSLCPPQPFQKHVYYPLASGPEGPDVAVAAAAAGAASMACAPPSAASGPLPFFQFRPRLESVDWRRLSAIDVDKVAGAVDVLTLQENIMNITFCKLEDEKCPHCQSGVDPVLLKLIRLAQFTIEYLLHSQEFLTSQLHTLEERLRLSHCDGEQSKKLLTKQAGEIKTLKEECKRRKKMISTQQLMIEAKANYYQRYILKYLQMKYIISRIYFRVIQG

SEQ ID NO: 2692 - protein, 1476 aa, Artificial Sequence
  Synthetic polypeptide
MAPAKATNVVRLLLGSTALWLSQLGSGTVAASKSVTAHLAAKWPETPLLLEASEFMAEESNEKFWQFLETVQELAIYKQTESDYSYYNLILKKAGQFLDNLHINLLKFAFSIRAYSPAIQMFQQIAADEPPPDGCNAFVVIHKKHTCKINEIKKLLKKAASRTRPYLFKGDHKFPTNKENLPVVILYAEMGTRTFSAFHKVLSEKAQNEEILYVLRHYIQKPSSRKMYLSGYGVELAIKSTEYKALDDTQVKTVTNTTVEDETETNEVQGFLFGKLKEIYSDLRDNLTAFQKYLIESNKQMMPLKVWELQDLSFQAASQIMSAPVYDSIKLMKDISQNFPIKARSLTRIAVNQHMREEIKENQKDLQVRFKIQPGDARLFINGLRVDMDVYDAFSILDMLKLEGKMMNGLRNLGINGEDMSKFLKLNSHIWEYTYVLDIRHSSIMWINDLENDDLYITWPTSCQKLLKPVFPGSVPSIRRNFHNLVLFIDPAQEYTLDFIKLADVFYSHEVPLRIGFVFILNTDDEVDGANDAGVALWRAFNYIAEEFDISEAFISIVHMYQKVKKDQNILTVDNVKSVLQNTFPHANIWDILGIHSKYDEERKAGASFYKMTGLGPLPQALYNGEPFKHEEMNIKELKMAVLQRMMDASVYLQREVFLGTLNDRTNAIDFLMDRNNVVPRINTLILRTNQQYLNLISTSVTADVEDFSTFFFLDSQDKSAVIAKNMYYLTQDDESIISAVTLWIIADFDKPSGRKLLFNALKHMKTSVHSRLGIIYNPTSKINEENTAISRGILAAFLTQKNMFLRSFLGQLAKEEIATAIYSGDKIKTFLIEGMDKNAFEKKYNTVGVNIFRTHQLFCQDVLKLRPGEMGIVSNGRFLGPLDEDFYAEDFYLLEKITFSNLGEKIKGIVENMGINANNMSDFIMKVDALMSSVPKRASRYDVTFLRENHSVIKTNPQENDMFFNVIAIVDPLTREAQKMAQLLVVLGKIINMKIKLFMNCRGRLSEAPLESFYRFVLEPELMSGANDVSSLGPVAKFLDIPESPLLILNMITPEGWLVETVHSNCDLDNIHLKDTEKTVTAEYELEYLLLEGQCFDKVTEQPPRGLQFTLGTKNKPAVVDTIVMAHHGYFQLKANPGAWILRLHQGKSEDIYQIVGHEGTDSQADLEDIIVVLNSFKSKILKVKVKKETDKIKEDILTDEDEKTKGLWDSIKSFTVSLHKENKKEKDVLNIFSVASGHLYERFLRIMMLSVLRNTKTPVKFWLLKNYLSPTFKEVIPHMAKEYGFRYELVQYRWPRWLRQQTERQRIIWGYKILFLDVLFPLAVDKIIFVDADQIVRHDLKELRDFDLDGAPYGYTPFCDSRREMDGYRFWKTGYWASHLLRRKYHISALYVVDLKKFRRIGAGDRLRSQYQALSQDPNSLSNLDQPPALPSQSAEIAASAWPPPRLGSEERLCLAAHHLGCEEPLCPAAQSGK

SEQ ID NO: 2693 - protein, 1465 aa, Artificial Sequence
  Synthetic polypeptide
MAPAKATNVVRLLLGSTALWLSQLGSGTVAASKSVTAHLAAKWPETPLLLEASEFMAEESNEKFWQFLETVQELAIYKQTESDYSYYNLILKKAGQFLDNLHINLLKFAFSIRAYSPAIQMFQQIAADEPPPDGCNAFVVIHKKHTCKINEIKKLLKKAASRTRPYLFKGDHKFPTNKENLPVVILYAEMGTRTFSAFHKVLSEKAQNEEILYVLRHYIQKPSSRKMYLSGYGVELAIKSTEYKALDDTQVKTVTNTTVEDETETNEVQGFLFGKLKEIYSDLRDNLTAFQKYLIESNKQMMPLKVWELQDLSFQAASQIMSAPVYDSIKLMKDISQNFPIKARSLTRIAVNQHMREEIKENQKDLQVRFKIQPGDARLFINGLRVDMDVYDAFSILDMLKLEGKMMNGLRNLGINGEDMSKFLKLNSHIWEYTYVLDIRHSSIMWINDLENDDLYITWPTSCQKLLKPVFPGSVPSIRRNFHNLVLFIDPAQEYTLDFIKLADVFYSHEVPLRIGFVFILNTDDEVDGANDAGVALWRAFNYIAEEFDISEAFISIVHMYQKVKKDQNILTVDNVKSVLQNTFPHANIWDILGIHSKYDEERKAGASFYKMTGLGPLPQALYNGEPFKHEEMNIKELKMAVLQRMMDASVYLQREVFLGTLNDRTNAIDFLMDRNNVVPRINTLILRTNQQYLNLISTSVTADVEDFSTFFFLDSQDKSAVIAKNMYYLTQDDESIISAVTLWIIADFDKPSGRKLLFNALKHMKTSVHSRLGIIYNPTSKINEENTAISRGILAAFLTQKNMFLRSFLGQLAKEEIATAIYSGDKIKTFLIEGMDKNAFEKKYNTVGVNIFRTHQLFCQDVLKLRPGEMGIVSNGRFLGPLDEDFYAEDFYLLEKITFSNLGEKIKGIVENMGINANNMSDFIMKVDALMSSVPKRASRYDVTFLRENHSVIKTNPQENDMFFNVIAIVDPLTREAQKMAQLLVVLGKIINMKIKLFMNCRGRLSEAPLESFYRFVLEPELMSGANDVSSLGPVAKFLDIPESPLLILNMITPEGWLVETVHSNCDLDNIHLKDTEKTVTAEYELEYLLLEGQCFDKVTEQPPRGLQFTLGTKNKPAVVDTIVMAHHGYFQLKANPGAWILRLHQGKSEDIYQIVGHEGTDSQADLEDIIVVLNSFKSKILKVKVKKETDKIKEDILTDEDEKTKGLWDSIKSFTVSLHKENKKEKDVLNIFSVASGHLYERFLRIMMLSVLRNTKTPVKFWLLKNYLSPTFKEVIPHMAKEYGFRYELVQYRWPRWLRQQTERQRIIWGYKILFLDVLFPLAVDKIIFVDADQIVRHDLKELRDFDLDGAPYGYTPFCDSRREMDGYRFWKTGYWASHLLRRKYHISALYVVDLKKFRRIGAGDRLRSQYQALSQDPNSLSNLDQAGVQWRDLGSLQPPPPSRLPCPPKVPRLQPLPGRHPV

SEQ ID NO: 2694 - protein, 1445 aa, Artificial Sequence
  Synthetic polypeptide
MAPAKATNVVRLLLGSTALWLSQLGSGTVAASKSVTAHLAAKWPETPLLLEASEFMAEESNEKFWQFLETVQELAIYKQTESDYSYYNLILKKAGQFLDNLHINLLKFAFSIRAYSPAIQMFQQIAADEPPPDGCNAFVVIHKKHTCKINEIKKLLKKAASRTRPYLFKGDHKFPTNKENLPVVILYAEMGTRTFSAFHKVLSEKAQNEEILYVLRHYIQKPSSRKMYLSGYGVELAIKSTEYKALDDTQVKTVTNTTVEDETETNEVQGFLFGKLKEIYSDLRDNLTAFQKYLIESNKQMMPLKVWELQDLSFQAASQIMSAPVYDSIKLMKDISQNFPIKARSLTRIAVNQHMREEIKENQKDLQVRFKIQPGDARLFINGLRVDMDVYDAFSILDMLKLEGKMMNGLRNLGINGEDMSKFLKLNSHIWEYTYVLDIRHSSIMWINDLENDDLYITWPTSCQKLLKPVFPGSVPSIRRNFHNLVLFIDPAQEYTLDFIKLADVFYSHEVPLRIGFVFILNTDDEVDGANDAGVALWRAFNYIAEEFDISEAFISIVHMYQKVKKDQNILTVDNVKSVLQNTFPHANIWDILGIHSKYDEERKAGASFYKMTGLGPLPQALYNGEPFKHEEMNIKELKMAVLQRMMDASVYLQREVFLGTLNDRTNAIDFLMDRNNVVPRINTLILRTNQQYLNLISTSVTADVEDFSTFFFLDSQDKSAVIAKNMYYLTQDDESIISAVTLWIIADFDKPSGRKLLFNALKHMKTSVHSRLGIIYNPTSKINEENTAISRGILAAFLTQKNMFLRSFLGQLAKEEIATAIYSGDKIKTFLIEGMDKNAFEKKYNTVGVNIFRTHQLFCQDVLKLRPGEMGIVSNGRFLGPLDEDFYAEDFYLLEKITFSNLGEKIKGIVENMGINANNMSDFIMKVDALMSSVPKRASRYDVTFLRENHSVIKTNPQENDMFFNVIAIVDPLTREAQKMAQLLVVLGKIINMKIKLFMNCRGRLSEAPLESFYRFVLEPELMSGANDVSSLGPVAKFLDIPESPLLILNMITPEGWLVETVHSNCDLDNIHLKDTEKTVTAEYELEYLLLEGQCFDKVTEQPPRGLQFTLGTKNKPAVVDTIVMAHHGYFQLKANPGAWILRLHQGKSEDIYQIVGHEGTDSQADLEDIIVVLNSFKSKILKVKVKKETDKIKEDILTDEDEKTKGLWDSIKSFTVSLHKENKKEKDVLNIFSVASGHLYERFLRIMMLSVLRNTKTPVKFWLLKNYLSPTFKEVIPHMAKEYGFRYELVQYRWPRWLRQQTERQRIIWGYKILFLDVLFPLAVDKIIFVDADQIVRHDLKELRDFDLDGAPYGYTPFCDSRREMDGYRFWKTGYWASHLLRRKYHISALYVVDLKKFRRIGAGDRLRSQYQALSQDPNSLSNLDQPRLDCTAAILAHCNFPA

SEQ ID NO: 2695 - protein, 1221 aa, Artificial Sequence
  Synthetic polypeptide
MAPAKATNVVRLLLGSTALWLSQLGSGTVAASKSVTAHLAAKWPETPLLLEASEFMAEESNEKFWQFLETVQELAIYKQTESDYSYYNLILKKAGQFLDNLHINLLKFAFSIRAYSPAIQMFQQIAADEPPPDGCNAFVVIHKKHTCKINEIKKLLKKAASRTRPYLFKGDHKFPTNKENLPVVILYAEMGTRTFSAFHKVLSEKAQNEEILYVLRHYIQKPSSRKMYLSGYGVELAIKSTEYKALDDTQVKTVTNTTVEDETETNEVQGFLFGKLKEIYSDLRDNLTAFQKYLIESNKQMMPLKVWELQDLSFQAASQIMSAPVYDSIKLMKDISQNFPIKARSLTRIAVNQHMREEIKENQKDLQVRFKIQPGDARLFINGLRVDMDVYDAFSILDMLKLEGKMMNGLRNLGINGEDMSKFLKLNSHIWEYTYVLDIRHSSIMWINDLENDDLYITWPTSCQKLLKPVFPGSVPSIRRNFHNLVLFIDPAQEYTLDFIKLADVFYSHEVPLRIGFVFILNTDDEVDGANDAGVALWRAFNYIAEEFDISEAFISIVHMYQKVKKDQNILTVDNVKSVLQNTFPHANIWDILGIHSKYDEERKAGASFYKMTGLGPLPQALYNGEPFKHEEMNIKELKMAVLQRMMDASVYLQREVFLGTLNDRTNAIDFLMDRNNVVPRINTLILRTNQQYLNLISTSVTADVEDFSTFFFLDSQDKSAVIAKNMYYLTQDDESIISAVTLWIIADFDKPSGRKLLFNALKHMKTSVHSRLGIIYNPTSKINEENTAISRGILAAFLTQKNMFLRSFLGQLAKEEIATAIYSGDKIKTFLIEGMDKNAFEKKYNTVGVNIFRTHQLFCQDVLKLRPGEMGIVSNGRFLGPLDEDFYAEDFYLLEKITFSNLGEKIKGIVENMGINANNMSDFIMKVDALMSSVPKRASRYDVTFLRENHSVIKTNPQENDMFFNVIAIVDPLTREAQKMAQLLVVLGKIINMKIKLFMNCRGRLSEAPLESFYRFVLEPELMSGANDVSSLGPVAKFLDIPESPLLILNMITPEGWLVETVHSNCDLDNIHLKDTEKTVTAEYELEYLLLEGQCFDKVTEQPPRGLQFTLGTKNKPAVVDTIVMAHHGYFQLKANPGAWILRLHQGKSEDIYQIVGHEGTDSQADLEDIIVVLNSFKSKILKVKVKKETDKIKEDILTDEDEKTKGLWDSIKSSSYSED

SEQ ID NO: 2696 - protein, 696 aa, Artificial Sequence
  Synthetic polypeptide
MAPAKATNVVRLLLGSTALWLSQLGSGTVAASKSVTAHLAAKWPETPLLLEASEFMAEESNEKFWQFLETVQELAIYKQTESDYSYYNLILKKAGQFLDNLHINLLKFAFSIRAYSPAIQMFQQIAADEPPPDGCNAFVVIHKKHTCKINEIKKLLKKAASRTRPYLFKGDHKFPTNKENLPVVILYAEMGTRTFSAFHKVLSEKAQNEEILYVLRHYIQKPSSRKMYLSGYGVELAIKSTEYKALDDTQVKTVTNTTVEDETETNEVQGFLFGKLKEIYSDLRDNLTAFQKYLIESNKQMMPLKVWELQDLSFQAASQIMSAPVYDSIKLMKDISQNFPIKARSLTRIAVNQHMREEIKENQKDLQVRFKIQPGDARLFINGLRVDMDVYDAFSILDMLKLEGKMMNGLRNLGINGEDMSKFLKLNSHIWEYTYVLDIRHSSIMWINDLENDDLYITWPTSCQKLLKPVFPGSVPSIRRNFHNLVLFIDPAQEYTLDFIKLADVFYSHEVPLRIGFVFILNTDDEVDGANDAGVALWRAFNYIAEEFDISEAFISIVHMYQKVKKDQNILTVDNVKSVLQNTFPHANIWDILGIHSKYDEERKAGASFYKMTGLGPLPQALYNGEPFKHEEMNIKELKMAVLQRMMDASVYLQREVFLAGVQWHDLGSLQPPPPSRLPCPPKVPRLQPLPGRHPV

SEQ ID NO: 2697 - protein, 607 aa, Artificial Sequence
  Synthetic polypeptide
MAPAKATNVVRLLLGSTALWLSQLGSGTVAASKSVTAHLAAKWPETPLLLEASEFMAEESNEKFWQFLETVQELAIYKQTESDYSYYNLILKKAGQFLDNLHINLLKFAFSIRAYSPAIQMFQQIAADEPPPDGCNAFVVIHKKHTCKINEIKKLLKKAASRTRPYLFKGDHKFPTNKENLPVVILYAEMGTRTFSAFHKVLSEKAQNEEILYVLRHYIQKPSSRKMYLSGYGVELAIKSTEYKALDDTQVKTVTNTTVEDETETNEVQGFLFGKLKEIYSDLRDNLTAFQKYLIESNKQMMPLKVWELQDLSFQAASQIMSAPVYDSIKLMKDISQNFPIKARSLTRIAVNQHMREEIKENQKDLQVRFKIQPGDARLFINGLRVDMDVYDAFSILDMLKLEGKMMNGLRNLGINGEDMSKFLKLNSHIWEYTYVLDIRHSSIMWINDLENDDLYITWPTSCQKLLKPVFPGSVPSIRRNFHNLVLFIDPAQEYTLDFIKLADVFYSHEVPLRIGFVFILNTDDEVDGANDAGVALWRAFNYIAEEFDISEAFISIVHMYQKVKKDQNILTVDNVKSVLQNTFPHANIWDILGIHSKYDEERKVNN

SEQ ID NO: 2698 - protein, 570 aa, Artificial Sequence
  Synthetic polypeptide
MAPAKATNVVRLLLGSTALWLSQLGSGTVAASKSVTAHLAAKWPETPLLLEASEFMAEESNEKFWQFLETVQELAIYKQTESDYSYYNLILKKAGQFLDNLHINLLKFAFSIRAYSPAIQMFQQIAADEPPPDGCNAFVVIHKKHTCKINEIKKLLKKAASRTRPYLFKGDHKFPTNKENLPVVILYAEMGTRTFSAFHKVLSEKAQNEEILYVLRHYIQKPSSRKMYLSGYGVELAIKSTEYKALDDTQVKTVTNTTVEDETETNEVQGFLFGKLKEIYSDLRDNLTAFQKYLIESNKQMMPLKVWELQDLSFQAASQIMSAPVYDSIKLMKDISQNFPIKARSLTRIAVNQHMREEIKENQKDLQVRFKIQPGDARLFINGLRVDMDVYDAFSILDMLKLEGKMMNGLRNLGINGEDMSKFLKLNSHIWEYTYVLDIRHSSIMWINDLENDDLYITWPTSCQKLLKPVFPGSVPSIRRNFHNLVLFIDPAQEYTLDFIKLADVFYSHEVPLRIGFVFILNTDDEVDGANDAGVALWRAFNYIAEEFDISEAFISIVHTCLQRRLKRIH

SEQ ID NO: 2699 - protein, 621 aa, Artificial Sequence
  Synthetic polypeptide
MPEDQVGKLEATENTISAMAAAAAEQQQFYLLLGNLLSPDNVVRKQAEETYENIPGQSKITFLLQAIRNTTAAEEARQMAAVLLRRLLSSAFDEVYPALPSDVQTAIKSELLMIIQMETQSSMRKKVCDIAAELARNLIDEDGNNQWPEGLKFLFDSVSSQNVGLREAALHIFWNFPGIFGNQQQHYLDVIKRMLVQCMQDQEHPSIRTLSARATAAFILANEHNVALFKHFADLLPGFLQAVNDSCYQNDDSVLKSLVEIADTVPKYLRPHLEATLQLSLKLCGDTSLNNMQRQLALEVIVTLSETAAAMLRKHTNIVAQTIPQMLAMMVDLEEDEDWANADELEDDDFDSNAVAGESALDRMACGLGGKLVLPMIKEHIMQMLQNPDWKYRHAGLMALSAIGEGCHQQMEGILNEIVNFVLLFLQDPHPRVRYAACNAVGQMATDFAPGFQKKFHEKVIAALLQTMEDQGNQRVQAHAAAALINFTEDCPKSLLIPYLDNLVKHLHSIMVLKLQELIQKGTKLVLEQVVTSIASVADTAEEKFVPYYDLFMPSLKHIVENAVQKELRLLRGKTIECISLIGLAVGKEKFMQDASDVMQLLLKTQTDFNDMEDDDPQPFE

SEQ ID NO: 2700 - protein, 603 aa, Artificial Sequence
  Synthetic polypeptide
MAAAAAEQQQFYLLLGNLLSPDNVVRKQAEETYENIPGQSKITFLLQAIRNTTAAEEARQMAAVLLRRLLSSAFDEVYPALPSDVQTAIKSELLMIIQMETQSSMRKKVCDIAAELARNLIDEDGNNQWPEGLKFLFDSVSSQNVGLREAALHIFWNFPGIFGNQQQHYLDVIKRMLVQCMQDQEHPSIRTLSARATAAFILANEHNVALFKHFADLLPGFLQAVNDSCYQNDDSVLKSLVEIADTVPKYLRPHLEATLQLSLKLCGDTSLNNMQRQLALEVIVTLSETAAAMLRKHTNIVAQTIPQMLAMMVDLEEDEDWANADELEDDDFDSNAVAGESALDRMACGLGGKLVLPMIKEHIMQMLQNPDWKYRHAGLMALSAIGEGCHQQMEGILNEIVNFVLLFLQDPHPRVRYAACNAVGQMATDFAPGFQKKFHEKVIAALLQTMEDQGNQRVQAHAAAALINFTEDCPKSLLIPYLDNLVKHLHSIMVLKLQELIQKGTKLVLEQVVTSIASVADTAEEKFVPYYDLFMPSLKHIVENAVQKELRLLRGKTIECISLIGLAVGKEKFMQDASDVMQLLLKTQTDFNDMEDDDPQPFE

SEQ ID NO: 2701 - protein, 478 aa, Artificial Sequence
  Synthetic polypeptide
MAAAAAEQQQFYLLLGNLLSPDNVVRKQAEETYENIPGQSKITFLLQAIRNTTAAEEARQMAAVLLRRLLSSAFDEVYPALPSDVQTAIKNLLPGFLQAVNDSCYQNDDSVLKSLVEIADTVPKYLRPHLEATLQLSLKLCGDTSLNNMQRQLALEVIVTLSETAAAMLRKHTNIVAQTIPQMLAMMVDLEEDEDWANADELEDDDFDSNAVAGESALDRMACGLGGKLVLPMIKEHIMQMLQNPDWKYRHAGLMALSAIGEGCHQQMEGILNEIVNFVLLFLQDPHPRVRYAACNAVGQMATDFAPGFQKKFHEKVIAALLQTMEDQGNQRVQAHAAAALINFTEDCPKSLLIPYLDNLVKHLHSIMVLKLQELIQKGTKLVLEQVVTSIASVADTAEEKFVPYYDLFMPSLKHIVENAVQKELRLLRGKTIECISLIGLAVGKEKFMQDASDVMQLLLKTQTDFNDMEDDDPQPFE

SEQ ID NO: 2702 - protein, 67 aa, Artificial Sequence
  Synthetic polypeptide
FSGHCCRGAWHQLPPRRRSHPRAAAPDAPPSRKPMRISQASQRSHSSYKPSEIQQLLKRLDKWPPFS

SEQ ID NO: 2703 - protein, 217 aa, Artificial Sequence
  Synthetic polypeptide
MAHSPVQSGLPGMQNLKADPEELFTKLEKIGKGSFGEVFKGIDNRTQKVVAIKIIDLEEAEDEIEDIQQEITVLSQCDSPYVTKYYGSYLKDTKLWIIMEYLGGGSALDLLEPGPLDETQIATILREILKGLDYLHSEKKIHRDIKAANVLLSEHGEVKLADFGVAGQLTDTQIKRNTFVGTPFWMAPEVIKQSAYDSKPEEKIWNIPAQRNEPCLR

SEQ ID NO: 2704 - protein, 229 aa, Artificial Sequence
  Synthetic polypeptide
MDSRAQLWGLALNKRRATLPHPGGSTNLKADPEELFTKLEKIGKGSFGEVFKGIDNRTQKVVAIKIIDLEEAEDEIEDIQQEITVLSQCDSPYVTKYYGSYLKDTKLWIIMEYLGGGSALDLLEPGPLDETQIATILREILKGLDYLHSEKKIHRDIKAANVLLSEHGEVKLADFGVAGQLTDTQIKRNTFVGTPFWMAPEVIKQSAYDSKPEEKIWNIPAQRNEPCLR

SEQ ID NO: 2705 - protein, 198 aa, Artificial Sequence
  Synthetic polypeptide
MAHSPVQSGLPGMQNLKADPEELFTKLEKIGKGSFGEVFKGIDNRTQKVVAIKIIDLEEAEDEIEDIQQEITVLSQCDSPYVTKYYGSYLKLEPGPLDETQIATILREILKGLDYLHSEKKIHRDIKAANVLLSEHGEVKLADFGVAGQLTDTQIKRNTFVGTPFWMAPEVIKQSAYDSKPEEKIWNIPAQRNEPCLR

SEQ ID NO: 2706 - protein, 34 aa, Artificial Sequence
  Synthetic polypeptide
QILWILSEGYKIMDNNGISWWRLRTRSIRTWPIR

SEQ ID NO: 2707 - protein, 162 aa, Artificial Sequence
  Synthetic polypeptide
MFTSTGSSGLYKAPLSKSLLLVPSALSLLLALLLPHCQKLFVYDLHAVKNDFQMSGLCYDSKMFQVHQVLCIPSWMAKFFSWTLEPIFSSSEPTSEARIGMGATLDIQRQQRMELLDRQLMFSQFAQGRRQRQQQIHNYHCVTAASSIQHSDLLYRFVAWSP

SEQ ID NO: 2708 - protein, 296 aa, Artificial Sequence
  Synthetic polypeptide
MFTSTGSSGLYKAPLSKSLLLVPSALSLLLALLLPHCQKLFVYDLHAVKNDFQIWRLICGRIICLDLKDTFCSSLLIYNFRIFERRYGSRKFASFLLGSWVLSALFDFLLIEAMQYFFGITAASNLPSGFLAPVFALFVPFYCSIPRVQVAQILGPLSITNKTLIYILGLQLFTSGSYIWIVAISGLMSGLCYDSKMFQVHQVLCIPSWMAKFFSWTLEPIFSSSEPTSEARIGMGATLDIQRQQRMELLDRQLMFSQFAQGRRQRQQQIHNYHCVTAASSIQHSDLLYRFVAWSP

SEQ ID NO: 2709 - protein, 261 aa, Artificial Sequence
  Synthetic polypeptide
MCFFFSLQEEFLDKHTLMRVLSSGGKLGSRGEGAQLCCWMLLFSWRVSGGQQTRRLCRRAFCWSPVPSPSCSPSSCLTARSSLCMTFTQSRTTSSLAPVFALFVPFYCSIPRVQVAQILGPLSITNKTLIYILGLQLFTSGSYIWIVAISGLMSGLCYDSKMFQVHQVLCIPSWMAKFFSWTLEPIFSSSEPTSEARIGMGATLDIQRQQRMELLDRQLMFSQFAQGRRQRQQQIHNYHCVTAASSIQHSDLLYRFVAWSP

SEQ ID NO: 2710 - protein, 172 aa, Artificial Sequence
  Synthetic polypeptide
MFTSTGSSGLYKAPLSKSLLLVPSALSLLLALLLPHCQKLFVYDLHAVKNDFQMSGLCYDSKMFQVHQVLCIPSWMAKFFSWTLEPIFSSSEPTSEARIGMGATLDIQRQQRMELLDRQLMFSQFAQGRRQRQQQSNRTKSNAEADGRIQQPSSKSDIKEICKNGKQCHSSQ

SEQ ID NO: 2711 - protein, 306 aa, Artificial Sequence
  Synthetic polypeptide
MFTSTGSSGLYKAPLSKSLLLVPSALSLLLALLLPHCQKLFVYDLHAVKNDFQIWRLICGRIICLDLKDTFCSSLLIYNFRIFERRYGSRKFASFLLGSWVLSALFDFLLIEAMQYFFGITAASNLPSGFLAPVFALFVPFYCSIPRVQVAQILGPLSITNKTLIYILGLQLFTSGSYIWIVAISGLMSGLCYDSKMFQVHQVLCIPSWMAKFFSWTLEPIFSSSEPTSEARIGMGATLDIQRQQRMELLDRQLMFSQFAQGRRQRQQQSNRTKSNAEADGRIQQPSSKSDIKEICKNGKQCHSSQ

SEQ ID NO: 2712 - protein, 271 aa, Artificial Sequence
  Synthetic polypeptide
MCFFFSLQEEFLDKHTLMRVLSSGGKLGSRGEGAQLCCWMLLFSWRVSGGQQTRRLCRRAFCWSPVPSPSCSPSSCLTARSSLCMTFTQSRTTSSLAPVFALFVPFYCSIPRVQVAQILGPLSITNKTLIYILGLQLFTSGSYIWIVAISGLMSGLCYDSKMFQVHQVLCIPSWMAKFFSWTLEPIFSSSEPTSEARIGMGATLDIQRQQRMELLDRQLMFSQFAQGRRQRQQQSNRTKSNAEADGRIQQPSSKSDIKEICKNGKQCHSSQ

SEQ ID NO: 2713 - protein, 175 aa, Artificial Sequence
  Synthetic polypeptide
MSPGLLLLGSAVLLAFGLCCTFVHRARSRYEHIPGPPRPSFLLGHLPCFWKKDEVGGRVLQDVFLDWAKKYGPVVRVNVFHKTSVIVTSPESVKKFLMSTKYNKDSKMYRALQTVFGERLFGQGLVSECNYERWHKQRRVIDLAFSRRFFKSLLYNSLRQVLQEASRRRHYYHRR

SEQ ID NO: 2714 - protein, 78 aa, Artificial Sequence
  Synthetic polypeptide
MSTKYNKDSKMYRALQTVFGERLFGQGLVSECNYERWHKQRRVIDLAFSRRFFKSLLYNSLRQVLQEASRRRHYYHRR

SEQ ID NO: 2715 - protein, 18 aa, Artificial Sequence
  Synthetic polypeptide
HSRSSCWAPTAHSWAPQT

SEQ ID NO: 2716 - protein, 11 aa, Artificial Sequence
  Synthetic polypeptide
MATRFEIFQIK

SEQ ID NO: 2717 - protein, 151 aa, Artificial Sequence
  Synthetic polypeptide
MPPCSGGDGSTPPGPSLRDRDCPAQSAEYPRDRLDPRPGSPSEASSPPFLRSRAPVNWYQEKAQVFLWHLMVSGSTTLLCLWKQPFHVSAFPVTASLAFRQSQGAGQHLYKDLQPFILLRLLPQDKRMREEKAAGERSEPNFECWEEMDSW

SEQ ID NO: 2718 - protein, 118 aa, Artificial Sequence
  Synthetic polypeptide
MPPCSGGDGSTPPGPSLRDRDCPAQSAEYPRDRLDPRPGSPSEASSPPFLRSFTPEASKTTSPPGGTNNSRRAALGAVILTVKVCSFTPEPVRPRTHQKEETLNTTEHQKEQTPDAPP

SEQ ID NO: 2719 - protein, 64 aa, Artificial Sequence
  Synthetic polypeptide
MPPCSGGDGSTPPGPSLRDRDCPAQSAEYPRDRLDPRPGSPSEASSPPFLRSCNTHREDLQLHS

SEQ ID NO: 2720 - protein, 35 aa, Artificial Sequence
  Synthetic polypeptide
MIPMRESPPTRPCSTPTSKNRGMVAHTCDSSYSGG

SEQ ID NO: 2721 - protein, 54 aa, Artificial Sequence
  Synthetic polypeptide
KWNISQRCKTRKYTNKAGCPEIRGLWLLPECLFQAAVHGIHLHPLVPGPGVSPH

SEQ ID NO: 2722 - protein, 61 aa, Artificial Sequence
  Synthetic polypeptide
MNFDFPFKKGSGIPLLTTNLSPQCLSLLHAMVAYDPDERIAAHQALQHPYFQEQRYGGTHV

SEQ ID NO: 2723 - protein, 294 aa, Artificial Sequence
  Synthetic polypeptide
MKNYKAIGKIGEGTFSEVMKMQSLRDGNYYACKQMKQRFESIEQVNNLREIQALRRLNPHPNILMLHEVVFDRKSGSLALICELMDMNIYELIRGRRYPLSEKKIMHYMYQLCKSLDHIHRNGIFHRDVKPENILIKDVLKLGDFGSCRSVYSKQPYTEYISTRWYRAPECLLTDGFYTYKMDLWSAGCVFYEIASLQPLFPGVNELDQISKIHDVIGTPAQKILTKFKQSRAMNFDFPFKKGSGIPLLTTNLSPQCLSLLHAMVAYDPDERIAAHQALQHPYFQEQRYGGTHV

SEQ ID NO: 2724 - protein, 295 aa, Artificial Sequence
  Synthetic polypeptide
MKNYKAIGKIGEGTFSEVMKMQSLRDGNYYACKQMKQRFESIEQVNNLREIQALRRLNPHPNILMLHEVVFDRKSGSLALICELMDMNIYELIRGRRYPLSEKKIMHYMYQLCKSLDHIHRNGIFHRDVKPENILIKQDVLKLGDFGSCRSVYSKQPYTEYISTRWYRAPECLLTDGFYTYKMDLWSAGCVFYEIASLQPLFPGVNELDQISKIHDVIGTPAQKILTKFKQSRAMNFDFPFKKGSGIPLLTTNLSPQCLSLLHAMVAYDPDERIAAHQALQHPYFQEQRYGGTHV

SEQ ID NO: 2725 - protein, 265 aa, Artificial Sequence
  Synthetic polypeptide
MKNYKAIGKIGEGTFSEVMKMQSLRDGNYYACKQMKQRFESDRKSGSLALICELMDMNIYELIRGRRYPLSEKKIMHYMYQLCKSLDHIHRNGIFHRDVKPENILIKQDVLKLGDFGSCRSVYSKQPYTEYISTRWYRAPECLLTDGFYTYKMDLWSAGCVFYEIASLQPLFPGVNELDQISKIHDVIGTPAQKILTKFKQSRAMNFDFPFKKGSGIPLLTTNLSPQCLSLLHAMVAYDPDERIAAHQALQHPYFQEQRYGGTHV

SEQ ID NO: 2726 - protein, 80 aa, Artificial Sequence
  Synthetic polypeptide
MASISEPVTFREFCPLYYLLNAIPTKIQKGFRSIVVYLTALDTNGDYIAVGSSIGMLYLYCRHLNQMRKYNFELKRREYF

SEQ ID NO: 2727 - protein, 1281 aa, Artificial Sequence
  Synthetic polypeptide
MASISEPVTFREFCPLYYLLNAIPTKIQKGFRSIVVYLTALDTNGDYIAVGSSIGMLYLYCRHLNQMRKYNFEGKTESITVVKLLSCFDDLVAAGTASGRVAVFQLVSSLPGRNKQLRRFDVTGIHKNSITALAWSPNGMKLFSGDDKGKIVYSSLDLDQGLCNSQLVLEEPSSIVQLDYSQKVLLVSTLQRSLLFYTEEKSVRQIGTQPRKSTGKFGACFIPGLCKQSDLTLYASRPGLRLWKADVHGTVQATFILKDAFAGGVKPFELHPRLESPNSGSCSLPERHLGLVSCFFQEGWVLSWNEYSIYLLDTVNQATVAGLEGSGDIVSVSCTENEIFFLKGDRNIIRISSRPEGLTSTVRDGLEMSGCSERVHVQQAEKLPGATVSETRLRGSSMASSVASEPRSRSSSLNSTDSGSGLLPPGLQATPELGKGSQPLSQRFNAISSEDFDQELVVKPIKVKRKKKKKKTEGGSRSTCHSSLESTPCSEFPGDSPQSLNTDLLSMTSSVLGSSVDQLSAESPDQESSFNGEVNGVPQENTDPETFNVLEVSGSMPDSLAEEDDIRTEMPHCHHAHGRELLNGAREDVGGSDVTGLGDEPCPADDGPNSTQLPFQEQDSSPGAHDGEDIQPIGPQSTFCEVPLLNSLTVPSSLSWAPSAEQWLPGTRADEGSPVEPSQEQDILTSMEASGHLSTNLWHAVTDDDTGQKEIPISERVLGSVGGQLTPVSALAASTHKPWLEQPPRDQTLTSSDEEDIYAHGLPSSSSETSVTELGPSCSQQDLSRLGAEDAGLLKPDQFAESWMGYSGPGYGILSLVVSEKYIWCLDYKGGLFCSALPGAGLRWQKFEDAVQQVAVSPSGALLWKIEQKSNRAFACGKVTIKGKRHWYEALPQAVFVALSDDTAWIIRTSGDLYLQTGLSVDRPCARAVKVDCPYPLSQITARNNVVWALTEQRALLYREGVSSFCPEGEQWKCDIVSERQALEPVCITLGDQQTLWALDIHGNLWFRTGIISKKPQGDDDHWWQVSITDYVVFDQCSLFQTIIHATHSVATAAQAPVEKVADKLRMAFWSQQLQCQPSLLGVNNSGVWISSGKNEFHVAKGSLIGTYWNHVVPRGTASATKWAFVLASAAPTKEGSFLWLCQSSKDLCSVSAQSAQSRPSTVQLPPEAEMRAYAACQDALWALDSLGQVFIRTLSKSCPTGMHWTRLDLSQLGAVKLTSLACGNQHIWACDSRGGVYFRVGTQPLNPSLMLPAWIMIEPPVQVEAGRPLEPRSSRPAWAT

SEQ ID NO: 2728 - protein, 73 aa, Artificial Sequence
  Synthetic polypeptide
MLPCAAGARGRGAMVVLRAGKKTFLPPLCRAFACRGCQLAPERGAERRDTAPSGVQWLTPVIPALWEAKAGGS

SEQ ID NO: 2729 - protein, 104 aa, Artificial Sequence
  Synthetic polypeptide
AAVRRGSQGAWGHGGLAGGEEDLSPPSLPRLRLPRLSTRSGARRRAQGYGAQRGAVAHSCNPSTLGGQGGRIMKSGVQDQSDRCGETPSLLEIQKLARYGGACL

SEQ ID NO: 2730 - protein, 55 aa, Artificial Sequence
  Synthetic polypeptide
REPGGVGPWWSCGRGRRPFSPLSAAPSPAAAVNSLRSAAPSAGIRRPAGCSGSLL

SEQ ID NO: 2731 - protein, 60 aa, Artificial Sequence
  Synthetic polypeptide
MVVLRAGKKTFLPPLCRAFACRGCQLAPERGAERRDTAPSGVQWLTPVIPALWEAKAGGS

SEQ ID NO: 2732 - protein, 43 aa, Artificial Sequence
  Synthetic polypeptide
AFACRGCQLAPERGAERRDTAPSGVQWLTPVIPALWEAKAGGS

SEQ ID NO: 2733 - protein, 35 aa, Artificial Sequence
  Synthetic polypeptide
LAPERGAERRDTAPSGVQWLTPVIPALWEAKAGGS

SEQ ID NO: 2734 - protein, 139 aa, Artificial Sequence
  Synthetic polypeptide
MLPCAAGARGRGAMVVLRAGKKTFLPPLCRAFACRGCQLAPERGAERRDTAPSGVSRFCPPRKSCHDWIGPPDKYSNLRPVHFYIPENESPLEQKLRKLRQETQEWNQQFWANQNLTFSKVQWLTPVIPALWEAKAGGS

SEQ ID NO: 2735 - protein, 63 aa, Artificial Sequence
  Synthetic polypeptide
REPGGVGPWWSCGRGRRPFSPLSAAPSPAAAVNSLRSAAPSAGIRRPAGSQDSALQESLAMIG

SEQ ID NO: 2736 - protein, 126 aa, Artificial Sequence
  Synthetic polypeptide
MVVLRAGKKTFLPPLCRAFACRGCQLAPERGAERRDTAPSGVSRFCPPRKSCHDWIGPPDKYSNLRPVHFYIPENESPLEQKLRKLRQETQEWNQQFWANQNLTFSKVQWLTPVIPALWEAKAGGS

SEQ ID NO: 2737 - protein, 101 aa, Artificial Sequence
  Synthetic polypeptide
LAPERGAERRDTAPSGVSRFCPPRKSCHDWIGPPDKYSNLRPVHFYIPENESPLEQKLRKLRQETQEWNQQFWANQNLTFSKVQWLTPVIPALWEAKAGGS

SEQ ID NO: 2738 - protein, 20 aa, Artificial Sequence
  Synthetic polypeptide
IKTRNTRMESTVLGKPEFDF

SEQ ID NO: 2739 - protein, 190 aa, Artificial Sequence
  Synthetic polypeptide
MLPCAAGARGRGAMVVLRAGKKTFLPPLCRAFACRGCQLAPERGAERRDTAPSGVSRFCPPRKSCHDWIGPPDKYSNLRPVHFYIPENESPLEQKLRKLRQETQEWNQQFWANQNLTFSKEKEEFIHSRLKTKGLGLRTESGQKATLNAEEMADFYKEFLSKNFQKHMYYNRLDTVARTWNPMTLGGQGG

SEQ ID NO: 2740 - protein, 102 aa, Artificial Sequence
  Synthetic polypeptide
AAVRRGSQGAWGHGGLAGGEEDLSPPSLPRLRLPRLSTRSGARRRAQGYGAQRGQKATLNAEEMADFYKEFLSKNFQKHMYYNRLDTVARTWNPMTLGGQGG

SEQ ID NO: 2741 - protein, 177 aa, Artificial Sequence
  Synthetic polypeptide
MVVLRAGKKTFLPPLCRAFACRGCQLAPERGAERRDTAPSGVSRFCPPRKSCHDWIGPPDKYSNLRPVHFYIPENESPLEQKLRKLRQETQEWNQQFWANQNLTFSKEKEEFIHSRLKTKGLGLRTESGQKATLNAEEMADFYKEFLSKNFQKHMYYNRLDTVARTWNPMTLGGQGG

SEQ ID NO: 2742 - protein, 182 aa, Artificial Sequence
  Synthetic polypeptide
MLPCAAGARGRGAMVVLRAGKKTFLPPLCRAFACRGCQLAPERGAERRDTAPSGVSRFCPPRKSCHDWIGPPDKYSNLRPVHFYIPENESPLEQKLRKLRQETQEWNQQFWANQNLTFSKEKEEFIHSRLKTKGLGLRTESGQKATLNAEEMADFYKEFLSKNFQKHMYYNRTERENQPLSS

SEQ ID NO: 2743 - protein, 94 aa, Artificial Sequence
  Synthetic polypeptide
AAVRRGSQGAWGHGGLAGGEEDLSPPSLPRLRLPRLSTRSGARRRAQGYGAQRGQKATLNAEEMADFYKEFLSKNFQKHMYYNRTERENQPLSS

SEQ ID NO: 2744 - protein, 169 aa, Artificial Sequence
  Synthetic polypeptide
MVVLRAGKKTFLPPLCRAFACRGCQLAPERGAERRDTAPSGVSRFCPPRKSCHDWIGPPDKYSNLRPVHFYIPENESPLEQKLRKLRQETQEWNQQFWANQNLTFSKEKEEFIHSRLKTKGLGLRTESGQKATLNAEEMADFYKEFLSKNFQKHMYYNRTERENQPLSS

SEQ ID NO: 2745 - protein, 193 aa, Artificial Sequence
  Synthetic polypeptide
MLPCAAGARGRGAMVVLRAGKKTFLPPLCRAFACRGCQLAPERGAERRDTAPSGVSRFCPPRKSCHDWIGPPDKYSNLRPVHFYIPENESPLEQKLRKLRQETQEWNQQFWANQNLTFSKEKEEFIHSRLKTKGLGLRTESGQKATLNAEEMADFYKEFLSKNFQKHMYYNRNINVLVDTLGALFYNKRSEKT

SEQ ID NO: 2746 - protein, 105 aa, Artificial Sequence
  Synthetic polypeptide
AAVRRGSQGAWGHGGLAGGEEDLSPPSLPRLRLPRLSTRSGARRRAQGYGAQRGQKATLNAEEMADFYKEFLSKNFQKHMYYNRNINVLVDTLGALFYNKRSEKT

SEQ ID NO: 2747 - protein, 180 aa, Artificial Sequence
  Synthetic polypeptide
MVVLRAGKKTFLPPLCRAFACRGCQLAPERGAERRDTAPSGVSRFCPPRKSCHDWIGPPDKYSNLRPVHFYIPENESPLEQKLRKLRQETQEWNQQFWANQNLTFSKEKEEFIHSRLKTKGLGLRTESGQKATLNAEEMADFYKEFLSKNFQKHMYYNRNINVLVDTLGALFYNKRSEKT

SEQ ID NO: 2748 - protein, 188 aa, Artificial Sequence
  Synthetic polypeptide
MDLDLLDLNPRIIAAIKKAKLKSVKEVLHFSGPDLKRLTNLSSPEVWHLLRTASLHLRGSSILTALQLHQQKERFPTQHQRLSLGCPVLDALLRGGLPLDGITELAGRSSAGKTQLALQLCLAVQFPRQHGGLEAGAVYICTEDAFPHKRLQQLMAQQPRLRTDVPGELLQKLRFGSQIFIEHVADVM

SEQ ID NO: 2749 - protein, 247 aa, Artificial Sequence
  Synthetic polypeptide
MSVKEGAQRKWAALKEKLGPQDSDPTEANLESADPELCIRLLQMPSVVNYSGLRKRLEGSDGGWMVQFLEQSGLDLLLEALARLSGRGVARISDALLQLTCVSCVRAVMNSRQGIEYILSNQGYVRQLSQALDTSNVMVKKQVFELLAALCIYSPEGHVLTLDALDHYKTVCSQQYRFSIVMNELSGSDNVPYVVTLLSVINAVILGPEDLRARTQLRNEFIGLQLLDVLARLRVQCSSLLGVRPTR

SEQ ID NO: 2750 - protein, 314 aa, Artificial Sequence
  Synthetic polypeptide
MSVKEGAQRKWAALKEKLGPQDSDPTEANLESADPELCIRLLQMPSVVNYSGLRKRLEGSDGGWMVQFLEQSGLDLLLEALARLSGRGVARISDALLQLTCVSCVRAVMNSRQGIEYILSNQGYVRQLSQALDTSNVMVKKQVFELLAALCIYSPEGHVLTLDALDHYKTVCSQQYRFSIVMNELSGSDNVPYVVTLLSVINAVILGPEDLRARTQLRNEFIGLQLLDVLARLRDLEDADLLIQLEAFEEAKAEDEEELLRVSGGVDMSSHQEVFASLFHKLSSGGSCVPRWHLATSEDIFGCHGWAGGAVGIE

SEQ ID NO: 2751 - protein, 159 aa, Artificial Sequence
  Synthetic polypeptide
MPKRSCPFADVAPLQLKVRVSQRELSRGVCAERYSQEVFEKTKRLLFLGAQAYLDHVWDEGCAVVHLPESPKPGPTGAPRAARGQMLIGPDGRLIRSLGQASEADPSGVASIACSSCVRAVDGKAVCGQCERALCGQCVRTCWGCGSVACTLCGLVETN

SEQ ID NO: 2752 - protein, 94 aa, Artificial Sequence
  Synthetic polypeptide
MPKRSCPFADVAPLQLKVRVSQRELSRGVCAERYSQEVFDPSGVASIACSSCVRAVDGKAVCGQCERALCGQCVRTCWGCGSVACTLCGLVETN

SEQ ID NO: 2753 - protein, 104 aa, Artificial Sequence
  Synthetic polypeptide
PLLSQEVFMERAALPGTAAFSGDQRQARQMCPVSRELPSLVGETSRRSRHRWSGQAQRRPSDSCSSGPRPTWTTCGMKAVPSFTCQSPQSLALQGPRGLHVGRC

SEQ ID NO: 2754 - protein, 43 aa, Artificial Sequence
  Synthetic polypeptide
ARRCQATGRRRQEGTAGCRFLSPWSRAAPPRRRPSPFSAMRTF

SEQ ID NO: 2755 - protein, 274 aa, Artificial Sequence
  Synthetic polypeptide
MQGRRELGGEPLSDLQEEAASASLRVAPERLSDDSLEWRRTCPDLLLSDGKASISMPREGGSTCTARCPDPGEHSSTWGEFEGFRESSAKSGQFSQSLELLEGPTEPQPPRTTSAPKECSSHQPCQGGPWVTGTSAVPPSEPILSYENILKCAFQEITVQQAAEDVSTIDHFLEISSEEKPGVERVHKLCNESRKLWRALQSIHTTSTSQRLWSESRCQENFFLVLGIDAAQKNLSGGQGHIMEDCDLKEPEGLLTVSSFCLQHCKALIQTKRP

SEQ ID NO: 2756 - protein, 32 aa, Artificial Sequence
  Synthetic polypeptide
MEDCDLKEPEGLLTVSSFCLQHCKALIQTKRP

SEQ ID NO: 2757 - protein, 10 aa, Artificial Sequence
  Synthetic polypeptide
SAYCTHLWWP

SEQ ID NO: 2758 - protein, 252 aa, Artificial Sequence
  Synthetic polypeptide
MSDTWSSIQAHKKQLDSLRERLQRRRKQDSGHLDLRNPEAALSPTFRSDSPVPTAPTSGGPKPSTASAVPELATDPELEKKLLHHLSDLALTLPTDAVSICLAISTPDAPATQDGVESLLQKFAAQELIEVKRGLLQDDAHPTLVTYADHSKLSAMMGAVAEKKGPGEVAGTVTGQKRRAEQDSTTVAAFASSLVSGLNSSASEPAKEPAKKSRKHAASDVDLEIESLLNQQSTKEQQSKKCVSLNKLINFS

SEQ ID NO: 2759 - protein, 118 aa, Artificial Sequence
  Synthetic polypeptide
MWGVFLLYVSMKMGGTTGQNIDQPTEMTATEGAIVQINCTYQTSGFNGLFWYQQHAGEAPTFLSYNVLDGLEEKETEKLILKFTWNCKGSRMAKIILKKKNKVGRLTFLYFKTYYKLW

SEQ ID NO: 2760 - protein, 486 aa, Artificial Sequence
  Synthetic polypeptide
MVTWLYRFLPTSNMAAKLRSLLPPDLRLQFWLHARLQKCFLSRGCGSYCAGAKASPLPGKMAMGLMCGRRELLRLLQSGRRVHSVAGPSQWLGKPLTTRLLFPAAPCCCRPHYLFLAASGPRSLSTSAISFAEVQVQAPPVVAATPSPTAVPEVASGETADVVQTAAEQSFAELGLGSYTPVGLIQNLLEFMHVDLGLPWWGAIAACTVFARCLIFPLIVTGQREAARIHNHLPEIQKFSSRIREAKLAGDHIEYYKASSEMALYQKKHGIKLYKPLILPVTQAPIFISFFIALREMANLPVPSLQTGGLWWFQDLTVSDPIYILPLAVTATMWAVLELGAETGVQSSDLQWMRNVIRMMPLITLPITMHFPTAVFMYWLSSNLFSLVQVSCLRIPAVRTVLKIPQRVVHDLDKLPPREGFLESFKKGWKNAEMTRQLREREQRMRNQLELAARGAVAHASNPSTFGRPRRADHEVSRSRPSWPTW

SEQ ID NO: 2761 - protein, 426 aa, Artificial Sequence
  Synthetic polypeptide
MAMGLMCGRRELLRLLQSGRRVHSVAGPSQWLGKPLTTRLLFPAAPCCCRPHYLFLAASGPRSLSTSAISFAEVQVQAPPVVAATPSPTAVPEVASGETADVVQTAAEQSFAELGLGSYTPVGLIQNLLEFMHVDLGLPWWGAIAACTVFARCLIFPLIVTGQREAARIHNHLPEIQKFSSRIREAKLAGDHIEYYKASSEMALYQKKHGIKLYKPLILPVTQAPIFISFFIALREMANLPVPSLQTGGLWWFQDLTVSDPIYILPLAVTATMWAVLELGAETGVQSSDLQWMRNVIRMMPLITLPITMHFPTAVFMYWLSSNLFSLVQVSCLRIPAVRTVLKIPQRVVHDLDKLPPREGFLESFKKGWKNAEMTRQLREREQRMRNQLELAARGAVAHASNPSTFGRPRRADHEVSRSRPSWPTW

SEQ ID NO: 2762 - protein, 410 aa, Artificial Sequence
  Synthetic polypeptide
MRGTQVHSVAGPSQWLGKPLTTRLLFPAAPCCCRPHYLFLAASGPRSLSTSAISFAEVQVQAPPVVAATPSPTAVPEVASGETADVVQTAAEQSFAELGLGSYTPVGLIQNLLEFMHVDLGLPWWGAIAACTVFARCLIFPLIVTGQREAARIHNHLPEIQKFSSRIREAKLAGDHIEYYKASSEMALYQKKHGIKLYKPLILPVTQAPIFISFFIALREMANLPVPSLQTGGLWWFQDLTVSDPIYILPLAVTATMWAVLELGAETGVQSSDLQWMRNVIRMMPLITLPITMHFPTAVFMYWLSSNLFSLVQVSCLRIPAVRTVLKIPQRVVHDLDKLPPREGFLESFKKGWKNAEMTRQLREREQRMRNQLELAARGAVAHASNPSTFGRPRRADHEVSRSRPSWPTW

SEQ ID NO: 2763 - protein, 110 aa, Artificial Sequence
  Synthetic polypeptide
MHKAGLLGLCARAWNSVRMASSGMTRRDPLANKVALVTASTDGIGFAIARRLAQDGAHVVVSSRKQQNVDQAVATLQGEGLSVTGTVCHVGKAEDRERLVATPQCATTEL

SEQ ID NO: 2764 - protein, 92 aa, Artificial Sequence
  Synthetic polypeptide
MASSGMTRRDPLANKVALVTASTDGIGFAIARRLAQDGAHVVVSSRKQQNVDQAVATLQGEGLSVTGTVCHVGKAEDRERLVATPQCATTEL

SEQ ID NO: 2765 - protein, 110 aa, Artificial Sequence
  Synthetic polypeptide
MHKAGLLGLCARAWNSVRMASSGMTRRDPLANKVALVTASTDGIGFAIARRLAQDGAHVVVSSRKQQNVDQAVATLQGEGLSVTGTVCHVGKAEDRERLVATPQCATTEV

SEQ ID NO: 2766 - protein, 92 aa, Artificial Sequence
  Synthetic polypeptide
MASSGMTRRDPLANKVALVTASTDGIGFAIARRLAQDGAHVVVSSRKQQNVDQAVATLQGEGLSVTGTVCHVGKAEDRERLVATPQCATTEV

SEQ ID NO: 2767 - protein, 62 aa, Artificial Sequence
  Synthetic polypeptide
MAKPCGVRLSGEARKQVEVFRQNLFQELGQVLSFSGLQFPHLQVLDPVISKGPSSSICQTSH

SEQ ID NO: 2768 - protein, 590 aa, Artificial Sequence
  Synthetic polypeptide
MDLCTRAGEPSLTQNTHPRQQALEQLLEDKVEDDMLQLSEFDPLLREIAPGPLTTPSVPGSTPGPCFLCGSAPGTLHCPSCKQALCPACDHLFHGHPSRAHHLRQTLPGVLQGTHLSPSLPASAQPRPQSTSLLALGDSSLSSPNPASAHLPWHCAACAMLNEPWAVLCVACDRPRGCKGLGLGTEGPQGTGGLEPDLARGRWACQSCTFENEAAAVLCSICERPRLAQPPSLVVDSRDAGICLQPLQQGDALLASAQSQVWYCIHCTFCNSSPGWVCVMCNRTSSPIPAQHAPRPYASSLEKGPPKPGPPRRLSAPLPSSCGDPEKQRQDKMREEGLQLVSMIREGEAAGACPEEIFSALQYSGTEVPLQWLRSELPYVLEMVAELAGQQDPGLGAFSCQEARRAWLDRHGNLDEAVEECVRTRRRKVQELQSLGFGPEEGSLQALFQHGGDVSRALTELQRQRLEPFRQRLWDSGPEPTPSWDGPDKQSLVRRLLAVYALPSWGRAELALSLLQETPRNYELGDVVEAVRHSQDRAFLRRLLAQECAVCGWALPHNRVSPLSIFLHPTVFRCLRCLPGPCWHLRLLTL

SEQ ID NO: 2769 - protein, 741 aa, Artificial Sequence
  Synthetic polypeptide
MPGEEEERAFLVAREELASALRRDSGQAFSLEQLRPLLASSLPLAARYLQLDAARLVRCNAHGEPRNYLNTLSTALNILEKYGRNLLSPQRPRYWRGVKFNNPVFRSTVDAVQGGRDVLRLYGYTEEQPDGLSFPEGQEEPDEHQVATVTLEVLLLRTELSLLLQNTHPRQQALEQLLEDKVEDDMLQLSEFDPLLREIAPGPLTTPSVPGSTPGPCFLCGSAPGTLHCPSCKQALCPACDHLFHGHPSRAHHLRQTLPGVLQGTHLSPSLPASAQPRPQSTSLLALGDSSLSSPNPASAHLPWHCAACAMLNEPWAVLCVACDRPRGCKGLGLGTEGPQGTGGLEPDLARGRWACQSCTFENEAAAVLCSICERPRLAQPPSLVVDSRDAGICLQPLQQGDALLASAQSQVWYCIHCTFCNSSPGWVCVMCNRTSSPIPAQHAPRPYASSLEKGPPKPGPPRRLSAPLPSSCGDPEKQRQDKMREEGLQLVSMIREGEAAGACPEEIFSALQYSGTEVPLQWLRSELPYVLEMVAELAGQQDPGLGAFSCQEARRAWLDRHGNLDEAVEECVRTRRRKVQELQSLGFGPEEGSLQALFQHGGDVSRALTELQRQRLEPFRQRLWDSGPEPTPSWDGPDKQSLVRRLLAVYALPSWGRAELALSLLQETPRNYELGDVVEAVRHSQDRAFLRRLLAQECAVCGWALPHNRVSPLSIFLHPTVFRCLRCLPGPCWHLRLLTL

SEQ ID NO: 2770 - protein, 32 aa, Artificial Sequence
  Synthetic polypeptide
LITLSFAARWMLCRGAEMCCDYMATQRSNQMG

SEQ ID NO: 2771 - protein, 216 aa, Artificial Sequence
  Synthetic polypeptide
SELPYVLEMVAELAGQQDPGLGAFSCQEARRAWLDRHGNLDEAVEECVRTRRRKVQELQSLGFGPEEGSLQALFQHGGDVSRALTELQRQRLEPFRQRLWDSGPEPTPSWDGPDKQSLVRRLLAVYALPSWGRAELALSLLQETPRNYELGDVVEAVRHSQDRAFLRRLLAQECAVCGWALPHNRVSPLSIFLHPTVFRCLRCLPGPCWHLRLLTL

SEQ ID NO: 2772 - protein, 280 aa, Artificial Sequence
  Synthetic polypeptide
MNESKPGDSQNLACVFCRKHDDCPNKYGEKKTKEKWNLTVHYYCLLMSSGIWQRGKEEEGVYGFLIEDIRKEVNRASKLKCCVCKKNGASIGCVAPRCKRSYHFPCGLQRECIFQFTGNFASFCWDHRPVQIITSNNYRESLPCTICLEFIEPIPSYNILRSPCCKNAWFHRDCLQVQAINAGVFFFRCTICNNSDIFQKEMLRMGIHIPEKPGMVAHACNPSPHFGRPRRADHPRSGVQDQPCQHGETLSLLKNTKTSRAWWQAPVIPATWEAEAGRIA

SEQ ID NO: 2773 - protein, 234 aa, Artificial Sequence
  Synthetic polypeptide
MSSGIWQRGKEEEGVYGFLIEDIRKEVNRASKLKCCVCKKNGASIGCVAPRCKRSYHFPCGLQRECIFQFTGNFASFCWDHRPVQIITSNNYRESLPCTICLEFIEPIPSYNILRSPCCKNAWFHRDCLQVQAINAGVFFFRCTICNNSDIFQKEMLRMGIHIPEKPGMVAHACNPSPHFGRPRRADHPRSGVQDQPCQHGETLSLLKNTKTSRAWWQAPVIPATWEAEAGRIA

SEQ ID NO: 2774 - protein, 310 aa, Artificial Sequence
  Synthetic polypeptide
MLIPALQISDSESVGLEDGIEQSAYLTESKMNESKPGDSQNLACVFCRKHDDCPNKYGEKKTKEKWNLTVHYYCLLMSSGIWQRGKEEEGVYGFLIEDIRKEVNRASKLKCCVCKKNGASIGCVAPRCKRSYHFPCGLQRECIFQFTGNFASFCWDHRPVQIITSNNYRESLPCTICLEFIEPIPSYNILRSPCCKNAWFHRDCLQVQAINAGVFFFRCTICNNSDIFQKEMLRMGIHIPEKPGMVAHACNPSPHFGRPRRADHPRSGVQDQPCQHGETLSLLKNTKTSRAWWQAPVIPATWEAEAGRIA

SEQ ID NO: 2775 - protein, 507 aa, Artificial Sequence
  Synthetic polypeptide
MNESKPGDSQNLACVFCRKHDDCPNKYGEKKTKEKWNLTVHYYCLLMSSGIWQRGKEEEGVYGFLIEDIRKEVNRASKLKCCVCKKNGASIGCVAPRCKRSYHFPCGLQRECIFQFTGNFASFCWDHRPVQIITSNNYRESLPCTICLEFIEPIPSYNILRSPCCKNAWFHRDCLQVQAINAGVFFFRCTICNNSDIFQKEMLRMGIHIPEKDASWELEENAYQELLQHYERCDVRRCRCKEGRDYNAPDSKWEIKRCQCCGSSGTHLACSSLRSWEQNWECLECRGIIYNSGEFQKAKKHVLPNSNNVGITDCLLEESSPKLPRQSPGSQSKDLLRQGSKFRRNVSTLLIELGFQIKKKTKRLYINKANIWNSALDAFRNRNFNPSYAIEVAYVIENDNFGSEHPGSKQEFLSLLMQHLENSSLFEGSLSKNLSLNSQALKENLYYEAGKMLAISLVHGGPSPGFFSKTLFNCLVYGPENTQPILDDVSDFDVAQIIIRESPSGFS

SEQ ID NO: 2776 - protein, 461 aa, Artificial Sequence
  Synthetic polypeptide
MSSGIWQRGKEEEGVYGFLIEDIRKEVNRASKLKCCVCKKNGASIGCVAPRCKRSYHFPCGLQRECIFQFTGNFASFCWDHRPVQIITSNNYRESLPCTICLEFIEPIPSYNILRSPCCKNAWFHRDCLQVQAINAGVFFFRCTICNNSDIFQKEMLRMGIHIPEKDASWELEENAYQELLQHYERCDVRRCRCKEGRDYNAPDSKWEIKRCQCCGSSGTHLACSSLRSWEQNWECLECRGIIYNSGEFQKAKKHVLPNSNNVGITDCLLEESSPKLPRQSPGSQSKDLLRQGSKFRRNVSTLLIELGFQIKKKTKRLYINKANIWNSALDAFRNRNFNPSYAIEVAYVIENDNFGSEHPGSKQEFLSLLMQHLENSSLFEGSLSKNLSLNSQALKENLYYEAGKMLAISLVHGGPSPGFFSKTLFNCLVYGPENTQPILDDVSDFDVAQIIIRESPSGFS

SEQ ID NO: 2777 - protein, 537 aa, Artificial Sequence
  Synthetic polypeptide
MLIPALQISDSESVGLEDGIEQSAYLTESKMNESKPGDSQNLACVFCRKHDDCPNKYGEKKTKEKWNLTVHYYCLLMSSGIWQRGKEEEGVYGFLIEDIRKEVNRASKLKCCVCKKNGASIGCVAPRCKRSYHFPCGLQRECIFQFTGNFASFCWDHRPVQIITSNNYRESLPCTICLEFIEPIPSYNILRSPCCKNAWFHRDCLQVQAINAGVFFFRCTICNNSDIFQKEMLRMGIHIPEKDASWELEENAYQELLQHYERCDVRRCRCKEGRDYNAPDSKWEIKRCQCCGSSGTHLACSSLRSWEQNWECLECRGIIYNSGEFQKAKKHVLPNSNNVGITDCLLEESSPKLPRQSPGSQSKDLLRQGSKFRRNVSTLLIELGFQIKKKTKRLYINKANIWNSALDAFRNRNFNPSYAIEVAYVIENDNFGSEHPGSKQEFLSLLMQHLENSSLFEGSLSKNLSLNSQALKENLYYEAGKMLAISLVHGGPSPGFFSKTLFNCLVYGPENTQPILDDVSDFDVAQIIIRESPSGFS

SEQ ID NO: 2778 - protein, 475 aa, Artificial Sequence
  Synthetic polypeptide
MAAAAAATAAAAASIRERQTVALKRMLNFNVPHIKNSTGEPVWKVLIYDRFGQDIISPLLSVKELRDMGITLHLLLHSDRDPIPDVPAVYFVMPTEENIDRMCQDLRNQLYESYYLNFISAISRSKLEDIANAALAASAVTQVAKVFDQYLNFITLEDDMFVLCNQNKELVSYRAINRPDITDTEMETVMDTIVDSLFCFFVTLGAVPIIRCSRGTAAEMVAVKLDKKLRENLRDARNSLFTGDTLGAGQFSFQRPLLVLVDRNIDLATPLHHTWTYQALVHDVLDFHLNRVNLEESSGVENSPAGARPKRKNKKSYDLTPVDKFWQKHKGSPFPEVAESVQQELESYRAQEDEVKRLKSIMGLEGEDEGAISMLSDNTAKLTSAVSSLPELLEKKRLIDLHTNVATAVLEHIKARKLDVYFEYEEKIMSKTTLDKSLLDIISDPDGRNQPIVLKSNQGHASQGKMEELFHTEED

SEQ ID NO: 2779 - protein, 416 aa, Artificial Sequence
  Synthetic polypeptide
MCLILKTAQENQYGRLLHSDRDPIPDVPAVYFVMPTEENIDRMCQDLRNQLYESYYLNFISAISRSKLEDIANAALAASAVTQVAKVFDQYLNFITLEDDMFVLCNQNKELVSYRAINRPDITDTEMETVMDTIVDSLFCFFVTLGAVPIIRCSRGTAAEMVAVKLDKKLRENLRDARNSLFTGDTLGAGQFSFQRPLLVLVDRNIDLATPLHHTWTYQALVHDVLDFHLNRVNLEESSGVENSPAGARPKRKNKKSYDLTPVDKFWQKHKGSPFPEVAESVQQELESYRAQEDEVKRLKSIMGLEGEDEGAISMLSDNTAKLTSAVSSLPELLEKKRLIDLHTNVATAVLEHIKARKLDVYFEYEEKIMSKTTLDKSLLDIISDPDGRNQPIVLKSNQGHASQGKMEELFHTEED

SEQ ID NO: 2780 - protein, 408 aa, Artificial Sequence
  Synthetic polypeptide
MGITLHLLLHSDRDPIPDVPAVYFVMPTEENIDRMCQDLRNQLYESYYLNFISAISRSKLEDIANAALAASAVTQVAKVFDQYLNFITLEDDMFVLCNQNKELVSYRAINRPDITDTEMETVMDTIVDSLFCFFVTLGAVPIIRCSRGTAAEMVAVKLDKKLRENLRDARNSLFTGDTLGAGQFSFQRPLLVLVDRNIDLATPLHHTWTYQALVHDVLDFHLNRVNLEESSGVENSPAGARPKRKNKKSYDLTPVDKFWQKHKGSPFPEVAESVQQELESYRAQEDEVKRLKSIMGLEGEDEGAISMLSDNTAKLTSAVSSLPELLEKKRLIDLHTNVATAVLEHIKARKLDVYFEYEEKIMSKTTLDKSLLDIISDPDGRNQPIVLKSNQGHASQGKMEELFHTEED

SEQ ID NO: 2781 - protein, 290 aa, Artificial Sequence
  Synthetic polypeptide
METVMDTIVDSLFCFFVTLGAVPIIRCSRGTAAEMVAVKLDKKLRENLRDARNSLFTGDTLGAGQFSFQRPLLVLVDRNIDLATPLHHTWTYQALVHDVLDFHLNRVNLEESSGVENSPAGARPKRKNKKSYDLTPVDKFWQKHKGSPFPEVAESVQQELESYRAQEDEVKRLKSIMGLEGEDEGAISMLSDNTAKLTSAVSSLPELLEKKRLIDLHTNVATAVLEHIKARKLDVYFEYEEKIMSKTTLDKSLLDIISDPDGRNQPIVLKSNQGHASQGKMEELFHTEED

SEQ ID NO: 2782 - protein, 383 aa, Artificial Sequence
  Synthetic polypeptide
MPTEENIDRMCQDLRNQLYESYYLNFISAISRSKLEDIANAALAASAVTQVAKVFDQYLNFITLEDDMFVLCNQNKELVSYRAINRPDITDTEMETVMDTIVDSLFCFFVTLGAVPIIRCSRGTAAEMVAVKLDKKLRENLRDARNSLFTGDTLGAGQFSFQRPLLVLVDRNIDLATPLHHTWTYQALVHDVLDFHLNRVNLEESSGVENSPAGARPKRKNKKSYDLTPVDKFWQKHKGSPFPEVAESVQQELESYRAQEDEVKRLKSIMGLEGEDEGAISMLSDNTAKLTSAVSSLPELLEKKRLIDLHTNVATAVLEHIKARKLDVYFEYEEKIMSKTTLDKSLLDIISDPDGRNQPIVLKSNQGHASQGKMEELFHTEED

SEQ ID NO: 2783 - protein, 247 aa, Artificial Sequence
  Synthetic polypeptide
MDELAGGGGGGPGMAAPPRQQQGPGGNLGLSPGGNGAAGGGGPPASEGAGPAAGPELSRPQQYTIPGILHYIQHEWARFEMERAHWEVERAELQARIAFLQGERKGQENLKKDLVRRIKMLEYALKQERAKYHKLKYGTELNQGDLKMPTFESEETKDTEAPTAPQNSQLTWKQGRQLLRQYLQEVGYTDTILDVRSQRVRSLLGLSNSEPNGSVETKNLEQILNGGESPKQKGQEIKRDNSPLICF

SEQ ID NO: 2784 - protein, 169 aa, Artificial Sequence
  Synthetic polypeptide
MDELAGGGGGGPGMAAPPRQQQGPGGNLGLSPGGNGAAGGGGPPASEGAGPAAGPELSRPQQYTIPGILHYIQHEWARFEMERAHWEVERAELQARIAFLQGERKGQENLKKDLVRRIKMLEYALKQERAKYHKLKYGTELNQGDLKMPTFESGTGYMGVFKNSLSYTL

SEQ ID NO: 2785 - protein, 50 aa, Artificial Sequence
  Synthetic polypeptide
MLEYALKQERAKYHKLKYGTELNQGDLKMPTFESGTGYMGVFKNSLSYTL

SEQ ID NO: 2786 - protein, 556 aa, Artificial Sequence [sequence omitted]

SEQ ID NO: 2787 - protein, 30 aa, Artificial Sequence
  Synthetic polypeptide
VFAQTFQQTMLPSIRLCSSKGNNYRICFRT

SEQ ID NO: 2788 - protein, 97 aa, Artificial Sequence
  Synthetic polypeptide
MADVDPDTLLEWLQMGQGDERDMQLIALEQLCMLLLMSDNVDRCFETDMDGAGNHHSQQAIARTKHQMHVLTHRWELNNENTWTQEGEHHTPGAVVG

SEQ ID NO: 2789 - protein, 1613 aa, Artificial Sequence
  Synthetic polypeptide
MLKGTSSVSRDVRVGVTQAYVVFVSTLGGAWLEKNFAAFFSHILSLASPSHPKATQTQIDAVCCRRCVSFILRTTIGGLLGEKAQLAAVKDICQAIWKLKKVMDAVMSDGNLETRLGSTDVAASQHMLVCALQELGNLIHNLGTTAAPLLQDSSTGLLDSILSVILHPSISVRLAAAWCLHCIAVALPSYLTPLLDRCLERLTGHKSSPEAVTGFSFAVAALLGAVKHCPLGIPHGKGKIIMTLAEDLLCSAAQNSRLSAQRTQAGWLLISALMTLGPAVVSHHLARVLLLWKCVFPASPKDLETEKSRGDSFTWQVTLEGRAGALCAIKSFVSHCGDLLTEEVTQRLLPPLPCAVDLLTQLSSILKMYGSPLKTPSVVYRQRLYELLILLPPETYEGNLCAILRELAADLTAPDIQVAASTFLLPPLCHQDDLLILSPFLQETDHRFIEEQLLLGNGVACGSLEYDPYSIYEKDVEGDSVPKPLPPALSVISSASKLFGVVCAHVGETQRLLILEQLLDSIKHTKGARQQVVQLHVVSSVSSFLKYVAGSKGCLGPEEMKRFALTLVMGALESPNPLLRCAAAESWARLAQVVDDGAFTAGLAQVSFDKLKSARDVVTRTGHSLALGSLHRYLGGISSSQHLNSCIGILYTLAQDSTSPDVQTWALHSLSLIIDSAGPLYYVHVEPTLSLIIMLLLNVPPTHAEVHQSLGRCLNALITTLGPELQGNSTSISTLRTSCLLGCAVMQDNPDCLVQAQAISCLQQLHMFAPRHVNLSSLVSCLCVNLCSPYLLLRRAVLACLRQLVQREAAEVSEHAVMLAKDSREELTPDANIREVGLEGALLILLDKETDERLCHDIKETLNYMLTSMAVEKLSLWLKLCKDVLAASADFTAVTCVDTMQEEEGDKGDDASVLTTRRDEKSHPFTNPRWATRVFAAECVCRIINQCENANSAHFDIALAQEMKKRDSRNDFLVLHLADLIRMAFMAATDHSDQLRLSGLEMLLVVIRRFATVPEPEFPGHVILEQYQANVGAALRPAFTSETPPDVTAKACQVCSAWIASGVVSDLNDLRRVHQLLVSSLTKIQAGKEALSHLYNESASTMEILAVLKAWAEVYIIAVQRHKNHRQPLKTTTCLEDGIRNGSCSSDGLLDLVYADLGTLSRLWLAALQDFALLTLPSEFASQLPAEGGAFYTAETSENAKLHYYNSWALILHATALWLTSTGFVVADPDEGASNLSRPVTPTSMCQGSSSGATIKSPEDVYTDRFHLILGISVEFLCSLRSDATMESITACLHALQALLDVPWPRSKIGSDQDLGIELLNVLHRVILTRESPSIQLASLEVVRQIICAAQEHVKEKRRSAEVDDGAAEKETLPEFGEGKDTGGLVPGKSLVFATLELCVCILVRQLPELNPKLTGSPGVKATKPQILLEDGSRLVSAALVILSELPAVCSPEGSISILPTILYLTIGVLRETAVKLPGGQLSSTVAASLQALKGILSSPMARAEKSRTAWTDLLRSALTTILDCWDPVDETHQELDEVSLLTAITVFILSTSPEVTTIPCLQKRCIDKFKATLEIKDPVHFGRTRWADCLRPGVREQPCSMVRMHPYKKYKN

SEQ ID NO: 2790 - protein, 1900 aa, Artificial Sequence
  Synthetic polypeptide
MELAHSLLLNEEAYNQLGEVQKAEFIFEWLRYLEKLLLATSRNDVREKQKTLVEQLLSLLNSSPGPPTRKLLAKNLAILYSIGDTFSVHEAIDKCNDLIRSKDDSPSYLPTKLAAVVCLGSLYKKLGRILGNTFTDTVGNILKAMKSAESQGRYEIMLSLQNILNGLGAAAAPCHRDVYKAARSCLTDRSMAVRCAAAKNEAIFMWSTDLDSVATLCFKSFEGSNYDVRISVSKLLGIILAKAVISKHPGTAASRQSIRRVSLEEVLELLGTGFLRGSSGFLRASGDMLKGTSSVSRDVRVGVTQAYVVFVSTLGGAWLEKNFAAFFSHILSLASPSHPKATQTQIDAVCCRRCVSFILRTTIGGLLGEKAQLAAVKDICQAIWKLKKVMDAVMSDGNLETRLGSTDVAASQHMLVCALQELGNLIHNLGTTAAPLLQDSSTGLLDSILSVILHPSISVRLAAAWCLHCIAVALPSYLTPLLDRCLERLTGHKSSPEAVTGFSFAVAALLGAVKHCPLGIPHGKGKIIMTLAEDLLCSAAQNSRLSAQRTQAGWLLISALMTLGPAVVSHHLARVLLLWKCVFPASPKDLETEKSRGDSFTWQVTLEGRAGALCAIKSFVSHCGDLLTEEVTQRLLPPLPCAVDLLTQLSSILKMYGSPLKTPSVVYRQRLYELLILLPPETYEGNLCAILRELAADLTAPDIQVAASTFLLPPLCHQDDLLILSPFLQETDHRFIEEQLLLGNGVACGSLEYDPYSIYEKDVEGDSVPKPLPPALSVISSASKLFGVVCAHVGETQRLLILEQLLDSIKHTKGARQQVVQLHVVSSVSSFLKYVAGSKGCLGPEEMKRFALTLVMGALESPNPLLRCAAAESWARLAQVVDDGAFTAGLAQVSFDKLKSARDVVTRTGHSLALGSLHRYLGGISSSQHLNSCIGILYTLAQDSTSPDVQTWALHSLSLIIDSAGPLYYVHVEPTLSLIIMLLLNVPPTHAEVHQSLGRCLNALITTLGPELQGNSTSISTLRTSCLLGCAVMQDNPDCLVQAQAISCLQQLHMFAPRHVNLSSLVSCLCVNLCSPYLLLRRAVLACLRQLVQREAAEVSEHAVMLAKDSREELTPDANIREVGLEGALLILLDKETDERLCHDIKETLNYMLTSMAVEKLSLWLKLCKDVLAASADFTAVTCVDTMQEEEGDKGDDASVLTTRRDEKSHPFTNPRWATRVFAAECVCRIINQCENANSAHFDIALAQEMKKRDSRNDFLVLHLADLIRMAFMAATDHSDQLRLSGLEMLLVVIRRFATVPEPEFPGHVILEQYQANVGAALRPAFTSETPPDVTAKACQVCSAWIASGVVSDLNDLRRVHQLLVSSLTKIQAGKEALSHLYNESASTMEILAVLKAWAEVYIIAVQRHKNHRQPLKTTTCLEDGIRNGSCSSDGLLDLVYADLGTLSRLWLAALQDFALLTLPSEFASQLPAEGGAFYTAETSENAKLHYYNSWALILHATALWLTSTGFVVADPDEGASNLSRPVTPTSMCQGSSSGATIKSPEDVYTDRFHLILGISVEFLCSLRSDATMESITACLHALQALLDVPWPRSKIGSDQDLGIELLNVLHRVILTRESPSIQLASLEVVRQIICAAQEHVKEKRRSAEVDDGAAEKETLPEFGEGKDTGGLVPGKSLVFATLELCVCILVRQLPELNPKLTGSPGVKATKPQILLEDGSRLVSAALVILSELPAVCSPEGSISILPTILYLTIGVLRETAVKLPGGQLSSTVAASLQALKGILSSPMARAEKSRTAWTDLLRSALTTILDCWDPVDETHQELDEVSLLTAITVFILSTSPEVTTIPCLQKRCIDKFKATLEIKDPVHFGRTRWADCLRPGVREQPCSMVRMHPYKKYKN

SEQ ID NO: 2791 - protein, 1825 aa, Artificial Sequence
  Synthetic polypeptide
MELAHSLLLNEEAYNQLGEVQKAEFIFEWLRYLEKLLLATSRNDVREKQKTLVEQLLSLLNSSPGPPTRKLLAKNLAILYSIGDTFSVHEAIDKCNDLIRSKDDSPSYLPTKLAAVVCLGSLYKKLGRILGNTFTDTVGNILKAMKSAESQGRYEIMLSLQNILNGLGAAAAPCHRDVYKAARSCLTDRSMAVRCAAAKNEAIFMWSTDLDSVATLCFKSFEGSNYDVRISVSKLLGIILAKAVISKHPGTAASRQSIRRVSLEEVLELLGTGFLRGSSGFLRASGDMLKGTSSVSRDVRVGVTQAYVVFVSTLGGAWLEKNFAAFFSHILSLASPSHPKATQTQIDAVCCRRCVSFILRTTIGGLLGEKAQLAAVKDICQAIWKLKKVMDAVMSDGNLETRLGSTDVAASQHMLVCALQELGNLIHNLGTTAAPLLQDSSTGLLDSILSVILHPSISVRLAAAWCLHCIAVALPSYLTPLLDRCLERLTGHKSSPEAVTGFSFAVAALLGAVKHCPLGIPHGKGKIIMTLAEDLLCSAAQNSRLSAQRTQAGWLLISALMTLGPAVVSHHLARVLLLWKCVFPASPKDLETEKSRGDSFTWQVTLEGRAGALCAIKSFVSHCGDLLTEEVTQRLLPPLPCAVDLLTQLSSILKMYGSPLKTPSVVYRQRLYELLILLPPETYEGNLCAILRELAADLTAPDIQVAASTFLLPPLCHQDDLLILSPFLQETDHRFIEEQLLLGNGVACGSLEYDPYSIYEKDVEGDSVPKPLPPALSVISSASKLFGVVCAHVGETQRLLILEQLLDSIKHTKGARQQVVQLHVVSSVSSFLKYVAGSKGCLGPEEMKRFALTLVMGALESPNPLLRCAAAESWARLAQVVDDGAFTAGLAQVSFDKLKSARDVVTRTGHSLALGSLHRYLGGISSSQHLNSCIGILYTLAQDSTSPDVQTWALHSLSLIIDSAGPLYYVHVEPTLSLIIMLLLNVPPTHAEVHQSLGRCLNALITTLGPELQGNSTSISTLRTSCLLGCAVMQDNPDCLVQAQAISCLQQLHMFAPRHVNLSSLVSCLCVNLCSPYLLLRRAVLACLRQLVQREAAEVSEHAVMLAKDSREELTPDANIREVGLEGALLILLDKETDERLCHDIKETLNYMLTSMAVEKLSLWLKLCKDVLAASADFTAVTCVDTMQEEEGDKGDDASVLTTRRDEKSHPFTNPRWATRVFAAECVCRIINQCENANSAHFDIALAQEMKKRDSRNDFLVLHLADLIRMAFMAATDHSDQLRLSGLEMLLVVIRRFATVPEPEFPGHVILEQYQANVGAALRPAFTSETPPDVTAKACQVCSAWIASGVVSDLNDLRRVHQLLVSSLTKIQAGKEALSHLYNESASTMEILAVLKAWAEVYIIAVQRHKNHRQPLKTTTCLEDGIRNGSCSSDGLLDLVYADLGTLSRLWLAALQDFALLTLPSEFASQLPAEGGAFYTAETSENAKLHYYNSWALILHATALWLTSTGFVVADPDEGASNLSRPVTPTSMCQGSSSGATIKSPEDVYTDRFHLILGISVEFLCSLRSDATMESITACLHALQALLDVPWPRSKIGSDQDLGIELLNVLHRVILTRESPSIQLASLEVVRQIICAAQEHVKEKRRSAEVDDGAAEKETLPEFGEGKDTGGLVPGKSLVFATLELCVCILVRQLPELNPKLTGSPGVKATKPQILLEDGSRLVSAALVILSELPAVCSPEVDETHQELDEVSLLTAITVFILSTSPEVTTIPCLQKRCIDKFKATLEIKDPVHFGRTRWADCLRPGVREQPCSMVRMHPYKKYKN

SEQ ID NO: 2792 - protein, 1906 aa, Artificial Sequence
  Synthetic polypeptide
MELAHSLLLNEEAYNQLGEVQKAEFIFEWLRYLEKLLLATSRNDVREKQKTLVEQLLSLLNSSPGPPTRKLLAKNLAILYSIGDTFSVHEAIDKCNDLIRSKDDSPSYLPTKLAAVVCLGSLYKKLGRILGNTFTDTVGNILKAMKSAESQGRYEIMLSLQNILNGLGAAAAPCHRDVYKAARSCLTDRSMAVRCAAAKCLLELQNEAIFMWSTDLDSVATLCFKSFEGSNYDVRISVSKLLGIILAKAVISKHPGTAASRQSIRRVSLEEVLELLGTGFLRGSSGFLRASGDMLKGTSSVSRDVRVGVTQAYVVFVSTLGGAWLEKNFAAFFSHILSLASPSHPKATQTQIDAVCCRRCVSFILRTTIGGLLGEKAQLAAVKDICQAIWKLKKVMDAVMSDGNLETRLGSTDVAASQHMLVCALQELGNLIHNLGTTAAPLLQDSSTGLLDSILSVILHPSISVRLAAAWCLHCIAVALPSYLTPLLDRCLERLTGHKSSPEAVTGFSFAVAALLGAVKHCPLGIPHGKGKIIMTLAEDLLCSAAQNSRLSAQRTQAGWLLISALMTLGPAVVSHHLARVLLLWKCVFPASPKDLETEKSRGDSFTWQVTLEGRAGALCAIKSFVSHCGDLLTEEVTQRLLPPLPCAVDLLTQLSSILKMYGSPLKTPSVVYRQRLYELLILLPPETYEGNLCAILRELAADLTAPDIQVAASTFLLPPLCHQDDLLILSPFLQETDHRFIEEQLLLGNGVACGSLEYDPYSIYEKDVEGDSVPKPLPPALSVISSASKLFGVVCAHVGETQRLLILEQLLDSIKHTKGARQQVVQLHVVSSVSSFLKYVAGSKGCLGPEEMKRFALTLVMGALESPNPLLRCAAAESWARLAQVVDDGAFTAGLAQVSFDKLKSARDVVTRTGHSLALGSLHRYLGGISSSQHLNSCIGILYTLAQDSTSPDVQTWALHSLSLIIDSAGPLYYVHVEPTLSLIIMLLLNVPPTHAEVHQSLGRCLNALITTLGPELQGNSTSISTLRTSCLLGCAVMQDNPDCLVQAQAISCLQQLHMFAPRHVNLSSLVSCLCVNLCSPYLLLRRAVLACLRQLVQREAAEVSEHAVMLAKDSREELTPDANIREVGLEGALLILLDKETDERLCHDIKETLNYMLTSMAVEKLSLWLKLCKDVLAASADFTAVTCVDTMQEEEGDKGDDASVLTTRRDEKSHPFTNPRWATRVFAAECVCRIINQCENANSAHFDIALAQEMKKRDSRNDFLVLHLADLIRMAFMAATDHSDQLRLSGLEMLLVVIRRFATVPEPEFPGHVILEQYQANVGAALRPAFTSETPPDVTAKACQVCSAWIASGVVSDLNDLRRVHQLLVSSLTKIQAGKEALSHLYNESASTMEILAVLKAWAEVYIIAVQRHKNHRQPLKTTTCLEDGIRNGSCSSDGLLDLVYADLGTLSRLWLAALQDFALLTLPSEFASQLPAEGGAFYTAETSENAKLHYYNSWALILHATALWLTSTGFVVADPDEGASNLSRPVTPTSMCQGSSSGATIKSPEDVYTDRFHLILGISVEFLCSLRSDATMESITACLHALQALLDVPWPRSKIGSDQDLGIELLNVLHRVILTRESPSIQLASLEVVRQIICAAQEHVKEKRRSAEVDDGAAEKETLPEFGEGKDTGGLVPGKSLVFATLELCVCILVRQLPELNPKLTGSPGVKATKPQILLEDGSRLVSAALVILSELPAVCSPEGSISILPTILYLTIGVLRETAVKLPGGQLSSTVAASLQALKGILSSPMARAEKSRTAWTDLLRSALTTILDCWDPVDETHQELDEVSLLTAITVFILSTSPEVTTIPCLQKRCIDKFKATLEIKDPVHFGRTRWADCLRPGVREQPCSMVRMHPYKKYKN

SEQ ID NO: 2793 - protein, 9 aa, Artificial Sequence
  Synthetic polypeptide
MEKRLSLLL

SEQ ID NO: 2794 - protein, 75 aa, Artificial Sequence
  Synthetic polypeptide
MAEGSRIPQARALLQQCLHARLQIRPADGDVAAQWVEVQRGLVIYVCFFKGADKELLPKMGSEERLFPAAIPSRK

SEQ ID NO: 2795 - protein, 83 aa, Artificial Sequence
  Synthetic polypeptide
MAEGSRIPQARALLQQCLHARLQIRPADGDVAAQWVEVQRGLVIYVCFFKGADKELLPKMAACLGLPKCRECSLCPAATPSGK

SEQ ID NO: 2796 - protein, 181 aa, Artificial Sequence
  Synthetic polypeptide
MGIWQRLLLFGGVSLRAGGGATAPLGGSRAMVCGRQLSGAGSETLKQRRTQIMSRGLPKQKPIEGVKQVIVVASGKGGVGKSTTAVNLALALAANDSSKAIGLLDVDVYGPSVPKMMNLKGNPELSQSNLMRPLLNYGIACMSMGFLVEESEPVVWRGLMVMSAIEKLLRQHKGPHKMLVS

SEQ ID NO: 2797 - protein, 129 aa, Artificial Sequence
  Synthetic polypeptide
MSRGLPKQKPIEGVKQVIVVASGKGGVGKSTTAVNLALALAANDSSKAIGLLDVDVYGPSVPKMMNLKGNPELSQSNLMRPLLNYGIACMSMGFLVEESEPVVWRGLMVMSAIEKLLRQHKGPHKMLVS

SEQ ID NO: 2798 - protein, 85 aa, Artificial Sequence
  Synthetic polypeptide
MSKAIGLLDVDVYGPSVPKMMNLKGNPELSQSNLMRPLLNYGIACMSMGFLVEESEPVVWRGLMVMSAIEKLLRQHKGPHKMLVS

SEQ ID NO: 2799 - protein, 231 aa, Artificial Sequence
  Synthetic polypeptide
MGIWQRLLLFGGVSLRAGGGATAPLGGSRAMVCGRQLSGAGSETLKQRRTQIMSRGLPKQKPIEGVKQVIVVASGKGGVGKSTTAVNLALALAANDSSKAIGLLDVDVYGPSVPKMMNLKGNPELSQSNLMRPLLNYGIACMSMGFLVEESEPVVWRGLMVMSAIEKLLRQVDWGQLDYLVVDMPPGTGDVQLSVSQNIPITGAVAHACNPSTLRGRGGWIMGSGERDHPG

SEQ ID NO: 2800 - protein, 135 aa, Artificial Sequence
  Synthetic polypeptide
MSKAIGLLDVDVYGPSVPKMMNLKGNPELSQSNLMRPLLNYGIACMSMGFLVEESEPVVWRGLMVMSAIEKLLRQVDWGQLDYLVVDMPPGTGDVQLSVSQNIPITGAVAHACNPSTLRGRGGWIMGSGERDHPG

SEQ ID NO: 2801 - protein, 101 aa, Artificial Sequence
  Synthetic polypeptide
MLLGPTAAPHGCTCHQKIVVQSGIAFSSQSTISHAVMSPVQPLGQKISCFYKPTALQVLHKLNAETTRLQGTTEAHCGKVQVSESQQKKTAEQEHLDYIIT

SEQ ID NO: 2802 - protein, 127 aa, Artificial Sequence
  Synthetic polypeptide
MTKEEFTKMKQELEAEYLAIFKKTVAMHEVFLCRVAAHPILRRDLNFHVFLEYNQDLSVRGKNKKEKLEDFFKNMVKSADGVIVSGVKDVDDFFEHERTFLLEYHNRVKDASAKSDRMTRSHKSWRQ

SEQ ID NO: 2803 - protein, 255 aa, Artificial Sequence
  Synthetic polypeptide
MRACAGPRLGAAMMEGLDDGPDFLSEEDRGLKAINVDLQSDAALQVDISDALSERDKVKFTVHTKSSLPNFKQNEFSVVRQHEEFIWLHDSFVENEDYAGYIIPPAPPRPDFDASREKLQKLGEGEGSMTKEEFTKMKQELEAEYLAIFKKTVAMHEVFLCRVAAHPILRRDLNFHVFLEYNQDLSVRGKNKKEKLEDFFKNMVKSADGVIVSGVKDVDDFFEHERTFLLEYHNRVKDASAKSDRMTRSHKSWRQ

SEQ ID NO: 2804 - protein, 131 aa, Artificial Sequence
  Synthetic polypeptide
MTTLTEIKLLPSLVLLVCCEYLAIFKKTVAMHEVFLCRVAAHPILRRDLNFHVFLEYNQDLSVRGKNKKEKLEDFFKNMVKSADGVIVSGVKDVDDFFEHERTFLLEYHNRVKDASAKSDRMTRSHKSWRQ

SEQ ID NO: 2805 - protein, 218 aa, Artificial Sequence
  Synthetic polypeptide
MRACAGPRLGAAMMEGLDDGPDFLSEEDRGLKAINVDLQSDAALQVDISDALSERDKVKFTVHTKIPPAPPRPDFDASREKLQKLGEGEGSMTKEEFTKMKQELEAEYLAIFKKTVAMHEVFLCRVAAHPILRRDLNFHVFLEYNQDLSVRGKNKKEKLEDFFKNMVKSADGVIVSGVKDVDDFFEHERTFLLEYHNRVKDASAKSDRMTRSHKSWRQ

SEQ ID NO: 2806 - protein, 1 aa, Artificial Sequence
  Synthetic polypeptide
E

SEQ ID NO: 2807 - protein, 230 aa, Artificial Sequence
  Synthetic polypeptide
MDQEPVGGVERGEAVAASGAAAAAAFGESAGQMSNERGFENVELGVIGKKKKVPRRVIHFVSGETMEEYSTDEDEVDGLEKKDVLPTVDPTKLTWGPYLWFYMLRAATSTLSVCDFLGEKIASVLGISTPKYQYAIDEYYRMKKEEEEEEEENRMSEEAEKQYQQNKLQTDSIVQTDQPETVISSSFVNVNFEMEGDSEPPITLVMGPSSHLDYHGRCLNILLILQIYLS

SEQ ID NO: 2808 - protein, 253 aa, Artificial Sequence
  Synthetic polypeptide
MEVGLPAITLFLTSASSPVVATTMDQEPVGGVERGEAVAASGAAAAAAFGESAGQMSNERGFENVELGVIGKKKKVPRRVIHFVSGETMEEYSTDEDEVDGLEKKDVLPTVDPTKLTWGPYLWFYMLRAATSTLSVCDFLGEKIASVLGISTPKYQYAIDEYYRMKKEEEEEEEENRMSEEAEKQYQQNKLQTDSIVQTDQPETVISSSFVNVNFEMEGDSEPPITLVMGPSSHLDYHGRCLNILLILQIYLS

SEQ ID NO: 2809 - protein, 370 aa, Artificial Sequence
  Synthetic polypeptide
MNSQTEDHALAPVRNTIQLPTQPLNSEEWDKLKEDLKENTGKTSFESWIISQMAGCHSSIDVAKSLLAWVAAKNNGIVSYDLLVKYLYLCVFHMQTSEVIDVFEIMKARYKTLEPRGYSLLIRGLIHSDRWREALLLLEDIKKVITPSKKNYNDCIQGALLHQDVNTAWNLYQELLGHDIVPMLETLKAFFDFGKDIKDDNYSNKLLDILSYLRNNQLYPGESFAHSIKTWFESVPGKQWKGQFTTVRKSGQCSGCGKTIESIQLSPEEYECLKGKIMRDVIDGGDQYRKTTPQELKRFENFIKSRPPFDVVIDGLNVAKMFPKVRESQLTCLLPSAMIVRPPKPRGTVSPLNLFFIINYPVLGMSLSVA

SEQ ID NO: 2810 - protein, 465 aa, Artificial Sequence
  Synthetic polypeptide
MTFYLFGIRSFPKLWKSPYLGLGPGHSYVSLFLADRCGIRNQQRLFSLKTMSPQNTKATNLIAKARYLRKDEGSNKQVYSVPHFFLAGAAKERSQMNSQTEDHALAPVRNTIQLPTQPLNSEEWDKLKEDLKENTGKTSFESWIISQMAGCHSSIDVAKSLLAWVAAKNNGIVSYDLLVKYLYLCVFHMQTSEVIDVFEIMKARYKTLEPRGYSLLIRGLIHSDRWREALLLLEDIKKVITPSKKNYNDCIQGALLHQDVNTAWNLYQELLGHDIVPMLETLKAFFDFGKDIKDDNYSNKLLDILSYLRNNQLYPGESFAHSIKTWFESVPGKQWKGQFTTVRKSGQCSGCGKTIESIQLSPEEYECLKGKIMRDVIDGGDQYRKTTPQELKRFENFIKSRPPFDVVIDGLNVAKMFPKVRESQLTCLLPSAMIVRPPKPRGTVSPLNLFFIINYPVLGMSLSVA

SEQ ID NO: 2811 - protein, 449 aa, Artificial Sequence
  Synthetic polypeptide
MTFYLFGIRSFPKLWKSPYLGLGPGHSYVSLFLADRCGIRNQQRLFSLKTMSPQNTKATNLIAKARYLRKDEGSNKQVYSVPHFFLAGAAKERSQMNSQTEDHALAPVRNTIQLPTQPLNSEEWDKLKEDLKENTGKTSFESWIISQMAGCHSSIDVAKSLLAWVAAKNNGIVSYDLLVKYLYLCVFHMQTSEVIDVFEIMKARYKTLEPRGYSLLIRGLIHSDRWREALLLLEDIKKVITPSKKNYNDCIQGALLHQDVNTAWNLYQELLGHDIVPMLETLKAFFDFGKDIKDDNYSNKLLDILSYLRNNQLYPGESFAHSIKTWFESGQCSGCGKTIESIQLSPEEYECLKGKIMRDVIDGGDQYRKTTPQELKRFENFIKSRPPFDVVIDGLNVAKMFPKVRESQLTCLLPSAMIVRPPKPRGTVSPLNLFFIINYPVLGMSLSVA

SEQ ID NO: 2812 - protein, 93 aa, Artificial Sequence
  Synthetic polypeptide
MRDVIDGGDQYRKTTPQELKRFENFIKSRPPFDVVIDGLNVAKMFPKVRESQLTCLLPSAMIVRPPKPRGTVSPLNLFFIINYPVLGMSLSVA

SEQ ID NO: 2813 - protein, 25 aa, Artificial Sequence
  Synthetic polypeptide
KMMLLMLSLSNIQKKKNLLRSTLMT

SEQ ID NO: 2814 - protein, 1984 aa, Artificial Sequence
  Synthetic polypeptide
MFSKKPHGDVKKSTQKVLDTKKDALTRLKHLRIVIENAESIDLKQFFDQHFSHIYYVFFENFVTIEASLKQKGHKSQREELDAILFIFEKILQLLPERIHQRWQFHSIGLILKKLLHTGNSLKIRREGVRLFLLWLQALQNNCSKEQLWMFSCLIPGFSAPQSEHGPRTLDNLINPPLNLQETQVTIEEITPLVPPQSGDKGQEDLTSYFLEALLKYIVIQVKSLEWKNKENQERGFSFLFSHFKKYYLPYIFPNICKENSLYHPILDIPQMRPKPHYVVIKKDAETNEAIYCTKEPFIKARVIVIRWLVSFWLEPKPHTGPHIPGMEGEVLPKNIQRAAASLVSREESKNDNADKTDRTTEPEQSHSNTSTLTEREPSSSSLCSIDEEHLTDIEIVRRVFSSKRSNVNFVTEIFRQAFLLPICEAAAMRKVVKVYQEWIQQEEKPLFMQEPEEIVITSSDLPCIENVTDHDISMEEGEKREEENGTNTADHVRNSSWAKNGSYQGALHNASEEATEQNIRAGTQAVLQVFIINSSNIFLLEPANEIKNLLDEHTDMCKRILNIYRYMVVQVSMDKKTWEQMLLVLLRVTESVLKMPSQAFLQFQGKKNMTLAGRLAGPLFQTLIVAWIKANLNVYISRELWDDLLSVLSSLTYWEELATEWSLTMETLTKVLARNLYSLDLSDLPLDKLSEQKQKKHKGKGVGHEFQKVSVDKSFSRGWSRDQPGQAPMRQRSATTTGSPGTEKARSIVRQKTVDIDDAQILPRSTRVRHFSQSEETGNEVFGALNEEQPLPRSSSTSDILEPFTVERAKVNKEDMSQKLPPLNSDIGGSSANVPDLMDEFIAERLRSGNASTMTRRGSSPGSLEIPKDLPDILNKQNQMRPIDDPGVPSEWTSPASAGSSDLISSDSHSDSFSAFQYDGRKFDNFGFGTDTGVTSSADVDSGSGHHQSAEEQEVASLTTLHIDSETSSLNQQAFSAEVATITGSESASPVHSPLGSRSQTPSPSTLNIDHMEQKDLQLDEKLHHSVLQTPDDLEISEFPSECCSVMAGGTLTGWHADVATVMWRRMLGILGDVNSIMDPEIHAQVFDYLCELWQNLAKIRDNLGISTDNLTSPSPPVLIPPLRILTPWLFKATMLTDKYKQGKLHAYKLICNTMKRRQDVSPNRDFLTHFYNIMHCGLLHIDQDIVNTIIKHCSPQFFSLGLPGATMLIMDFIVAAGRVASSAFLNAPRVEAQVLLGSLVCFPNLYCELPSLHPNIPDVAVSQFTDVKELIIKTVLSSARDEPSGPARCVALCSLGIWICEELVHESHHPQIKEALNVICVSLKFTNKTVAHVACNMLHMLVHYVPRLQIYQPDSPLKIIQILIATITHLLPSTEASSYEMDKRLVVSLLLCLLDWIMALPLKTLLQPFHATGAESDKTEKSVLNCIYKVLHGCVYGAQCFSNPRYFPMSLSDLASVDYDPFMHLESLKEPEPLHSPDSERSSKLQPVTEVKTQMQHGLISIAARTVITHLVNHLGHYPMSGGPAMLTSQVCENHDNHYSESTELSPELFESPNIQFFVLNNTTLVSCIQIRSEENMPGGGLSAGLASANSNVRIIVRDLSGKYSWDSAILYGPPPVSGLSEPTSFMLSLSHQEKPEEPPTSNECLEDITVKDGLSLQFKRFRETVPTWDTIRDEEDVLDELLQYLGVTSPECLQRTGISLNIPAPQPVCISEKQENDVINAILKQHTEEKEFVEKHFNDLNMKAVEQDEPIPQKPQSAFYYCRLLLSILGMNSWDKRRSFHLLKKNEKLLRELRNLDSRQCRETHKIAVFYVAEGQEDKHSILTNTGGSQAYEDFVAGLGWEVNLTNHCGFMGGLQKNKSTGLTTPYFATSTVEVIFHVSTRMPSDSDDSLTKKLRHLGNDEVHIVWSEHTRDYRRGIIPTEFGDVLIVIYPMKNHMFSIQIMKKPEENCLNLGGRGCTEPRSYHCTPAWATREKLHLKKI

SEQ ID NO: 2815 - protein, 2031 aa, Artificial Sequence
  Synthetic polypeptide
MFSKKPHGDVKKSTQKVLDTKKDALTRLKHLRIVIENAESIDLKQFFDQHFSHIYYVFFENFVTIEASLKQKGHKSQREELDAILFIFEKILQLLPERIHQRWQFHSIGLILKKLLHTGNSLKIRREGVRLFLLWLQALQNNCSKEQLWMFSCLIPGFSAPQSEHGPRTLDNLINPPLNLQETQVTIEEITPLVPPQSGDKGQEDLTSYFLEALLKYIVIQVKSLEWKNKENQERGFSFLFSHFKKYYLPYIFPNICKENSLYHPILDIPQMRPKPHYVVIKKDAETNEAIYCTKEPFIKARVIVIRWLVSFWLEPKPHTGPHIPGMEGEVLPKNIQRAAASLVSREESKNDNADKTDRTTEPEQSHSNTSTLTEREPSSSSLCSIDEEHLTDIEIVRRVFSSKRSNVNFVTEIFRQAFLLPICEAAAMRKVVKVYQEWIQQEEKPLFMQEPEEIVITSSDLPCIENVTDHDISMEEGEKREEENGTNTADHVRNSSWAKNGSYQGALHNASEEATEQNIRAGTQAVLQVFIINSSNIFLLEPANEIKNLLDEHTDMCKRILNIYRYMVVQVSMDKKTWEQMLLVLLRVTESVLKMPSQAFLQFQGKKNMTLAGRLAGPLFQTLIVAWIKANLNVYISRELWDDLLSVLSSLTYWEELATEWSLTMETLTKVLARNLYSLDLSDLPLDKLSEQKQKKHKGKGVGHEFQKVSVDKSFSRGWSRDQPGQAPMRQRSATTTGSPGTEKARSIVRQKTVAMRSRSIGECALPSAYIRSAKSAPVLIHTSKPFLPDIVLTPLSDELSDIDDAQILPRSTRVRHFSQSEETGNEVFGALNEEQPLPRSSSTSDILEPFTVERAKVNKEDMSQKLPPLNSDIGGSSANVPDLMDEFIAERLRSGNASTMTRRGSSPGSLEIPKDLPDILNKQNQMRPIDDPGVPSEWTSPASAGSSDLISSDSHSDSFSAFQYDGRKFDNFGFGTDTGVTSSADVDSGSGHHQSAEEQEVASLTTLHIDSETSSLNQQAFSAEVATITGSESASPVHSPLGSRSQTPSPSTLNIDHMEQKDLQLDEKLHHSVLQTPDDLEISEFPSECCSVMAGGTLTGWHADVATVMWRRMLGILGDVNSIMDPEIHAQVFDYLCELWQNLAKIRDNLGISTDNLTSPSPPVLIPPLRILTPWLFKATMLTDKYKQGKLHAYKLICNTMKRRQDVSPNRDFLTHFYNIMHCGLLHIDQDIVNTIIKHCSPQFFSLGLPGATMLIMDFIVAAGRVASSAFLNAPRVEAQVLLGSLVCFPNLYCELPSLHPNIPDVAVSQFTDVKELIIKTVLSSARDEPSGPARCVALCSLGIWICEELVHESHHPQIKEALNVICVSLKFTNKTVAHVACNMLHMLVHYVPRLQIYQPDSPLKIIQILIATITHLLPSTEASSYEMDKRLVVSLLLCLLDWIMALPLKTLLQPFHATGAESDKTEKSVLNCIYKVLHGCVYGAQCFSNPRYFPMSLSDLASVDYDPFMHLESLKEPEPLHSPDSERSSKLQPVTEVKTQMQHGLISIAARTVITHLVNHLGHYPMSGGPAMLTSQVCENHDNHYSESTELSPELFESPNIQFFVLNNTTLVSCIQIRSEENMPGGGLSAGLASANSNVRIIVRDLSGKYSWDSAILYGPPPVSGLSEPTSFMLSLSHQEKPEEPPTSNECLEDITVKDGLSLQFKRFRETVPTWDTIRDEEDVLDELLQYLGVTSPECLQRTGISLNIPAPQPVCISEKQENDVINAILKQHTEEKEFVEKHFNDLNMKAVEQDEPIPQKPQSAFYYCRLLLSILGMNSWDKRRSFHLLKKNEKLLRELRNLDSRQCRETHKIAVFYVAEGQEDKHSILTNTGGSQAYEDFVAGLGWEVNLTNHCGFMGGLQKNKSTGLTTPYFATSTVEVIFHVSTRMPSDSDDSLTKKLRHLGNDEVHIVWSEHTRDYRRGIIPTEFGDVLIVIYPMKNHMFSIQIMKKPEENCLNLGGRGCTEPRSYHCTPAWATREKLHLKKI

SEQ ID NO: 2816 - protein, 622 aa, Artificial Sequence
  Synthetic polypeptide
QILIATITHLLPSTEASSYEMDKRLVVSLLLCLLDWIMALPLKTLLQPFHATGAESDKTEKSVLNCIYKVLHGCVYGAQCFSNPRYFPMSLSDLASVDYDPFMHLESLKEPEPLHSPDSERSSKLQPVTEVKTQMQHGLISIAARTVITHLVNHLGHYPMSGGPAMLTSQVCENHDNHYSESTELSPELFESPNIQFFVLNNTTLVSCIQIRSEENMPGGGLSAGLASANSNVRIIVRDLSGKYSWDSAILYGPPPVSGLSEPTSFMLSLSHQEKPEEPPTSNECLEDITVKDGLSLQFKRFRETVPTWDTIRDEEDVLDELLQYLGVTSPECLQRTGISLNIPAPQPVCISEKQENDVINAILKQHTEEKEFVEKHFNDLNMKAVEQDEPIPQKPQSAFYYCRLLLSILGMNSWDKRRSFHLLKKNEKLLRELRNLDSRQCRETHKIAVFYVAEGQEDKHSILTNTGGSQAYEDFVAGLGWEVNLTNHCGFMGGLQKNKSTGLTTPYFATSTVEVIFHVSTRMPSDSDDSLTKKLRHLGNDEVHIVWSEHTRDYRRGIIPTEFGDVLIVIYPMKNHMFSIQIMKKPEENCLNLGGRGCTEPRSYHCTPAWATREKLHLKKI

SEQ ID NO: 2817 - protein, 1997 aa, Artificial Sequence
  Synthetic polypeptide
MFSKKPHGDVKKSTQKVLDTKKDALTRLKHLRIVIENAESIDLKQFFDQHFSHIYYVFFENFVTIEASLKQKGHKSQREELDAILFIFEKILQLLPERIHQRWQFHSIGLILKKLLHTGNSLKIRREGVRLFLLWLQALQNNCSKEQLWMFSCLIPGFSAPQSEHGPRTLDNLINPPLNLQETQVTIEEITPLVPPQSGDKGQEDLTSYFLEALLKYIVIQVKSLEWKNKENQERGFSFLFSHFKKYYLPYIFPNICKENSLYHPILDIPQMRPKPHYVVIKKDAETNEAIYCTKEPFIKARVIVIRWLVSFWLEPKPHTGPHIPGMEGEVLPKNIQRAAASLVSREESKNDNADKTDRTTEPEQSHSNTSTLTEREPSSSSLCSIDEEHLTDIEIVRRVFSSKRSNVNFVTEIFRQAFLLPICEAAAMRKVVKVYQEWIQQEEKPLFMQEPEEIVITSSDLPCIENVTDHDISMEEGEKREEENGTNTADHVRNSSWAKNGSYQGALHNASEEATEQNIRAGTQAVLQVFIINSSNIFLLEPANEIKNLLDEHTDMCKRILNIYRYMVVQVSMDKKTWEQMLLVLLRVTESVLKMPSQAFLQFQGKKNMTLAGRLAGPLFQTLIVAWIKANLNVYISRELWDDLLSVLSSLTYWEELATEWSLTMETLTKVLARNLYSLDLSDLPLDKLSEQKQKKHKGKGVGHEFQKVSVDKSFSRGWSRDQPGQAPMRQRSATTTGSPGTEKARSIVRQKTVDIDDAQILPRSTRVRHFSQSEETGNEVFGALNEEQPLPRSSSTSDILEPFTVERAKEAEQNATRGSTEGSVQSCNGLFWKESCSDIGGSSANVPDLMDEFIAERLRSGNASTMTRRGSSPGSLEIPKDLPDILNKQNQMRPIDDPGVPSEWTSPASAGSSDLISSDSHSDSFSAFQYDGRKFDNFGFGTDTGVTSSADVDSGSGHHQSAEEQEVASLTTLHIDSETSSLNQQAFSAEVATITGSESASPVHSPLGSRSQTPSPSTLNIDHMEQKDLQLDEKLHHSVLQTPDDLEISEFPSECCSVMAGGTLTGWHADVATVMWRRMLGILGDVNSIMDPEIHAQVFDYLCELWQNLAKIRDNLGISTDNLTSPSPPVLIPPLRILTPWLFKATMLTDKYKQGKLHAYKLICNTMKRRQDVSPNRDFLTHFYNIMHCGLLHIDQDIVNTIIKHCSPQFFSLGLPGATMLIMDFIVAAGRVASSAFLNAPRVEAQVLLGSLVCFPNLYCELPSLHPNIPDVAVSQFTDVKELIIKTVLSSARDEPSGPARCVALCSLGIWICEELVHESHHPQIKEALNVICVSLKFTNKTVAHVACNMLHMLVHYVPRLQIYQPDSPLKIIQILIATITHLLPSTEASSYEMDKRLVVSLLLCLLDWIMALPLKTLLQPFHATGAESDKTEKSVLNCIYKVLHGCVYGAQCFSNPRYFPMSLSDLASVDYDPFMHLESLKEPEPLHSPDSERSSKLQPVTEVKTQMQHGLISIAARTVITHLVNHLGHYPMSGGPAMLTSQVCENHDNHYSESTELSPELFESPNIQFFVLNNTTLVSCIQIRSEENMPGGGLSAGLASANSNVRIIVRDLSGKYSWDSAILYGPPPVSGLSEPTSFMLSLSHQEKPEEPPTSNECLEDITVKDGLSLQFKRFRETVPTWDTIRDEEDVLDELLQYLGVTSPECLQRTGISLNIPAPQPVCISEKQENDVINAILKQHTEEKEFVEKHFNDLNMKAVEQDEPIPQKPQSAFYYCRLLLSILGMNSWDKRRSFHLLKKNEKLLRELRNLDSRQCRETHKIAVFYVAEGQEDKHSILTNTGGSQAYEDFVAGLGWEVNLTNHCGFMGGLQKNKSTGLTTPYFATSTVEVIFHVSTRMPSDSDDSLTKKLRHLGNDEVHIVWSEHTRDYRRGIIPTEFGDVLIVIYPMKNHMFSIQIMKKPEENCLNLGGRGCTEPRSYHCTPAWATREKLHLKKI

SEQ ID NO: 2818 - protein, 756 aa, Artificial Sequence
  Synthetic polypeptide
MFSKKPHGDVKKSTQKVLDTKKDALTRLKHLRIVIENAESIDLKQFFDQHFSHIYYVFFENFVTIEASLKQKGHKSQREELDAILFIFEKILQLLPERIHQRWQFHSIGLILKKLLHTGNSLKIRREGVRLFLLWLQALQNNCSKEQLWMFSCLIPGFSAPQSEHGPRTLDNLINPPLNLQETQVTIEEITPLVPPQSGDKGQEDLTSYFLEALLKYIVIQVKSLEWKNKENQERGFSFLFSHFKKYYLPYIFPNICKENSLYHPILDIPQMRPKPHYVVIKKDAETNEAIYCTKEPFIKARVIVIRWLVSFWLEPKPHTGPHIPGMEGEVLPKNIQRAAASLVSREESKNDNADKTDRTTEPEQSHSNTSTLTEREPSSSSLCSIDEEHLTDIEIVRRVFSSKRSNVNFVTEIFRQAFLLPICEAAAMRKVVKVYQEWIQQEEKPLFMQEPEEIVITSSDLPCIENVTDHDISMEEGEKREEENGTNTADHVRNSSWAKNGSYQGALHNASEEATEQNIRAGTQAVLQVFIINSSNIFLLEPANEIKNLLDEHTDMCKRILNIYRYMVVQVSMDKKTWEQMLLVLLRVTESVLKMPSQAFLQFQGKKNMTLAGRLAGPLFQTLIVAWIKANLNVYISRELWDDLLSVLSSLTYWEELATEWSLTMETLTKVLARNLYSLDLSDLPLDKLSEQKQKKHKGKGVGHEFQKVSVDKSFSRGWSRDQPGQAPMRQRSATTTGSPGTEKARSIVRQKTVG

SEQ ID NO: 2819 - protein, 164 aa, Artificial Sequence
  Synthetic polypeptide
MSRLQLAIEERDEAIARAKHMEMSLKVLENINPEENDMTLQELLNRINNADTGIAIQKNGAIIVDRIYKTKECKMRITAEEMSALIEERDAALSKCKRLEQELHHVKEQNQTSANNMRHLTAENNQERALKAKLLSMQQARETAVQQYKKLEEEIQTLRVYYRN

SEQ ID NO: 2820 - protein, 345 aa, Artificial Sequence
  Synthetic polypeptide
MENWSKDITHSYLEQETTGINKSTQPDEQLTMNSEKSMHRKSTELVNEITCENTEWPGQRSTNFQIISSYPDDESVYCTTEKYNVMEHRHNDMHYECMTPCQVTSDSDKEKTIAFLLKELDILRTSNKKLQQKLAKEDKEQRKLKFKLELQEKETEAKIAEKTAALVEEVYFAQKERDEAVMSRLQLAIEERDEAIARAKHMEMSLKVLENINPEENDMTLQELLNRINNADTGIAIQKNGAIIVDRIYKTKECKMRITAEEMSALIEERDAALSKCKRLEQELHHVKEQNQTSANNMRHLTAENNQERALKAKLLSMQQARETAVQQYKKLEEEIQTLRVYYRN

SEQ ID NO: 2821 - protein, 314 aa, Artificial Sequence
  Synthetic polypeptide
MNSEKSMHRKSTELVNEITCENTEWPGQRSTNFQIISSYPDDESVYCTTEKYNVMEHRHNDMHYECMTPCQVTSDSDKEKTIAFLLKELDILRTSNKKLQQKLAKEDKEQRKLKFKLELQEKETEAKIAEKTAALVEEVYFAQKERDEAVMSRLQLAIEERDEAIARAKHMEMSLKVLENINPEENDMTLQELLNRINNADTGIAIQKNGAIIVDRIYKTKECKMRITAEEMSALIEERDAALSKCKRLEQELHHVKEQNQTSANNMRHLTAENNQERALKAKLLSMQQARETAVQQYKKLEEEIQTLRVYYRN

SEQ ID NO: 2822 - protein, 174 aa, Artificial Sequence
  Synthetic polypeptide
MNSEKSMHRKSTELVNEITCENTEWPGQRSTNFQIISSYPDDESVYCTTEKYNVMEHRHNDMHYECMTPCQVTSDSDKEKTIAFLLKELDILRTSNKKLQQKLAKEDKEQRKLKFKLELQEKETEAKIAEKTAGKVVIYATSQRNCSSTVQKTGRGNPDPSSLLQELTQDGLKI

SEQ ID NO: 2823 - protein, 1464 aa, Artificial Sequence
  Synthetic polypeptide
MSTIPRHFGLKYKEESYMFKELEKVRQETKKDFLRFKQKLASKPAVDESPVHSLHAPGPARPARVSCAAARTSRRYPSLKGPAMSAAALLQEVLGGAPRPSGLGEAAAPGKTRSFRPRDFYLRSSAFLRHQALKKPPVIASGFGTARPVVLLPPPEPPVKRRARGVLESSRHAAPRRVFHLGREREQSQEVAPLAGPCMAKERKASSVSAEDGYMEASSGRRKVRIRSNFVSESGAREAREAAGLGAQGEQESWPPSDAREAAWQALLPSRVIPTSIEEIIASLQSEAQLASDQTIKELIRSVLGQNYDITMEDISLMGKMYLKTSPMQAETPEIQAEYKFQMGAEESQMSVHKELSETMSSILQIEQEDIEWGPSEAESIVFKPQEISQVQPAEELSKPLEDGQPTSDSKEAKWVSLTAKSPEFLQIEGKEIKRMRKRKSLRPRKSSKPLCDKKLHKKIPQDYSMPHLHDLCTTIPAQELPVDLRLASRVYHTANRKGHDTLLGKFGTSFLDDRFTDEEQTDRILYGIPVMDDNQEYVHIPPTPQGIPPELAQGTRERAHKPHLEVLGEEMYAYPEFTKLFWNTAAPKFSVPESVMKETLYPKYESVQASRLLTDKLSYKSSVITLHQHSRTNFWCFLPRKSASFESIQKWFSAQPTQLRRVKSSVDLRKEKIIAPLEIKNDMQSSIKEVMFQKAKELKRQLQLTKQNKTEEPNYVKESIDDIFDNMCEKHSLRNLSLTLIEASKKAGISYIVYPKKKKMRWKKRLKQQKLIFVHEELSKPPKSLERSASHGILPGQKKYLFKVPLYERQIRCPSLPLYLNFEKFVQAKGGIPENIDPRTWALDRLIEYKDASIPVKEKDDKISVPEDPPERVKEPPKLKLNDYVESDLPQEVIKYYESEVKILTEEINDKTKYPAFAYCRRGAIYRKLGKLQSAMNDLQRVILLEPLFLNAYWHRHLIYLFQDKINEALDDLNYIHKYNKNNTEAYLSKAEIYRGKKDITLAILNYTQAIKSTPTDADIYFRRGEMYEITNKVLAIDDFSKCIFYDPKRTDALLKRGLFYCENENWFAAIEDFTALLNIDHQNSQARTYRGIAYVKWKFYKEATQDFSAAIHLDPNNWLALYYRGCLFRKSNPFRALQDYSVSALINDGYENLGCFLHRGIVYAHLKLWLLAICDFETVISLERTITLAYVNIGLIHLLHLDNYTEAIWQFSEAIRIDPLCIQSYLCRAETYFKLHKLKKAVNELSRAIHLQPDGIQLYIRRGQYLLMMKYYDLAKFTIYQIAEMDKGLSELSPMQQALIYSFCENHDKAIEVLDGISWNRAEMTMCALLAKVQMKAKRTKEAVEVLKKALDAISHSDKGPDATAISADCLYNLGLCYMEEGNLQMAFDSFTKAVKANPDFAESFYQRGLCKVKLHKDSSILDFNRAITLNPKHYQEMHTGGLGVKYYHIYNLFSNSAEKNR

SEQ ID NO: 2824 - protein, 178 aa, Artificial Sequence
  Synthetic polypeptide
MDKGLSELSPMQQALIYSFCENHDKAIEVLDGISWNRAEMTMCALLAKVQMKAKRTKEAVEVLKKALDAISHSDKGPDATAISADCLYNLGLCYMEEGNLQMAFDSFTKAVKANPDFAESFYQRGLCKVKLHKDSSILDFNRAITLNPKHYQEMHTGGLGVKYYHIYNLFSNSAEKNR

SEQ ID NO: 2825 - protein, 195 aa, Artificial Sequence
  Synthetic polypeptide
MMKYYDLAKFTIYQIAEMDKGLSELSPMQQALIYSFCENHDKAIEVLDGISWNRAEMTMCALLAKVQMKAKRTKEAVEVLKKALDAISHSDKGPDATAISADCLYNLGLCYMEEGNLQMAFDSFTKAVKANPDFAESFYQRGLCKVKLHKDSSILDFNRAITLNPKHYQEMHTGGLGVKYYHIYNLFSNSAEKNR

SEQ ID NO: 2826 - protein, 547 aa, Artificial Sequence
  Synthetic polypeptide
MLGLSKVPLTQATRGPQVQQPPPSNRFLQPVQKIDMNLTDLLGELQRDPWPVPQGKRPLRSSGVALSIAVGLLECTFPNTGARIMMFIGGPATQGPGMVVGDELKTPIRSWHDIDKDNAKYVKKGTKHFEALANRAATTGHVIDIYACALDQTGLLEMKCCPNLTGGYMVMGDSFNTSLFKQTFQRVFTKDMHGQFKMGFGGTLEIKTSREIKISGAIGPCVSLNSKGPCVSENEIGTGGTCQWKICGLSPTTTLAIYFEVVNQHNAPIPQGGRGAIQFVTQYQHSSGQRRIRVTTIARNWADAQTQIQNIAASFDQEAAAILMARLAIYRAETEEGPDVLRWLDRQLIRLCQKFGEYHKDDPSSFRFSETFSLYPQFMFHLRRSSFLQVFNNSPDESSYYRHHFMRQDLTQSLIMIQPILYAYSFSGPPEPVLLDSSSILADRILLMDTFFQILIYHGETIAQWRKSGYQDMPEYENFRHLLQAPVDDAQEILHSRFPMPRYIDTEHGGSQARFLLSKVNPSQTHNNMYAWGQKLFNKKKKKGKIM

SEQ ID NO: 2827 - protein, 749 aa, Artificial Sequence
  Synthetic polypeptide
MTTYLEFIQQNEERDGVRFSWNVWPSSRLEATRMVVPVAALFTPLKERPDLPPIQYEPVLCSRTTCRAVLNPLCQVDYRAKLWACNFCYQRNQFPPSYAGISELNQPAELLPQFSSIEYVVLRGPQMPLIFLYVVDTCMEDEDLQALKESMQMSLSLLPPTALVGLITFGRMVQVHELGCEGISKSYVFRGTKDLSAKQLQEMLGLSKVPLTQATRGPQVQQPPPSNRFLQPVQKIDMNLTDLLGELQRDPWPVPQGKRPLRSSGVALSIAVGLLECTFPNTGARIMMFIGGPATQGPGMVVGDELKTPIRSWHDIDKDNAKYVKKGTKHFEALANRAATTGHVIDIYACALDQTGLLEMKCCPNLTGGYMVMGDSFNTSLFKQTFQRVFTKDMHGQFKMGFGGTLEIKTSREIKISGAIGPCVSLNSKGPCVSENEIGTGGTCQWKICGLSPTTTLAIYFEVVNQHNAPIPQGGRGAIQFVTQYQHSSGQRRIRVTTIARNWADAQTQIQNIAASFDQEAAAILMARLAIYRAETEEGPDVLRWLDRQLIRLCQKFGEYHKDDPSSFRFSETFSLYPQFMFHLRRSSFLQVFNNSPDESSYYRHHFMRQDLTQSLIMIQPILYAYSFSGPPEPVLLDSSSILADRILLMDTFFQILIYHGETIAQWRKSGYQDMPEYENFRHLLQAPVDDAQEILHSRFPMPRYIDTEHGGSQARFLLSKVNPSQTHNNMYAWGQKLFNKKKKKGKIM

SEQ ID NO: 2828 - protein, 647 aa, Artificial Sequence
  Synthetic polypeptide
MPLIFLYVVDTCMEDEDLQALKESMQMSLSLLPPTALVGLITFGRMVQVHELGCEGISKSYVFRGTKDLSAKQLQEMLGLSKVPLTQATRGPQVQQPPPSNRFLQPVQKIDMNLTDLLGELQRDPWPVPQGKRPLRSSGVALSIAVGLLECTFPNTGARIMMFIGGPATQGPGMVVGDELKTPIRSWHDIDKDNAKYVKKGTKHFEALANRAATTGHVIDIYACALDQTGLLEMKCCPNLTGGYMVMGDSFNTSLFKQTFQRVFTKDMHGQFKMGFGGTLEIKTSREIKISGAIGPCVSLNSKGPCVSENEIGTGGTCQWKICGLSPTTTLAIYFEVVNQHNAPIPQGGRGAIQFVTQYQHSSGQRRIRVTTIARNWADAQTQIQNIAASFDQEAAAILMARLAIYRAETEEGPDVLRWLDRQLIRLCQKFGEYHKDDPSSFRFSETFSLYPQRRDFPKTSGEILENQEKARSACLKFMFHLRRSSFLQVFNNSPDESSYYRHHFMRQDLTQSLIMIQPILYAYSFSGPPEPVLLDSSSILADRILLMDTFFQILIYHGETIAQWRKSGYQDMPEYENFRHLLQAPVDDAQEILHSRFPMPRYIDTEHGGSQARFLLSKVNPSQTHNNMYAWGQKLFNKKKKKGKIM

SEQ ID NO: 2829 - protein, 720 aa, Artificial Sequence
  Synthetic polypeptide
MTTYLEFIQQNEERDGVRFSWNVWPSSRLEATRMVVPVAALFTPLKERPDLPPIQYEPVLCSRTTCRAVLNPLCQVDYRAKLWACNFCYQRNQRGPQMPLIFLYVVDTCMEDEDLQALKESMQMSLSLLPPTALVGLITFGRMVQVHELGCEGISKSYVFRGTKDLSAKQLQEMLGLSKVPLTQATRGPQVQQPPPSNRFLQPVQKIDMNLTDLLGELQRDPWPVPQGKRPLRSSGVALSIAVGLLECTFPNTGARIMMFIGGPATQGPGMVVGDELKTPIRSWHDIDKDNAKYVKKGTKHFEALANRAATTGHVIDIYACALDQTGLLEMKCCPNLTGGYMVMGDSFNTSLFKQTFQRVFTKDMHGQFKMGFGGTLEIKTSREIKISGAIGPCVSLNSKGPCVSENEIGTGGTCQWKICGLSPTTTLAIYFEVVNQHNAPIPQGGRGAIQFVTQYQHSSGQRRIRVTTIARNWADAQTQIQNIAASFDQEAAAILMARLAIYRAETEEGPDVLRWLDRQLIRLCQKFGEYHKDDPSSFRFSETFSLYPQFMFHLRRSSFLQVFNNSPDESSYYRHHFMRQDLTQSLIMIQPILYAYSFSGPPEPVLLDSSSILADRILLMDTFFQILIYHGETIAQWRKSGYQDMPEYENFRHLLQAPVDDAQEILHSRFPMPRYIDTEHGGSQARFLLSKVNPSQTHNNMYAWGQKLFNKKKKKGKIM

SEQ ID NO: 2830 - protein, 185 aa, Artificial Sequence
  Synthetic polypeptide
MRRAELAGLKTMAWVPAESAVEELMPRLLPVEPCDLTEGFDPSVPPRTPQEYLRRVQIEAAQCPDVVVAQIDPKKLKRKQSVNISLSGCQPAPEGYSPTLQWQQQQVAQFSTVRQNVNKHRSHWKSQQLDSNVTMPKSEDEEGWKKFCLGEKLCADGAVGPATNESPGIDYVQVTYWPRKFDTPY

SEQ ID NO: 2831 - protein, 65 aa, Artificial Sequence
  Synthetic polypeptide
GWFENHGVGTSGVRSGRVDASAIAGRALRLDGRFRSLGTPEDASGIPEAGPDRSSSMSRCCGSSN

SEQ ID NO: 2832 - skipped

SEQ ID NO: 2833 - protein, 166 aa, Artificial Sequence
  Synthetic polypeptide
MADEALFLLLHNEMVSGVYKSAEQGEVENGRCITKLENMGFRVGQGLIERFTKDTARFKDELDIMKFICKDFWTTVFKKQIDNLRTNHQGIYVLQDNKFRLLTQMSAGKQYLEHASKYLAFTCGLIRGGLSNLGIKSIVTAEVSSMPALPFALCHDCETFPSHVEV

SEQ ID NO: 2834 - protein, 138 aa, Artificial Sequence
  Synthetic polypeptide
MADEALFLLLHNEMVSGVYKSAEQGEVENGRCITKLENMGFRVGQGLIERFTKDTARFKDELDIMKFICKDFWTTVFKKQIDNLRTNHQYLAFTCGLIRGGLSNLGIKSIVTAEVSSMPALPFALCHDCETFPSHVEV

SEQ ID NO: 2835 - protein, 91 aa, Artificial Sequence
  Synthetic polypeptide
MAVAVRTLQEQLEKAKESLKNVDENIRKLTGRDPNDVRPIQARLLALSGPGGGRGRGSLLLRRGFSDSGGGPPAKQRDLEGAVSRHSGSSL

SEQ ID NO: 2836 - protein, 265 aa, Artificial Sequence
  Synthetic polypeptide
MAVAVRTLQEQLEKAKESLKNVDENIRKLTGRDPNDVRPIQARLLALSGPGGGRGRGSLLLRRGFSDSGGGPPAKQRDLEGAVSRLGGERRTRRESRQESDPEDDDVKKPALQSSVVATSKERTRRDLIQDQNMDEKGKQRNRRIFGLLMGTLQKFKQESTVATERQKRRQEIEQKLEVQAEEERKQVENERRELFEERRAKQTELRLLEQKVELAQLQEEWNEHNAKIIKYIRTKTKPHLFYIPGRMCPATQKLIEESQRKMNG

SEQ ID NO: 2837 - protein, 805 aa, Artificial Sequence
  Synthetic polypeptide
MAKFGVHRILLLAISLTKCLESTKLLADLKKCGDLECEALINRVSAMRDYRGPDCRYLNFTKGEEISVYVKLAGEREDLWAGSKGKEFGYFPRDAVQIEEVFISEEIQMSTKESDFLCLLGVSYTFDNEDSELNGDYGENIYPYEEDKDEKSSIYESDFQIEPGFYATYESTLFEDQVPALEAPEDIGSTSESKDWEEVVVESMEQDRIPEVHVPPSSAVSGVKEWFGLGGEQAEEKAFESVIEPVQESSFRSRKIAVEDENDLEELNNGEPQTEHQQESESEIDSVPKTQSELASESEHIPKPQSTGWFGGGFTSYLGFGDEDTGLELIAEESNPPLQDFPNSISSDKEATVPCTEILTEKKDTITNDSLSLKPSWFDFGFAILGFAYAKEDKIMLDDRKNEEDGGADEHEHPLTSELDPEKEQEIETIKIIETEDQIDKKPVSEKTDESDTIPYLKKFLYNFDNPWNFQNIPKETELPFPKQILDQNNVIENEETGEFSIDNYPTDNTKVMIFKSSYSLSEDASEFQILKYLFQIDVYDFMNSAFSPIVILTERVVAALPEGMRPDSNLYGFPWELVICAAVVGFFAVLFFLWRSFRSVRSRLYVGREKKLALMLSGLIEEKSKLLEKFSLVQKEYEGYEVESSLKDASFEKEATEAQSLEATCEKLNRSNSELEDEILCLEKELKEEKSKHSEQDELMADISKRIQSLEDESKSLKSQVAEAKMTFKIFQMNEERLKIAIKDALNENSQLQESQKQLLQEAEVWKEQVSELNKQKVTFEDSKVHAEQVLNDKESHIKVGVEQ

SEQ ID NO: 2838 - protein, 258 aa, Artificial Sequence
  Synthetic polypeptide
MELKSPEEEVVAALPEGMRPDSNLYGFPWELVICAAVVGFFAVLFFLWRSFRSVRSRLYVGREKKLALMLSGLIEEKSKLLEKFSLVQKEYEGYEVESSLKDASFEKEATEAQSLEATCEKLNRSNSELEDEILCLEKELKEEKSKHSEQDELMADISKRIQSLEDESKSLKSQVAEAKMTFKIFQMNEERLKIAIKDALNENSQLQESQKQLLQEAEVWKEQVSELNKQKVTFEDSKVHAEQVLNDKESHIKVGVEQ

SEQ ID NO: 2839 - protein, 190 aa, Artificial Sequence
  Synthetic polypeptide
MLSGLIEEKSKLLEKFSLVQKEYEGYEVESSLKDASFEKEATEAQSLEATCEKLNRSNSELEDEILCLEKELKEEKSKHSEQDELMADISKRIQSLEDESKSLKSQVAEAKMTFKIFQMNEERLKIAIKDALNENSQLQESQKQLLQEAEVWKEQVSELNKQKVTFEDSKVHAEQVLNDKESHIKVGVEQ

SEQ ID NO: 2840 - protein, 241 aa, Artificial Sequence
  Synthetic polypeptide
MRPDSNLYGFPWELVICAAVVGFFAVLFFLWRSFRSVRSRLYVGREKKLALMLSGLIEEKSKLLEKFSLVQKEYEGYEVESSLKDASFEKEATEAQSLEATCEKLNRSNSELEDEILCLEKELKEEKSKHSEQDELMADISKRIQSLEDESKSLKSQVAEAKMTFKIFQMNEERLKIAIKDALNENSQLQESQKQLLQEAEVWKEQVSELNKQKVTFEDSKVHAEQVLNDKESHIKVGVEQ

SEQ ID NO: 2841 - protein, 275 aa, Artificial Sequence
  Synthetic polypeptide
MEEPGVTPQPYLGLLLEELRRVVAALPEGMRPDSNLYGFPWELVICAAVVGFFAVLFFLWRSFRSVRSRLYVGREKKLALMLSGLIEEKSKLLEKFSLVQKEYEGYEVESSLKDASFEKEATEAQSLEVENQMATCEKLNRSNSELEDEILCLEKELKEEKSKHSEQDELMADISKRIQSLEDESKSLKSQVAEAKMTFKIFQMNEERLKIAIKDALNENSQLQESQKQLLQEAEVWKEQVSELNKQKVTFEDSKVHAEQVLNDKESHIKVGVEQ

SEQ ID NO: 2842 - protein, 270 aa, Artificial Sequence
  Synthetic polypeptide
MEEPGVTPQPYLGLLLEELRRVVAALPEGMRPDSNLYGFPWELVICAAVVGFFAVLFFLWRSFRSVRSRLYVGREKKLALMLSGLIEEKSKLLEKFSLVQKEYEGYEVESSLKDASFEKEATEAQSLEATCEKLNRSNSELEDEILCLEKELKEEKSKHSEQDELMADISKRIQSLEDESKSLKSQVAEAKMTFKIFQMNEERLKIAIKDALNENSQLQESQKQLLQEAEVWKEQVSELNKQKVTFEDSKVHAEQVLNDKESHIKVGVEQ

SEQ ID NO: 2843 - protein, 195 aa, Artificial Sequence
  Synthetic polypeptide
MLSGLIEEKSKLLEKFSLVQKEYEGYEVESSLKDASFEKEATEAQSLEVENQMATCEKLNRSNSELEDEILCLEKELKEEKSKHSEQDELMADISKRIQSLEDESKSLKSQVAEAKMTFKIFQMNEERLKIAIKDALNENSQLQESQKQLLQEAEVWKEQVSELNKQKVTFEDSKVHAEQVLNDKESHIKVGVEQ

SEQ ID NO: 2844 - protein, 530 aa, Artificial Sequence
  Synthetic polypeptide
MAPERLRSRALSAFKLRGLLLRGEAIKYLTEALQSISELELEDKLEKIINAVEKQPLSSNMIERSVVEAAVQECSQSVDETIEHVFNIIGAFDIPRFVYNSERKKFLPLLMTNHPAPNLFGTPRDKAEMFRERYTILHQRTHRHELFTPPVIGSHPDESGSKFQLKTIETLLGSTTKIGDAIVLGMITQLKEGKFFLEDPTGTVQLDLSKAQFHSGLYTEACFVLAEGWFEDQVFHVNAFGFPPTEPSSTTRAYYGNINFFGGPSNTSVKTSAKLKQLEEENKDAMFVFLSDVWLDQVEVLEKLRIMFAGYSPAPPTCFILCGNFSSAPYGKNQVQALKDSLKTLADIICEYPDIHQSSRFVFVPGPEDPGFGSILPRPPLAESITNEFRQRVPFSVFTTNPCRIQYCTQEITVFREDLVNKMCRNCVRFPSSNLAIPNHFVKTILSQGHLTPLPLYVCPVYWAYDYALRVYPVPDLLVIADKYDPFTTTNTECLCINPGSFPRSGFSFKVFYPSNKTVEDRSRTVFWGK

SEQ ID NO: 2845 - protein, 504 aa, Artificial Sequence
  Synthetic polypeptide
MAPERLRSRALSAFKLRGLLLRGEAIKYLTEALQSISELELEDKLEKIINAVEKQPLSSNMIERSVVEAAVQECSQSVDETILLMTNHPAPNLFGTPRDKAEMFRERYTILHQRTHRHELFTPPVIGSHPDESGSKFQLKTIETLLGSTTKIGDAIVLGMITQLKEGKFFLEDPTGTVQLDLSKAQFHSGLYTEACFVLAEGWFEDQVFHVNAFGFPPTEPSSTTRAYYGNINFFGGPSNTSVKTSAKLKQLEEENKDAMFVFLSDVWLDQVEVLEKLRIMFAGYSPAPPTCFILCGNFSSAPYGKNQVQALKDSLKTLADIICEYPDIHQSSRFVFVPGPEDPGFGSILPRPPLAESITNEFRQRVPFSVFTTNPCRIQYCTQEITVFREDLVNKMCRNCVRFPSSNLAIPNHFVKTILSQGHLTPLPLYVCPVYWAYDYALRVYPVPDLLVIADKYDPFTTTNTECLCINPGSFPRSGFSFKVFYPSNKTVEDRSRTVFWGK

SEQ ID NO: 2846 - protein, 369 aa, Artificial Sequence [sequence omitted]

SEQ ID NO: 2847 - protein, 813 aa, Artificial Sequence
  Synthetic polypeptide
MKSRFSTIDLRAVLAELNASLLGMRVNNVYDVDNKTYLIRLQKPDFKATLLLESGIRIHTTEFEWPKNMMPSSFAMKCRKHLKSRRLVSAKQLGVDRIVDFQFGSDEAAYHLIIELYDRGNIVLTDYEYVILNILRFRTDEADDVKFAVRERYPLDHARAAEPLLTLERLTEIVASAPKGELLKRVLNPLLPYGPALIEHCLLENGFSGNVKVDEKLETKDIEKVLVSLQKAEDYMKTTSNFSGKGYIIQKREIKPSLEADKPVEDILTYEEFHPFLFSQHSQCPYIEFESFDKAVDEFYSKIEGQKIDLKALQQEKQALKKLDNVRKDHENRLEALQQAQEIDKLKGELIEMNLQIVDRAIQVVRSALANQIDWTEIGLIVKEAQAQGDPVASAIKELKLQTNHVTMLLRNPYLLSEEEDDDVDGDVNVEKNETEPPKGKKKKQKNKQLQKPQKNKPLLVDVDLSLSAYANAKKYYDHKRYAAKKTQKTVEAAEKAFKSAEKKTKQTLKEVQTVTSIQKARKVYWFEKFLWFISSENYLIIGGRDQQQNEIIVKRYLTPGDIYVHADLHGATSCVIKNPTGEPIPPRTLTEAGTMALCYSAAWDARVITSAWWVYHHQVSKTAPTGEYLTTGSFMIRGKKNFLPPSYLMMGFSFLFKVDESCVWRHQGERKVRVQDEDMETLASCTSELISEEMEQLDGGDTSSDEDKEEHETPVEVELMTQVDQEDITLQSGRDELNEELIQEESSEDEGEYEEVRKDQDSVGEMKDEGEETLNYPDTTIDLSHLQPQRDLVKVSCVYTIWQCLTHSKFSI

SEQ ID NO: 2848 - protein, 771 aa, Artificial Sequence
  Synthetic polypeptide
MKSRFSTIDLRAVLAELNASLLGMRVNNVYDVDNKTYLIRLQKPDFKATLLLESGIRIHTTEFEWPKNMMPSSFAMKGNIVLTDYEYVILNILRFRTDEADDVKFAVRERYPLDHARAAEPLLTLERLTEIVASAPKGELLKRVLNPLLPYGPALIEHCLLENGFSGNVKVDEKLETKDIEKVLVSLQKAEDYMKTTSNFSGKGYIIQKREIKPSLEADKPVEDILTYEEFHPFLFSQHSQCPYIEFESFDKAVDEFYSKIEGQKIDLKALQQEKQALKKLDNVRKDHENRLEALQQAQEIDKLKGELIEMNLQIVDRAIQVVRSALANQIDWTEIGLIVKEAQAQGDPVASAIKELKLQTNHVTMLLRNPYLLSEEEDDDVDGDVNVEKNETEPPKGKKKKQKNKQLQKPQKNKPLLVDVDLSLSAYANAKKYYDHKRYAAKKTQKTVEAAEKAFKSAEKKTKQTLKEVQTVTSIQKARKVYWFEKFLWFISSENYLIIGGRDQQQNEIIVKRYLTPGDIYVHADLHGATSCVIKNPTGEPIPPRTLTEAGTMALCYSAAWDARVITSAWWVYHHQVSKTAPTGEYLTTGSFMIRGKKNFLPPSYLMMGFSFLFKVDESCVWRHQGERKVRVQDEDMETLASCTSELISEEMEQLDGGDTSSDEDKEEHETPVEVELMTQVDQEDITLQSGRDELNEELIQEESSEDEGEYEEVRKDQDSVGEMKDEGEETLNYPDTTIDLSHLQPQRDLVKVSCVYTIWQCLTHSKFSI

SEQ ID NO: 2849 - protein, 792 aa, Artificial Sequence
  Synthetic polypeptide
MKSRFSTIDLRAVLAELNASLLGMRVNNVYDVDNKTYLIRLQKPDFKATLLLESGIRIHTTEFEWPKNMMPSSFAMKCRKHLKSRRLVSAKQLGVDRIVDFQFGSDEAAYHLIIELYDRGNIVLTDYEYVILNILRFRTDEADDVKFAVRERYPLDHARAAEPLLTLERLTEIVASAPKGELLKRVLNPLLPYGPALIEHCLLENGFSGNVKVDEKLETKDIEKVLVSLQKAEDYMKTTSNFSGKGYIIQKREIKPSLEADKPVEDILTYEEFHPFLFSQHSQCPYIEFESFDKAVDEFYSKIEGQKIDLKALQQEKQALKKLDNVRKDHENRLEALQQAQEIDKLKGELIEMNLQIVDRAIQVVRSALANQIDWTEIGLIVKEAQAQGDPVASAIKELKLQTNHVTMLLRNPYLLSEEEDDDVDGDVNVEKNETEPPKGKKKKQKNKQLQKPQKNKPLLVDVDLSLSAYANAKKYYDHKRYAAKKTQKTVEAAEKAFKSAEKKTKQTLKEVQTVTSIQKARKVYWFEKFLWFISSENYLIIGGRDQQQNEIIVKRYLTPGEPIPPRTLTEAGTMALCYSAAWDARVITSAWWVYHHQVSKTAPTGEYLTTGSFMIRGKKNFLPPSYLMMGFSFLFKVDESCVWRHQGERKVRVQDEDMETLASCTSELISEEMEQLDGGDTSSDEDKEEHETPVEVELMTQVDQEDITLQSGRDELNEELIQEESSEDEGEYEEVRKDQDSVGEMKDEGEETLNYPDTTIDLSHLQPQRDLVKVSCVYTIWQCLTHSKFSI

SEQ ID NO: 2850 - protein, 586 aa, Artificial Sequence
  Synthetic polypeptide
MKSRFSTIDLRAVLAELNASLLGMRVNNVYDVDNKTYLIRLQKPDFKATLLLESGIRIHTTEFEWPKNMMPSSFAMKCRKHLKSRRLVSAKQLGVDRIVDFQFGSDEAAYHLIIELYDRGNIVLTDYEYVILNILRFRTDEADDVKFAVRERYPLDHARAAEPLLTLERLTEIVASAPKGELLKRVLNPLLPYGPALIEHCLLENGFSGNVKVDEKLETKDIEKVLVSLQKAEDYMKTTSNFSGKGYIIQKREIKPSLEADKPVEDILTYEEFHPFLFSQHSQCPYIEFESFDKAVDEFYSKIEGQKIDLKALQQEKQALKKLDNVRKDHENRLEALQQAQEIDKLKGELIEMNLQIVDRAIQVVRSALANQIDWTEIGLIVKEAQAQGDPVASAIKELKLQTNHVTMLLRNPYLLSEEEDDDVDGDVNVEKNETEPPKGKKKKQKNKQLQKPQKNKPLLVDVDLSLSAYANAKKYYDHKRYAAKKTQKTVEAAEKAFKSAEKKTKQTLKEVQTVTSIQKARKVYWFEKFLWFISSENYLIIGGRDQQQNEIIVKRYLTPGDIYVHADLHGATSCVIKNPTGIYPR

SEQ ID NO: 2851 - protein, 544 aa, Artificial Sequence
  Synthetic polypeptide
MKSRFSTIDLRAVLAELNASLLGMRVNNVYDVDNKTYLIRLQKPDFKATLLLESGIRIHTTEFEWPKNMMPSSFAMKGNIVLTDYEYVILNILRFRTDEADDVKFAVRERYPLDHARAAEPLLTLERLTEIVASAPKGELLKRVLNPLLPYGPALIEHCLLENGFSGNVKVDEKLETKDIEKVLVSLQKAEDYMKTTSNFSGKGYIIQKREIKPSLEADKPVEDILTYEEFHPFLFSQHSQCPYIEFESFDKAVDEFYSKIEGQKIDLKALQQEKQALKKLDNVRKDHENRLEALQQAQEIDKLKGELIEMNLQIVDRAIQVVRSALANQIDWTEIGLIVKEAQAQGDPVASAIKELKLQTNHVTMLLRNPYLLSEEEDDDVDGDVNVEKNETEPPKGKKKKQKNKQLQKPQKNKPLLVDVDLSLSAYANAKKYYDHKRYAAKKTQKTVEAAEKAFKSAEKKTKQTLKEVQTVTSIQKARKVYWFEKFLWFISSENYLIIGGRDQQQNEIIVKRYLTPGDIYVHADLHGATSCVIKNPTGIYPR

SEQ ID NO: 2852 - protein, 283 aa, Artificial Sequence
  Synthetic polypeptide
MKSRFSTIDLRAVLAELNASLLGMRVNNVYDVDNKTYLIRLQKPDFKATLLLESGIRIHTTEFEWPKNMMPSSFAMKCRKHLKSRRLVSAKQLGVDRIVDFQFGSDEAAYHLIIELYDRGNIVLTDYEYVILNILRFRTDEADDVKFAVRERYPLDHARAAEPLLTLERLTEIVASAPKGELLKRVLNPLLPYGPALIEHCLLENGFSGNVKVDEKLETKDIEKVLVSLQKAEDYMKTTSNFSGKVQWLTPVISALLEAKVGGSLETKSSTPPWPSWQNPCLY

SEQ ID NO: 2853 - protein, 241 aa, Artificial Sequence
  Synthetic polypeptide
MKSRFSTIDLRAVLAELNASLLGMRVNNVYDVDNKTYLIRLQKPDFKATLLLESGIRIHTTEFEWPKNMMPSSFAMKGNIVLTDYEYVILNILRFRTDEADDVKFAVRERYPLDHARAAEPLLTLERLTEIVASAPKGELLKRVLNPLLPYGPALIEHCLLENGFSGNVKVDEKLETKDIEKVLVSLQKAEDYMKTTSNFSGKVQWLTPVISALLEAKVGGSLETKSSTPPWPSWQNPCLY

SEQ ID NO: 2854 - protein, 179 aa, Artificial Sequence
  Synthetic polypeptide
MCCAVSEQRLTCADQMMPFGKISQQLCGVKKLPWSCDSRYFWGWLNAVFNKVDYDRIRDVGPDRAASEWLLRCGAMVRYHGQERWQKDYNHLPTGPLDKYKIQAIDATDSCIMSIGFDHMEGLEHVEKIRLCKCHYIEDDCLLRLSQLENLQKTILEMEIISCGNITDKGIIALRHLRA

SEQ ID NO: 2855 - protein, 151 aa, Artificial Sequence
  Synthetic polypeptide
MIRGSGAEACSNEDGCSEKGMKGVDYDRIRDVGPDRAASEWLLRCGAMVRYHGQERWQKDYNHLPTGPLDKYKIQAIDATDSCIMSIGFDHMEGLEHVEKIRLCKCHYIEDDCLLRLSQLENLQKTILEMEIISCGNITDKGIIALRHLRA

SEQ ID NO: 2856 - protein, 107 aa, Artificial Sequence
  Synthetic polypeptide
MMEKYEKIGKIGEGSYGVVFKCRNRDTGQIVAIKKFLESEDDPVIKKIALREIRMLKQLKHPNLVNLLEVFRRKRRLHLVFEYCDHTVLHELDRYQRGTLGSQYSLP

SEQ ID NO: 2857 - protein, 92 aa, Artificial Sequence
  Synthetic polypeptide
MDEVEQDQHEARLKELFDSFDTTGTGSLGQEELTDLCHMLSLEEVAPVLQQTLLQDNLLGRVHFDQFKEALILILSRTLSNEEHFQEPVIIP

SEQ ID NO: 2858 - protein, 54 aa, Artificial Sequence
  Synthetic polypeptide
MLSLEEVAPVLQQTLLQDNLLGRVHFDQFKEALILILSRTLSNEEHFQEPVIIP

SEQ ID NO: 2859 - protein, 6 aa, Artificial Sequence
  Synthetic polypeptide
PTFATC

SEQ ID NO: 2860 - protein, 841 aa, Artificial Sequence
  Synthetic polypeptide
MAKPLTDQEKRRQISIRGIVGVENVAELKKSFNRHLHFTLVKDRNVATTRDYYFALAHTVRDHLVGRWIRTQQHYYDKCPKRVYYLSLEFYMGRTLQNTMINLGLQNACDEAIYQLGLDIEELEEIEEDAGLGNGGLGRLAACFLDSMATLGLAAYGYGIRYEYGIFNQKIRDGWQVEEADDWLRYGNPWEKSRPEFMLPVHFYGKVEHTNTGTKWIDTQVVLALPYDTPVPGYMNNTVNTMRLWSARAPNDFNLRDFNVGDYIQAVLDRNLAENISRVLYPNDNFFEGKELRLKQEYFVVAATLQDIIRRFKASKFGSTRGAGTVFDAFPDQVAIQLNDTHPALAIPELMRIFVDIEKLPWSKAWELTQKTFAYTNHTVLPEALERWPVDLVEKLLPRHLEIIYEINQKHLDRIVALFPKDVDRLRRMSLIEEEGSKRINMAHLCIVGSHAVNGVAKIHSDIVKTKVFKDFSELEPDKFQNKTNGITPRRWLLLCNPGLAELIAEKIGEDYVKDLSQLTKLHSFLGDDVFLRELAKVKQENKLKFSQFLETEYKVKINPSSMFDVQVKRIHEYKRQLLNCLHVITMYNRIKKDPKKLFVPRTVIIGGKAAPGYHMAKMIIKLITSVADVVNNDPMVGSKLKVIFLENYRVSLAEKVIPATDLSEQISTAGTEASGTGNMKFMLNGALTIGTMDGANVEMAEEAGEENLFIFGMRIDDVAALDKKGYEAKEYYEALPELKLVIDQIDNGFFSPKQPDLFKDIINMLFYHDRFKVFADYEAYVKCQDKVSQLYMKSDAVRPKHWPGKDSVQTGPLRETTMRTELFVLFTAESPTPTTVLGTS

SEQ ID NO: 2861 - protein, 44 aa, Artificial Sequence
  Synthetic polypeptide
MNKLNFHNNRVMQDRRSVCIFLPNDESLNIIINGHCKDLKMSHA

SEQ ID NO: 2862 - protein, 36 aa, Artificial Sequence
  Synthetic polypeptide
MQGKLQPPMEREARDGVPSGKARSASEPQALGTEEG

SEQ ID NO: 2863 - protein, 581 aa, Artificial Sequence
  Synthetic polypeptide
MFSGFNVFRVGISFVIMCIFYMPTVNSLPELSPQKYFSTLQPGKASLAYFCQADSPRTSVFLEELNEAVRPLQDYGISVAKVNCVKEEISRYCGKEKDLMKAYLFKGNILLREFPTDTLFDVNAIVAHVLFALLFSEVKYITNLEDLQNIENALKGKANIIFSYVRAIGIPEHRAVMEAAFVYGTTYQFVLTTEIALLESIGSEDVEYAHLYFFHCKLVLDLTQQCRRTLMEQPLTTLNIHLFIKTMKAPLLTEVAEDPQQVSTVHLQLGLPLVFIVSQQATYEADRRTAEWVAWRLLGKAGVLLLLRDSLEVNIPQDANVVFKRAEEGVPVEFLVLHDVDLIISHVENNMHIEEIQEDEDNDMEGPDIDVQDDEVAETVFRDRKRKLPLELTVELTEETFNATVMASDSIVLFYAGWQAVSMAFLQSYIDVAVKLKGTSTMLLTRINCADWSDVCTKQNVTEFPIIKMYKKGENPVSYAGMLGTEDLLKFIQLNRISYPVNITSIQEAEEYLSGELYKDLILYSSVSVLGLFSPTMKTDGVRNRTYSRTSSDPRKHRVTKWCTRWAHCVHCSLAATGDRG

SEQ ID NO: 2864 - protein, 7 aa, Artificial Sequence
  Synthetic polypeptide
LLCFLLE

SEQ ID NO: 2865 - protein, 104 aa, Artificial Sequence
  Synthetic polypeptide
GAERPARPALRRAVRLCLPAAVAAAPVPRAAAELPEPLPLPLSPVGSAQDHPLLRRLLAQRLPALAPAARSPALLPPLAALLLPLLSPVLHALSPQPLPGGGYM

SEQ ID NO: 2866 - protein, 405 aa, Artificial Sequence
  Synthetic polypeptide
MRVSVPGPAAAAAPAAGREPSTPGGGSGGGGAVAAASGAAVPGSVQLALSVLHALLYAALFAFAYLQLWRLLLYRERRLSYQSLCLFLCLLWAALRTTLFSAAFSLSGSLPLLRPPAHLHFFPHWLLYCFPSCLQFSTLCLLNLYLAEVICKVRCATELDRHKILLHLGFIMASLLFLVVNLTCAMLVHGDVPENQLKWTVFVRALINDSLFILCAISLVCYICKITKMSSANVYLESKGMSLCQTVVVGSVVILLYSSRACYNLVVVTISQDTLESPFNYGWDNLSDKAHVEDISGEEYIVFGMVLFLWEHVPAWSVVLFFRAQRLNQNLAPAGMINSHSYSSRAYFFDNPRRYDSDDDLPRLGSSREGRIGKNYFKVHMEPKKSPHRQVNPKPKEQSWRHHAT

SEQ ID NO: 2867 - protein, 238 aa, Artificial Sequence
  Synthetic polypeptide
MAIPGIPYERRLLIMADPRDKALQDYRKKLLEHKEIDGRLKELREQLKELTKQYEKSENDLKALQSVGQIVGEVLKQLTEEKFIVKATNGPRYVVGCRRQLDKSKLKPGTRVALDMTTLTIMRYLPREVDPLVYNMSHEDPGNVSYSEIGGLSEQIRELREVIELPLTNPELFQRVGIIPPKGCLLYGPPGRVRWLLPVIPALWEAEVAGSPEPKSSRPACATQRDPVSEKQTDKQKT

SEQ ID NO: 2868 - protein, 224 aa, Artificial Sequence
  Synthetic polypeptide
MADPRDKALQDYRKKLLEHKEIDGRLKELREQLKELTKQYEKSENDLKALQSVGQIVGEVLKQLTEEKFIVKATNGPRYVVGCRRQLDKSKLKPGTRVALDMTTLTIMRYLPREVDPLVYNMSHEDPGNVSYSEIGGLSEQIRELREVIELPLTNPELFQRVGIIPPKGCLLYGPPGRVRWLLPVIPALWEAEVAGSPEPKSSRPACATQRDPVSEKQTDKQKT

SEQ ID NO: 2869 - protein, 184 aa, Artificial Sequence
  Synthetic polypeptide
MADPRDKALQDYRKKLLEHKEIDGRLKEFIVKATNGPRYVVGCRRQLDKSKLKPGTRVALDMTTLTIMRYLPREVDPLVYNMSHEDPGNVSYSEIGGLSEQIRELREVIELPLTNPELFQRVGIIPPKGCLLYGPPGRVRWLLPVIPALWEAEVAGSPEPKSSRPACATQRDPVSEKQTDKQKT

SEQ ID NO: 2870 - protein, 3 aa, Artificial Sequence
  Synthetic polypeptide
GGP

SEQ ID NO: 2871 - protein, 55 aa, Artificial Sequence
  Synthetic polypeptide
MPATRKPMRYGHTEGHTEVCFDDSGSLLTVKTIRMKTFMMIYFHLINSKYFFSSL

SEQ ID NO: 2872 - protein, 49 aa, Artificial Sequence
  Synthetic polypeptide
MPATRKPMRYGHTEGHTEVCFDDSGRSHQVCLPLLPPPLLPPPLPPLRQ

SEQ ID NO: 2873 - protein, 1382 aa, Artificial Sequence
  Synthetic polypeptide
MEFYESAYFIVLIPSIVITVIFLFFWLFMKETLYDEVLAKQKREQKLIPTKTDKKKAEKKKNKKKEIQNGNLHESDSESVPRDFKLSDALAVEDDQVAPVPLNVVETSSSVRERKKKEKKQKPVLEEQVIKESDASKIPGKKVEPVPVTKQPTPPSEAAASKKKPGQKKSKNGSDDQDKKVETLMVPSKRQEALPLHQETKQESGSGKKKASSKKQKTENVFVDEPLIHATTYIPLMDNADSSPVVDKREVIDLLKPDQVEGIQKSGTKKLKTETDKENAEVKFKDFLLSLKTMMFSEDEALCVVDLLKEKSGVIQDALKKSSKGELTTLIHQLQEKDKLLAAVKEDAAATKDRCKQLTQEMMTEKERSNVVITRMKDRIGTLEKEHNVFQNKIHVSYQETQQMQMKFQQVREQMEAEIAHLKQENGILRDAVSNTTNQLESKQSAELNKLRQDYARLVNELTEKTGKLQQEEVQKKNAEQAATQLKVQLQEAERRWEEVQSYIRKRTAEHEAAQQDLQSKFVAKENEVQSLHSKLTDTLVSKQQLEQRLMQLMESEQKRVNKEESLQMQVQDILEQNEALKAQIQQFHSQIAAQTSASVLAEELHKVIAEKDKQIKQTEDSLASERDRLTSKEEELKDIQNMNFLLKAEVQKLQALANEQAAAAHELEKMQQSVYVKDDKIRLLEEQLQHEISNKMEEFKILNDQNKALKSEVQKLQTLVSEQPNKDVVEQMEKCIQEKDEKLKTVEELLETGLIQVATKEEELNAIRTENSSLTKEVQDLKAKQNDQVSFASLVEELKKVIHEKDGKIKSVEELLEAELLKVANKEKTVQDLKQEIKALKEEIGNVQLEKAQQLSITSKVQELQNLLKGKEEQMNTMKAVLEEKEKDLANTGKWLQDLQEENESLKAHVQEVAQHNLKEASSASQFEELEIVLKEKENELKRLEAMLKERESDLSSKTQLLQDVQDENKLFKSQIEQLKQQNYQQASSFPPHEELLKVISEREKEISGLWNELDSLKDAVEHQRKKNNDLREKNWEAMEALASTEKMLQDKVNKTSKERQQQVEAVELEAKEVLKKLFPKVSVPSNLSYGEWLHGFEKKAKECMAGTSGSEEVKVLEHKLKEADEMHTLLQLECEKYKSVLAETEGILQKLQRSVEQEENKWKVKVDESHKTIKQMQSSFTSSEQELERLRSENKDIENLRREREHLEMELEKAEMERSTYVTEVRELKDLLTELQKKLDDSYSEAVRQNEELNLLKAQLNETLTKLRTEQNERQKVAGDLHKAQQSLELIQSKIVKAAGDTTVIENSDVSPETESSEKETMSVSLNQTVTQLQQLLQAVNQQLTKEKEHYQVLDAGLCSCLRTVLDSLCLEWFVLQMFA

SEQ ID NO: 2874 - protein, 1331 aa, Artificial Sequence
  Synthetic polypeptide
MEFYESAYFIVLIPSIVITVIFLFFWLFMKETLYDEVLAKQKREQKLIPTKTDKKKAEKKKNKKKEIQNGNLHESDSESVPRDFKLSDALAVEDDQVAPVPLNVVETSSSVRERKKKEKKQKPVLEEQVIKESDASKIPGKKVEPVPVTKQPTPPSEAAASKKKPGQKKSKNGSDDQDKKVETLMVPSKRQEALPLHQETKQESGSGKKKASSKKQKTENVFVDEPLIHATTYIPLMDNADSSPVVDKREVIDLLKPDQVEGIQKSGTKKLKTETDKENAEVKFKDFLLSLKTMMFSEDEALCVVDLLKEKSGVIQDALKKSSKGELTTLIHQLQEKDKLLAAVKEDAAATKDRCKQLTQEMMTEKERSNVVITRMKDRIGTLEKEHNVFQNKIHVSYQETQQMQMKFQQVREQMEAEIAHLKQENGILRDAVSNTTNQLESKQSAELNKLRQDYARLVNELTEKTGKLQQEEVQKKNAEQAATQLKVQLQEAERRWEEVQSYIRKRTAEHEAAQQDLQSKFVAKENEVQSLHSKLTDTLVSKQQLEQRLMQLMESEQKRVNKEESLQMQVQDILEQNEALKAQIQQFHSQIAAQTSASVLAEELHKVIAEKDKQIKQTEDSLASERDRLTSKEEELKDIQNMNFLLKAEVQKLQALANEQAAAAHELEKMQQSVYVKDDKIRLLEEQLQHEISNKMEEFKILNDQNKALKSEVQKLQTLVSEQPNKDVVEQMEKCIQEKDEKLKTVEELLETGLIQVATKEEELNAIRTENSSLTKEVQDLKAKQNDQVSFASLVEELKKVIHEKDGKIKSVEELLEAELLKVANKEKTVQLSITSKVQELQNLLKGKEEQMNTMKAVLEEKEKDLANTGKWLQDLQEENESLKAHVQEVAQHNLKEASSASQFEELEIVLKEKENELKRLEAMLKERESDLSSKTQLLQDVQDENKLFKSQIEQLKQQNYQQASSFPPHEELLKVISEREKEISGLWNELDSLKDAVEHQRKKNNDLREKNWEAMEALASTEKMLQDKVNKTSKERQQQVEAVELEAKEVLKKLFPKVSVPSNLSYGEWLHGFEKKAKECMAGTSGSEEVKVLEHKLKEADEMHTLLQLECEKYKSVLAETEGILQKLQRSVEQEENKWKVKVDESHKTIKQMQSSFTSSEQELERLRSENKDIENLRREREHLEMELEKAEMERSTYVTEVRELKAQLNETLTKLRTEQNERQKVAGDLHKAQQSLELIQSKIVKAAGDTTVIENSDVSPETESSEKETMSVSLNQTVTQLQQLLQAVNQQLTKEKEHYQVLDAGLCSCLRTVLDSLCLEWFVLQMFA

SEQ ID NO: 2875 - protein, 1325 aa, Artificial Sequence
  Synthetic polypeptide
MEFYESAYFIVLIPSIVITVIFLFFWLFMKETLYDEVLAKQKREQKLIPTKTDKKKAEKKKNKKKEIQNGNLHESDSESVPRDFKLSDALAVEDDQVAPVPLNVVETSSSVRERKKKEKKQKPVLEEQVIKESDASKIPGKKVEPVPVTKQPTPPSEAAASKKKPGQKKSKNGSDDQDKKVETLMVPSKRQEALPLHQETKQESGSGKKKASSKKQKTENVFVDEPLIHATTYIPLMDNADSSPVVDKREVIDLLKPDQVEGIQKSGTKKLKTETDKENAEVKFKDFLLSLKTMMFSEDEALCVVDLLKEKSGVIQDALKKSSKGELTTLIHQLQEKDKLLAAVKEDAAATKDRCKQLTQEMMTEKERSNVVITRMKDRIGTLEKEHNVFQNKIHVSYQETQQMQMKFQQVREQMEAEIAHLKQENGILRDAVSNTTNQLESKQSAELNKLRQDYARLVNELTEKTGKLQQEEVQKKNAEQAATQLKVQLQEAERRWEEVQSYIRKRTAEHEAAQQDLQSKFVAKENEVQSLHSKLTDTLVSKQQLEQRLMQLMESEQKRVNKEESLQMQVQDILEQNEALKAQIQQFHSQIAAQTSASVLAEELHKVIAEKDKQIKQTEDSLASERDRLTSKEEELKDIQNMNFLLKAEVQKLQALANEQAAAAHELEKMQQSVYVKDDKIRLLEEQLQHEISNKMEEFKILNDQNKALKSEVQKLQTLVSEQPNKDVVEQMEKCIQEKDEKLKTVEELLETGLIQVATKEEELNAIRTENSSLTKEVQDLKAKQNDQVSFASLVEELKKVIHEKDGKIKSVEELLEAELLKVANKEKTVQDLKQEIKALKEEIGNVQLEKAQQLSITSKVQELQNLLKGKEEQMNTMKAVLEEKEKDLANTGKWLQDLQEENESLKAHVQEVAQHNLKEASSASQFEELEIVLKEKENELKRLEAMLKERESDLSSKTQLLQDVQDENKLFKSQIEQLKQQNYQQASSFPPHEELLKVISEREKEISGLWNELDSLKDAVEHQRKKNNERQQQVEAVELEAKEVLKKLFPKVSVPSNLSYGEWLHGFEKKAKECMAGTSGSEEVKVLEHKLKEADEMHTLLQLECEKYKSVLAETEGILQKLQRSVEQEENKWKVKVDESHKTIKQMQSSFTSSEQELERLRSENKDIENLRREREHLEMELEKAEMERSTYVTEVRELKAQLNETLTKLRTEQNERQKVAGDLHKAQQSLELIQSKIVKAAGDTTVIENSDVSPETESSEKETMSVSLNQTVTQLQQLLQAVNQQLTKEKEHYQVLDAGLCSCLRTVLDSLCLEWFVLQMFA

SEQ ID NO: 2876 - protein, 620 aa, Artificial Sequence
  Synthetic polypeptide
MVPSCCFFRCRKQKDNRYQPNKDVVEQMEKCIQEKDEKLKTVEELLETGLIQVATKEEELNAIRTENSSLTKEVQDLKAKQNDQVSFASLVEELKKVIHEKDGKIKSVEELLEAELLKVANKEKTVQDLKQEIKALKEEIGNVQLEKAQQLSITSKVQELQNLLKGKEEQMNTMKAVLEEKEKDLANTGKWLQDLQEENESLKAHVQEVAQHNLKEASSASQFEELEIVLKEKENELKRLEAMLKERESDLSSKTQLLQDVQDENKLFKSQIEQLKQQNYQQASSFPPHEELLKVISEREKEISGLWNELDSLKDAVEHQRKKNNERQQQVEAVELEAKEVLKKLFPKVSVPSNLSYGEWLHGFEKKAKECMAGTSGSEEVKVLEHKLKEADEMHTLLQLECEKYKSVLAETEGILQKLQRSVEQEENKWKVKVDESHKTIKQMQSSFTSSEQELERLRSENKDIENLRREREHLEMELEKAEMERSTYVTEVRELKAQLNETLTKLRTEQNERQKVAGDLHKAQQSLELIQSKIVKAAGDTTVIENSDVSPETESSEKETMSVSLNQTVTQLQQLLQAVNQQLTKEKEHYQVLDAGLCSCLRTVLDSLCLEWFVLQMFA

SEQ ID NO: 2877 - protein, 359 aa, Artificial Sequence
  Synthetic polypeptide
MFWFRISEREKEISGLWNELDSLKDAVEHQRKKNNDLREKNWEAMEALASTEKMLQDKVNKTSKERQQQVEAVELEAKEVLKKLFPKVSVPSNLSYGEWLHGFEKKAKECMAGTSGSEEVKVLEHKLKEADEMHTLLQLECEKYKSVLAETEGILQKLQRSVEQEENKWKVKVDESHKTIKQMQSSFTSSEQELERLRSENKDIENLRREREHLEMELEKAEMERSTYVTEVRELKAQLNETLTKLRTEQNERQKVAGDLHKAQQSLELIQSKIVKAAGDTTVIENSDVSPETESSEKETMSVSLNQTVTQLQQLLQAVNQQLTKEKEHYQVLDAGLCSCLRTVLDSLCLEWFVLQMFA

SEQ ID NO: 2878 - skipped

SEQ ID NO: 2879 - protein, 15 aa, Artificial Sequence
  Synthetic polypeptide
ERALPGVRCWLVFLP

SEQ ID NO: 2880 - protein, 474 aa, Artificial Sequence
  Synthetic polypeptide
MSPHGDGRGQAQGRAVRVGLRRSGGIRGGVAVFAAVAAVFTFTLPPSVPGGDSGELITAAHELGVAHPPGYPLFTLVAKLAITLFPFGSIAYRVNLLCGLFGAVAASLLFFTVFRLSGSSAGGILAAGVFSFSRLTWQWSIAAEVFSLNNLFVGLLMALTVHFEEAATAKERSKVAKIGAFCCGLSLCNQHTIILYVLCIIPWILFQLLKKKELSLGSLLKLSLYFSAGLLPYVHLPISSYLNHARWTWGDQTTLQGFLTHFLREEYGTFSLAKSEIGSSMSEILLSQVTNMRTELSFNIQALAVCANICLATKDRQNPSLVWLFTGMFCIYSLFFAWRANLDISKPLFMGVVERFWMQSNAVVAVLAGIGLAAVVSETNRVLNSNGLQCLEWLSATLFVVYQIYSNYSVCDQRTNYVIDKFAKNLLTSMPHDAIILLRGDLPGNSLRYMHYCEGLRPDISLVDQEAGRSGSRL

SEQ ID NO: 2881 - protein, 393 aa, Artificial Sequence
  Synthetic polypeptide
MATTAELFEEPFVADEYIERLVWRTPGGGSRGGPEAFDPKRLLEEFVNHIQELQIMDERIQRKVEKLEQQCQKEAKEFAKKVQELQKSNQVAFQHFQELDEHISYVATKVCHLGDQLEGVNTPRQRAVEAQKLMKYFNEFLDGELKSDVFTNSEKIKEAADIIQKLHLIAQELPFDRFSEVKSKIASKYHDLECQLIQEFTSAQRRGEISRMREVAAVLLHFKGYSHCVDVYIKQCQEGAYLRNDIFEDAGILCQRVNKQVGDIFSNPETVLAKLIQNVFEIKLQSFVKEQLEECRKSDAEQYLKNLYDLYTRTTNLSSKLMEFNLGTDKQTFLSKLIKSIFISYLENYIEVETGYLKSRSAMILQRYYDSKNHQKRSIGTGGTLGGRDGLIT

SEQ ID NO: 2882 - protein, 328 aa, Artificial Sequence
  Synthetic polypeptide
MATTAELFEEPFVADEYIERLVWRTPGGGSRGGPEAFDPKRLLEEFVNHIQELQIMDERIQRKVEKLEQQCQKEAKEFAKKVQELQKSNQIKEAADIIQKLHLIAQELPFDRFSEVKSKIASKYHDLECQLIQEFTSAQRRGEISRMREVAAVLLHFKGYSHCVDVYIKQCQEGAYLRNDIFEDAGILCQRVNKQVGDIFSNPETVLAKLIQNVFEIKLQSFVKEQLEECRKSDAEQYLKNLYDLYTRTTNLSSKLMEFNLGTDKQTFLSKLIKSIFISYLENYIEVETGYLKSRSAMILQRYYDSKNHQKRSIGTGGTLGGRDGLIT

SEQ ID NO: 2883 - protein, 994 aa, Artificial Sequence
  Synthetic polypeptide
MFWCGTCFVTNNMKGSEVSLEKKKKIKMPVKRLREVVSQNHGDHLVLLKDELPCVPPALSANKRLPVGTGTSLNGTSRGSSDLTSARNCYQPLLENPMVSESDFSKDVAVQVLPLDKIEENNKQKANDIFISQYTMGQKDALRTVLKQNVSLCLTGWSDHSGVITTHCSLYLLRLMRSSHLSLPSSWDYRAQSMPVFKEVKVHLLEDAGIEKDAVTQETRISPSGIDSATTVAAATAAAIATAAPLIKVQSDLEAKVNSVTELLSKLQETDKHLQRVTEQQTSIQRKQEKLHCHDHEKQMNVFMEQHIRHLEKLQQQQIDIQTHFISAALKTSSFQPVSMPSSRAVEKYSVKPEHPNLGSCNPSLYNTFASKQAPLKEVEDTSFDKQKSPLETPAPRRFAPVPVSRDDELSKRENLLEEKENMEVSCHRGNVRLLEQILNNNDSLTRKSESSNTTSLTRSKIGWTPEKTNRFPSCEELETTKVTMQKSDDVLHDLGQKEKETNSMVQPKESLSMLKLPDLPQNSVKLQTTNTTRSVLKDAEKILRGVQNNKKVLEENLEAIIRAKDGAAMYSLINALSTNREMSEKIRIRKTVDEWIKTISAEIQDELSRTDYEQKRFDQKNQRTKKGQNMTKDIRTNTQDKTVNKSVIPRKHSQKQIEEHFRNLPMRGMPASSLQKERKEGLLKATTVIQDEDYMLQVYGKPVYQGHRSTLKKGPYLRFNSPSPKSRPQRPKVIERVKGTKVKSIRTQTDFYATKPKKMDSKMKHSVPVLPHGDQQYLFSPSREMPTFSGTLEGHLIPMAILLGQTQSNSDTMPPAGVIVSKPHPVTVTTSIPPSSRKVETGVKKPNIAIVEMKSEKKDPPQLTVQVLPSVDIDSISNSSADVLSPLSSPKEASLPPVQTWIKTPEIMKVDEEEVKFPGTNFDEIIDVIQEEEKCDEIPDSEPILEFNRSVKADSTKYNGPPFPPVASTFQPTADILDKVIERKETLENSLIQ

SEQ ID NO: 2884 - protein, 926 aa, Artificial Sequence
  Synthetic polypeptide
MPVKRLREVVSQNHGDHLVLLKDELPCVPPALSANKRLPVGTGTSLNGTSRGSSDLTSARNCYQPLLENPMVSESDFSKDVAVQVLPLDKIEENNKQKANDIFISQYTMGQKDALRTVLKQKAQSMPVFKEVKVHLLEDAGIEKDAVTQETRISPSGIDSATTVAAATAAAIATAAPLIKVQSDLEAKVNSVTELLSKLQETDKHLQRVTEQQTSIQRKQEKLHCHDHEKQMNVFMEQHIRHLEKLQQQQIDIQTHFISAALKTSSFQPVSMPSSRAVEKYSVKPEHPNLGSCNPSLYNTFASKQAPLKEVEDTSFDKQKSPLETPAPRRFAPVPVSRDDELSKRENLLEEKENMEVSCHRGNVRLLEQILNNNDSLTRKSESSNTTSLTRSKIGWTPEKTNRFPSCEELETTKVTMQKSDDVLHDLGQKEKETNSMVQPKESLSMLKLPDLPQNSVKLQTTNTTRSVLKDAEKILRGVQNNKKVLEENLEAIIRAKDGAAMYSLINALSTNREMSEKIRIRKTVDEWIKTISAEIQDELSRTDYEQKRFDQKNQRTKKGQNMTKDIRTNTQDKTVNKSVIPRKHSQKQIEEHFRNLPMRGMPASSLQKERKEGLLKATTVIQDEDYMLQVYGKPVYQGHRSTLKKGPYLRFNSPSPKSRPQRPKVIERVKGTKVKSIRTQTDFYATKPKKMDSKMKHSVPVLPHGDQQYLFSPSREMPTFSGTLEGHLIPMAILLGQTQSNSDTMPPAGVIVSKPHPVTVTTSIPPSSRKVETGVKKPNIAIVEMKSEKKDPPQLTVQVLPSVDIDSISNSSADVLSPLSSPKEASLPPVQTWIKTPEIMKVDEEEVKFPGTNFDEIIDVIQEEEKCDEIPDSEPILEFNRSVKADSTKYNGPPFPPVASTFQPTADILDKVIERKETLENSLIQ

SEQ ID NO: 2885 - protein, 897 aa, Artificial Sequence
  Synthetic polypeptide
MVSESDFSKDVAVQVLPLDKIEENNKQKANDIFISQYTMGQKDALRTVLKQNVSLCLTGWSDHSGVITTHCSLYLLRLMRSSHLSLPSSWDYRAQSMPVFKEVKVHLLEDAGIEKDAVTQETRISPSGIDSATTVAAATAAAIATAAPLIKVQSDLEAKVNSVTELLSKLQETDKHLQRVTEQQTSIQRKQEKLHCHDHEKQMNVFMEQHIRHLEKLQQQQIDIQTHFISAALKTSSFQPVSMPSSRAVEKYSVKPEHPNLGSCNPSLYNTFASKQAPLKEVEDTSFDKQKSPLETPAPRRFAPVPVSRDDELSKRENLLEEKENMEVSCHRGNVRLLEQILNNNDSLTRKSESSNTTSLTRSKIGWTPEKTNRFPSCEELETTKVTMQKSDDVLHDLGQKEKETNSMVQPKESLSMLKLPDLPQNSVKLQTTNTTRSVLKDAEKILRGVQNNKKVLEENLEAIIRAKDGAAMYSLINALSTNREMSEKIRIRKTVDEWIKTISAEIQDELSRTDYEQKRFDQKNQRTKKGQNMTKDIRTNTQDKTVNKSVIPRKHSQKQIEEHFRNLPMRGMPASSLQKERKEGLLKATTVIQDEDYMLQVYGKPVYQGHRSTLKKGPYLRFNSPSPKSRPQRPKVIERVKGTKVKSIRTQTDFYATKPKKMDSKMKHSVPVLPHGDQQYLFSPSREMPTFSGTLEGHLIPMAILLGQTQSNSDTMPPAGVIVSKPHPVTVTTSIPPSSRKVETGVKKPNIAIVEMKSEKKDPPQLTVQVLPSVDIDSISNSSADVLSPLSSPKEASLPPVQTWIKTPEIMKVDEEEVKFPGTNFDEIIDVIQEEEKCDEIPDSEPILEFNRSVKADSTKYNGPPFPPVASTFQPTADILDKVIERKETLENSLIQ

SEQ ID NO: 2886 - protein, 865 aa, Artificial Sequence
  Synthetic polypeptide
MKGSEVSLEKKKKIKMPVKRLREVVSQNHGDHLVLLKDELPCVPPALSANKRLPVGTGTSLNGTSRGSSDLTSARNCYQPLLENPMVSESDFSKDVAVQVLPLDKIEENNKQKANDIFISQYTMGQKDALRTVLKQKAQSMPVFKEVKVHLLEDAGIEKDAVTQETRISPSGIDSATTVAAATAAAIATAAPLIKVQSDLEAKVNSVTELLSKLQETDKHLQRVTEQQTSIQRKQEKLHCHDHEKQMNVFMEQHIRHLEKLQQQQIDIQTHFISAALKTSSFQPVSMPSSRAVEKYSVKPEHPNLGSCNPSLYNTFASKQAPLKEVEDTSFDKQKSPLETPAPRRFAPVPVSRDDELSKRENLLEEKENMEVSCHRGNVRLLEQILNNNDSLTRKSESSNTTSLTRSKIGWTPEKTNRFPSCEELETTKVTMQKSDDVLHDLGQKEKETNSMVQPKESLSMLKLPDLPQNSVKLQTTNTTRSVLKDAEKILRGVQNNKKVLEENLEAIIRAKDGAAMYSLINALSTNREMSEKIRIRKTVDEWIKTISAEIQGLLKATTVIQDEDYMLQVYGKPVYQGHRSTLKKGPYLRFNSPSPKSRPQRPKVIERVKGTKVKSIRTQTDFYATKPKKMDSKMKHSVPVLPHGDQQYLFSPSREMPTFSGTLEGHLIPMAILLGQTQSNSDTMPPAGVIVSKPHPVTVTTSIPPSSRKVETGVKKPNIAIVEMKSEKKDPPQLTVQVLPSVDIDSISNSSADVLSPLSSPKEASLPPVQTWIKTPEIMKVDEEEVKFPGTNFDEIIDVIQEEEKCDEIPDSEPILEFNRSVKADSTKYNGPPFPPVASTFQPTADILDKVIERKETLENSLIQ

SEQ ID NO: 2887 - protein, 1632 aa, Artificial Sequence
  Synthetic polypeptide
MFWCGTCFVTNNMKGSEVSLEKKKKIKMPVKRLREVVSQNHGDHLVLLKDELPCVPPALSANKRLPVGTGTSLNGTSRGSSDLTSARNCYQPLLENPMVSESDFSKDVAVQVLPLDKIEENNKQKANDIFISQYTMGQKDALRTVLKQNVSLCLTGWSDHSGVITTHCSLYLLRLMRSSHLSLPSSWDYRAQSMPVFKEVKVHLLEDAGIEKDAVTQETRISPSGIDSATTVAAATAAAIATAAPLIKVQSDLEAKVNSVTELLSKLQETDKHLQRVTEQQTSIQRKQEKLHCHDHEKQMNVFMEQHIRHLEKLQQQQIDIQTHFISAALKTSSFQPVSMPSSRAVEKYSVKPEHPNLGSCNPSLYNTFASKQAPLKEVEDTSFDKQKSPLETPAPRRFAPVPVSRDDELSKRENLLEEKENMEVSCHRGNVRLLEQILNNNDSLTRKSESSNTTSLTRSKIGWTPEKTNRFPSCEELETTKVTMQKSDDVLHDLGQKEKETNSMVQPKESLSMLKLPDLPQNSVKLQTTNTTRSVLKDAEKILRGVQNNKKVLEENLEAIIRAKDGAAMYSLINALSTNREMSEKIRIRKTVDEWIKTISAEIQDELSRTDYEQKRFDQKNQRTKKGQNMTKDIRTNTQDKTVNKSVIPRKHSQKQIEEHFRNLPMRGMPASSLQKERKEGLLKATTVIQDEDYMLQVYGKPVYQGHRSTLKKGPYLRFNSPSPKSRPQRPKVIERVKGTKVKSIRTQTDFYATKPKKMDSKMKHSVPVLPHGDQQYLFSPSREMPTFSGTLEGHLIPMAILLGQTQSNSDTMPPAGVIVSKPHPVTVTTSIPPSSRKVETGVKKPNIAIVEMKSEKKDPPQLTVQVLPSVDIDSISNSSADVLSPLSSPKEASLPPVQTWIKTPEIMKVDEEEVKFPGTNFDEIIDVIQEEEKCDEIPDSEPILEFNRSVKADSTKYNGPPFPPVASTFQPTADILDKVIERKETLENSLIQWVEQEIMSRIISGLFPVQQQIAPSISVSVSETSEPLTSDIVEGTSSGALQLFVDAGVPVNSNVIKHFVNEALAETIAVMLGDREAKKQGPVATGVSGDASTNETYLPARVCTPLPTPQPTPPCSPSSPAKECVLVKTPDSSPCDSDHDMAFPVKEICAEKGDDMPAIMLVNTPTVTPTTTPPPAAAVFTPTLSDISIDKLKVSSPELPKPWGDGDLPLEEENPNSPQEELHPRAIVMSVAKDEEPESMDFPAQPPPPEPVPFMPFPAGTKAPSPSQMPGSDSSTLESTLSVTVTETETLDKPISEGEILFSCGQKLAPKILEDIGLYLTNLNDSLSSTLHDAVEMEDDPPSEGQVIRMSHKKFHADAILSFAKQNQESAVSQQAVYHSEDLENSVGELSEGQRPQLTAAAENILMGHSLYMQPPVTNTQSLDQQCDPKPLSRQFDTVSGSIYEDSCASHGPMSLGELELEPNSKLVLPTTLLTAQENDVNLPVAAEDFSQYQLKQNQDVKQVEHKPSQSYLRVRNKSDIAPSQQQVSPGDMDRTQIELNPYLTCVFSGQAWWLTSVMSALWEAEEGGSLETKEFETKEFETSPGIIGRPSLYKKFLKISQAWWYIPVVLTTWEAEVEGSLEPVRLRLQ

SEQ ID NO: 2888 - protein, 1564 aa, Artificial Sequence
  Synthetic polypeptide
MPVKRLREVVSQNHGDHLVLLKDELPCVPPALSANKRLPVGTGTSLNGTSRGSSDLTSARNCYQPLLENPMVSESDFSKDVAVQVLPLDKIEENNKQKANDIFISQYTMGQKDALRTVLKQKAQSMPVFKEVKVHLLEDAGIEKDAVTQETRISPSGIDSATTVAAATAAAIATAAPLIKVQSDLEAKVNSVTELLSKLQETDKHLQRVTEQQTSIQRKQEKLHCHDHEKQMNVFMEQHIRHLEKLQQQQIDIQTHFISAALKTSSFQPVSMPSSRAVEKYSVKPEHPNLGSCNPSLYNTFASKQAPLKEVEDTSFDKQKSPLETPAPRRFAPVPVSRDDELSKRENLLEEKENMEVSCHRGNVRLLEQILNNNDSLTRKSESSNTTSLTRSKIGWTPEKTNRFPSCEELETTKVTMQKSDDVLHDLGQKEKETNSMVQPKESLSMLKLPDLPQNSVKLQTTNTTRSVLKDAEKILRGVQNNKKVLEENLEAIIRAKDGAAMYSLINALSTNREMSEKIRIRKTVDEWIKTISAEIQDELSRTDYEQKRFDQKNQRTKKGQNMTKDIRTNTQDKTVNKSVIPRKHSQKQIEEHFRNLPMRGMPASSLQKERKEGLLKATTVIQDEDYMLQVYGKPVYQGHRSTLKKGPYLRFNSPSPKSRPQRPKVIERVKGTKVKSIRTQTDFYATKPKKMDSKMKHSVPVLPHGDQQYLFSPSREMPTFSGTLEGHLIPMAILLGQTQSNSDTMPPAGVIVSKPHPVTVTTSIPPSSRKVETGVKKPNIAIVEMKSEKKDPPQLTVQVLPSVDIDSISNSSADVLSPLSSPKEASLPPVQTWIKTPEIMKVDEEEVKFPGTNFDEIIDVIQEEEKCDEIPDSEPILEFNRSVKADSTKYNGPPFPPVASTFQPTADILDKVIERKETLENSLIQWVEQEIMSRIISGLFPVQQQIAPSISVSVSETSEPLTSDIVEGTSSGALQLFVDAGVPVNSNVIKHFVNEALAETIAVMLGDREAKKQGPVATGVSGDASTNETYLPARVCTPLPTPQPTPPCSPSSPAKECVLVKTPDSSPCDSDHDMAFPVKEICAEKGDDMPAIMLVNTPTVTPTTTPPPAAAVFTPTLSDISIDKLKVSSPELPKPWGDGDLPLEEENPNSPQEELHPRAIVMSVAKDEEPESMDFPAQPPPPEPVPFMPFPAGTKAPSPSQMPGSDSSTLESTLSVTVTETETLDKPISEGEILFSCGQKLAPKILEDIGLYLTNLNDSLSSTLHDAVEMEDDPPSEGQVIRMSHKKFHADAILSFAKQNQESAVSQQAVYHSEDLENSVGELSEGQRPQLTAAAENILMGHSLYMQPPVTNTQSLDQQCDPKPLSRQFDTVSGSIYEDSCASHGPMSLGELELEPNSKLVLPTTLLTAQENDVNLPVAAEDFSQYQLKQNQDVKQVEHKPSQSYLRVRNKSDIAPSQQQVSPGDMDRTQIELNPYLTCVFSGQAWWLTSVMSALWEAEEGGSLETKEFETKEFETSPGIIGRPSLYKKFLKISQAWWYIPVVLTTWEAEVEGSLEPVRLRLQ

SEQ ID NO: 2889 - protein, 1535 aa, Artificial Sequence
  Synthetic polypeptide
MVSESDFSKDVAVQVLPLDKIEENNKQKANDIFISQYTMGQKDALRTVLKQNVSLCLTGWSDHSGVITTHCSLYLLRLMRSSHLSLPSSWDYRAQSMPVFKEVKVHLLEDAGIEKDAVTQETRISPSGIDSATTVAAATAAAIATAAPLIKVQSDLEAKVNSVTELLSKLQETDKHLQRVTEQQTSIQRKQEKLHCHDHEKQMNVFMEQHIRHLEKLQQQQIDIQTHFISAALKTSSFQPVSMPSSRAVEKYSVKPEHPNLGSCNPSLYNTFASKQAPLKEVEDTSFDKQKSPLETPAPRRFAPVPVSRDDELSKRENLLEEKENMEVSCHRGNVRLLEQILNNNDSLTRKSESSNTTSLTRSKIGWTPEKTNRFPSCEELETTKVTMQKSDDVLHDLGQKEKETNSMVQPKESLSMLKLPDLPQNSVKLQTTNTTRSVLKDAEKILRGVQNNKKVLEENLEAIIRAKDGAAMYSLINALSTNREMSEKIRIRKTVDEWIKTISAEIQDELSRTDYEQKRFDQKNQRTKKGQNMTKDIRTNTQDKTVNKSVIPRKHSQKQIEEHFRNLPMRGMPASSLQKERKEGLLKATTVIQDEDYMLQVYGKPVYQGHRSTLKKGPYLRFNSPSPKSRPQRPKVIERVKGTKVKSIRTQTDFYATKPKKMDSKMKHSVPVLPHGDQQYLFSPSREMPTFSGTLEGHLIPMAILLGQTQSNSDTMPPAGVIVSKPHPVTVTTSIPPSSRKVETGVKKPNIAIVEMKSEKKDPPQLTVQVLPSVDIDSISNSSADVLSPLSSPKEASLPPVQTWIKTPEIMKVDEEEVKFPGTNFDEIIDVIQEEEKCDEIPDSEPILEFNRSVKADSTKYNGPPFPPVASTFQPTADILDKVIERKETLENSLIQWVEQEIMSRIISGLFPVQQQIAPSISVSVSETSEPLTSDIVEGTSSGALQLFVDAGVPVNSNVIKHFVNEALAETIAVMLGDREAKKQGPVATGVSGDASTNETYLPARVCTPLPTPQPTPPCSPSSPAKECVLVKTPDSSPCDSDHDMAFPVKEICAEKGDDMPAIMLVNTPTVTPTTTPPPAAAVFTPTLSDISIDKLKVSSPELPKPWGDGDLPLEEENPNSPQEELHPRAIVMSVAKDEEPESMDFPAQPPPPEPVPFMPFPAGTKAPSPSQMPGSDSSTLESTLSVTVTETETLDKPISEGEILFSCGQKLAPKILEDIGLYLTNLNDSLSSTLHDAVEMEDDPPSEGQVIRMSHKKFHADAILSFAKQNQESAVSQQAVYHSEDLENSVGELSEGQRPQLTAAAENILMGHSLYMQPPVTNTQSLDQQCDPKPLSRQFDTVSGSIYEDSCASHGPMSLGELELEPNSKLVLPTTLLTAQENDVNLPVAAEDFSQYQLKQNQDVKQVEHKPSQSYLRVRNKSDIAPSQQQVSPGDMDRTQIELNPYLTCVFSGQAWWLTSVMSALWEAEEGGSLETKEFETKEFETSPGIIGRPSLYKKFLKISQAWWYIPVVLTTWEAEVEGSLEPVRLRLQ

SEQ ID NO: 2890 - protein, 1503 aa, Artificial Sequence
  Synthetic polypeptide
MKGSEVSLEKKKKIKMPVKRLREVVSQNHGDHLVLLKDELPCVPPALSANKRLPVGTGTSLNGTSRGSSDLTSARNCYQPLLENPMVSESDFSKDVAVQVLPLDKIEENNKQKANDIFISQYTMGQKDALRTVLKQKAQSMPVFKEVKVHLLEDAGIEKDAVTQETRISPSGIDSATTVAAATAAAIATAAPLIKVQSDLEAKVNSVTELLSKLQETDKHLQRVTEQQTSIQRKQEKLHCHDHEKQMNVFMEQHIRHLEKLQQQQIDIQTHFISAALKTSSFQPVSMPSSRAVEKYSVKPEHPNLGSCNPSLYNTFASKQAPLKEVEDTSFDKQKSPLETPAPRRFAPVPVSRDDELSKRENLLEEKENMEVSCHRGNVRLLEQILNNNDSLTRKSESSNTTSLTRSKIGWTPEKTNRFPSCEELETTKVTMQKSDDVLHDLGQKEKETNSMVQPKESLSMLKLPDLPQNSVKLQTTNTTRSVLKDAEKILRGVQNNKKVLEENLEAIIRAKDGAAMYSLINALSTNREMSEKIRIRKTVDEWIKTISAEIQGLLKATTVIQDEDYMLQVYGKPVYQGHRSTLKKGPYLRFNSPSPKSRPQRPKVIERVKGTKVKSIRTQTDFYATKPKKMDSKMKHSVPVLPHGDQQYLFSPSREMPTFSGTLEGHLIPMAILLGQTQSNSDTMPPAGVIVSKPHPVTVTTSIPPSSRKVETGVKKPNIAIVEMKSEKKDPPQLTVQVLPSVDIDSISNSSADVLSPLSSPKEASLPPVQTWIKTPEIMKVDEEEVKFPGTNFDEIIDVIQEEEKCDEIPDSEPILEFNRSVKADSTKYNGPPFPPVASTFQPTADILDKVIERKETLENSLIQWVEQEIMSRIISGLFPVQQQIAPSISVSVSETSEPLTSDIVEGTSSGALQLFVDAGVPVNSNVIKHFVNEALAETIAVMLGDREAKKQGPVATGVSGDASTNETYLPARVCTPLPTPQPTPPCSPSSPAKECVLVKTPDSSPCDSDHDMAFPVKEICAEKGDDMPAIMLVNTPTVTPTTTPPPAAAVFTPTLSDISIDKLKVSSPELPKPWGDGDLPLEEENPNSPQEELHPRAIVMSVAKDEEPESMDFPAQPPPPEPVPFMPFPAGTKAPSPSQMPGSDSSTLESTLSVTVTETETLDKPISEGEILFSCGQKLAPKILEDIGLYLTNLNDSLSSTLHDAVEMEDDPPSEGQVIRMSHKKFHADAILSFAKQNQESAVSQQAVYHSEDLENSVGELSEGQRPQLTAAAENILMGHSLYMQPPVTNTQSLDQQCDPKPLSRQFDTVSGSIYEDSCASHGPMSLGELELEPNSKLVLPTTLLTAQENDVNLPVAAEDFSQYQLKQNQDVKQVEHKPSQSYLRVRNKSDIAPSQQQVSPGDMDRTQIELNPYLTCVFSGQAWWLTSVMSALWEAEEGGSLETKEFETKEFETSPGIIGRPSLYKKFLKISQAWWYIPVVLTTWEAEVEGSLEPVRLRLQ

SEQ ID NO: 2891 - protein, 97 aa, Artificial Sequence
  Synthetic polypeptide
MAPRKRGGRGISFIFCCFRNNDHPEITYRLRNDSNFALQTMEPALPMPPVEELDVMFSELVDELDLTDKHREAMFALPAEKKWQIYCSKKKEKFATL

SEQ ID NO: 2892 - protein, 745 aa, Artificial Sequence
  Synthetic polypeptide
MAPRKRGGRGISFIFCCFRNNDHPEITYRLRNDSNFALQTMEPALPMPPVEELDVMFSELVDELDLTDKHREAMFALPAEKKWQIYCSKKKDQEENKGATSWPEFYIDQLNSMAARKSLLALEKEEEEERSKTIESLKTALRTKPMRFVTRFIDLDGLSCILNFLKTMDYETSESRIHTSLIGCIKALMNNSQGRAHVLAHSESINVIAQSLSTENIKTKVAVLEILGAVCLVPGGHKKVLQAMLHYQKYASERTRFQTLINDLDKSTGRYRDEVSLKTAIMSFINAVLSQGAGVESLDFRLHLRYEFLMLGIQPVIDKLREHENSTLDRHLDFFEMLRNEDELEFAKRFELVHIDTKSATQMFELTRKRLTHSEAYPHFMSILHHCLQMPYKRSGNTVQYWLLLDRIIQQIVIQNDKGQDPDSTPLENFNIKNVVRMLVNENEVKQWKEQAEKMRKEHNELQQKLEKKERECDAKTQEKEEMMQTLNKMKEKLEKETTEHKQVKQQVADLTAQLHELSRRAVCASIPGGPSPGAPGGPFPSSVPGSLLPPPPPPPLPGGMLPPPPPPLPPGGPPPPPGPPPLGAIMPPPGAPMGLALKKKSIPQPTNALKSFNWSKLPENKLEGTVWTEIDDTKVFKILDLEDLERTFSAYQRQQKEADAIDDTLSSKLKVKELSVIDGRRAQNCNILLSSYSRSSTTRYLEVNCIHITFITIYCFNCSILFLVIVDLSLCLIYKLNFTLGMYV

SEQ ID NO: 2893 - protein, 755 aa, Artificial Sequence
  Synthetic polypeptide
MAPRKRGGRGISFIFCCFRNNDHPEITYRLRNDSNFALQTMEPALPMPPVEELDVMFSELVDELDLTDKHREAMFALPAEKKWQIYCSKKKDQEENKGATSWPEFYIDQLNSMAARKSLLALEKEEEEERSKTIESLKTALRTKPMRFVTRFIDLDGLSCILNFLKTMDYETSESRIHTSLIGCIKALMNNSQGRAHVLAHSESINVIAQSLSTENIKTKVAVLEILGAVCLVPGGHKKVLQAMLHYQKYASERTRFQTLINDLDKSTGRYRDEVSLKTAIMSFINAVLSQGAGVESLDFRLHLRYEFLMLGIQPVIDKLREHENSTLDRHLDFFEMLRNEDELEFAKRFELVHIDTKSATQMFELTRKRLTHSEAYPHFMSILHHCLQMPYKRSGNTVQYWLLLDRIIQQIVIQNDKGQDPDSTPLENFNIKNVVRMLVNENEVKQWKEQAEKMRKEHNELQQKLEKKERECDAKTQEKEEMMQTLNKMKEKLEKETTEHKQVKQQVADLTAQLHELSRRAVCASIPGGPSPGAPGGPFPSSVPGSLLPPPPPPPLPGGMLPPPPPPLPPGGPPPPPGPPPLGAIMPPPGAPMGLALKKKSIPQPTNALKSFNWSKLPENKLEGTVWTEIDDTKVFKILDLEDLERTFSAYQRQQDFFVNSNSKQKEADAIDDTLSSKLKVKELSVIDGRRAQNCNILLSSYSRSSTTRYLEVNCIHITFITIYCFNCSILFLVIVDLSLCLIYKLNFTLGMYV

SEQ ID NO: 2894 - protein, 324 aa, Artificial Sequence
  Synthetic polypeptide
MESALAVPRLPPHDPGTPVLSVVDMHTGGEPLRIVLAGCPEVSGPTLLAKRRYMRQHLDHVRRRLMFEPRGHRDMYGAVLVPSELPDAHLGVLFLHNEGYSSMCGHAVLALGRFALDFGLVPAPPAGTREARVNIHCPCGLVTAFVACEDGRSHGPVRFHSVPAFVLATDLMVDVPGHGKVMVDIAYGGAFYAFVTAEKLGLDICSAKTRDLVDAASAVTEAVKAQFKINHPDSEDLAFLYGTILTDGKDAYTKEPTTNICVFADEQVDRSPTGSGVTARIALQYHKGLLELNQMRAFKSSATGSVFTGKAVRSVQWGSSEATM

SEQ ID NO: 2895 - protein, 153 aa, Artificial Sequence [sequence omitted]

SEQ ID NO: 2896 - protein, 550 aa, Artificial Sequence
  Synthetic polypeptide
MIESENLNQEEIIKELCLCNGLSYEMVGQEGSDTSKLEMFFLGYPRIVGLSLFPNLTSLTIVAQDIKEISGLEPCLQLKELWIAECCIEKIEGLQECRNLEKLYLYFNKISKIENLEKLIKLKVLWLNHNTIKNIEGLQTLKNLKDLNLAGNLINSIGRCLDSNEQLERLNLSGNQICSFKELTNLTRLPCLKDLCLNDPQYTTNPVCLLCNYSTHVLYHLPCLQRFDTLDVSAKQIKELADTTAMKKIMYYNMRIKTLQRHLKEDLEKLNDQKCKLQKLPEERVKLFSFVKKTLERELAELKGSGKGHSDGSNNSKVTDPETLKSCETVTEEPSLQQKILAKLNALNERVTFWNKKLDEIEAIYHIEVKQKKKSHGLLIPLLLIELETVGNFHFEEGTRSDDWFNFCYELILSRFCAWDFRTYGITGVKVKRIIKVNNRILRLKFEEKFQKFLENEDMHDSESYRRMLECLFYVFDPEVSVKKKHLLQILEKGFKDSETSKLPLKKEAIIVSNSLSISECPRIEFLQQKHKDEKKISLKHELFRHDGTI

SEQ ID NO: 2897 - protein, 325 aa, Artificial Sequence
  Synthetic polypeptide
MPALEHMNQILHILFVFLPFLWALGTLPPPDALLLWAMEQVLEFGLGGSSMSTHLRLLVMFIMSAGTAIASYFIPSTVGVVLFMTGFGFLLSLNLSDMGHKIGTKSKDLPSGPEKHFSWKECLFYIIILVLALLETSLLHHFAGFSQISKSNSQAIVGYGLMILLIILWILREIQSVYIIGIFRNPFYPKDVQTVTVFFEKQTRLMKIGIVRRILLTLVSPFAMIAFLSLDSSLQGLHSVSVCIGFTRAFRMVWQNTENALLETVIVSTVHLISSTDIWWNRSLDTGLRLLLSIFLHIKKKVDCKTASGRSFRRYSRRRHCYHRR

SEQ ID NO: 2898 - protein, 559 aa, Artificial Sequence
  Synthetic polypeptide
MSPDVPLLNDYKQDFFLKRFPQTVLGGPRFKLGYCAPPYIYVNQIILFLMPWVWGGVGTLLYQLGILKDYYTAALSGGLMLFTAFVIQFTSLYAKNKSTTVERILTTDILAEEDEHEFTSCTGAETVKFLIPGKKYVANTVFHSILAGLACGLGTWYLLPNRITLLYGSTGGTALLFFFGWMTLCIAEYSLIVNTATETATFQTQDTYEIIPLMRPLYIFFFVSVDLAHRFVVNMPALEHMNQILHILFVFLPFLWALGTLPPPDALLLWAMEQVLEFGLGGSSMSTHLRLLVMFIMSAGTAIASYFIPSTVGVVLFMTGFGFLLSLNLSDMGHKIGTKSKDLPSGPEKHFSWKECLFYIIILVLALLETSLLHHFAGFSQISKSNSQAIVGYGLMILLIILWILREIQSVYIIGIFRNPFYPKDVQTVTVFFEKQTRLMKIGIVRRILLTLVSPFAMIAFLSLDSSLQGLHSVSVCIGFTRAFRMVWQNTENALLETVIVSTVHLISSTDIWWNRSLDTGLRLLLSIFLHIKKKVDCKTASGRSFRRYSRRRHCYHRR

SEQ ID NO: 2899 - protein, 32 aa, Artificial Sequence
  Synthetic polypeptide
CINSTLDLQYRHMVEQKPGYRTQTLTEYIPTY

SEQ ID NO: 2900 - protein, 123 aa, Artificial Sequence
  Synthetic polypeptide
MNDSLFVSLDRLLLEFVFQYEQDISTKEEMIQRINKCCEDIKENKVTICRIHETINATDEEIDHYCKHSEEIKDNCRNWKPTCDVFRKHEDYMQDQFTVYQGTVEKDKSRFFEKIKLIDRQQD

SEQ ID NO: 2901 - protein, 94 aa, Artificial Sequence
  Synthetic polypeptide
MIQRINKCCEDIKENKVTICRIHETINATDEEIDHYCKHSEEIKDNCRNWKPTCDVFRKHEDYMQDQFTVYQGTVEKDKSRFFEKIKLIDRQQD

SEQ ID NO: 2902 - protein, 42 aa, Artificial Sequence
  Synthetic polypeptide
MNDSLFVSLDRLLLEFVFQYEQDISTKEEMIQRINRAGFLKR

SEQ ID NO: 2903 - protein, 13 aa, Artificial Sequence
  Synthetic polypeptide
MIQRINRAGFLKR

SEQ ID NO: 2904 - protein, 128 aa, Artificial Sequence
  Synthetic polypeptide
MEASWGSFNAERGWYVSVQQPEEAEAEELSPLLSNELHRQRSPGVSFGLSVFNLMNAIMGSGILGLAYVLANTGVFGFSFLLLTVALLASYSVHLLLSMCIQTGPQAGEQTNRGAEEEHSKGEKRRSV

SEQ ID NO: 2905 - protein, 123 aa, Artificial Sequence
  Synthetic polypeptide
GSFNAERGWYVSVQQPEEAEAEELSPLLSNELHRQRSPGVSFGLSVFNLMNAIMGSGILGLAYVLANTGVFGFSFLLLTVALLASYSVHLLLSMCIQTGPQAGEQTNRGAEEEHSKGEKRRSV

SEQ ID NO: 2906 - protein, 105 aa, Artificial Sequence
  Synthetic polypeptide
MSGPRIMYSLLLELHRQRSPGVSFGLSVFNLMNAIMGSGILGLAYVLANTGVFGFSFLLLTVALLASYSVHLLLSMCIQTGPQAGEQTNRGAEEEHSKGEKRRSV

SEQ ID NO: 2907 - protein, 109 aa, Artificial Sequence
  Synthetic polypeptide
LSPLHSHPIFISCSHKELHRQRSPGVSFGLSVFNLMNAIMGSGILGLAYVLANTGVFGFSFLLLTVALLASYSVHLLLSMCIQTGPQAGEQTNRGAEEEHSKGEKRRSV

SEQ ID NO: 2908 - protein, 74 aa, Artificial Sequence
  Synthetic polypeptide
MNAIMGSGILGLAYVLANTGVFGFSFLLLTVALLASYSVHLLLSMCIQTGPQAGEQTNRGAEEEHSKGEKRRSV

SEQ ID NO: 2909 - protein, 2 aa, Artificial Sequence
  Synthetic polypeptide
LI

SEQ ID NO: 2910 - protein, 261 aa, Artificial Sequence
  Synthetic polypeptide
MSLRQRLAQLVGRLQDPQKVARFQRLCGVEAPPRRSADRREDEKAEAPLAGDPRLRGRQPGAPGGPQPPGSDRNQCPAKPDGGGAPNGVRNGLAAELGPASPRRAGALRRNSLTGEEGQLARVSNWPLYCLFCFGTELGNELFYILFFPFWIWNLDPLVGRRLVVIWVLVMYLGQCTKDIIRWPRPASPPVVKLEVFYNSEYSMPSTHAMSGTAIPISMVLLTYGRWQYPLIYGLILIPCWCSLVCLSRIYMGMHSILQGL

SEQ ID NO: 2911 - protein, 30 aa, Artificial Sequence
  Synthetic polypeptide
MASSPELPTEDEQGSWGIDDLHISLQDMPF

SEQ ID NO: 2912 - protein, 2439 aa, Artificial Sequence
  Synthetic polypeptide
MASSPELPTEDEQGSWGIDDLHISLQAEQEDTQKKAFTCWINSQLARHTSPSVISDLFTDIKKGHVLLDLLEVLSGQQLPRDKGSNTFQCRINIEHALTFLRNRSIKLINIHVTDIIDGNPSIILGLIWTIILHFHIEKLAQTLSCNYNQPSLDDVSVVDSSPASSPPAKKCSKVQARWQMSARKALLLWAQEQCATYESVNVTDFKSSWRNGMAFLAIIHALRPDLIDMKSVKHRSNKDNLREAFRIAEQELKIPRLLEPEDVDVVDPDEKSIMTYVAQFLQYSKDAPGTGEEAQGKVKDAMGWLTLQKEKLQKLLKDSENDTYFKKYNSLLSFMESFNEEKKSFLDVLSIKRDLDELDKDHLQLREAWDGLDHQINAWKIKLNYALPPPLHQTEAWLQEVEELMDEDLSASQDHSQAVTLIQEKMTLFKSLMDRFEHHSNILLTFENKDENHLPLVPPNKLEEMKRRINNILEKKFILLLEFHYYKCLVLGLVDEVKSKLDIWNIKYGSRESVELLLEDWHKFIEEKEFLARLDTSFQKCGEIYKNLAGECQNINKQYMMVKSDVCMYRKNIYNVKSTLQKVLACWATYVENLRLLRACFEETKKEEIKEVPFETLAQWNLEHATLNEAGNFLVEVSNDVVGSSISKELRRLNKRWRKLVSKTQLEMNLPLMIKKQDQPTFDNSGNILSKEEKATVEFSTDMSVELPENYNQNIKAGEKHEKENEEFTGQLKVAKDVEKLIGQVEIWEAEAKSVLDQDDVDTSMEESLKHLIAKGSMFDELMARSEDMLQMDIQNISSQESFQHVLTTGLQAKIQEAKEKVQINVVKLIAALKNLTDVSPDLDIRLKMEESQKELESYMMRAQQLLGQRESPGELISKHKEALIISNTKSLAKYLKAVEELKNNVTEDIKMSLEEKSRDVCAKWESLHHELSLYVQQLKIDIEKGKLSDNILKLEKQINKEKKLIRRGRTKGLIKEHEACFSEEGCLYQLNHHMEVLRELCEELPSQKSQQEVKRLLKDYEQKIERLLKCASEIHMTLQPTAGGTSKNEGTITTSENRGGDPHSEAPFAKSDNQPSTEKAMEPTMKFSLASVLRPLQEESIMEKDYSASINSLLERYDTYRDILEHHLQNNKFRITSDFSSEEDRSSSCLQAKLTDLQVIKNETDARWKEFEIISLKLENHVNDIKKPFVIKERDTLKERERELQMTLNTRMESLETALRLVLPVEKASLLLCGSDLPLHKMAIQGFHLIDADRIYQHLRNIQDSIAKQIEICNRLEEPGNFVLKELHPFDLHAMQNIILKYKTQFEGMNHRVQRSEDTLKALEDFLASLRTAKLSAEPVTDLSASDTQVAQENTLTVKNKEGEIHLMKDKAKHLDKCLKMLDMSFKDAERGDDTSCENLLDAFSIKLSETHGYGVQEEFTEENKLLEACIFKNNELLKNIQDVQSQISKIGLKDPTVPAVKHRKKSLIRLDKVLDEYEEEKRHLQEMANSLPHFKDGREKTVNQQCQNTVVLWENTKALVTECLEQCGRVLELLKQYQNFKSILTTLIQKEESVISLQASYMGKENLKKRIAEIEIVKEEFNEHLEVVDKINQVCKNLQFYLNKMKTFEEPPFEKEANIIVDRWLDINEKTEDYYENLGRALALWDKLFNLKNVIDEWTEKALQKMELHQLTEEDRERLKEELQVHEQKTSEFSRRVAEIQFLLQSSEIPLELQVMESSILNKMEHVQKCLTGESNCHALSGSTAELREDLDQAKTQIGMTESLLKALSPSDSLEIFTKLEEIQQQILQQKHSMILLENQIGCLTPELSELKKQYESVSDLFNTKKSVLQDHFSKLLNDQCKNFNDWFSNIKVNLKECFESSETKKSVEQKLQKLSDFLTLEGRNSKIKQVDSVLKHVKKHLPKAHVKELISWLVGQEFELEKMESICQARAKELEDSLQQLLRLQDDHRNLRKWLTNQEEKWKGMEEPGEKTELFCQALARKREQFESVAQLNNSLKEYGFTEEEEIIMEATCLMDRYQTLLRQLSEIEEEDKLLPTEDQSFNDLAHDVIHWIKEIKESLMVLNSSEGKMPLEERIQKIKEIILLKPEGDARIETIMKQAESSEAPLVQKTLTDISNQWDNTLHLASTYLSHQEKLLLEGEKYLQSKEDLRLMLIELKKKQEAGFALQHGLQEKKAQLKIYKKFLKKAQDLTSLLKELKSQGNYLLECTKNPSFSEEPWLEIKHLHESLLQQLQDSVQNLDGHVREHDSYQVCVTDLNTTLDNFSKEFVSFSDKPVDQIAVEEKLQKLQELENRLSLQDGTLKKILALAKSVKQNTSSVGQKIIKDDIKSLQCKQKDLENRLASAKQEMECCLNSILKSKRSTEKKGKFTLPGREKQATSDVQESTQESAAVEKLEEDWEINKVQWLTAVISAREEAEVDRLLEPRSSRPAWATW

SEQ ID NO: 2913 - protein, 193 aa, Artificial Sequence
  Synthetic polypeptide
MEKLRIKYSEMYTIVPAEIESQVEECRKALEDIDEKISNEVLKSSPSYAMRRKIEEINNGLHNVEKMLQQKSKNIEKAQEIQKKMWDELDLWHSKLNELDSEVQDIVEQDPGQAQEWMDNLMIPFQQYQQVSQRAECRTSQLNKATVKMEEYSDLLKSTEAWIENTSHLLANPADYDSLRTLSHHASTVQHFR

SEQ ID NO: 2914 - protein, 3831 aa, Artificial Sequence
  Synthetic polypeptide
MASSPELPTEDEQGSWGIDDLHISLQAEQEDTQKKAFTCWINSQLARHTSPSVISDLFTDIKKGHVLLDLLEVLSGQQLPRDKGSNTFQCRINIEHALTFLRNRSIKLINIHVTDIIDGNPSIILGLIWTIILHFHIEKLAQTLSCNYNQPSLDDVSVVDSSPASSPPAKKCSKVQARWQMSARKALLLWAQEQCATYESVNVTDFKSSWRNGMAFLAIIHALRPDLIDMKSVKHRSNKDNLREAFRIAEQELKIPRLLEPEDVDVVDPDEKSIMTYVAQFLQYSKDAPGTGEEAQGKVKDAMGWLTLQKEKLQKLLKDSENDTYFKKYNSLLSFMESFNEEKKSFLDVLSIKRDLDELDKDHLQLREAWDGLDHQINAWKIKLNYALPPPLHQTEAWLQEVEELMDEDLSASQDHSQAVTLIQEKMTLFKSLMDRFEHHSNILLTFENKDENHLPLVPPNKLEEMKRRINNILEKKFILLLEFHYYKCLVLGLVDEVKSKLDIWNIKYGSRESVELLLEDWHKFIEEKEFLARLDTSFQKCGEIYKNLAGECQNINKQYMMVKSDVCMYRKNIYNVKSTLQKVLACWATYVENLRLLRACFEETKKEEIKEVPFETLAQWNLEHATLNEAGNFLVEVSNDVVGSSISKELRRLNKRWRKLVSKTQLEMNLPLMIKKQDQPTFDNSGNILSKEEKATVEFSTDMSVELPENYNQNIKAGEKHEKENEEFTGQLKVAKDVEKLIGQVEIWEAEAKSVLDQDDVDTSMEESLKHLIAKGSMFDELMARSEDMLQMDIQNISSQESFQHVLTTGLQAKIQEAKEKVQINVVKLIAALKNLTDVSPDLDIRLKMEESQKELESYMMRAQQLLGQRESPGELISKHKEALIISNTKSLAKYLKAVEELKNNVTEDIKMSLEEKSRDVCAKWESLHHELSLYVQQLKIDIEKGKLSDNILKLEKQINKEKKLIRRGRTKGLIKEHEACFSEEGCLYQLNHHMEVLRELCEELPSQKSQQEVKRLLKDYEQKIERLLKCASEIHMTLQPTAGGTSKNEGTITTSENRGGDPHSEAPFAKSDNQPSTEKAMEPTMKFSLASVLRPLQEESIMEKDYSASINSLLERYDTYRDILEHHLQNNKFRITSDFSSEEDRSSSCLQAKLTDLQVIKNETDARWKEFEIISLKLENHVNDIKKPFVIKERDTLKERERELQMTLNTRMESLETALRLVLPVEKASLLLCGSDLPLHKMAIQGFHLIDADRIYQHLRNIQDSIAKQIEICNRLEEPGNFVLKELHPFDLHAMQNIILKYKTQFEGMNHRVQRSEDTLKALEDFLASLRTAKLSAEPVTDLSASDTQVAQENTLTVKNKEGEIHLMKDKAKHLDKCLKMLDMSFKDAERGDDTSCENLLDAFSIKLSETHGYGVQEEFTEENKLLEACIFKNNELLKNIQDVQSQISKIGLKDPTVPAVKHRKKSLIRLDKVLDEYEEEKRHLQEMANSLPHFKDGREKTVNQQCQNTVVLWENTKALVTECLEQCGRVLELLKQYQNFKSILTTLIQKEESVISLQASYMGKENLKKRIAEIEIVKEEFNEHLEVVDKINQVCKNLQFYLNKMKTFEEPPFEKEANIIVDRWLDINEKTEDYYENLGRALALWDKLFNLKNVIDEWTEKALQKMELHQLTEEDRERLKEELQVHEQKTSEFSRRVAEIQFLLQSSEIPLELQVMESSILNKMEHVQKCLTGESNCHALSGSTAELREDLDQAKTQIGMTESLLKALSPSDSLEIFTKLEEIQQQILQQKHSMILLENQIGCLTPELSELKKQYESVSDLFNTKKSVLQDHFSKLLNDQCKNFNDWFSNIKVNLKECFESSETKKSVEQKLQKLSDFLTLEGRNSKIKQVDSVLKHVKKHLPKAHVKELISWLVGQEFELEKMESICQARAKELEDSLQQLLRLQDDHRNLRKWLTNQEEKWKGMEEPGEKTELFCQALARKREQFESVAQLNNSLKEYGFTEEEEIIMEATCLMDRYQTLLRQLSEIEEEDKLLPTEDQSFNDLAHDVIHWIKEIKESLMVLNSSEGKMPLEERIQKIKEIILLKPEGDARIETIMKQAESSEAPLVQKTLTDISNQWDNTLHLASTYLSHQEKLLLEGEKYLQSKEDLRLMLIELKKKQEAGFALQHGLQEKKAQLKIYKKFLKKAQDLTSLLKELKSQGNYLLECTKNPSFSEEPWLEIKHLHESLLQQLQDSVQNLDGHVREHDSYQVCVTDLNTTLDNFSKEFVSFSDKPVDQIAVEEKLQKLQELENRLSLQDGTLKKILALAKSVKQNTSSVGQKIIKDDIKSLQCKQKDLENRLASAKQEMECCLNSILKSKRSTEKKGKFTLPGREKQATSDVQESTQESAAVEKLEEDWEINKDSAVEMAMSKQLSLNAQESMKNTEDERKVNELQNQPLELDTMLRNEQLEEIEKLYTQLEAKKAAIKPLEQTECLNKTETGALVLHNIGYSAQHLDNLLQALITLKKNKESQYCVLRDFQEYLAAVESSMKALLTDKESLKVGPLDSVTYLDKIKKFIASIEKEKDSLGNLKIKWENLSNHVTDMDKKLLESQIKQLEHGWEQVEQQIQKKYSQQVVEYDEFTTLMNKVQDTEISLQQQQQHLQLRLKSPEERAGNQSMIALTTDLQATKHGFSVLKGQAELQMKRIWGEKEKKNLEDGINNLKKQWETLEPLHLEAENQIKKCDIRNKMKETILWAKNLLGELNPSIPLLPDDILSQIRKCKVTHDGILARQQSVESLAEEVKDKVPSLTTYEGSDLNNTLEDLRNQYQMLVLKSTQRSQQLEFKLEERSNFFAIIRKFQLMVQESETLIIPRVETAATEAELKHHHVTLEASQKELQEIDSGISTHLQELTNIYEELNVFERLFLEDQLKNLKIRTNRIQRFIQNTCNEVEHKIKFCRQFHEKTSALQEEADSIQRNELLLNQEVNKGVKEEIYNLKDRLTAIKCCILQVLKLKKVFDYIGLNWDFSQLDQLQTQVFEKEKELEEKIKQLDTFEEEHGKYQALLSKMRAIDLQIKKMTEVVLKAPDSSPESRRLNAQILSQRIEKAKCLCDEIIKKLNENKTFDDSFKEKEILQIKLNAEENDKLYKVLQNMVLELSPKELDEKNCQDKLETSLHVLNQIKSQLQQPLLINLEIKHIQNEKDNCEAFQEQVWAEMCSIKAVTAIEKQREENSSEASDVETKLREFEDLQMQLNTSIDLRTNVLNDAYENLTRYKEAVTRAVESITSLEAIIIPYRVDVGNPEESLEMPLRKQEELESTVAHIQDLTEKLGMISSPEAKLQLQYTLQELVSKNSAMKEAFKAQETEAERYLENYKCYRKMEEDIYTNLSKMETVLGQSMSSLPLSYREALERLEQSKALVSNLISTKEELMKLRQILRLLRLRCTENDGICLLKIVSALWEKWLSLLEAAKEWEMWCEELKQEWKFVSEEIEREAIILDNLQEELPEISKTKEAATTEELSELLDCLCQYGENVEKQQLLLTLLLQRIRSIQNVPESSGAVETVPAFQEITSMKERCNKLLQKVQKNKELVQTEIQERHSFTKEIIALKNFFQQTTTSFQNMAFQDHPEKSEQFEELQSILKKGKLTFENIMEKLRIKYSEMYTIVPAEIESQVEECRKALEDIDEKISNEVLKSSPSYAMRRKIEEINNGLHNVEKMLQQKSKNIEKAQEIQKKMWDELDLWHSKLNELDSEVQDIVEQDPGQAQEWMDNLMIPFQQYQQVSQRAECRTSQLNKATVKMEEYSDLLKSTEAWIENTSHLLANPADYDSLRTLSHHASTVQHFR

SEQ ID NO: 2915 - protein, 3864 aa, Artificial Sequence
  Synthetic polypeptide
MASSPELPTEDEQGSWGIDDLHISLQAEQEDTQKKAFTCWINSQLARHTSPSVISDLFTDIKKGHVLLDLLEVLSGQQLPRDKGSNTFQCRINIEHALTFLRNRSIKLINIHVTDIIDGNPSIILGLIWTIILHFHIEKLAQTLSCNYNQPSLDDVSVVDSSPASSPPAKKCSKVQARWQMSARKALLLWAQEQCATYESVNVTDFKSSWRNGMAFLAIIHALRPDLIDMKSVKHRSNKDNLREAFRIAEQELKIPRLLEPEDVDVVDPDEKSIMTYVAQFLQYSKDAPGTGEEAQGKVKDAMGWLTLQKEKLQKLLKDSENDTYFKKYNSLLSFMESFNEEKKSFLDVLSIKRDLDELDKDHLQLREAWDGLDHQINAWKIKLNYALPPPLHQTEAWLQEVEELMDEDLSASQDHSQAVTLIQEKMTLFKSLMDRFEHHSNILLTFENKDENHLPLVPPNKLEEMKRRINNILEKKFILLLEFHYYKCLVLGLVDEVKSKLDIWNIKYGSRESVELLLEDWHKFIEEKEFLARLDTSFQKCGEIYKNLAGECQNINKQYMMVKSDVCMYRKNIYNVKSTLQKVLACWATYVENLRLLRACFEETKKEEIKEVPFETLAQWNLEHATLNEAGNFLVEVSNDVVGSSISKELRRLNKRWRKLVSKTQLEMNLPLMIKKQDQPTFDNSGNILSKEEKATVEFSTDMSVELPENYNQNIKAGEKHEKENEEFTGQLKVAKDVEKLIGQVEIWEAEAKSVLDQDDVDTSMEESLKHLIAKGSMFDELMARSEDMLQMDIQNISSQESFQHVLTTGLQAKIQEAKEKVQINVVKLIAALKNLTDVSPDLDIRLKMEESQKELESYMMRAQQLLGQRESPGELISKHKEALIISNTKSLAKYLKAVEELKNNVTEDIKMSLEEKSRDVCAKWESLHHELSLYVQQLKIDIEKGKLSDNILKLEKQINKEKKLIRRGRTKGLIKEHEACFSEEGCLYQLNHHMEVLRELCEELPSQKSQQEVKRLLKDYEQKIERLLKCASEIHMTLQPTAGGTSKNEGTITTSENRGGDPHSEAPFAKSDNQPSTEKAMEPTMKFSLASVLRPLQEESIMEKDYSASINSLLERYDTYRDILEHHLQNNKFRITSDFSSEEDRSSSCLQAKLTDLQVIKNETDARWKEFEIISLKLENHVNDIKKPFVIKERDTLKERERELQMTLNTRMESLETALRLVLPVEKASLLLCGSDLPLHKMAIQGFHLIDADRIYQHLRNIQDSIAKQIEICNRLEEPGNFVLKELHPFDLHAMQNIILKYKTQFEGMNHRVQRSEDTLKALEDFLASLRTAKLSAEPVTDLSASDTQVAQENTLTVKNKEGEIHLMKDKAKHLDKCLKMLDMSFKDAERGDDTSCENLLDAFSIKLSETHGYGVQEEFTEENKLLEACIFKNNELLKNIQDVQSQISKIGLKDPTVPAVKHRKKSLIRLDKVLDEYEEEKRHLQEMANSLPHFKDGREKTVNQQCQNTVVLWENTKALVTECLEQCGRVLELLKQYQNFKSILTTLIQKEESVISLQASYMGKENLKKRIAEIEIVKEEFNEHLEVVDKINQVCKNLQFYLNKMKTFEEPPFEKEANIIVDRWLDINEKTEDYYENLGRALALWDKLFNLKNVIDEWTEKALQKMELHQLTEEDRERLKEELQVHEQKTSEFSRRVAEIQFLLQSSEIPLELQVMESSILNKMEHVQKCLTGESNCHALSGSTAELREDLDQAKTQIGMTESLLKALSPSDSLEIFTKLEEIQQQILQQKHSMILLENQIGCLTPELSELKKQYESVSDLFNTKKSVLQDHFSKLLNDQCKNFNDWFSNIKVNLKECFESSETKKSVEQKLQKLSDFLTLEGRNSKIKQVDSVLKHVKKHLPKAHVKELISWLVGQEFELEKMESICQARAKELEDSLQQLLRLQDDHRNLRKWLTNQEEKWKGMEEPGEKTELFCQALARKREQFESVAQLNNSLKEYGFTEEEEIIMEATCLMDRYQTLLRQLSEIEEEDKLLPTEDQSFNDLAHDVIHWIKEIKESLMVLNSSEGKMPLEERIQKIKEIILLKPEGDARIETIMKQAESSEAPLVQKTLTDISNQWDNTLHLASTYLSHQEKLLLEGEKYLQSKEDLRLMLIELKKKQEAGFALQHGLQEKKAQLKIYKKFLKKAQDLTSLLKELKSQGNYLLECTKNPSFSEEPWLEIKHLHESLLQQLQDSVQNLDGHVREHDSYQVCVTDLNTTLDNFSKEFVSFSDKPVDQIAVEEKLQKLQELENRLSLQDGTLKKILALAKSVKQNTSSVGQKIIKDDIKSLQCKQKDLENRLASAKQEMECCLNSILKSKRSTEKKGKFTLPGREKQATSDVQESTQESAAVEKLEEDWEINKNFVENVMAVSKNCHHSMYIFESIVKNFISDEMQDSAVEMAMSKQLSLNAQESMKNTEDERKVNELQNQPLELDTMLRNEQLEEIEKLYTQLEAKKAAIKPLEQTECLNKTETGALVLHNIGYSAQHLDNLLQALITLKKNKESQYCVLRDFQEYLAAVESSMKALLTDKESLKVGPLDSVTYLDKIKKFIASIEKEKDSLGNLKIKWENLSNHVTDMDKKLLESQIKQLEHGWEQVEQQIQKKYSQQVVEYDEFTTLMNKVQDTEISLQQQQQHLQLRLKSPEERAGNQSMIALTTDLQATKHGFSVLKGQAELQMKRIWGEKEKKNLEDGINNLKKQWETLEPLHLEAENQIKKCDIRNKMKETILWAKNLLGELNPSIPLLPDDILSQIRKCKVTHDGILARQQSVESLAEEVKDKVPSLTTYEGSDLNNTLEDLRNQYQMLVLKSTQRSQQLEFKLEERSNFFAIIRKFQLMVQESETLIIPRVETAATEAELKHHHVTLEASQKELQEIDSGISTHLQELTNIYEELNVFERLFLEDQLKNLKIRTNRIQRFIQNTCNEVEHKIKFCRQFHEKTSALQEEADSIQRNELLLNQEVNKGVKEEIYNLKDRLTAIKCCILQVLKLKKVFDYIGLNWDFSQLDQLQTQVFEKEKELEEKIKQLDTFEEEHGKYQALLSKMRAIDLQIKKMTEVVLKAPDSSPESRRLNAQILSQRIEKAKCLCDEIIKKLNENKTFDDSFKEKEILQIKLNAEENDKLYKVLQNMVLELSPKELDEKNCQDKLETSLHVLNQIKSQLQQPLLINLEIKHIQNEKDNCEAFQEQVWAEMCSIKAVTAIEKQREENSSEASDVETKLREFEDLQMQLNTSIDLRTNVLNDAYENLTRYKEAVTRAVESITSLEAIIIPYRVDVGNPEESLEMPLRKQEELESTVAHIQDLTEKLGMISSPEAKLQLQYTLQELVSKNSAMKEAFKAQETEAERYLENYKCYRKMEEDIYTNLSKMETVLGQSMSSLPLSYREALERLEQSKALVSNLISTKEELMKLRQILRLLRLRCTENDGICLLKIVSALWEKWLSLLEAAKEWEMWCEELKQEWKFVSEEIEREAIILDNLQEELPEISKTKEAATTEELSELLDCLCQYGENVEKQQLLLTLLLQRIRSIQNVPESSGAVETVPAFQEITSMKERCNKLLQKVQKNKELVQTEIQERHSFTKEIIALKNFFQQTTTSFQNMAFQDHPEKSEQFEELQSILKKGKLTFENIMEKLRIKYSEMYTIVPAEIESQVEECRKALEDIDEKISNEVLKSSPSYAMRRKIEEINNGLHNVEKMLQQKSKNIEKAQEIQKKMWDELDLWHSKLNELDSEVQDIVEQDPGQAQEWMDNLMIPFQQYQQVSQRAECRTSQLNKATVKMEEYSDLLKSTEAWIENTSHLLANPADYDSLRTLSHHASTVQHFR

SEQ ID NO: 2916 - protein, 465 aa, Artificial Sequence
  Synthetic polypeptide
MEEDIYTNLSKMETVLGQSMSSLPLSYREALERLEQSKALVSNLISTKEELMKLRQILRLLRLRCTENDGICLLKIVSALWEKWLSLLEAAKEWEMWCEELKQEWKFVSEEIEREAIILDNLQEELPEISKTKEAATTEELSELLDCLCQYGENVEKQQLLLTLLLQRIRSIQNVPESSGAVETVPAFQEITSMKERCNKLLQKVQKNKELVQTEIQERHSFTKEIIALKNFFQQTTTSFQNMAFQDHPEKSEQFEELQSILKKGKLTFENIMEKLRIKYSEMYTIVPAEIESQVEECRKALEDIDEKISNEVLKSSPSYAMRRKIEEINNGLHNVEKMLQQKSKNIEKAQEIQKKMWDELDLWHSKLNELDSEVQDIVEQDPGQAQEWMDNLMIPFQQYQQVSQRAECRTSQLNKATVKMEEYSDLLKSTEAWIENTSHLLANPADYDSLRTLSHHASTVQHFR

SEQ ID NO: 2917 - protein, 348 aa, Artificial Sequence
  Synthetic polypeptide
MEKLRIKYSEMYTIVPAEIESQVEECRKALEDIDEKISNEVLKSSPSYAMRRKIEEINNGLHNVEKMLQQKSKNIEKAQEIQKKMWDELDLWHSKLNELDSEVQDIVEQDPGQAQEWMDNLMIPFQQYQQVSQRAECRTSQLNKATVKMEEYSDLLKSTEAWIENTSHLLANPADYDSLRTLSHHASTVQDSKCFRSGPRPNIYVSYYVTVIQMALEDSEQKHNLLHSIFMDLEDLSIIFETDELTQSIQELSNQVTALQQKIMESLPQIQRMADERWLTPVIPALWEAEAGGSPAVRSWRPAWPTWRNSVSTKNIKINWAWWHVPVIPAIQEAEAGESLEPGRRRLQ

SEQ ID NO: 2918 - protein, 3963 aa, Artificial Sequence
  Synthetic polypeptide
MASSPELPTEDEQGSWGIDDLHISLQAEQEDTQKKAFTCWINSQLARHTSPSVISDLFTDIKKGHVLLDLLEVLSGQQLPRDKGSNTFQCRINIEHALTFLRNRSIKLINIHVTDIIDGNPSIILGLIWTIILHFHIEKLAQTLSCNYNQPSLDDVSVVDSSPASSPPAKKCSKVQARWQMSARKALLLWAQEQCATYESVNVTDFKSSWRNGMAFLAIIHALRPDLIDMKSVKHRSNKDNLREAFRIAEQELKIPRLLEPEDVDVVDPDEKSIMTYVAQFLQYSKDAPGTGEEAQGKVKDAMGWLTLQKEKLQKLLKDSENDTYFKKYNSLLSFMESFNEEKKSFLDVLSIKRDLDELDKDHLQLREAWDGLDHQINAWKIKLNYALPPPLHQTEAWLQEVEELMDEDLSASQDHSQAVTLIQEKMTLFKSLMDRFEHHSNILLTFENKDENHLPLVPPNKLEEMKRRINNILEKKFILLLEFHYYKCLVLGLVDEVKSKLDIWNIKYGSRESVELLLEDWHKFIEEKEFLARLDTSFQKCGEIYKNLAGECQNINKQYMMVKSDVCMYRKNIYNVKSTLQKVLACWATYVENLRLLRACFEETKKEEIKEVPFETLAQWNLEHATLNEAGNFLVEVSNDVVGSSISKELRRLNKRWRKLVSKTQLEMNLPLMIKKQDQPTFDNSGNILSKEEKATVEFSTDMSVELPENYNQNIKAGEKHEKENEEFTGQLKVAKDVEKLIGQVEIWEAEAKSVLDQDDVDTSMEESLKHLIAKGSMFDELMARSEDMLQMDIQNISSQESFQHVLTTGLQAKIQEAKEKVQINVVKLIAALKNLTDVSPDLDIRLKMEESQKELESYMMRAQQLLGQRESPGELISKHKEALIISNTKSLAKYLKAVEELKNNVTEDIKMSLEEKSRDVCAKWESLHHELSLYVQQLKIDIEKGKLSDNILKLEKQINKEKKLIRRGRTKGLIKEHEACFSEEGCLYQLNHHMEVLRELCEELPSQKSQQEVKRLLKDYEQKIERLLKCASEIHMTLQPTAGGTSKNEGTITTSENRGGDPHSEAPFAKSDNQPSTEKAMEPTMKFSLASVLRPLQEESIMEKDYSASINSLLERYDTYRDILEHHLQNNKFRITSDFSSEEDRSSSCLQAKLTDLQVIKNETDARWKEFEIISLKLENHVNDIKKPFVIKERDTLKERERELQMTLNTRMESLETALRLVLPVEKASLLLCGSDLPLHKMAIQGFHLIDADRIYQHLRNIQDSIAKQIEICNRLEEPGNFVLKELHPFDLHAMQNIILKYKTQFEGMNHRVQRSEDTLKALEDFLASLRTAKLSAEPVTDLSASDTQVAQENTLTVKNKEGEIHLMKDKAKHLDKCLKMLDMSFKDAERGDDTSCENLLDAFSIKLSETHGYGVQEEFTEENKLLEACIFKNNELLKNIQDVQSQISKIGLKDPTVPAVKHRKKSLIRLDKVLDEYEEEKRHLQEMANSLPHFKDGREKTVNQQCQNTVVLWENTKALVTECLEQCGRVLELLKQYQNFKSILTTLIQKEESVISLQASYMGKENLKKRIAEIEIVKEEFNEHLEVVDKINQVCKNLQFYLNKMKTFEEPPFEKEANIIVDRWLDINEKTEDYYENLGRALALWDKLFNLKNVIDEWTEKALQKMELHQLTEEDRERLKEELQVHEQKTSEFSRRVAEIQFLLQSSEIPLELQVMESSILNKMEHVQKCLTGESNCHALSGSTAELREDLDQAKTQIGMTESLLKALSPSDSLEIFTKLEEIQQQILQQKHSMILLENQIGCLTPELSELKKQYESVSDLFNTKKSVLQDHFSKLLNDQCKNFNDWFSNIKVNLKECFESSETKKSVEQKLQKLSDFLTLEGRNSKIKQVDSVLKHVKKHLPKAHVKELISWLVGQEFELEKMESICQARAKELEDSLQQLLRLQDDHRNLRKWLTNQEEKWKGMEEPGEKTELFCQALARKREQFESVAQLNNSLKEYGFTEEEEIIMEATCLMDRYQTLLRQLSEIEEEDKLLPTEDQSFNDLAHDVIHWIKEIKESLMVLNSSEGKMPLEERIQKIKEIILLKPEGDARIETIMKQAESSEAPLVQKTLTDISNQWDNTLHLASTYLSHQEKLLLEGEKYLQSKEDLRLMLIELKKKQEAGFALQHGLQEKKAQLKIYKKFLKKAQDLTSLLKELKSQGNYLLECTKNPSFSEEPWLEIKHLHESLLQQLQDSVQNLDGHVREHDSYQVCVTDLNTTLDNFSKEFVSFSDKPVDQIAVEEKLQKLQELENRLSLQDGTLKKILALAKSVKQNTSSVGQKIIKDDIKSLQCKQKDLENRLASAKQEMECCLNSILKSKRSTEKKGKFTLPGREKQATSDVQESTQESAAVEKLEEDWEINKDSAVEMAMSKQLSLNAQESMKNTEDERKVNELQNQPLELDTMLRNEQLEEIEKLYTQLEAKKAAIKPLEQTECLNKTETGALVLHNIGYSAQHLDNLLQALITLKKNKESQYCVLRDFQEYLAAVESSMKALLTDKESLKVGPLDSVTYLDKIKKFIASIEKEKDSLGNLKIKWENLSNHVTDMDKKLLESQIKQLEHGWEQVEQQIQKKYSQQVVEYDEFTTLMNKVQDTEISLQQQQQHLQLRLKSPEERAGNQSMIALTTDLQATKHGFSVLKGQAELQMKRIWGEKEKKNLEDGINNLKKQWETLEPLHLEAENQIKKCDIRNKMKETILWAKNLLGELNPSIPLLPDDILSQIRKCKVTHDGILARQQSVESLAEEVKDKVPSLTTYEGSDLNNTLEDLRNQYQMLVLKSTQRSQQLEFKLEERSNFFAIIRKFQLMVQESETLIIPRVETAATEAELKHHHVTLEASQKELQEIDSGISTHLQELTNIYEELNVFERLFLEDQLKNLKIRTNRIQRFIQNTCNEVEHKIKFCRQFHEKTSALQEEADSIQRNELLLNQEVNKGVKEEIYNLKDRLTAIKCCILQVLKLKKVFDYIGLNWDFSQLDQLQTQVFEKEKELEEKIKQLDTFEEEHGKYQALLSKMRAIDLQIKKMTEVVLKAPDSSPESRRLNAQILSQRIEKAKCLCDEIIKKLNENKTFDDSFKEKEILQIKLNAEENDKLYKVLQNMVLELSPKELDEKNCQDKLETSLHVLNQIKSQLQQPLLINLEIKHIQNEKDNCEAFQEQVWAEMCSIKAVTAIEKQREENSSEASDVETKLREFEDLQMQLNTSIDLRTNVLNDAYENLTRYKEAVTRAVESITSLEAIIIPYRVDVGNPEESLEMPLRKQEELESTVAHIQDLTEKLGMISSPEAKLQLQYTLQELVSKNSAMKEAFKAQETEAERYLENYKCYRKMEEDIYTNLSKMETVLGQSMSSLPLSYREALERLEQSKALVSNLISTKEELMKLRQILRLLRLRCTENDGICLLKIVSALWEKWLSLLEAAKEWEMWCEELKQEWKFVSEEIEREAIILDNLQEELPEISKTKEAATTEELSELLDCLCQYGENVEKQQLLLTLLLQRIRSIQNVPESSGAVETVPAFQEITSMKERCNKLLQKVQKNKELVQTEIQERHSFTKEIIALKNFFQQTTTSFQNMAFQDHPEKSEQFEELQSILKKGKLTFENIMEKLRIKYSEMYTIVPAEIESQVEECRKALEDIDEKISNEVLKSSPSYAMRRKIEEINNGLHNVEKMLQQKSKNIEKAQEIQKKMWDELDLWHSKLNELDSEVQDIVEQDPGQAQEWMDNLMIPFQQYQQVSQRAECRTSQLNKATVKMEEYSDLLKSTEAWIENTSHLLANPADYDSLRTLSHHASTVQMALEDSEQKHNLLHSIFMDLEDLSIIFETDELTQSIQELSNQVTALQQKIMESLPQIQRMADERWLTPVIPALWEAEAGGSPAVRSWRPAWPTWRNSVSTKNIKINWAWWHVPVIPAIQEAEAGESLEPGRRRLQ

SEQ ID NO: 2919 - protein, 3996 aa, Artificial Sequence
  Synthetic polypeptide
MASSPELPTEDEQGSWGIDDLHISLQAEQEDTQKKAFTCWINSQLARHTSPSVISDLFTDIKKGHVLLDLLEVLSGQQLPRDKGSNTFQCRINIEHALTFLRNRSIKLINIHVTDIIDGNPSIILGLIWTIILHFHIEKLAQTLSCNYNQPSLDDVSVVDSSPASSPPAKKCSKVQARWQMSARKALLLWAQEQCATYESVNVTDFKSSWRNGMAFLAIIHALRPDLIDMKSVKHRSNKDNLREAFRIAEQELKIPRLLEPEDVDVVDPDEKSIMTYVAQFLQYSKDAPGTGEEAQGKVKDAMGWLTLQKEKLQKLLKDSENDTYFKKYNSLLSFMESFNEEKKSFLDVLSIKRDLDELDKDHLQLREAWDGLDHQINAWKIKLNYALPPPLHQTEAWLQEVEELMDEDLSASQDHSQAVTLIQEKMTLFKSLMDRFEHHSNILLTFENKDENHLPLVPPNKLEEMKRRINNILEKKFILLLEFHYYKCLVLGLVDEVKSKLDIWNIKYGSRESVELLLEDWHKFIEEKEFLARLDTSFQKCGEIYKNLAGECQNINKQYMMVKSDVCMYRKNIYNVKSTLQKVLACWATYVENLRLLRACFEETKKEEIKEVPFETLAQWNLEHATLNEAGNFLVEVSNDVVGSSISKELRRLNKRWRKLVSKTQLEMNLPLMIKKQDQPTFDNSGNILSKEEKATVEFSTDMSVELPENYNQNIKAGEKHEKENEEFTGQLKVAKDVEKLIGQVEIWEAEAKSVLDQDDVDTSMEESLKHLIAKGSMFDELMARSEDMLQMDIQNISSQESFQHVLTTGLQAKIQEAKEKVQINVVKLIAALKNLTDVSPDLDIRLKMEESQKELESYMMRAQQLLGQRESPGELISKHKEALIISNTKSLAKYLKAVEELKNNVTEDIKMSLEEKSRDVCAKWESLHHELSLYVQQLKIDIEKGKLSDNILKLEKQINKEKKLIRRGRTKGLIKEHEACFSEEGCLYQLNHHMEVLRELCEELPSQKSQQEVKRLLKDYEQKIERLLKCASEIHMTLQPTAGGTSKNEGTITTSENRGGDPHSEAPFAKSDNQPSTEKAMEPTMKFSLASVLRPLQEESIMEKDYSASINSLLERYDTYRDILEHHLQNNKFRITSDFSSEEDRSSSCLQAKLTDLQVIKNETDARWKEFEIISLKLENHVNDIKKPFVIKERDTLKERERELQMTLNTRMESLETALRLVLPVEKASLLLCGSDLPLHKMAIQGFHLIDADRIYQHLRNIQDSIAKQIEICNRLEEPGNFVLKELHPFDLHAMQNIILKYKTQFEGMNHRVQRSEDTLKALEDFLASLRTAKLSAEPVTDLSASDTQVAQENTLTVKNKEGEIHLMKDKAKHLDKCLKMLDMSFKDAERGDDTSCENLLDAFSIKLSETHGYGVQEEFTEENKLLEACIFKNNELLKNIQDVQSQISKIGLKDPTVPAVKHRKKSLIRLDKVLDEYEEEKRHLQEMANSLPHFKDGREKTVNQQCQNTVVLWENTKALVTECLEQCGRVLELLKQYQNFKSILTTLIQKEESVISLQASYMGKENLKKRIAEIEIVKEEFNEHLEVVDKINQVCKNLQFYLNKMKTFEEPPFEKEANIIVDRWLDINEKTEDYYENLGRALALWDKLFNLKNVIDEWTEKALQKMELHQLTEEDRERLKEELQVHEQKTSEFSRRVAEIQFLLQSSEIPLELQVMESSILNKMEHVQKCLTGESNCHALSGSTAELREDLDQAKTQIGMTESLLKALSPSDSLEIFTKLEEIQQQILQQKHSMILLENQIGCLTPELSELKKQYESVSDLFNTKKSVLQDHFSKLLNDQCKNFNDWFSNIKVNLKECFESSETKKSVEQKLQKLSDFLTLEGRNSKIKQVDSVLKHVKKHLPKAHVKELISWLVGQEFELEKMESICQARAKELEDSLQQLLRLQDDHRNLRKWLTNQEEKWKGMEEPGEKTELFCQALARKREQFESVAQLNNSLKEYGFTEEEEIIMEATCLMDRYQTLLRQLSEIEEEDKLLPTEDQSFNDLAHDVIHWIKEIKESLMVLNSSEGKMPLEERIQKIKEIILLKPEGDARIETIMKQAESSEAPLVQKTLTDISNQWDNTLHLASTYLSHQEKLLLEGEKYLQSKEDLRLMLIELKKKQEAGFALQHGLQEKKAQLKIYKKFLKKAQDLTSLLKELKSQGNYLLECTKNPSFSEEPWLEIKHLHESLLQQLQDSVQNLDGHVREHDSYQVCVTDLNTTLDNFSKEFVSFSDKPVDQIAVEEKLQKLQELENRLSLQDGTLKKILALAKSVKQNTSSVGQKIIKDDIKSLQCKQKDLENRLASAKQEMECCLNSILKSKRSTEKKGKFTLPGREKQATSDVQESTQESAAVEKLEEDWEINKNFVENVMAVSKNCHHSMYIFESIVKNFISDEMQDSAVEMAMSKQLSLNAQESMKNTEDERKVNELQNQPLELDTMLRNEQLEEIEKLYTQLEAKKAAIKPLEQTECLNKTETGALVLHNIGYSAQHLDNLLQALITLKKNKESQYCVLRDFQEYLAAVESSMKALLTDKESLKVGPLDSVTYLDKIKKFIASIEKEKDSLGNLKIKWENLSNHVTDMDKKLLESQIKQLEHGWEQVEQQIQKKYSQQVVEYDEFTTLMNKVQDTEISLQQQQQHLQLRLKSPEERAGNQSMIALTTDLQATKHGFSVLKGQAELQMKRIWGEKEKKNLEDGINNLKKQWETLEPLHLEAENQIKKCDIRNKMKETILWAKNLLGELNPSIPLLPDDILSQIRKCKVTHDGILARQQSVESLAEEVKDKVPSLTTYEGSDLNNTLEDLRNQYQMLVLKSTQRSQQLEFKLEERSNFFAIIRKFQLMVQESETLIIPRVETAATEAELKHHHVTLEASQKELQEIDSGISTHLQELTNIYEELNVFERLFLEDQLKNLKIRTNRIQRFIQNTCNEVEHKIKFCRQFHEKTSALQEEADSIQRNELLLNQEVNKGVKEEIYNLKDRLTAIKCCILQVLKLKKVFDYIGLNWDFSQLDQLQTQVFEKEKELEEKIKQLDTFEEEHGKYQALLSKMRAIDLQIKKMTEVVLKAPDSSPESRRLNAQILSQRIEKAKCLCDEIIKKLNENKTFDDSFKEKEILQIKLNAEENDKLYKVLQNMVLELSPKELDEKNCQDKLETSLHVLNQIKSQLQQPLLINLEIKHIQNEKDNCEAFQEQVWAEMCSIKAVTAIEKQREENSSEASDVETKLREFEDLQMQLNTSIDLRTNVLNDAYENLTRYKEAVTRAVESITSLEAIIIPYRVDVGNPEESLEMPLRKQEELESTVAHIQDLTEKLGMISSPEAKLQLQYTLQELVSKNSAMKEAFKAQETEAERYLENYKCYRKMEEDIYTNLSKMETVLGQSMSSLPLSYREALERLEQSKALVSNLISTKEELMKLRQILRLLRLRCTENDGICLLKIVSALWEKWLSLLEAAKEWEMWCEELKQEWKFVSEEIEREAIILDNLQEELPEISKTKEAATTEELSELLDCLCQYGENVEKQQLLLTLLLQRIRSIQNVPESSGAVETVPAFQEITSMKERCNKLLQKVQKNKELVQTEIQERHSFTKEIIALKNFFQQTTTSFQNMAFQDHPEKSEQFEELQSILKKGKLTFENIMEKLRIKYSEMYTIVPAEIESQVEECRKALEDIDEKISNEVLKSSPSYAMRRKIEEINNGLHNVEKMLQQKSKNIEKAQEIQKKMWDELDLWHSKLNELDSEVQDIVEQDPGQAQEWMDNLMIPFQQYQQVSQRAECRTSQLNKATVKMEEYSDLLKSTEAWIENTSHLLANPADYDSLRTLSHHASTVQMALEDSEQKHNLLHSIFMDLEDLSIIFETDELTQSIQELSNQVTALQQKIMESLPQIQRMADERWLTPVIPALWEAEAGGSPAVRSWRPAWPTWRNSVSTKNIKINWAWWHVPVIPAIQEAEAGESLEPGRRRLQ

SEQ ID NO: 2920 - protein, 597 aa, Artificial Sequence
  Synthetic polypeptide
MEEDIYTNLSKMETVLGQSMSSLPLSYREALERLEQSKALVSNLISTKEELMKLRQILRLLRLRCTENDGICLLKIVSALWEKWLSLLEAAKEWEMWCEELKQEWKFVSEEIEREAIILDNLQEELPEISKTKEAATTEELSELLDCLCQYGENVEKQQLLLTLLLQRIRSIQNVPESSGAVETVPAFQEITSMKERCNKLLQKVQKNKELVQTEIQERHSFTKEIIALKNFFQQTTTSFQNMAFQDHPEKSEQFEELQSILKKGKLTFENIMEKLRIKYSEMYTIVPAEIESQVEECRKALEDIDEKISNEVLKSSPSYAMRRKIEEINNGLHNVEKMLQQKSKNIEKAQEIQKKMWDELDLWHSKLNELDSEVQDIVEQDPGQAQEWMDNLMIPFQQYQQVSQRAECRTSQLNKATVKMEEYSDLLKSTEAWIENTSHLLANPADYDSLRTLSHHASTVQMALEDSEQKHNLLHSIFMDLEDLSIIFETDELTQSIQELSNQVTALQQKIMESLPQIQRMADERWLTPVIPALWEAEAGGSPAVRSWRPAWPTWRNSVSTKNIKINWAWWHVPVIPAIQEAEAGESLEPGRRRLQ

SEQ ID NO: 2921 - protein, 1039 aa, Artificial Sequence
  Synthetic polypeptide
MEKLRIKYSEMYTIVPAEIESQVEECRKALEDIDEKISNEVLKSSPSYAMRRKIEEINNGLHNVEKMLQQKSKNIEKAQEIQKKMWDELDLWHSKLNELDSEVQDIVEQDPGQAQEWMDNLMIPFQQYQQVSQRAECRTSQLNKATVKMEEYSDLLKSTEAWIENTSHLLANPADYDSLRTLSHHASTVQDSKCFRSGPRPNIYVSYYVTVIQMALEDSEQKHNLLHSIFMDLEDLSIIFETDELTQSIQELSNQVTALQQKIMESLPQIQRMADDVVAIESEVKSMEKRVSKIKTILLSKEIFDFSPEEHLKHGEVILENIRPMKKTIAEIVSYQVELRLPQTGMKPLPVFQRTNQLLQDIKLLENVTQEQNELLKVVIKQTNEWDEEIENLKQILNNYSAQFSLEHMSPDQADKLPQLQGEIERMEKQILSLNQRKEDLLVDLKATVLNLHQHLKQEQEGVERDRLPAVTSEEGGVAERDASERKLNRRGSMSYLAAVEEEVEESSVKSDNGDEKAEPSPQSWSSLWKHDKDMEEDRASSSSGTIVQEAYGKISTSDNSMAQILTPDSLNTEQGPECSLRPNQTEEGTTPPIEADTLDSSDAQGGLEPRVEKTRPEPTEVLHACKTQVAELELWLQQANVAVEPETLNADMQQVLEQQLVGCQAMLTEIEHKVAFLLETCKDQGLGDNGATQHEAEALSLKLKTVKCNLEKVQMMLQEKHSEDQHPTILKKSSEPEHQEALQPVNLSELESIVTERPQFSRQKDFQQQQVLELKPMEQKDFIKFIEFNAKKMWPQYCQHDNDTTQESSASNQASSPENDVPDSILSPQGQNGDKWQYLHHELSSKIKLPLPQLVEPQVSTNMGILPSVTMYNFRYPTTEELKTYTTQLEDLRQEASNLQTQENMTEEAYINLDKKLFELFLTLSQCLSSVEEMLEMPRLYREDGSGQQVHYETLALELKKLYLALSDKKGDLLKAMTWPGENTNLLLECFDNLQVCLEHTQAAAVCRSKSLKAGLDYNRSYQPDMVVCACNPSYLGG

SEQ ID NO: 2922 - protein, 4654 aa, Artificial Sequence
  Synthetic polypeptide
MASSPELPTEDEQGSWGIDDLHISLQAEQEDTQKKAFTCWINSQLARHTSPSVISDLFTDIKKGHVLLDLLEVLSGQQLPRDKGSNTFQCRINIEHALTFLRNRSIKLINIHVTDIIDGNPSIILGLIWTIILHFHIEKLAQTLSCNYNQPSLDDVSVVDSSPASSPPAKKCSKVQARWQMSARKALLLWAQEQCATYESVNVTDFKSSWRNGMAFLAIIHALRPDLIDMKSVKHRSNKDNLREAFRIAEQELKIPRLLEPEDVDVVDPDEKSIMTYVAQFLQYSKDAPGTGEEAQGKVKDAMGWLTLQKEKLQKLLKDSENDTYFKKYNSLLSFMESFNEEKKSFLDVLSIKRDLDELDKDHLQLREAWDGLDHQINAWKIKLNYALPPPLHQTEAWLQEVEELMDEDLSASQDHSQAVTLIQEKMTLFKSLMDRFEHHSNILLTFENKDENHLPLVPPNKLEEMKRRINNILEKKFILLLEFHYYKCLVLGLVDEVKSKLDIWNIKYGSRESVELLLEDWHKFIEEKEFLARLDTSFQKCGEIYKNLAGECQNINKQYMMVKSDVCMYRKNIYNVKSTLQKVLACWATYVENLRLLRACFEETKKEEIKEVPFETLAQWNLEHATLNEAGNFLVEVSNDVVGSSISKELRRLNKRWRKLVSKTQLEMNLPLMIKKQDQPTFDNSGNILSKEEKATVEFSTDMSVELPENYNQNIKAGEKHEKENEEFTGQLKVAKDVEKLIGQVEIWEAEAKSVLDQDDVDTSMEESLKHLIAKGSMFDELMARSEDMLQMDIQNISSQESFQHVLTTGLQAKIQEAKEKVQINVVKLIAALKNLTDVSPDLDIRLKMEESQKELESYMMRAQQLLGQRESPGELISKHKEALIISNTKSLAKYLKAVEELKNNVTEDIKMSLEEKSRDVCAKWESLHHELSLYVQQLKIDIEKGKLSDNILKLEKQINKEKKLIRRGRTKGLIKEHEACFSEEGCLYQLNHHMEVLRELCEELPSQKSQQEVKRLLKDYEQKIERLLKCASEIHMTLQPTAGGTSKNEGTITTSENRGGDPHSEAPFAKSDNQPSTEKAMEPTMKFSLASVLRPLQEESIMEKDYSASINSLLERYDTYRDILEHHLQNNKFRITSDFSSEEDRSSSCLQAKLTDLQVIKNETDARWKEFEIISLKLENHVNDIKKPFVIKERDTLKERERELQMTLNTRMESLETALRLVLPVEKASLLLCGSDLPLHKMAIQGFHLIDADRIYQHLRNIQDSIAKQIEICNRLEEPGNFVLKELHPFDLHAMQNIILKYKTQFEGMNHRVQRSEDTLKALEDFLASLRTAKLSAEPVTDLSASDTQVAQENTLTVKNKEGEIHLMKDKAKHLDKCLKMLDMSFKDAERGDDTSCENLLDAFSIKLSETHGYGVQEEFTEENKLLEACIFKNNELLKNIQDVQSQISKIGLKDPTVPAVKHRKKSLIRLDKVLDEYEEEKRHLQEMANSLPHFKDGREKTVNQQCQNTVVLWENTKALVTECLEQCGRVLELLKQYQNFKSILTTLIQKEESVISLQASYMGKENLKKRIAEIEIVKEEFNEHLEVVDKINQVCKNLQFYLNKMKTFEEPPFEKEANIIVDRWLDINEKTEDYYENLGRALALWDKLFNLKNVIDEWTEKALQKMELHQLTEEDRERLKEELQVHEQKTSEFSRRVAEIQFLLQSSEIPLELQVMESSILNKMEHVQKCLTGESNCHALSGSTAELREDLDQAKTQIGMTESLLKALSPSDSLEIFTKLEEIQQQILQQKHSMILLENQIGCLTPELSELKKQYESVSDLFNTKKSVLQDHFSKLLNDQCKNFNDWFSNIKVNLKECFESSETKKSVEQKLQKLSDFLTLEGRNSKIKQVDSVLKHVKKHLPKAHVKELISWLVGQEFELEKMESICQARAKELEDSLQQLLRLQDDHRNLRKWLTNQEEKWKGMEEPGEKTELFCQALARKREQFESVAQLNNSLKEYGFTEEEEIIMEATCLMDRYQTLLRQLSEIEEEDKLLPTEDQSFNDLAHDVIHWIKEIKESLMVLNSSEGKMPLEERIQKIKEIILLKPEGDARIETIMKQAESSEAPLVQKTLTDISNQWDNTLHLASTYLSHQEKLLLEGEKYLQSKEDLRLMLIELKKKQEAGFALQHGLQEKKAQLKIYKKFLKKAQDLTSLLKELKSQGNYLLECTKNPSFSEEPWLEIKHLHESLLQQLQDSVQNLDGHVREHDSYQVCVTDLNTTLDNFSKEFVSFSDKPVDQIAVEEKLQKLQELENRLSLQDGTLKKILALAKSVKQNTSSVGQKIIKDDIKSLQCKQKDLENRLASAKQEMECCLNSILKSKRSTEKKGKFTLPGREKQATSDVQESTQESAAVEKLEEDWEINKDSAVEMAMSKQLSLNAQESMKNTEDERKVNELQNQPLELDTMLRNEQLEEIEKLYTQLEAKKAAIKPLEQTECLNKTETGALVLHNIGYSAQHLDNLLQALITLKKNKESQYCVLRDFQEYLAAVESSMKALLTDKESLKVGPLDSVTYLDKIKKFIASIEKEKDSLGNLKIKWENLSNHVTDMDKKLLESQIKQLEHGWEQVEQQIQKKYSQQVVEYDEFTTLMNKVQDTEISLQQQQQHLQLRLKSPEERAGNQSMIALTTDLQATKHGFSVLKGQAELQMKRIWGEKEKKNLEDGINNLKKQWETLEPLHLEAENQIKKCDIRNKMKETILWAKNLLGELNPSIPLLPDDILSQIRKCKVTHDGILARQQSVESLAEEVKDKVPSLTTYEGSDLNNTLEDLRNQYQMLVLKSTQRSQQLEFKLEERSNFFAIIRKFQLMVQESETLIIPRVETAATEAELKHHHVTLEASQKELQEIDSGISTHLQELTNIYEELNVFERLFLEDQLKNLKIRTNRIQRFIQNTCNEVEHKIKFCRQFHEKTSALQEEADSIQRNELLLNQEVNKGVKEEIYNLKDRLTAIKCCILQVLKLKKVFDYIGLNWDFSQLDQLQTQVFEKEKELEEKIKQLDTFEEEHGKYQALLSKMRAIDLQIKKMTEVVLKAPDSSPESRRLNAQILSQRIEKAKCLCDEIIKKLNENKTFDDSFKEKEILQIKLNAEENDKLYKVLQNMVLELSPKELDEKNCQDKLETSLHVLNQIKSQLQQPLLINLEIKHIQNEKDNCEAFQEQVWAEMCSIKAVTAIEKQREENSSEASDVETKLREFEDLQMQLNTSIDLRTNVLNDAYENLTRYKEAVTRAVESITSLEAIIIPYRVDVGNPEESLEMPLRKQEELESTVAHIQDLTEKLGMISSPEAKLQLQYTLQELVSKNSAMKEAFKAQETEAERYLENYKCYRKMEEDIYTNLSKMETVLGQSMSSLPLSYREALERLEQSKALVSNLISTKEELMKLRQILRLLRLRCTENDGICLLKIVSALWEKWLSLLEAAKEWEMWCEELKQEWKFVSEEIEREAIILDNLQEELPEISKTKEAATTEELSELLDCLCQYGENVEKQQLLLTLLLQRIRSIQNVPESSGAVETVPAFQEITSMKERCNKLLQKVQKNKELVQTEIQERHSFTKEIIALKNFFQQTTTSFQNMAFQDHPEKSEQFEELQSILKKGKLTFENIMEKLRIKYSEMYTIVPAEIESQVEECRKALEDIDEKISNEVLKSSPSYAMRRKIEEINNGLHNVEKMLQQKSKNIEKAQEIQKKMWDELDLWHSKLNELDSEVQDIVEQDPGQAQEWMDNLMIPFQQYQQVSQRAECRTSQLNKATVKMEEYSDLLKSTEAWIENTSHLLANPADYDSLRTLSHHASTVQMALEDSEQKHNLLHSIFMDLEDLSIIFETDELTQSIQELSNQVTALQQKIMESLPQIQRMADDVVAIESEVKSMEKRVSKIKTILLSKEIFDFSPEEHLKHGEVILENIRPMKKTIAEIVSYQVELRLPQTGMKPLPVFQRTNQLLQDIKLLENVTQEQNELLKVVIKQTNEWDEEIENLKQILNNYSAQFSLEHMSPDQADKLPQLQGEIERMEKQILSLNQRKEDLLVDLKATVLNLHQHLKQEQEGVERDRLPAVTSEEGGVAERDASERKLNRRGSMSYLAAVEEEVEESSVKSDNGDEKAEPSPQSWSSLWKHDKDMEEDRASSSSGTIVQEAYGKISTSDNSMAQILTPDSLNTEQGPECSLRPNQTEEGTTPPIEADTLDSSDAQGGLEPRVEKTRPEPTEVLHACKTQVAELELWLQQANVAVEPETLNADMQQVLEQQLVGCQAMLTEIEHKVAFLLETCKDQGLGDNGATQHEAEALSLKLKTVKCNLEKVQMMLQEKHSEDQHPTILKKSSEPEHQEALQPVNLSELESIVTERPQFSRQKDFQQQQVLELKPMEQKDFIKFIEFNAKKMWPQYCQHDNDTTQESSASNQASSPENDVPDSILSPQGQNGDKWQYLHHELSSKIKLPLPQLVEPQVSTNMGILPSVTMYNFRYPTTEELKTYTTQLEDLRQEASNLQTQENMTEEAYINLDKKLFELFLTLSQCLSSVEEMLEMPRLYREDGSGQQVHYETLALELKKLYLALSDKKGDLLKAMTWPGENTNLLLECFDNLQVCLEHTQAAAVCRSKSLKAGLDYNRSYQPDMVVCACNPSYLGG

SEQ ID NO: 2923 - protein, 4605 aa, Artificial Sequence
  Synthetic polypeptide
MASSPELPTEDEQGSWGIDDLHISLQAEQEDTQKKAFTCWINSQLARHTSPSVISDLFTDIKKGHVLLDLLEVLSGQQLPRDKGSNTFQCRINIEHALTFLRNRSIKLINIHVTDIIDGNPSIILGLIWTIILHFHIEKLAQTLSCNYNQPSLDDVSVVDSSPASSPPAKKCSKVQARWQMSARKALLLWAQEQCATYESVNVTDFKSSWRNGMAFLAIIHALRPDLIDMKSVKHRSNKDNLREAFRIAEQELKIPRLLEPEDVDVVDPDEKSIMTYVAQFLQYSKDAPGTGEEAQGKVKDAMGWLTLQKEKLQKLLKDSENDTYFKKYNSLLSFMESFNEEKKSFLDVLSIKRDLDELDKDHLQLREAWDGLDHQINAWKIKLNYALPPPLHQTEAWLQEVEELMDEDLSASQDHSQAVTLIQEKMTLFKSLMDRFEHHSNILLTFENKDENHLPLVPPNKLEEMKRRINNILEKKFILLLEFHYYKCLVLGLVDEVKSKLDIWNIKYGSRESVELLLEDWHKFIEEKEFLARLDTSFQKCGEIYKNLAGECQNINKQYMMVKSDVCMYRKNIYNVKSTLQKVLACWATYVENLRLLRACFEETKKEEIKEVPFETLAQWNLEHATLNEAGNFLVEVSNDVVGSSISKELRRLNKRWRKLVSKTQLEMNLPLMIKKQDQPTFDNSGNILSKEEKATVEFSTDMSVELPENYNQNIKAGEKHEKENEEFTGQLKVAKDVEKLIGQVEIWEAEAKSVLDQDDVDTSMEESLKHLIAKGSMFDELMARSEDMLQMDIQNISSQESFQHVLTTGLQAKIQEAKEKVQINVVKLIAALKNLTDVSPDLDIRLKMEESQKELESYMMRAQQLLGQRESPGELISKHKEALIISNTKSLAKYLKAVEELKNNVTEDIKMSLEEKSRDVCAKWESLHHELSLYVQQLKIDIEKGKLSDNILKLEKQINKEKKLIRRGRTKGLIKEHEACFSEEGCLYQLNHHMEVLRELCEELPSQKSQQEVKRLLKDYEQKIERLLKCASEIHMTLQPTAGGTSKNEGTITTSENRGGDPHSEAPFAKSDNQPSTEKAMEPTMKFSLASVLRPLQEESIMEKDYSASINSLLERYDTYRDILEHHLQNNKFRITSDFSSEEDRSSSCLQAKLTDLQVIKNETDARWKEFEIISLKLENHVNDIKKPFVIKERDTLKERERELQMTLNTRMESLETALRLVLPVEKASLLLCGSDLPLHKMAIQGFHLIDADRIYQHLRNIQDSIAKQIEICNRLEEPGNFVLKELHPFDLHAMQNIILKYKTQFEGMNHRVQRSEDTLKALEDFLASLRTAKLSAEPVTDLSASDTQVAQENTLTVKNKEGEIHLMKDKAKHLDKCLKMLDMSFKDAERGDDTSCENLLDAFSIKLSETHGYGVQEEFTEENKLLEACIFKNNELLKNIQDVQSQISKIGLKDPTVPAVKHRKKSLIRLDKVLDEYEEEKRHLQEMANSLPHFKDGREKTVNQQCQNTVVLWENTKALVTECLEQCGRVLELLKQYQNFKSILTTLIQKEESVISLQASYMGKENLKKRIAEIEIVKEEFNEHLEVVDKINQVCKNLQFYLNKMKTFEEPPFEKEANIIVDRWLDINEKTEDYYENLGRALALWDKLFNLKNVIDEWTEKALQKMELHQLTEEDRERLKEELQVHEQKTSEFSRRVAEIQFLLQSSEIPLELQVMESSILNKMEHVQKCLTGESNCHALSGSTAELREDLDQAKTQIGMTESLLKALSPSDSLEIFTKLEEIQQQILQQKHSMILLENQIGCLTPELSELKKQYESVSDLFNTKKSVLQDHFSKLLNDQCKNFNDWFSNIKVNLKECFESSETKKSVEQKLQKLSDFLTLEGRNSKIKQVDSVLKHVKKHLPKAHVKELISWLVGQEFELEKMESICQARAKELEDSLQQLLRLQDDHRNLRKWLTNQEEKWKGMEEPGEKTELFCQALARKREQFESVAQLNNSLKEYGFTEEEEIIMEATCLMDRYQTLLRQLSEIEEEDKLLPTEDQSFNDLAHDVIHWIKEIKESLMVLNSSEGKMPLEERIQKIKEIILLKPEGDARIETIMKQAESSEAPLVQKTLTDISNQWDNTLHLASTYLSHQEKLLLEGEKYLQSKEDLRLMLIELKKKQEAGFALQHGLQEKKAQLKIYKKFLKKAQDLTSLLKELKSQGNYLLECTKNPSFSEEPWLEIKHLHESLLQQLQDSVQNLDGHVREHDSYQVCVTDLNTTLDNFSKEFVSFSDKPVDQIAVEEKLQKLQELENRLSLQDGTLKKILALAKSVKQNTSSVGQKIIKDDIKSLQCKQKDLENRLASAKQEMECCLNSILKSKRSTEKKGKFTLPGREKQATSDVQESTQESAAVEKLEEDWEINKNFVENVMAVSKNCHHSMYIFESIVKNFISDEMQDSAVEMAMSKQLSLNAQESMKNTEDERKVNELQNQPLELDTMLRNEQLEEIEKLYTQLEAKKAAIKPLEQTECLNKTETGALVLHNIGYSAQHLDNLLQALITLKKNKESQYCVLRDFQEYLAAVESSMKALLTDKESLKVGPLDSVTYLDKIKKFIASIEKEKDSLGNLKIKWENLSNHVTDMDKKLLESQIKQLEHGWEQVEQQIQKKYSQQVVEYDEFTTLMNKVQDTEISLQQQQQHLQLRLKSPEERAGNQSMIALTTDLQATKHGFSVLKGQAELQMKRIWGEKEKKNLEDGINNLKKQWETLEPLHLEAENQIKKCDIRNKMKETILWAKNLLGELNPSIPLLPDDILSQIRKCKVTHDGILARQQSVESLAEEVKDKVPSLTTYEGSDLNNTLEDLRNQYQMLVLKSTQRSQQLEFKLEERSNFFAIIRKFQLMVQESETLIIPRVETAATEAELKHHHVTLEASQKELQEIDSGISTHLQELTNIYEELNVFERLFLEDQLKNLKIRTNRIQRFIQNTCNEVEHKIKFCRQFHEKTSALQEEADSIQRNELLLNQEVNKGVKEEIYNLKDRLTAIKCCILQVLKLKKVFDYIGLNWDFSQLDQLQTQVFEKEKELEEKIKQLDTFEEEHGKYQALLSKMRAIDLQIKKMTEVVLKAPDSSPESRRLNAQILSQRIEKAKCLCDEIIKKLNENKTFDDSFKEKEILQIKLNAEENDKLYKVLQNMVLELSPKELDEKNCQDKLETSLHVLNQIKSQLQQPLLINLEIKHIQNEKDNCEAFQEQVWAEMCSIKAVTAIEKQREENSSEASDVETKLREFEDLQMQLNTSIDLRTNVLNDAYENLTRYKEAVTRAVESITSLEAIIIPYRVDVGNPEESLEMPLRKQEELESTVAHIQDLTEKLGMISSPEAKLQLQYTLQELVSKNSAMKEAFKAQETEAERYLENYKCYRKMEEDIYTNLSKMETVLGQSMSSLPLSYREALERLEQSKALVSNLISTKEELMKLRQILRLLRLRCTENDGICLLKIVSALWEKWLSLLEAAKEWEMWCEELKQEWKFVSEEIEREAIILDNLQEELPEISKTKEAATTEELSELLDCLCQYGENVEKQQLLLTLLLQRIRSIQNVPESSGAVETVPAFQEITSMKERCNKLLQKVQKNKELVQTEIQERHSFTKEIIALKNFFQQTTTSFQNMAFQDHPEKSEQFEELQSILKKGKLTFENIMEKLRIKYSEMYTIVPAEIESQVEECRKALEDIDEKISNEVLKSSPSYAMRRKIEEINNGLHNVEKMLQQKSKNIEKAQEIQKKMWDELDLWHSKLNELDSEVQDIVEQDPGQAQEWMDNLMIPFQQYQQVSQRAECRTSQLNKATVKMEEYSDLLKSTEAWIENTSHLLANPADYDSLRTLSHHASTVQMALEDSEQKHNLLHSIFMDLEDLSIIFETDELTQSIQELSNQVTALQQKIMESLPQIQRMADDVVAIESEVKSMEKRVSKIKTILLSKEIFDFSPEEHLKHGEVILENIRPMKKTIAEIVSYQVELRLPQTGMKPLPVFQRTNQLLQDIKLLENVTQEQNELLKVVIKQTNEWDEEIENLKQILNNYSAQFSLEHMSPDQADKLPQLQGEIERMEKQILSLNQRKEDLLVDLKATVLNLHQHLKQEQEGVERDRLPAVTSEEGGVAERDASERKLNRRGSMSYLAAVEEEVEESSVKSDHDKDMEEDRASSSSGTIVQEAYGKISTSDNSMAQILTPDSLNTEQGPECSLRPNQTEEGTTPPIEADTLDSSDAQGGLEPRVEKTRPEPTEVLHACKTQVAELELWLQQANVAVEPETLNADMQQVLEQQLVGCQAMLTEIEHKVAFLLETCKDQGLGDNGATQHEAEALSLKLKTVKCNLEKVQMMLQEKHSEDQHPTILKKSSEPEHQEALQPVNLSELESIVTERPQFSRQKDFQQQQVLELKPMEQKDFIKFIEFNAKKMWPQYCQHDNDTTQESSARYPTTEELKTYTTQLEDLRQEASNLQTQENMTEEAYINLDKKLFELFLTLSQCLSSVEEMLEMPRLYREDGSGQQVHYETLALELKKLYLALSDKKGDLLKAMTWPGENTNLLLECFDNLQVCLEHTQAAAVCRSKSLKAGLDYNRSYQPDMVVCACNPSYLGG

SEQ ID NO: 2924 - protein, 1288 aa, Artificial Sequence
  Synthetic polypeptide
MEEDIYTNLSKMETVLGQSMSSLPLSYREALERLEQSKALVSNLISTKEELMKLRQILRLLRLRCTENDGICLLKIVSALWEKWLSLLEAAKEWEMWCEELKQEWKFVSEEIEREAIILDNLQEELPEISKTKEAATTEELSELLDCLCQYGENVEKQQLLLTLLLQRIRSIQNVPESSGAVETVPAFQEITSMKERCNKLLQKVQKNKELVQTEIQERHSFTKEIIALKNFFQQTTTSFQNMAFQDHPEKSEQFEELQSILKKGKLTFENIMEKLRIKYSEMYTIVPAEIESQVEECRKALEDIDEKISNEVLKSSPSYAMRRKIEEINNGLHNVEKMLQQKSKNIEKAQEIQKKMWDELDLWHSKLNELDSEVQDIVEQDPGQAQEWMDNLMIPFQQYQQVSQRAECRTSQLNKATVKMEEYSDLLKSTEAWIENTSHLLANPADYDSLRTLSHHASTVQMALEDSEQKHNLLHSIFMDLEDLSIIFETDELTQSIQELSNQVTALQQKIMESLPQIQRMADDVVAIESEVKSMEKRVSKIKTILLSKEIFDFSPEEHLKHGEVILENIRPMKKTIAEIVSYQVELRLPQTGMKPLPVFQRTNQLLQDIKLLENVTQEQNELLKVVIKQTNEWDEEIENLKQILNNYSAQFSLEHMSPDQADKLPQLQGEIERMEKQILSLNQRKEDLLVDLKATVLNLHQHLKQEQEGVERDRLPAVTSEEGGVAERDASERKLNRRGSMSYLAAVEEEVEESSVKSDNGDEKAEPSPQSWSSLWKHDKDMEEDRASSSSGTIVQEAYGKISTSDNSMAQILTPDSLNTEQGPECSLRPNQTEEGTTPPIEADTLDSSDAQGGLEPRVEKTRPEPTEVLHACKTQVAELELWLQQANVAVEPETLNADMQQVLEQQLVGCQAMLTEIEHKVAFLLETCKDQGLGDNGATQHEAEALSLKLKTVKCNLEKVQMMLQEKHSEDQHPTILKKSSEPEHQEALQPVNLSELESIVTERPQFSRQKDFQQQQVLELKPMEQKDFIKFIEFNAKKMWPQYCQHDNDTTQESSASNQASSPENDVPDSILSPQGQNGDKWQYLHHELSSKIKLPLPQLVEPQVSTNMGILPSVTMYNFRYPTTEELKTYTTQLEDLRQEASNLQTQENMTEEAYINLDKKLFELFLTLSQCLSSVEEMLEMPRLYREDGSGQQVHYETLALELKKLYLALSDKKGDLLKAMTWPGENTNLLLECFDNLQVCLEHTQAAAVCRSKSLKAGLDYNRSYQPDMVVCACNPSYLGG

SEQ ID NO: 2925 - protein, 801 aa, Artificial Sequence
  Synthetic polypeptide
MRHRVCRGRSGQGRRRSSVIPWPVPKHVGWVVLLGCGGSGTSILVVSIVGSGLIKAMAPAEILNGKEISAQIRARLKNQVTQLKEQVPGFTPRLAILQVGNRDDSNLYINVKLKAAEEIGIKATHIKLPRTTTESEVMKYITSLNEDSTVHGFLVQLPLDSENSINTEEVINAIAPEKDVDGLTSINAGKLARGDLNDCFIPCTPKGCLELIKETGVPIAGRHAVVVGRSKIVGAPMHDLLLWNNATVTTCHSKTAHLDEEVNKGDILVVATGQPEMVKGEWIKPGAIVIDCGINYVPDDKKPNGRKVVGDVAYDEAKERASFITPVPGGVGPMTVAMLMQSTVESAKRFLEKFKPGKWMIQYNNLNLKTPVPSDIDISRSCKPKPIGKLAREIGLLSEEVELYGETKAKVLLSALERLKHRPDGKYVVVTGITPTPLGEGKSTTTIGLVQALGAHLYQNVFACVRQPSQGPTFGIKGGAAGGGYSQVIPMEEFNLHLTGDIHAITAANNLVAAAIDARIFHELTQTDKALFNRLVPSVNGVRRFSDIQIRRLKRLGIEKTDPTTLTDEEINRFARLDIDPETITWQRVLDTNDRFLRKITIGQAPTEKGHTRTAQFDISVASEIMAVLALTTSLEDMRERLGKMVVASSKKGEPVSAEDLGVSGALTVLMKDAIKPNLMQTLEGTPVFVHAGPFANIAHGNSSIIADRIALKLVGPEGFVVTEAGFGADIGMEKFFNIKCRYSGLCPHVVVLVATVRALKMHGGGPTVTAGLPLPKAYIQEDSPYNIIQLKCRSVRLRNP

SEQ ID NO: 2926 - protein, 745 aa, Artificial Sequence
  Synthetic polypeptide
MAPAEILNGKEISAQIRARLKNQVTQLKEQVPGFTPRLAILQVGNRDDSNLYINVKLKAAEEIGIKATHIKLPRTTTESEVMKYITSLNEDSTVHGFLVQLPLDSENSINTEEVINAIAPEKDVDGLTSINAGKLARGDLNDCFIPCTPKGCLELIKETGVPIAGRHAVVVGRSKIVGAPMHDLLLWNNATVTTCHSKTAHLDEEVNKGDILVVATGQPEMVKGEWIKPGAIVIDCGINYVPDDKKPNGRKVVGDVAYDEAKERASFITPVPGGVGPMTVAMLMQSTVESAKRFLEKFKPGKWMIQYNNLNLKTPVPSDIDISRSCKPKPIGKLAREIGLLSEEVELYGETKAKVLLSALERLKHRPDGKYVVVTGITPTPLGEGKSTTTIGLVQALGAHLYQNVFACVRQPSQGPTFGIKGGAAGGGYSQVIPMEEFNLHLTGDIHAITAANNLVAAAIDARIFHELTQTDKALFNRLVPSVNGVRRFSDIQIRRLKRLGIEKTDPTTLTDEEINRFARLDIDPETITWQRVLDTNDRFLRKITIGQAPTEKGHTRTAQFDISVASEIMAVLALTTSLEDMRERLGKMVVASSKKGEPVSAEDLGVSGALTVLMKDAIKPNLMQTLEGTPVFVHAGPFANIAHGNSSIIADRIALKLVGPEGFVVTEAGFGADIGMEKFFNIKCRYSGLCPHVVVLVATVRALKMHGGGPTVTAGLPLPKAYIQEDSPYNIIQLKCRSVRLRNP

SEQ ID NO: 2927 - protein, 109 aa, Artificial Sequence [sequence omitted]

SEQ ID NO: 2928 - protein, 63 aa, Artificial Sequence
  Synthetic polypeptide
MKTIEVDGIKVRIQIWDTAGQERYQTITKQYYRRAQGIFLVYDISSERSYQHIMKWVSDVDEL

SEQ ID NO: 2929 - protein, 34 aa, Artificial Sequence
  Synthetic polypeptide
APVPSWGGIASPSGWRRWRRRPESGINLGVLTLR

SEQ ID NO: 2930 - protein, 239 aa, Artificial Sequence
  Synthetic polypeptide
MRPWTGSWRWIMLILFAWGTLLFYIGGHLVRDNDHPDHSSRELSKILAKLERLKQQNEDLRRMAESLRIPEGPIDQGPAIGRVRVLEEQLVKAKEQIENYKKQTRNGLGKDHEILRRRIENGAKELWFFLQSELKKLKNLEGNELQRHADEFLLDLGHHERSIMTDLYYLSQTDGAGDWREKEAKDLTELVQRRITYLQPAECLRLQARAATPDWFSYFFGGDGVSLCWPGWSPAPNRE

SEQ ID NO: 2931 - protein, 76 aa, Artificial Sequence
  Synthetic polypeptide
MTDLYYLSQTDGAGDWREKEAKDLTELVQRRITYLQPAECLRLQARAATPDWFSYFFGGDGVSLCWPGWSPAPNRE

SEQ ID NO: 2932 - protein, 110 aa, Artificial Sequence
  Synthetic polypeptide
MAITVSLVNNKRKIVVLAQPTTVKRKRITPYKSIMTDLYYLSQTDGAGDWREKEAKDLTELVQRRITYLQPAECLRLQARAATPDWFSYFFGGDGVSLCWPGWSPAPNRE

SEQ ID NO: 2933 - protein, 234 aa, Artificial Sequence
  Synthetic polypeptide
MRPWTGSWRWIMLILFAWGTLLFYIGGHLVRDNDHPDHSSRELSKILAKLERLKQQNEDLRRMAESLRIPEGPIDQGPAIGRVRVLEEQLVKAKEQIENYKKQTRNGLGKDHEILRRRIENGAKELWFFLQSELKKLKNLEGNELQRHADEFLLDLGHHERSIMTDLYYLSQTDGAGDWREKEAKDLTELVQRRITYLQPPALASQSAEIAASAWPPPRLGCEEPLCLAAQSGK

SEQ ID NO: 2934 - protein, 71 aa, Artificial Sequence
  Synthetic polypeptide
MTDLYYLSQTDGAGDWREKEAKDLTELVQRRITYLQPPALASQSAEIAASAWPPPRLGCEEPLCLAAQSGK

SEQ ID NO: 2935 - protein, 105 aa, Artificial Sequence
  Synthetic polypeptide
MAITVSLVNNKRKIVVLAQPTTVKRKRITPYKSIMTDLYYLSQTDGAGDWREKEAKDLTELVQRRITYLQPPALASQSAEIAASAWPPPRLGCEEPLCLAAQSGK

SEQ ID NO: 2936 - protein, 280 aa, Artificial Sequence
  Synthetic polypeptide
MRPWTGSWRWIMLILFAWGTLLFYIGGHLVRDNDHPDHSSRELSKILAKLERLKQQNEDLRRMAESLRIPEGPIDQGPAIGRVRVLEEQLVKAKEQIENYKKQTRNGLGKDHEILRRRIENGAKELWFFLQSELKKLKNLEGNELQRHADEFLLDLGHHERSIMTDLYYLSQTDGAGDWREKEAKDLTELVQRRITYLQNPKDCSKAKKLVCNINKGCGYGCQLHHVVYCFMIAYGTQRTLILESQNWRYATGGWETVFRPVSETCTDRSGISTGHWSGL

SEQ ID NO: 2937 - protein, 117 aa, Artificial Sequence
  Synthetic polypeptide
MTDLYYLSQTDGAGDWREKEAKDLTELVQRRITYLQNPKDCSKAKKLVCNINKGCGYGCQLHHVVYCFMIAYGTQRTLILESQNWRYATGGWETVFRPVSETCTDRSGISTGHWSGL

SEQ ID NO: 2938 - protein, 151 aa, Artificial Sequence
  Synthetic polypeptide
MAITVSLVNNKRKIVVLAQPTTVKRKRITPYKSIMTDLYYLSQTDGAGDWREKEAKDLTELVQRRITYLQNPKDCSKAKKLVCNINKGCGYGCQLHHVVYCFMIAYGTQRTLILESQNWRYATGGWETVFRPVSETCTDRSGISTGHWSGL

SEQ ID NO: 2939 - protein, 25 aa, Artificial Sequence
  Synthetic polypeptide
MHRQIWHLHWTLVRIIGFLTPPQPC

SEQ ID NO: 2940 - protein, 54 aa, Artificial Sequence
  Synthetic polypeptide
MATEGMILTNHDHQIRVGVLTVSDSCFRNLAEDRSGINLKDLVQDPSLHSFSRL

SEQ ID NO: 2941 - protein, 63 aa, Artificial Sequence
  Synthetic polypeptide
MATEGMILTNHDHQIRVGVLTVSDSCFRNLAEDRSGINLKDLVQDPSLSFPAQALSWPAPIHI

SEQ ID NO: 2942 - protein, 69 aa, Artificial Sequence
  Synthetic polypeptide
MATEGMILTNHDHQIRVGVLTVSDSCFRNLAEDRSGINLKDLVQDPSLLSLGLLPSTYKTWLAPPCLPP

SEQ ID NO: 2943 - protein, 78 aa, Artificial Sequence
  Synthetic polypeptide
MATEGMILTNHDHQIRVGVLTVSDSCFRNLAEDRSGINLKDLVQDPSLLGGTISAYKIVPDEIEEIKGKHKEDGWKQS

SEQ ID NO: 2944 - protein, 1 aa, Artificial Sequence
  Synthetic polypeptide
A

SEQ ID NO: 2945 - protein, 169 aa, Artificial Sequence
  Synthetic polypeptide
MPGLSCRFYQHKFPEVEDVVMVNVRSIAEMGAYVSLLEYNNIEGMILLSELSRRRIRSINKLIRIGRNECVVVIRVDKEKGYIDLSKRRVSPEEAIKCEDKFTKSKTVYSILRHVAEVLEYTKDEQLESLFQRTAWVFDDKYKRPGYGAYDAFKHAVSLGSMFLPSLYL

SEQ ID NO: 2946 - protein, 87 aa, Artificial Sequence
  Synthetic polypeptide
MEDGVLKEGFLVKRGHIVHNWKARWFILRQNTLVYYKLEGGRRVTPPKGRILLDGCTITCPCLEYENRPPGRQSKTPSQEKNKKQNK

SEQ ID NO: 2947 - protein, 71 aa, Artificial Sequence
  Synthetic polypeptide
IVHNWKARWFILRQNTLVYYKLEGGRRVTPPKGRILLDGCTITCPCLEYENRPPGRQSKTPSQEKNKKQNK

SEQ ID NO: 2948 - protein, 21 aa, Artificial Sequence
  Synthetic polypeptide
NRPPGRQSKTPSQEKNKKQNK

SEQ ID NO: 2949 - protein, 124 aa, Artificial Sequence
  Synthetic polypeptide
MGSKKLKRVGLSQELCDRLSRHQILTCQDFLCLSPLELMKVTGLSYRGVHELLCMVSRACAPKMQTAYGIKAQRSADFSPAFLSTTLSALDEALHGGVACGSLTEIKHQATNQSMQHCYFISSR

SEQ ID NO: 2950 - protein, 286 aa, Artificial Sequence
  Synthetic polypeptide
MGSKKLKRVGLSQELCDRLSRHQILTCQDFLCLSPLELMKVTGLSYRGVHELLCMVSRACAPKMQTAYGIKAQRSADFSPAFLSTTLSALDEALHGGVACGSLTEITGPPGCGKTQFCIMMSILATLPTNMGGLEGAVVYIDTESAFSAERLVEIAESRFPRYFNTEEKLLLTSSKVHLYRELTCDEVLQRIESLEEEIISKGIKLVILDSVASVVRKEFDAQLQGNLKERNKFLAREASSLKYLAEEFSIPVILTNQITTHLSGALASQADLVSPADDLSLSEGS

SEQ ID NO: 2951 - protein, 29 aa, Artificial Sequence
  Synthetic polypeptide
MARWLTPVIPALWEAEAGRSPEVGSSRPV

SEQ ID NO: 2952 - protein, 107 aa, Artificial Sequence [sequence omitted]

SEQ ID NO: 2953 - protein, 232 aa, Artificial Sequence
  Synthetic polypeptide
MDDFISISLLSLAMLVGCYVAGIIPLAVNFSEERLKLVTVLGAGLLCGTALAVIVPEGVHALYEDILEGKHHQASETHNVIASDKAAEKSVVHEHEHSHDHTQLHAYIGVSLVLGFVFMLLVDQIGNSHVHSTDDPEAARSSNSKITTTLGLVVHAAADGVALGAAASTSQTSVQLIVFVAIMLHKAPAAFGLVSFLMHAGLERNRIRKHLLVFALAAPVMSMVTYLGLSKV

SEQ ID NO: 2954 - protein, 166 aa, Artificial Sequence
  Synthetic polypeptide
MDDFISISLLSLAMLVGCYVAGIIPLAVNFSEERLKLVTVLGAGLLCGTALAVIVPEGVHALYEDILEDPEAARSSNSKITTTLGLVVHAAADGVALGAAASTSQTSVQLIVFVAIMLHKAPAAFGLVSFLMHAGLERNRIRKHLLVFALAAPVMSMVTYLGLSKV

SEQ ID NO: 2955 - protein, 209 aa, Artificial Sequence
  Synthetic polypeptide
MDDFISISLLSLAMLVGCYVAGIIPLAVNFSEERLKLVTVLGAGLLCGTALAVIVPEGVHALYEDILEGKHHQASETHNVIASDKAAEKSVVHEHEHSHDHTQLHAYIGVSLVLGFVFMLLVDQIGNSHVHSTDADGVALGAAASTSQTSVQLIVFVAIMLHKAPAAFGLVSFLMHAGLERNRIRKHLLVFALAAPVMSMVTYLGLSKV

SEQ ID NO: 2956 - protein, 193 aa, Artificial Sequence
  Synthetic polypeptide
MFTSKSNSVSPSPSLEQADSDALDISTKVQLYGVLWKRPFGRPSAKWSRRFFIIKESFLLYYSESEKKSFETNKYFNIHPKGVIPLGGCLVEPKEEPSMPYAMKISHQDFHGNILLAAESEFEQTQWLEMLQESGKVTWKNAQLGEAMIKSLEAQGLQLAKEKQEYLDKLMEETEELCLQREQREAGRGGSRL

SEQ ID NO: 2957 - protein, 56 aa, Artificial Sequence
  Synthetic polypeptide
MGSQTLQILRQGVWAALSGGWYYDPHQATFVNALHLYLWLFLLGLPFTLYMAYRWK

SEQ ID NO: 2958 - protein, 1809 aa, Artificial Sequence
  Synthetic polypeptide
MGSQTLQILRQGVWAALSGGWYYDPHQATFVNALHLYLWLFLLGLPFTLYMALPSTMIIVAVYCPVIAAVFIVLKMVNYRLHRALDAGEVVDRTANEFTDQRTKAEQGNCSTRRKDSNGPSDPGGGIEMSEFIREATPPVGCSSRNSYAGLDPSNQIGSGSSRLGTAATIKGDTDTAKTSDDISLSLGQSSSLCKEGSEEQDLAADRKLFRLVSNDSFISIQPSLSSCGQDLPRDFSDKVNLPSHNHHHHVDQSLSSACDTEVASLVPLHSHSYRKDHRPRGVPRTSSSAVAFPDTSLNDFPLYQQRRGLDPVSELESSKPLSGSKESLVENSGLSGEFQLAGDLKINTSQPPTKSGKSKPLKAEKSMDSLRSLSTRSSGSTESYCSGTDRDTNSTVSSYKSEQTSSTHIESILSEHEESPKAGTKSGRKKECCAGPEEKNSCASDKRTSSEKIAMEASTNSGVHEAKDPTPSDEMHNQRGLSTSASEEANKNPHANEFTSQGDRPPGNTAENKEEKSDKSAVSVDSKVRKDVGGKQKEGDVRPKSSSVIHRTASAHKSGRRRTGKKRASSFDSSRHRDYVCFRGVSGTKPHSAIFCHDEDSSDQSDLSRASSVQSAHQFSSDSSSSTTSHSCQSPEGRYSALKTKHTHKERGTDSEHTHKAHLVPEGTSKKRATRRTSSTNSAKTRARVLSLDSGTVACLNDSNRLMAPESIKPLTTSKSDLEAKEGEVLDELSLLGRASQLETVTRSRNSLPNQVAFPEGEEQDAVSGAAQASEEAVSFRRERSTFRRQAVRRRHNAGSNPTPPTLLIGSPLSLQDGQQGQQSTAQVKVQSRPPSQAAVLSASASLLVRNGSVHLEASHDNASAVGGSSLHDELGKFSSTLYETGGCDMSLVNFEPAARRASNICDTDSHVSSSTSVRFYPHDVLSLPQIRLNRLLTIDTDLLEQQDIDLSPDLAATYGPTEEAAQKVKHYYRFWILPQLWIGINFDRLTLLALFDRNREILENVLAVILAILVAFLGSILLIQGFFRDIWVFQFCLVIASCQYSLLKSVQPDSSSPRHGHNRIIAYSRPVYFCICCGLIWLLDYGSRNLTATKFKLYGITFTNPLVFISARDLVIVFTLCFPIVFFIGLLPQVNTFVMYLCEQLDIHIFGGNATTSLLAALYSFICSIVAVALLYGLCYGALKDSWDGQHIPVLFSIFCGLLVAVSYHLSRQSSDPSVLFSLVQSKIFPKTEEKNPEDPLSEVKDPLPEKLRNSVSERLQSDLVVCIVIGVLYFAIHVSTVFTVLQPALKYVLYTLVGFVGFVTHYVLPQVRKQLPWHCFSHPLLKTLEYNQYEVRNAATMMWFEKLHVWLLFVEKNIIYPLIVLNELSSSAETIASPKKLNTELGALMITVAGLKLLRSSFSSPTYQYVTVIFTVLFFKFDYEAFSETMLLDLFFMSILFNKLWELLYKLQFVYTYIAPWQITWGSAFHAFAQPFAVPHSAMLFIQAAVSAFFSTPLNPFLGSAIFITSYVRPVKFWERDYNTKRVDHSNTRLASQLDRNPGTYCQQREVEAITEGVEEDEGFCCCEPGHIPHMLSFNAAFSQRWLAWEVIVTKYILEGYSITDNSAASMLQVFDLRKVLTTYYVKGIIYYVTTSSKLEEWLANETMQEGLRLCADRNYVDVDPTFNPNIDEDYDHRLAGISRESFCVIYLNWIEYCSSRRAKPVDVDKDSSLVTLCYGLCVLGRRALGTASHHMSSNLESFLYGLHALFKGDFRISSIRDEWIFADMELLRKVVVPGIRMSIKLHQTARPTPPLPPSQPVPNVR

SEQ ID NO: 2959 - protein, 1881 aa, Artificial Sequence
  Synthetic polypeptide
MGSQTLQILRQGVWAALSGGWYYDPHQATFVNALHLYLWLFLLGLPFTLYMALPSTMIIVAVYCPVIAAVFIVLKMVNYRLHRALDAGEVVDRTANEFTDQRTKAEQGNCSTRRKDSNGPSDPGGGIEMSEFIREATPPVGCSSRNSYAGLDPSNQIGSGSSRLGTAATIKGDTDTAKTSDDISLSLGQSSSLCKEGSEEQDLAADRKLFRLVSNDSFISIQPSLSSCGQDLPRDFSDKVNLPSHNHHHHVDQSLSSACDTEVASLVPLHSHSYRKDHRPRGVPRTSSSAVAFPDTSLNDFPLYQQRRGLDPVSELESSKPLSGSKESLVENSGLSGEFQLAGDLKINTSQPPTKSGKSKPLKAEKSMDSLRSLSTRSSGSTESYCSGTDRDTNSTVSSYKSEQTSSTHIESILSEHEESPKAGTKSGRKKECCAGPEEKNSCASDKRTSSEKIAMEASTNSGVHEAKDPTPSDEMHNQRGLSTSASEEANKNPHANEFTSQGDRPPGNTAENKEEKSDKSAVSVDSKVRKDVGGKQKEGDVRPKSSSVIHRTASAHKSGRRRTGKKRASSFDSSRHRDYVCFRGVSGTKPHSAIFCHDEDSSDQSDLSRASSVQSAHQFSSDSSSSTTSHSCQSPEGRYSALKTKHTHKERGTDSEHTHKAHLVPEGTSKKRATRRTSSTNSAKTRARVLSLDSGTVACLNDSNRLMAPESIKPLTTSKSDLEAKEGEVLDELSLLGRASQLETVTRSRNSLPNQVAFPEGEEQDAVSGAAQASEEAVSFRRERSTFRRQAVRRRHNAGSNPTPPTLLIGSPLSLQDGQQGQQSTAQVKVQSRPPSQAAVLSASASLLVRNGSVHLEASHDNASAVGGSSLHDELGKFSSTLYETGGCDMSLVNFEPAARRASNICDTDSHVSSSTSVRFYPHDVLSLPQIRLNRLLTIDTDLLEQQDIDLSPDLAATYGPTEEAAQKVKHYYRFWILPQLWIGINFDRLTLLALFDRNREILENVLAVILAILVAFLGSILLIQGFFRDIWVFQFCLVIASCQYSLLKSVQPDSSSPRHGHNRIIAYSRPVYFCICCGLIWLLDYGSRNLTATKFKLYGITFTNPLVFISARDLVIVFTLCFPIVFFIGLLPQVNTFVMYLCEQLDIHIFGGNATTSLLAALYSFICSIVAVALLYGLCYGALKDSWDGQHIPVLFSIFCGLLVAVSYHLSRQSSDPSVLFSLVQSKIFPKTEEKNPEDPLSEVKDPLPEKLRNSVSERLQSDLVVCIVIGVLYFAIHVSTVFTVLQPALKYVLYTLVGFVGFVTHYVLPQVRKQLPWHCFSHPLLKTLEYNQYEVRNAATMMWFEKLHVWLLFVEKNIIYPLIVLNELSSSAETIASPKKLNTELGALMITVAGLKLLRSSFSSPTYQYVTVIFTVLFFKFDYEAFSETMLLDLFFMSILFNKLWELLYKLQFVYTYIAPWQITWGSAFHAFAQPFAVPHSAMLFIQAAVSAFFSTPLNPFLGSAIFITSYVRPVKFWERDYNTKRVDHSNTRLASQLDRNPGSDDNNLNSIFYEHLTRSLQHSLCGDLLLGRWGNYSTGDCFILASDYLNALVHLIEIGNGLVTFQLRGLEFRGTYCQQREVEAITEGVEEDEGFCCCEPGHIPHMLSFNAAFSQRWLAWEVIVTKYILEGYSITDNSAASMLQVFDLRKVLTTYYVKGIIYYVTTSSKLEEWLANETMQEGLRLCADRNYVDVDPTFNPNIDEDYDHRLAGISRESFCVIYLNWIEYCSSRRAKPVDVDKDSSLVTLCYGLCVLGRRALGTASHHMSSNLESFLYGLHALFKGDFRISSIRDEWIFADMELLRKVVVPGIRMSIKLHQTARPTPPLPPSQPVPNVR

SEQ ID NO: 2960 - protein, 1770 aa, Artificial Sequence
  Synthetic polypeptide
MGSQTLQILRQGVWAALSGGWYYDPHQATFVNALHLYLWLFLLGLPFTLYMALPSTMIIVAVYCPVIAAVFIVLKMVNYRLHRALDAGEVVDRTANEFTDQRTKAEQGNCSTRRKDSNGPSDPGGGIEMSEFIREATPPVGCSSRNSYAGLDPSNQIGSGSSRLGTAATIKGDTDTAKTSDDISLSLGQSSSLCKEGSEEQDLAADRKLFRLVSNDSFISIQPSLSSCGQDLPRDFSDKVNLPSHNHHHHVDQSLSSACDTEVASLVPLHSHSYRKDHRPRGVPRTSSSAVAFPDTSLNDFPLYQQRRGLDPVSELESSKPLSGSKESLVENSGLSGEFQLAGDLKINTSQPPTKSGKSKPLKAEKSMDSLRSLSTRSSGSTESYCSGTDRDTNSTVSSYKSEQTSSTHIESILSEHEESPKAGTKSGRKKECCAGPEEKNSCASDKRTSSEKIAMEASTNSGVHEAKDPTPSDEMHNQRGLSTSASEEANKNPHANEFTSQGDRPPGNTAENKEEKSDKSAVSVDSKVRKDVGGKQKEGDVRPKSSSVIHRTASAHKSGRRRTGKKRASSFDSSRHRDYVCFRGVSGTKPHSAIFCHDEDSSDQSDLSRASSVQSAHQFSSDSSSSTTSHSCQSPEGRYSALKTKHTHKERGTDSEHTHKAHLVPEGTSKKRATRRTSSTNSAKTRARVLSLDSGTVACLNDSNRLMAPESIKPLTTSKSDLEAKEGEVLDELSLLGRASQLETVTRSRNSLPNQVAFPEGEEQDAVSGGKFSSTLYETGGCDMSLVNFEPAARRASNICDTDSHVSSSTSVRFYPHDVIRLNRLLTIDTDLLEQQDIDLSPDLAATYGPTEEAAQKVKHYYRFWILPQLWIGINFDRLTLLALFDRNREILENVLAVILAILVAFLGSILLIQGFFRDIWVFQFCLVIASCQYSLLKSVQPDSSSPRHGHNRIIAYSRPVYFCICCGLIWLLDYGSRNLTATKFKLYGITFTNPLVFISARDLVIVFTLCFPIVFFIGLLPQVNTFVMYLCEQLDIHIFGGNATTSLLAALYSFICSIVAVALLYGLCYGALKDSWDGQHIPVLFSIFCGLLVAVSYHLSRQSSDPSVLFSLVQSKIFPKTEEKNPEDPLSEVKDPLPEKLRNSVSERLQSDLVVCIVIGVLYFAIHVSTVFTVLQPALKYVLYTLVGFVGFVTHYVLPQVRKQLPWHCFSHPLLKTLEYNQYEVRNAATMMWFEKLHVWLLFVEKNIIYPLIVLNELSSSAETIASPKKLNTELGALMITVAGLKLLRSSFSSPTYQYVTVIFTVLFFKFDYEAFSETMLLDLFFMSILFNKLWELLYKLQFVYTYIAPWQITWGSAFHAFAQPFAVPHSAMLFIQAAVSAFFSTPLNPFLGSAIFITSYVRPVKFWERDYNTKRVDHSNTRLASQLDRNPGSDDNNLNSIFYEHLTRSLQHSLCGDLLLGRWGNYSTGDCFILASDYLNALVHLIEIGNGLVTFQLRGLEFRGTYCQQREVEAITEGVEEDEGFCCCEPGHIPHMLSFNAAFSQRWLAWEVIVTKYILEGYSITDNSAASMLQVFDLRKVLTTYYVKGIIYYVTTSSKLEEWLANETMQEGLRLCADRNYVDVDPTFNPNIDEDYDHRLAGISRESFCVIYLNWIEYCSSRRAKPVDVDKDSSLVTLCYGLCVLGRRALGTASHHMSSNLESFLYGLHALFKGDFRISSIRDEWIFADMELLRKVVVPGIRMSIKLHQTARPTPPLPPSQPVPNVR

SEQ ID NO: 2961 - protein, 10 aa, Artificial Sequence
  Synthetic polypeptide
QICWSNRTLI

SEQ ID NO: 2962 - protein, 1797 aa, Artificial Sequence
  Synthetic polypeptide
MGSQTLQILRQGVWAALSGGWYYDPHQATFVNALHLYLWLFLLGLPFTLYMALPSTMIIVAVYCPVIAAVFIVLKMVNYRLHRALDAGEVVDRTANEFTDQRTKAEQGNCSTRRKDSNGPSDPGGGIEMSEFIREATPPVGCSSRNSYAGLDPSNQIGSGSSRLGTAATIKGDTDTAKTSDDISLSLGQSSSLCKEGSEEQDLAADRKLFRLVSNDSFISIQPSLSSCGQDLPRDFSDKVNLPSHNHHHHVDQSLSSACDTEVASLVPLHSHSYRKDHRPRGVPRTSSSAVAFPDTSLNDFPLYQQRRGLDPVSELESSKPLSGSKESLVENSGLSGEFQLAGDLKINTSQPPTKSGKSKPLKAEKSMDSLRSLSTRSSGSTESYCSGTDRDTNSTVSSYKSEQTSSTHIESILSEHEESPKAGTKSGRKKECCAGPEEKNSCASDKRTSSEKIAMEASTNSGVHEAKDPTPSDEMHNQRGLSTSASEEANKNPHANEFTSQGDRPPGNTAENKEEKSDKSAVSVDSKVRKDVGGKQKEGDVRPKSSSVIHRTASAHKSGRRRTGKKRASSFDSSRHRDYVCFRGVSGTKPHSAIFCHDEDSSDQSDLSRASSVQSAHQFSSDSSSSTTSHSCQSPEGRYSALKTKHTHKERGTDSEHTHKAHLVPEGTSKKRATRRTSSTNSAKTRARVLSLDSGTVACLNDSNRLMAPESIKPLTTSKSDLEAKEGEVLDELSLLGRASQLETVTRSRNSLPNQVAFPEGEEQDAVSGAAQASEEAVSFRRERSTFRRQAVRRRHNAGSNPTPPTLLIGSPLSLQDGQQGQQSTAQVKVQSRPPSQAAVLSASASLLVRNGSVHLEASHDNASAVGGSSLHDELGKFSSTLYETGGCDMSLVNFEPAARRASNICDTDSHVSSSTSVRFYPHDVLSLPQIRLNRLLTIDTDLLEQQDIDLSPDLAATYGPTEEAAQKVKHYYRFWILPQLWIGINFDRLTLLALFDRNREILENVLAVILAILVAFLGSILLIQGFFRDIWVFQFCLVIASCQYSLLKSVQPDSSSPRHGHNRIIAYSRPVYFCICCGLIWLLDYGSRNLTATKFKLYGITFTNPLVFISARDLVIVFTLCFPIVFFIGLLPQVNTFVMYLCEQLDIHIFGGNATTSLLAALYSFICSIVAVALLYGLCYGALKDSWDGQHIPVLFSIFCGLLVAVSYHLSRQSSDPSVLFSLVQSKIFPKTEEKNPEDPLSEVKDPLPEKLRNSVSERLQSDLVVCIVIGVLYFAIHVSTVFTVLQPALKYVLYTLVGFVGFVTHYVLPQVRKQLPWHCFSHPLLKTLEYNQYEVRNAATMMWFEKLHVWLLFVEKNIIYPLIVLNELSSSAETIASPKKLNTELGALMITVAGLKLLRSSFSSPTYQYVTVIFTVLFFKFDYEAFSETMLLDLFFMSILFNKLWELLYKLQFVYTYIAPWQITWGSAFHAFAQPFAVPHSAMLFIQAAVSAFFSTPLNPFLGSAIFITSYVRPVKFWERDYNTKRVDHSNTRLASQLDRNPGTYCQQREVEAITEGVEEDEGFCCCEPGHIPHMLSFNAAFSQRWLAWEVIVTKYILEGYSITDNSAASMLQVFDLRKVLTTYYVKGIIYYVTTSSKLEEWLANETMQEGLRLCADRNYVDVDPTFNPNIDEDYDHRLAGISRESFCVIYLNWIEYCSSRRAKPVDVDKDSSLVTLCYGLCVLGRRALGTASHHMSSNLESFLYGLHALFKGDFRISSIRDEWIFADMELLRKVVVPGIRMSIKLHQPVPNVR

SEQ ID NO: 2963 - protein, 1869 aa, Artificial Sequence
  Synthetic polypeptide
MGSQTLQILRQGVWAALSGGWYYDPHQATFVNALHLYLWLFLLGLPFTLYMALPSTMIIVAVYCPVIAAVFIVLKMVNYRLHRALDAGEVVDRTANEFTDQRTKAEQGNCSTRRKDSNGPSDPGGGIEMSEFIREATPPVGCSSRNSYAGLDPSNQIGSGSSRLGTAATIKGDTDTAKTSDDISLSLGQSSSLCKEGSEEQDLAADRKLFRLVSNDSFISIQPSLSSCGQDLPRDFSDKVNLPSHNHHHHVDQSLSSACDTEVASLVPLHSHSYRKDHRPRGVPRTSSSAVAFPDTSLNDFPLYQQRRGLDPVSELESSKPLSGSKESLVENSGLSGEFQLAGDLKINTSQPPTKSGKSKPLKAEKSMDSLRSLSTRSSGSTESYCSGTDRDTNSTVSSYKSEQTSSTHIESILSEHEESPKAGTKSGRKKECCAGPEEKNSCASDKRTSSEKIAMEASTNSGVHEAKDPTPSDEMHNQRGLSTSASEEANKNPHANEFTSQGDRPPGNTAENKEEKSDKSAVSVDSKVRKDVGGKQKEGDVRPKSSSVIHRTASAHKSGRRRTGKKRASSFDSSRHRDYVCFRGVSGTKPHSAIFCHDEDSSDQSDLSRASSVQSAHQFSSDSSSSTTSHSCQSPEGRYSALKTKHTHKERGTDSEHTHKAHLVPEGTSKKRATRRTSSTNSAKTRARVLSLDSGTVACLNDSNRLMAPESIKPLTTSKSDLEAKEGEVLDELSLLGRASQLETVTRSRNSLPNQVAFPEGEEQDAVSGAAQASEEAVSFRRERSTFRRQAVRRRHNAGSNPTPPTLLIGSPLSLQDGQQGQQSTAQVKVQSRPPSQAAVLSASASLLVRNGSVHLEASHDNASAVGGSSLHDELGKFSSTLYETGGCDMSLVNFEPAARRASNICDTDSHVSSSTSVRFYPHDVLSLPQIRLNRLLTIDTDLLEQQDIDLSPDLAATYGPTEEAAQKVKHYYRFWILPQLWIGINFDRLTLLALFDRNREILENVLAVILAILVAFLGSILLIQGFFRDIWVFQFCLVIASCQYSLLKSVQPDSSSPRHGHNRIIAYSRPVYFCICCGLIWLLDYGSRNLTATKFKLYGITFTNPLVFISARDLVIVFTLCFPIVFFIGLLPQVNTFVMYLCEQLDIHIFGGNATTSLLAALYSFICSIVAVALLYGLCYGALKDSWDGQHIPVLFSIFCGLLVAVSYHLSRQSSDPSVLFSLVQSKIFPKTEEKNPEDPLSEVKDPLPEKLRNSVSERLQSDLVVCIVIGVLYFAIHVSTVFTVLQPALKYVLYTLVGFVGFVTHYVLPQVRKQLPWHCFSHPLLKTLEYNQYEVRNAATMMWFEKLHVWLLFVEKNIIYPLIVLNELSSSAETIASPKKLNTELGALMITVAGLKLLRSSFSSPTYQYVTVIFTVLFFKFDYEAFSETMLLDLFFMSILFNKLWELLYKLQFVYTYIAPWQITWGSAFHAFAQPFAVPHSAMLFIQAAVSAFFSTPLNPFLGSAIFITSYVRPVKFWERDYNTKRVDHSNTRLASQLDRNPGSDDNNLNSIFYEHLTRSLQHSLCGDLLLGRWGNYSTGDCFILASDYLNALVHLIEIGNGLVTFQLRGLEFRGTYCQQREVEAITEGVEEDEGFCCCEPGHIPHMLSFNAAFSQRWLAWEVIVTKYILEGYSITDNSAASMLQVFDLRKVLTTYYVKGIIYYVTTSSKLEEWLANETMQEGLRLCADRNYVDVDPTFNPNIDEDYDHRLAGISRESFCVIYLNWIEYCSSRRAKPVDVDKDSSLVTLCYGLCVLGRRALGTASHHMSSNLESFLYGLHALFKGDFRISSIRDEWIFADMELLRKVVVPGIRMSIKLHQPVPNVR

SEQ ID NO: 2964 - protein, 1758 aa, Artificial Sequence
  Synthetic polypeptide
MGSQTLQILRQGVWAALSGGWYYDPHQATFVNALHLYLWLFLLGLPFTLYMALPSTMIIVAVYCPVIAAVFIVLKMVNYRLHRALDAGEVVDRTANEFTDQRTKAEQGNCSTRRKDSNGPSDPGGGIEMSEFIREATPPVGCSSRNSYAGLDPSNQIGSGSSRLGTAATIKGDTDTAKTSDDISLSLGQSSSLCKEGSEEQDLAADRKLFRLVSNDSFISIQPSLSSCGQDLPRDFSDKVNLPSHNHHHHVDQSLSSACDTEVASLVPLHSHSYRKDHRPRGVPRTSSSAVAFPDTSLNDFPLYQQRRGLDPVSELESSKPLSGSKESLVENSGLSGEFQLAGDLKINTSQPPTKSGKSKPLKAEKSMDSLRSLSTRSSGSTESYCSGTDRDTNSTVSSYKSEQTSSTHIESILSEHEESPKAGTKSGRKKECCAGPEEKNSCASDKRTSSEKIAMEASTNSGVHEAKDPTPSDEMHNQRGLSTSASEEANKNPHANEFTSQGDRPPGNTAENKEEKSDKSAVSVDSKVRKDVGGKQKEGDVRPKSSSVIHRTASAHKSGRRRTGKKRASSFDSSRHRDYVCFRGVSGTKPHSAIFCHDEDSSDQSDLSRASSVQSAHQFSSDSSSSTTSHSCQSPEGRYSALKTKHTHKERGTDSEHTHKAHLVPEGTSKKRATRRTSSTNSAKTRARVLSLDSGTVACLNDSNRLMAPESIKPLTTSKSDLEAKEGEVLDELSLLGRASQLETVTRSRNSLPNQVAFPEGEEQDAVSGGKFSSTLYETGGCDMSLVNFEPAARRASNICDTDSHVSSSTSVRFYPHDVIRLNRLLTIDTDLLEQQDIDLSPDLAATYGPTEEAAQKVKHYYRFWILPQLWIGINFDRLTLLALFDRNREILENVLAVILAILVAFLGSILLIQGFFRDIWVFQFCLVIASCQYSLLKSVQPDSSSPRHGHNRIIAYSRPVYFCICCGLIWLLDYGSRNLTATKFKLYGITFTNPLVFISARDLVIVFTLCFPIVFFIGLLPQVNTFVMYLCEQLDIHIFGGNATTSLLAALYSFICSIVAVALLYGLCYGALKDSWDGQHIPVLFSIFCGLLVAVSYHLSRQSSDPSVLFSLVQSKIFPKTEEKNPEDPLSEVKDPLPEKLRNSVSERLQSDLVVCIVIGVLYFAIHVSTVFTVLQPALKYVLYTLVGFVGFVTHYVLPQVRKQLPWHCFSHPLLKTLEYNQYEVRNAATMMWFEKLHVWLLFVEKNIIYPLIVLNELSSSAETIASPKKLNTELGALMITVAGLKLLRSSFSSPTYQYVTVIFTVLFFKFDYEAFSETMLLDLFFMSILFNKLWELLYKLQFVYTYIAPWQITWGSAFHAFAQPFAVPHSAMLFIQAAVSAFFSTPLNPFLGSAIFITSYVRPVKFWERDYNTKRVDHSNTRLASQLDRNPGSDDNNLNSIFYEHLTRSLQHSLCGDLLLGRWGNYSTGDCFILASDYLNALVHLIEIGNGLVTFQLRGLEFRGTYCQQREVEAITEGVEEDEGFCCCEPGHIPHMLSFNAAFSQRWLAWEVIVTKYILEGYSITDNSAASMLQVFDLRKVLTTYYVKGIIYYVTTSSKLEEWLANETMQEGLRLCADRNYVDVDPTFNPNIDEDYDHRLAGISRESFCVIYLNWIEYCSSRRAKPVDVDKDSSLVTLCYGLCVLGRRALGTASHHMSSNLESFLYGLHALFKGDFRISSIRDEWIFADMELLRKVVVPGIRMSIKLHQPVPNVR

SEQ ID NO: 2965 - protein, 10 aa, Artificial Sequence
  Synthetic polypeptide
QICWSNRTLI

SEQ ID NO: 2966 - protein, 165 aa, Artificial Sequence
  Synthetic polypeptide
MDASLSMLANCEKLSLSTNCIEKIANLNGLKNLRILSLGRNNIKNLNGLEAVGDTLEELWISYNFIEKLKGIHIMKKLKILYMSNNLVKDWAEFVKLAELPCLEDLVFVGNPLEEKHSAENNWIEEATKRVPKLKKLDARLHPGEINSHVTHTKPVWWSLHTDVH

SEQ ID NO: 2967 - protein, 204 aa, Artificial Sequence
  Synthetic polypeptide
MAKATTIKEALARWEEKTGQRPSEAKEIKLYAQIPPIEKMDASLSMLANCEKLSLSTNCIEKIANLNGLKNLRILSLGRNNIKNLNGLEAVGDTLEELWISYNFIEKLKGIHIMKKLKILYMSNNLVKDWAEFVKLAELPCLEDLVFVGNPLEEKHSAENNWIEEATKRVPKLKKLDARLHPGEINSHVTHTKPVWWSLHTDVH

SEQ ID NO: 2968 - protein, 91 aa, Artificial Sequence
  Synthetic polypeptide
MKKLKILYMSNNLVKDWAEFVKLAELPCLEDLVFVGNPLEEKHSAENNWIEEATKRVPKLKKLDARLHPGEINSHVTHTKPVWWSLHTDVH

SEQ ID NO: 2969 - protein, 117 aa, Artificial Sequence
  Synthetic polypeptide
MEAVGDTLEELWISYNFIEKLKGIHIMKKLKILYMSNNLVKDWAEFVKLAELPCLEDLVFVGNPLEEKHSAENNWIEEATKRVPKLKKLDARLHPGEINSHVTHTKPVWWSLHTDVH

SEQ ID NO: 2970 - protein, 126 aa, Artificial Sequence
  Synthetic polypeptide
MIVQRVVLNSRPGKNGNPVAENFRMEEVYLPDNINEGQVQVRTLYLSVDPYMSSWFSGLQIWTRISTVSLPALIHWNHTAGFSESSACRWQIMGLLSLSNCMSQYLIINLFIDMYVSCWFCFSGEF

SEQ ID NO: 2971 - protein, 130 aa, Artificial Sequence
  Synthetic polypeptide
MLSDELESKPELLVQFVQNTSIPLGQGLVESEAKDITCLSLLPVTEASECSRLMLPGLGSSAEHLVFVQDEAEDSGNDFLSSESTDSSIPWFLRVQELAHDSLIAATRAQLAKNAKTSSNVIFKALSLDH

SEQ ID NO: 2972 - protein, 203 aa, Artificial Sequence
  Synthetic polypeptide
MLSDELESKPELLVQFVQNTSIPLGQGLVESEAKDITCLSLLPVTEASECSRLMLPDDTTNHSNSSKEVPSSAVLRSLRVNVGPDGEETRAQTVQKSPEFLSTSESSSLLQDLQPSDSTSFILLNLTRAGLGSSAEHLVFVQDEAEDSGNDFLSSESTDSSIPWFLRVQELAHDSLIAATRAQLAKNAKTSSNVIFKALSLDH

SEQ ID NO: 2973 - protein, 220 aa, Artificial Sequence
  Synthetic polypeptide
MLSDELESKPELLVQFVQNTSIPLGQGLVESEAKDITCLSLLPVTEASECSRLMLPEPVPWREEDGKSGCSDLNDTTNHSNSSKEVPSSAVLRSLRVNVGPDGEETRAQTVQKSPEFLSTSESSSLLQDLQPSDSTSFILLNLTRAGLGSSAEHLVFVQDEAEDSGNDFLSSESTDSSIPWFLRVQELAHDSLIAATRAQLAKNAKTSSNVIFKALSLDH

SEQ ID NO: 2974 - protein, 150 aa, Artificial Sequence
  Synthetic polypeptide
MLPDDTTNHSNSSKEVPSSAVLRSLRVNVGPDGEETRAQTVQKSPEFLSTSESSSLLQDLQPSDSTSFILLNLTRAGLGSSAEHLVFVQDEAEDSGNDFLSSESTDSSIPWFLRVQELAHDSLIAATRAQLAKNAKTSSNVIFKALSLDH

SEQ ID NO: 2975 - protein, 115 aa, Artificial Sequence
  Synthetic polypeptide
MGWKMASPTDGTDLEASLLSFEKLDRASPDLWPEQLPGVAEFAASFKSPITSSPPKWMAEIERDDIDMLKELGSLTTANLMEKVRGLQNLAYQLGLDEWTWMKLETIFLSKLSQG

SEQ ID NO: 2976 - protein, 98 aa, Artificial Sequence
  Synthetic polypeptide
MGWKMASPTDGTDLEASLLSFEKLDRASPDLWPEQLPGVAEFAASFKSPITSSPPKWMAEIERDDIDMLKELGSLTTANLMEKVRGLQNLAYQLGLDE

SEQ ID NO: 2977 - protein, 51 aa, Artificial Sequence
  Synthetic polypeptide
MRFLAATFLLLALSTAAQAEPVQFKDCGTVAHTCNPSTLGGQDGQITRSRD

SEQ ID NO: 2978 - protein, 23 aa, Artificial Sequence
  Synthetic polypeptide
GAQHRCPGRTGAVQGLRHSGSHL

SEQ ID NO: 2979 - protein, 85 aa, Artificial Sequence
  Synthetic polypeptide
LLGERAIPRAGSQAGWRPTLGSVGGRVGSPSSAECCRPFPGQRRWNFVALQPPARGHRQKGLALSQMILWIVNFELRLWRTVGKA

SEQ ID NO: 2980 - protein, 8 aa, Artificial Sequence
  Synthetic polypeptide
MMDCLYAK

SEQ ID NO: 2981 - protein, 97 aa, Artificial Sequence
  Synthetic polypeptide
MGKQKKTRKYATMKRMLSLRDQRLKEKDRLKPKKKEKKDPSALKEREVPQHPSCLFFQYNTQLGPPYHILVDTNFINFSIKAKLDLVQSMMDCLYAK

SEQ ID NO: 2982 - protein, 85 aa, Artificial Sequence
  Synthetic polypeptide
MKRMLSLRDQRLKEKDRLKPKKKEKKDPSALKEREVPQHPSCLFFQYNTQLGPPYHILVDTNFINFSIKAKLDLVQSMMDCLYAK

SEQ ID NO: 2983 - protein, 82 aa, Artificial Sequence
  Synthetic polypeptide
MGKQKKTRNKEKDRLKPKKKEKKDPSALKEREVPQHPSCLFFQYNTQLGPPYHILVDTNFINFSIKAKLDLVQSMMDCLYAK

SEQ ID NO: 2984 - protein, 296 aa, Artificial Sequence
  Synthetic polypeptide
MSVLGEYERHCDSINSDFGSESGGCGDSSPGPSASQGPRAGGGAAEQEELHYIPIRVLGRGAFGEATLYRRTEDDSLVVWKEVDLTRLSEKERRDALNEIVILALLQHDNIIAYYNHFMDNTTLLIELEYCNGGNLYDKILRQKDKLFEEEMVVWYLFQIVSAVSCIHKAGILHRDIKTLNIFLTKANLIKLGDYGLAKKLNSEYSMAETLVGTPYYMSPELCQGVKYNFKSDIWAVGCVIFELLTLKRTFDATNPLNLCVKIVQGIRAMEVDSSQYSLELIQMVHSCLDQVQEPL

SEQ ID NO: 2985 - protein, 8 aa, Artificial Sequence
  Synthetic polypeptide
MSVLGELS

SEQ ID NO: 2986 - protein, 83 aa, Artificial Sequence
  Synthetic polypeptide
MEDLLDLDEELRYSLATSRAKMGRRAQQESAQAENHLNGKNSSLTLTGETSSAKLPRCRQGGWAGDSVKASNPVLLLDSHLPA

SEQ ID NO: 2987 - protein, 441 aa, Artificial Sequence
  Synthetic polypeptide
MDELVHDLASALEQTSEQNKLGELWEEMALSPRQQRRQLRKRRGRKRRSDFTHLAEHTCCYSEASESSLDEATKDCREVAPVTNFSDSDDTMVAKRHPALNAIVKSKQHSWHESDSFTENAPCRPLRRRRKVKRVTSEVAASLQQKLKVSDWSYERGCRFKSAKKQRLSRWKENTPWTSSGHGLCESAENRTFLSKTGRKERMECETDEQKQGSDENMSECETSSVCSSSDTGLFTNDEGRQGDDEQSDWFYEGECVPGFTVPNLLPKWAPDHCSEVERMDSGLDKFSDSTFLLPSRPAQRGYHTRLNRLPGAAARCLRKGRRRLVGKETSINTLGTERISHIISDPRQKDFWLPSAGKRERNQFNPLSPLYSLDVLADASHRRCSPAHCSARQANVHWGPPCSRDIKRKRKPVATASLSSPSAALFTVVKVETNHMSIAG

SEQ ID NO: 2988 - protein, 446 aa, Artificial Sequence
  Synthetic polypeptide
MDELVHDLASALEQTSEQNKLGELWEEMALSPRQQRRQLRKRRGRKRRSDFTHLAEHTCCYSEASESSLDEATKDCREVAPVTNFSDSDDTMVAKRHPALNAIVKSKQHSWHESDSFTENAPCRPLRRRRKVKRVTSEVAASLQQKLKVSDWSYERGCRFKSAKKQRLSRWKENTPWTSSGHGLCESAENRTFLSKTGRKERMECETDEQKQGSDENMSECETSSVCSSSDTGLFTNDEGRQGDDEQSDWFYEGECVPGFTVPNLLPKWAPDHCSEVERMDSGLDKFSDSTFLLPSRPAQRGYHTRLNRLPGAAARCLRKGRRRLVGKETSINTLGTERISHIISDPRQKEKNKALASDFPHISACAHEFNPLSPLYSLDVLADASHRRCSPAHCSARQANVHWGPPCSRDIKRKRKPVATASLSSPSAALFTVVKVETNHMSIAG

SEQ ID NO: 2989 - protein, 84 aa, Artificial Sequence
  Synthetic polypeptide
MFLPMLLTEGVHQHTALPDRQMYTGDHHVHVTSRGSGNQWPQHLCLAPVQHYSQSSRWKQITCPLLDEWMNTICRIYTMEYYVA

SEQ ID NO: 2990 - protein, 186 aa, Artificial Sequence
  Synthetic polypeptide
MNRTKGDEEEYWNSSKFKAFTFDDEDDELSQLKESKRAVNSLRDFVDDDDDDDLERVSWSGEPVGSISWSIRETAGNSGSTHEGREQLKSRNSFSSYAQLPKPTSTYSLSSFFRALSDTPAKSYAPELGRPKGEYRDYSNDWSPSDTVRRLRKGKSQLLERLRWKDCLSPEGRGCNEPRLCHSIPA

SEQ ID NO: 2991 - protein, 199 aa, Artificial Sequence
  Synthetic polypeptide
MNRTKGDEEEYWNSSKFKAFTFDDEDDELSQLKESKRAVNSLRDFVDDDDDDDLERVSWSGEPVGSISWSIRETAGNSGSTHEGREQLKSRNSFSSYAQLPKPTSTYSLSSFFRGRTRPGSFQSLSDALSDTPAKSYAPELGRPKGEYRDYSNDWSPSDTVRRLRKGKSQLLERLRWKDCLSPEGRGCNEPRLCHSIPA

SEQ ID NO: 2992 - protein, 150 aa, Artificial Sequence
  Synthetic polypeptide
MNRTKGDEEEYWNSSKFKAFTFDDEDDELSQLKESKRAVNSLRDFVDDDDDDDLERVSWSGEPVGSRTRPGSFQSLSDALSDTPAKSYAPELGRPKGEYRDYSNDWSPSDTVRRLRKGKSQLLERLRWKDCLSPEGRGCNEPRLCHSIPA

SEQ ID NO: 2993 - protein, 225 aa, Artificial Sequence
  Synthetic polypeptide
MTTGLILFFQSGRPLGAGVRLGLGLRMNRTKGDEEEYWNSSKFKAFTFDDEDDELSQLKESKRAVNSLRDFVDDDDDDDLERVSWSGEPVGSISWSIRETAGNSGSTHEGREQLKSRNSFSSYAQLPKPTSTYSLSSFFRGRTRPGSFQSLSDALSDTPAKSYAPELGRPKGEYRDYSNDWSPSDTVRRLRKGKSQLLERLRWKDCLSPEGRGCNEPRLCHSIPA

SEQ ID NO: 2994 - protein, 533 aa, Artificial Sequence
  Synthetic polypeptide
MRPEPGGCCCRRTVRANGCVANGEVRNGYVRSSAAAAAAAAAGQIHHVTQNGGLYKRPFNEAFEETPMLVAVLTYVGYGVLTLFGYLRDFLRYWRIEKCHHATEREEQKDFVSLYQDFENFYTRNLYMRIRDNWNRPICSVPGARVDIMERQSHDYNWSFKYTGNIIKGVINMGSYNYLGFARNTGSCQEAAAKVLEEYGAGVCSTRQEIGNLDKHEELEELVARFLGVEAAMAYGMGFATNSMNIPALVGKGCLILSDELNHASLVLGARLSGATIRIFKHNNMQSLEKLLKDAIVYGQPRTRRPWKKILILVEGIYSMEGSIVRLPEVIALKKKYKAYLYLDEAHSIGALGPTGRGVVEYFGLDPEDVDVMMGTFTKSFGASGGYIGGKKELIDYLRTHSHSAVYATSLSPPVVEQIITSMKCIMGQDGTSLGKECVQQLAENTRYFRRRLKEMGFIIYGNEDSPVVPLMLYMPAKIGAFGREMLKRNIGVVVVGFPATPIIESRARFCLSAAHTKEILDTMCILKTIKLC

SEQ ID NO: 2995 - protein, 349 aa, Artificial Sequence
  Synthetic polypeptide
MALTSFLPAPTQLSQDQLEAEEKARSQRSRQTSLVSSRREPPPYGYRKGWIPRLLEDFGDGGAFPEIHVAQYPLDMGRKKKMSNALAIQVDSEGKIKYDAIARQGQSKDKVIYSKYTDLVPKEVMNADDPDLQRPDEEAIKEITEKTRVALEKSVSQKVAAAMPVRAADKLAPAQYIRYTPSQQGVAFNSGAKQRVIRMVEMQKDPMEPPRFKINKKIPRGPPSPPAPVMHSPSRKMTVKEQQEWKIPPCISNWKNAKGYTIPLDKRLAADGRGLQTVHINENFAKLAEALYIADRKAREAVEMRAQVERKMAQKEKEKHEEKLREMAQKARERRAGIKTHVEKEKLRI

SEQ ID NO: 2996 - protein, 187 aa, Artificial Sequence
  Synthetic polypeptide
MPVRAADKLAPAQYIRYTPSQQGVAFNSGAKQRVIRMVEMQKDPMEPPRFKINKKIPRGPPSPPAPVMHSPSRKMTVKEQQEWKIPPCISNWKNAKGYTIPLDKRLAADGRGLQTVHINENFAKLAEALYIADRKAREAVEMRAQVERKMAQKEKEKHEEKLREMAQKARERRAGIKTHVEKEKLRI

SEQ ID NO: 2997 - protein, 60 aa, Artificial Sequence
  Synthetic polypeptide
MANSANTNTVPKLYRSVIEDVINDVRDIFLDDGVDEQVLMELKTLLPRCLGICGWHSVSI

SEQ ID NO: 2998 - protein, 21 aa, Artificial Sequence
  Synthetic polypeptide
MELKTLLPRCLGICGWHSVSI

SEQ ID NO: 2999 - protein, 249 aa, Artificial Sequence
  Synthetic polypeptide
MFFLYTDFFLSLVAVPAAAPVCQPKSATNGQPPAPAPTPTPRLSISSRATVVARMEGTSQGGLQTVMKWKTVVAIFVVVVVYLVTGGLVFRALEQPFESSQKNTIALEKAEFLRDHVCVSPQELETLIQHALDADNAGVSPIGNSSNNSSHWDLGSAFFFAGTVITTIGYGNIAPSTEGGKIFCILYAIFGIPLFGFLLAGIGDQLGTIFGKSIARVEKVFRVPSTMIVSFLRLPRPCGTVSQLNPFSL

SEQ ID NO: 3000 - protein, 254 aa, Artificial Sequence
  Synthetic polypeptide
MEDGFKGDRTEGCRSDSVAVPAAAPVCQPKSATNGQPPAPAPTPTPRLSISSRATVVARMEGTSQGGLQTVMKWKTVVAIFVVVVVYLVTGGLVFRALEQPFESSQKNTIALEKAEFLRDHVCVSPQELETLIQHALDADNAGVSPIGNSSNNSSHWDLGSAFFFAGTVITTIGYGNIAPSTEGGKIFCILYAIFGIPLFGFLLAGIGDQLGTIFGKSIARVEKVFRVPSTMIVSFLRLPRPCGTVSQLNPFSL

SEQ ID NO: 3001 - protein, 254 aa, Artificial Sequence
  Synthetic polypeptide
MKFPIETPRKQVNWDPKVAVPAAAPVCQPKSATNGQPPAPAPTPTPRLSISSRATVVARMEGTSQGGLQTVMKWKTVVAIFVVVVVYLVTGGLVFRALEQPFESSQKNTIALEKAEFLRDHVCVSPQELETLIQHALDADNAGVSPIGNSSNNSSHWDLGSAFFFAGTVITTIGYGNIAPSTEGGKIFCILYAIFGIPLFGFLLAGIGDQLGTIFGKSIARVEKVFRVPSTMIVSFLRLPRPCGTVSQLNPFSL

SEQ ID NO: 3002 - protein, 1689 aa, Artificial Sequence
  Synthetic polypeptide
MAARSAPSCHLRLEWVYGYRGHQCRNNLYYTAAKEIVYFVAGVGVVYSPREHRQKFYRGHSDDIISLALHPERVLVATGQVGKEPYICIWDSYTVQTISVLKDVHTHGIACLAFDLDGQRLVSVGLDSKNAVCVWDWKRGKMLSMAPGHTDRIFDISWDLYQPNKLVSCGVKHIKFWSLCGNALTPKRGVFGKTGDLQTILCLACARDELTYSGALNGDIYVWKGINLIRTIQGAHAAGIFSMNACEEGFATGGRDGCIRLWDLTFKPITVIDLRETDQGYKGLSVRSVCWRGDHILVGTQDSEIFEIVVQERNKPFLIMQGHCEGELWALAVHPTKPLAVTGSDDRSVRIWSLVDHALIARCNMEEPIRCAAVNADGIHLALGMKDGSFTVLRVRDMTEVVHIKDRKEAIHELKYSPDGTYLAVGCNDSSVDIYGVAQRYKKVGECLGSLSFITHLDWSSDSRYLQTNDGNGKRLFYRMPGGKEVTSTEEIKGVHWASWTCVSGLEVNGIWPKYSDINDINSVDGNYIGQVLVTADDYGIIKLFRYPCLRKGAKFRKYIGHSAHVTNVRWSHDYQWVISIGGADHSVFQWKFIPERKLKDAVHIAPQESLADSHSDESDSDLSDVPELDSEIEQETQLTYRRQVYKEDLPQLKEQCKEKQKSATSKRRERAPGNSIRLHFVHGYRGYDCRSNLFYTQIGEIVYHVAAVGVIYNRQQNTQRFYLGHDDDILCLTIHPLKDYVATGQVGRDPSIHIWDTETIKPLSILKGHHQYGVSAVDFSADGKRLASVGIDDSHTVVLWDWKKGEKLSIARGSKDKIFVVKMNPYVPDKLITAGIKHMKFWRKAGGGLIGRKGYIGTLGKNDTMMCAVYGWTEEMAFSGTSTGDVCIWRDIFLVKTVKAHDGPVFSMHALEKGFVTGGKDGIVALWDDSFERCLKTYAIKRAALAPGSKGLLLEDNPSIRAISLGHGHILVGTKNGEILEVDKSGPITLLVQGHMEGEVWGLATHPYLPICATVSDDKTLRIWDLSPSHCMLAVRKLKKGGRCCCFSPDGKALAVGLNDGSFLMANADTLEDLVSFHHRKDMISDIRFSPGSGKYLAVASHDSFIDIYNVMSSKRVGICKGATSYITHIDWDIRGKLLQVNTGAKEQLFFEAPRGKKQTIPSVEVEKIAWASWTSVLGLCCEGIWPVIGEVTDVTASCLTSDKMVLATGDDLGFVKLFRYPTKGKFGKFKRYVAHSTHVTNVRWTYDDSMLVTLGGTDMSLMVWTNEMEGYREKRPCDSEESDIDSEEDGGYDSDVTRENEISYTIRALSTNIRPMLGIKPHLQQKEPSIDERQGVVRGSRPPVSRAPPQPEKLQTNNVGKKKRPIEDLVLELIFGYRGRDCRNNVHYLNDGDDIIYHTASVGILHNVATGSQSFYQEHNDDILCLTVNQHPKFINIVATGQVGDSADMSATAPSIHIWDAMNKQTLSILRCYHSKGVCSVSFSATGKLLLSVGLDPEHTITIWRWQEGAKIASRAGHNQRIFVAEFRPDSDTQFVSVGVKHVKFWTLAGRALLSKKGLLSTLEDARMQTMLAIAFGANNLTFTGTISGDVCVWKDHILCRIVARAHNGPVFAMYTTLRDGLIVTGGKERPSKEGGAVKLWDQELRRCRAFRLETGQATDCVRSVCRGKVFTREDFESFHHKEMINV

SEQ ID NO: 3003 - protein, 1643 aa, Artificial Sequence
  Synthetic polypeptide
MAARSAPSCHLRLEWVYGYRGHQCRNNLYYTAAKEIVYFVAGVGVVYSPREHRQKFYRGHSDDIISLALHPERVLVATGQVGKEPYICIWDSYTVQTISVLKDVHTHGIACLAFDLDGQRLVSVGLDSKNAVCVWDWKRGKMLSMAPGHTDRIFDISWDLYQPNKLVSCGVKHIKFWSLCGNALTPKRGVFGKTGDLQTILCLACARDELTYSGALNGDIYVWKGINLIRTIQGAHAAGIFSMNACEEGFATGGRDGCIRLWDLTFKPITVIDLRETDQGYKGLSVRSVCWRGDHILVGTQDSEIFEIVVQERNKPFLIMQGHCEGELWALAVHPTKPLAVTGSDDRSVRIWSLVDHALIARCNMEEPIRCAAVNADGIHLALGMKDGSFTVLRVRDMTEVVHIKDRKEAIHELKYSPDGTYLAVGCNDSSVDIYGVAQRYKKVGECLGSLSFITHLDWSSDSRYLQTNDGNGKRLFYRMPGGKEVTSTEEIKGVHWASWTCVSGLEVNGIWPKYSDINDINSVDGNYIGQVLVTADDYGIIKLFRYPCLRKGAKFRKYIGHSAHVTNVRWSHDYQWVISIGGADHSVFQWKFIPERKLKDAVHIAPQESLADSHSDESDSDLSDVPELDSEIEQETQLTYRRQVYKEDLPQLKEQCKEKQKSATSKRRERAPGNSIRLHFVHGYRGYDCRSNLFYTQIGEIVYHVAAVGVIYNRQQNTQRFYLGHDDDILCLTIHPLKDYVATGQVGRDPSIHIWDTETIKPLSILKGHHQYGVSAVDFSADGKRLASVGIDDSHTVVLWDWKKGEKLSIARGSKDKIFVVKMNPYVPDKLITAGIKHMKFWRKAGDVCIWRDIFLVKTVKAHDGPVFSMHALEKGFVTGGKDGIVALWDDSFERCLKTYAIKRAALAPGSKGLLLEDNPSIRAISLGHGHILVGTKNGEILEVDKSGPITLLVQGHMEGEVWGLATHPYLPICATVSDDKTLRIWDLSPSHCMLAVRKLKKGGRCCCFSPDGKALAVGLNDGSFLMANADTLEDLVSFHHRKDMISDIRFSPGSGKYLAVASHDSFIDIYNVMSSKRVGICKGATSYITHIDWDIRGKLLQVNTGAKEQLFFEAPRGKKQTIPSVEVEKIAWASWTSVLGLCCEGIWPVIGEVTDVTASCLTSDKMVLATGDDLGFVKLFRYPTKGKFGKFKRYVAHSTHVTNVRWTYDDSMLVTLGGTDMSLMVWTNEMEGYREKRPCDSEESDIDSEEDGGYDSDVTRENEISYTIRALSTNIRPMLGIKPHLQQKEPSIDERPPVSRAPPQPEKLQTNNVGKKKRPIEDLVLELIFGYRGRDCRNNVHYLNDGDDIIYHTASVGILHNVATGSQSFYQEHNDDILCLTVNQHPKFINIVATGQVVLSCSLLTTAPSIHIWDAMNKQTLSILRCYHSKGVCSVSFSATGKLLLSVGLDPEHTITIWRWQEGAKIASRAGHNQRIFVAEFRPDSDTQFVSVGVKHVKFWTLAGRALLSKKGLLSTLEDARMQTMLAIAFGANNLTFTGTISGDVCVWKDHILCRIVARAHNGPVFAMYTTLRDGLIVTGGKERPSKEGGAVKLWDQELRRCRAFRLETGQATDCVRSVCRGKVFTREDFESFHHKEMINV

SEQ ID NO: 3004 - protein, 1681 aa, Artificial Sequence
  Synthetic polypeptide
MAARSAPSCHLRLEWVYGYRGHQCRNNLYYTAAKEIVYFVAGVGVVYSPREHRQKFYRGHSDDIISLALHPERVLVATGQVGKEPYICIWDSYTVQTISVLKDVHTHGIACLAFDLDGQRLVSVGLDSKNAVCVWDWKRGKMLSMAPGHTDRIFDISWDLYQPNKLVSCGVKHIKFWSLCGNALTPKRGVFGKTGDLQTILCLACARDELTYSGALNGDIYVWKGINLIRTIQGAHAAGIFSMNACEEGFATGGRDGCIRLWDLTFKPITVIDLRETDQGYKGLSVRSVCWRGDHILVGTQDSEIFEIVVQERNKPFLIMQGHCEGELWALAVHPTKPLAVTGSDDRSVRIWSLVDHALIARCNMEEPIRCAAVNADGIHLALGMKDGSFTVLRVRDMTEVVHIKDRKEAIHELKYSPDGTYLAVGCNDSSVDIYGVAQRYKKVGECLGSLSFITHLDWSSDSRYLQTNDGNGKRLFYRMPGGKEVTSTEEIKGVHWASWTCVSGLEVNGIWPKYSDINDINSVDGNYIGQVLVTADDYGIIKLFRYPCLRKGAKFRKYIGHSAHVTNVRWSHDYQWVISIGGADHSVFQWKFIPERKLKDAVHIAPQESLADSHSDESDSDLSDVPELDSEIEQETQLTYRRQVYKEDLPQLKEQCKEKQKSATSKRRERAPGNSIRLHFVHGYRGYDCRSNLFYTQIGEIVYHVAAVGVIYNRQQNTQRFYLGHDDDILCLTIHPLKDYVATGQVGRDPSIHIWDTETIKPLSILKGHHQYGVSAVDFSADGKRLASVGIDDSHTVVLWDWKKGEKLSIARGSKDKIFVVKMNPYVPDKLITAGIKHMKFWRKAGGGLIGRKGYIGTLGKNDTMMCAVYGWTEEMAFSGTSTGDVCIWRDIFLVKTVKAHDGPVFSMHALEKGFVTGGKDGIVALWDDSFERCLKTYAIKRAALAPGSKGLLLEDNPSIRAISLGHGHILVGTKNGEILEVDKSGPITLLVQGHMEGEVWGLATHPYLPICATVSDDKTLRIWDLSPSHCMLAVRKLKKGGRCCCFSPDGKALAVGLNDGSFLMANADTLEDLVSFHHRKDMISDIRFSPGSGKYLAVASHDSFIDIYNVMSSKRVGICKGATSYITHIDWDIRGKLLQVNTGAKEQLFFEAPRGKKQTIPSVEVEKIAWASWTSVLGLCCEGIWPVIGEVTDVTASCLTSDKMVLATGDDLGFVKLFRYPTKGKFGKFKRYVAHSTHVTNVRWTYDDSMLVTLGGTDMSLMVWTNEMEGYREKRPCDSEESDIDSEEDGGYDSDVTRENEISYTIRALSTNIRPMLGIKPHLQQKEPSIDERPPVSRAPPQPEKLQTNNVGKKKRPIEDLVLELIFGYRGRDCRNNVHYLNDGDDIIYHTASVGILHNVATGSQSFYQEHNDDILCLTVNQHPKFINIVATGQVGDSADMSATAPSIHIWDAMNKQTLSILRCYHSKGVCSVSFSATGKLLLSVGLDPEHTITIWRWQEGAKIASRAGHNQRIFVAEFRPDSDTQFVSVGVKHVKFWTLAGRALLSKKGLLSTLEDARMQTMLAIAFGANNLTFTGTISGDVCVWKDHILCRIVARAHNGPVFAMYTTLRDGLIVTGGKERPSKEGGAVKLWDQELRRCRAFRLETGQATDCVRSVCRGKVFTREDFESFHHKEMINV

SEQ ID NO: 3005 - protein, 130 aa, Artificial Sequence
  Synthetic polypeptide
GLLSTLEDARMQTMLAIAFGANNLTFTGTISGDVCVWKDHILCRIVARAHNGPVFAMYTTLRDGLIVTGGKERPSKEGGAVKLWDQELRRCRAFRLETGQATDCVRSVCRGKVFTREDFESFHHKEMINV

SEQ ID NO: 3006 - protein, 143 aa, Artificial Sequence
  Synthetic polypeptide
MFFSEARARSRTWEASPSEHRKWVEVFKACDEDHKGYLSREDFKTAVVMLFGYKPSKIEVDSVMSSINPNTSGILLEGFLNIVRKKKEAQRYRNEVRHIFTAFDTYYRGFLTLEDFKKAFRQVAPKLPERTVLEVFRHGGSYL

SEQ ID NO: 3007 - protein, 119 aa, Artificial Sequence
  Synthetic polypeptide
MVFKACDEDHKGYLSREDFKTAVVMLFGYKPSKIEVDSVMSSINPNTSGILLEGFLNIVRKKKEAQRYRNEVRHIFTAFDTYYRGFLTLEDFKKAFRQVAPKLPERTVLEVFRHGGSYL

SEQ ID NO: 3008 - protein, 118 aa, Artificial Sequence
  Synthetic polypeptide
VFKACDEDHKGYLSREDFKTAVVMLFGYKPSKIEVDSVMSSINPNTSGILLEGFLNIVRKKKEAQRYRNEVRHIFTAFDTYYRGFLTLEDFKKAFRQVAPKLPERTVLEVFRHGGSYL

SEQ ID NO: 3009 - protein, 95 aa, Artificial Sequence
  Synthetic polypeptide
MLFGYKPSKIEVDSVMSSINPNTSGILLEGFLNIVRKKKEAQRYRNEVRHIFTAFDTYYRGFLTLEDFKKAFRQVAPKLPERTVLEVFRHGGSYL

SEQ ID NO: 3010 - protein, 80 aa, Artificial Sequence
  Synthetic polypeptide
MSSINPNTSGILLEGFLNIVRKKKEAQRYRNEVRHIFTAFDTYYRGFLTLEDFKKAFRQVAPKLPERTVLEVFRHGGSYL

SEQ ID NO: 3011 - protein, 1 aa, Artificial Sequence
  Synthetic polypeptide
M

SEQ ID NO: 3012 - protein, 213 aa, Artificial Sequence
  Synthetic polypeptide
MEEEGGSSGGAAGTSADGGDGGEQLLTVKHELRTANLTGHAEKVGIENFELLKVLGTGAYGKVFLVRKISGHDTGKLYAMKVLKKATIVQKAKTTEHTRTERQVLEHIRQSPFLVTLHYAFQTETKLHLILDYINGGELFTHLSQRERFTEHEVQIYVGEIVLALEHLHKLGIIYRDIKLENILLDSNGHVVLTDFGLSKEFVADEAAVPSSP

SEQ ID NO: 3013 - protein, 134 aa, Artificial Sequence
  Synthetic polypeptide
MKVLKKATIVQKAKTTEHTRTERQVLEHIRQSPFLVTLHYAFQTETKLHLILDYINGGELFTHLSQRERFTEHEVQIYVGEIVLALEHLHKLGIIYRDIKLENILLDSNGHVVLTDFGLSKEFVADEAAVPSSP

SEQ ID NO: 3014 - protein, 208 aa, Artificial Sequence
  Synthetic polypeptide
MEEEGGSSGGAAGTSADGGDGGEQLLTVKHELRTANLTGHAEKVGIENFELLKVLGTGAYGKVFLVRKISGHDTGKLYAMKVLKKATIVQKAKTTEHTRTERQVLEHIRQSPFLVTLHYAFQTETKLHLILDYINGGELFTHLSQRERFTEHEVQIYVGEIVLALEHLHKLGIIYRDIKLENILLDSNGHVVLTDFGLSKEFVADEVQ

SEQ ID NO: 3015 - protein, 129 aa, Artificial Sequence
  Synthetic polypeptide
MKVLKKATIVQKAKTTEHTRTERQVLEHIRQSPFLVTLHYAFQTETKLHLILDYINGGELFTHLSQRERFTEHEVQIYVGEIVLALEHLHKLGIIYRDIKLENILLDSNGHVVLTDFGLSKEFVADEVQ

SEQ ID NO: 3016 - protein, 216 aa, Artificial Sequence
  Synthetic polypeptide
MPFTLHLRSRLPSAIRSLILQKKPNIRNTSSMAGELRPASLVVLPRSLAPAFERFCQVNTGPLPLLGQSEPEKWMLPPQGAISETRMGHPQFWKYEFGACTGSLASLEQYSEQLKDMVAFFLGCSFSLEEALEKAGLPRRDPAGHSQAGAYKTTVPCVTHAGFCCPLVVTMRPIPKDKLEGLVRACCSLGGEQGQPVHMGDPGGMELEGTQLVPPA

SEQ ID NO: 3017 - protein, 211 aa, Artificial Sequence
  Synthetic polypeptide
MPFTLHLRSRLPSAIRSLILQKKPNIRNTSSMAGELRPASLVVLPRSLAPAFERFCQVNTGPLPLLGQSEPEKWMLPPQGAISETRMGHPQFWKYEFGACTGSLASLEQYSEQLKDMVAFFLGCSFSLEEALEKAGLPRRDPAGHSQTTVPCVTHAGFCCPLVVTMRPIPKDKLEGLVRACCSLGGEQGQPVHMGDPGGMELEGTQLVPPA

SEQ ID NO: 3018 - protein, 87 aa, Artificial Sequence
  Synthetic polypeptide
MVAFFLGCSFSLEEALEKAGAYKTTVPCVTHAGFCCPLVVTMRPIPKDKLEGLVRACCSLGGEQGQPVHMGDPGGMELEGTQLVPPA

SEQ ID NO: 3019 - protein, 2 aa, Artificial Sequence
  Synthetic polypeptide
GV

SEQ ID NO: 3020 - protein, 15 aa, Artificial Sequence
  Synthetic polypeptide
PAPAAWLRWSSTRSS

SEQ ID NO: 3021 - protein, 523 aa, Artificial Sequence
  Synthetic polypeptide
MPFTLHLRSRLPSAIRSLILQKKPNIRNTSSMAGELRPASLVVLPRSLAPAFERFCQVNTGPLPLLGQSEPEKWMLPPQGAISETRMGHPQFWKYEFGACTGSLASLEQYSEQLKDMVAFFLGCSFSLEEALEKAGLPRRDPAGHSQTTVPCVTHAGFCCPLVVTMRPIPKDKLEGLVRACCSLGELLGIKELSKPAYGDAMVCPPGEVPVFWPSPLTSLGAVSSCETPLAFASIPGCTVMTDLKDAKAPPGCLTPERIPEVHHISQDPLHYSIASVSASQKIRELESMIGIDPGNRGIGHLLCKDELLKASLSLSHARSVLITTGFPTHFNHEPPEETDGPPGAVALVAFLQALEKEVAIIVDQRAWNLHQKIVEDAVEQGVLKTQIPILTYQGGSVEAAQAFLCKNGDPQTPRFDHLVAIERAGRAADGNYYNARKMNIKHLVDPIDDLFLAAKKIPGISSTGVSNWGGYALACALYILYSCAVHSQYLRKAVGPSRAPGDQAWTQALPSVIKILQVVWGH

SEQ ID NO: 3022 - protein, 580 aa, Artificial Sequence
  Synthetic polypeptide
MPFTLHLRSRLPSAIRSLILQKKPNIRNTSSMAGELRPASLVVLPRSLAPAFERFCQVNTGPLPLLGQSEPEKWMLPPQGAISETRMGHPQFWKYEFGACTGSLASLEQYSEQLKDMVAFFLGCSFSLEEALEKAGLPRRDPAGHSQAGAYKTTVPCVTHAGFCCPLVVTMRPIPKDKLEGLVRACCSLGGEQGQPVHMGDPELLGIKELSKPAYGDAMVCPPGEVPVFWPSPLTSLGAVSSCETPLAFASIPGCTVMTDLKDAKAPPGCLTPERIPEVHHISQDPLHYSIASVSASQKIRELESMIGIDPGNRGIGHLLCKDELLKASLSLSHARSVLITTGFPTHFNHEPPEETDGPPGAVALVAFLQALEKEVAIIVDQRAWNLHQKIVEDAVEQGVLKTQIPILTYQGGSVEAAQAFLCKNGDPQTPRFDHLVAIERAGRAADGNYYNARKMNIKHLVDPIDDLFLAAKKIPGISSTGVGDGGNELGMGKVKEAVRRHIRHGDVIACDVEADFAVIAGVSNWGGYALACALYILYSCAVHSQYLRKAVGPSRAPGDQAWTQALPSVIKILQVVWGH

SEQ ID NO: 3023 - protein, 540 aa, Artificial Sequence
  Synthetic polypeptide
MPFTLHLRSRLPSAIRSLILQKKPNIRNTSSMAGELRPASLVVLPRSLAPAFERFCQVNTGPLPLLGQSEPEKWMLPPQGAISETRMGHPQFWKYEFGACTGSLASLEQYSEQLKDMVAFFLGCSFSLEEALEKAGLPRRDPAGHSQAGAYKTTVPCVTHAGFCCPLVVTMRPIPKDKLEGLVRACCSLGGEQGQPVHMGDPELLGIKELSKPAYGDAMVCPPGEVPVFWPSPLTSLGAVSSCETPLAFASIPGCTVMTDLKDAKAPPGCLTPERIPEVHHISQDPLHYSIASVSASQKIRELESMIGIDPGNRGIGHLLCKDELLKASLSLSHARSVLITTGFPTHFNHEPPEETDGPPGAVALVAFLQALEKEVAIIVDQRAWNLHQKIVEDAVEQGVLKTQIPILTYQGGSVEAAQAFLCKNGDPQTPRFDHLVAIERAGRAADGNYYNARKMNIKHLVDPIDDLFLAAKKIPGISSTGVSNWGGYALACALYILYSCAVHSQYLRKAVGPSRAPGDQAWTQALPSVIKILQVVWGH

SEQ ID NO: 3024 - protein, 575 aa, Artificial Sequence
  Synthetic polypeptide
MPFTLHLRSRLPSAIRSLILQKKPNIRNTSSMAGELRPASLVVLPRSLAPAFERFCQVNTGPLPLLGQSEPEKWMLPPQGAISETRMGHPQFWKYEFGACTGSLASLEQYSEQLKDMVAFFLGCSFSLEEALEKAGLPRRDPAGHSQTTVPCVTHAGFCCPLVVTMRPIPKDKLEGLVRACCSLGGEQGQPVHMGDPELLGIKELSKPAYGDAMVCPPGEVPVFWPSPLTSLGAVSSCETPLAFASIPGCTVMTDLKDAKAPPGCLTPERIPEVHHISQDPLHYSIASVSASQKIRELESMIGIDPGNRGIGHLLCKDELLKASLSLSHARSVLITTGFPTHFNHEPPEETDGPPGAVALVAFLQALEKEVAIIVDQRAWNLHQKIVEDAVEQGVLKTQIPILTYQGGSVEAAQAFLCKNGDPQTPRFDHLVAIERAGRAADGNYYNARKMNIKHLVDPIDDLFLAAKKIPGISSTGVGDGGNELGMGKVKEAVRRHIRHGDVIACDVEADFAVIAGVSNWGGYALACALYILYSCAVHSQYLRKAVGPSRAPGDQAWTQALPSVIKILQVVWGH

SEQ ID NO: 3025 - protein, 451 aa, Artificial Sequence
  Synthetic polypeptide
MVAFFLGCSFSLEEALEKAGAYKTTVPCVTHAGFCCPLVVTMRPIPKDKLEGLVRACCSLGGEQGQPVHMGDPELLGIKELSKPAYGDAMVCPPGEVPVFWPSPLTSLGAVSSCETPLAFASIPGCTVMTDLKDAKAPPGCLTPERIPEVHHISQDPLHYSIASVSASQKIRELESMIGIDPGNRGIGHLLCKDELLKASLSLSHARSVLITTGFPTHFNHEPPEETDGPPGAVALVAFLQALEKEVAIIVDQRAWNLHQKIVEDAVEQGVLKTQIPILTYQGGSVEAAQAFLCKNGDPQTPRFDHLVAIERAGRAADGNYYNARKMNIKHLVDPIDDLFLAAKKIPGISSTGVGDGGNELGMGKVKEAVRRHIRHGDVIACDVEADFAVIAGVSNWGGYALACALYILYSCAVHSQYLRKAVGPSRAPGDQAWTQALPSVIKILQVVWGH

SEQ ID NO: 3026 - protein, 2 aa, Artificial Sequence
  Synthetic polypeptide
GV

SEQ ID NO: 3027 - protein, 15 aa, Artificial Sequence
  Synthetic polypeptide
PAPAAWLRWSSTRSS

SEQ ID NO: 3028 - protein, 3 aa, Artificial Sequence
  Synthetic polypeptide
SRY

SEQ ID NO: 3029 - protein, 110 aa, Artificial Sequence
  Synthetic polypeptide
MDVTVSELLELFLQSPLVTWVKTFGPFGSGSQDNLTMYMDLVDGIFLNQIMLQIDPRPTNQRINKHVNNDVNLRIQNLTILVRNIKTYYQLLVGMQIAVLTLEKLSGSKA

SEQ ID NO: 3030 - protein, 102 aa, Artificial Sequence
  Synthetic polypeptide
MGGAEWESEQTGVKTFGPFGSGSQDNLTMYMDLVDGIFLNQIMLQIDPRPTNQRINKHVNNDVNLRIQNLTILVRNIKTYYQLLVGMQIAVLTLEKLSGSKA

SEQ ID NO: 3031 - protein, 540 aa, Artificial Sequence
  Synthetic polypeptide
MTDTRRRVKVYTLNEDRQWDDRGTGHVSSGYVERLKGMSLLVRAESDGSLLLESKINPNTAYQKQQDTLIVWSEAENYDLALSFQEKAGCDEIWEKICQVQGKDPSVDITQDLVDESEEERFDDMSSPGLELPSCELSRLEEIAELVASSLPSPLRREKLALALENEGYIKKLLELFHVCEDLENIEGLHHLYEIIKGIFLLNRTALFEVMFSEECIMDVIGCLEYDPALSQPRKHREFLTKTAKFKEVIPISDPELKQKIHQTYRVQYIQDMVLPTPSVFEENMLSTLHSFIFFNKVEIVGMLQEDEKFLTDLFAQLTDEATDEEKRQELVNFLKEFCAFSQTLQPQNRDAFFKTLSNMGILPALEVILGMDDTQVRSAATDIFSYLVEYNPSMVREFVMQEAQQNDDDILLINLIIEHMICDTDPELGGAVQLMGLLRTLVDPENMLATANKTEKTEFLGFFYKHCMHVLTAPLLANTTEDKPSKDDFQTAQLLALVLELLTFCVEHHTYHIKNYIINKDILRRVLVLMASKHAFLAL

SEQ ID NO: 3032 - protein, 314 aa, Artificial Sequence
  Synthetic polypeptide
MTDTRRRVKVYTLNEDRQWDDRGTGHVSSGYVERLKGMSLLVRAESDGSLLLESKINPNTAYQKQQEDEKFLTDLFAQLTDEATDEEKRQELVNFLKEFCAFSQTLQPQNRDAFFKTLSNMGILPALEVILGMDDTQVRSAATDIFSYLVEYNPSMVREFVMQEAQQNDDVSKKLTEQKITSKDILLINLIIEHMICDTDPELGGAVQLMGLLRTLVDPENMLATANKTEKTEFLGFFYKHCMHVLTAPLLANTTEDKPSKDDFQTAQLLALVLELLTFCVEHHTYHIKNYIINKDILRRVLVLMASKHAFLAL

SEQ ID NO: 3033 - protein, 553 aa, Artificial Sequence
  Synthetic polypeptide
MTDTRRRVKVYTLNEDRQWDDRGTGHVSSGYVERLKGMSLLVRAESDGSLLLESKINPNTAYQKQQDTLIVWSEAENYDLALSFQEKAGCDEIWEKICQVQGKDPSVDITQDLVDESEEERFDDMSSPGLELPSCELSRLEEIAELVASSLPSPLRREKLALALENEGYIKKLLELFHVCEDLENIEGLHHLYEIIKGIFLLNRTALFEVMFSEECIMDVIGCLEYDPALSQPRKHREFLTKTAKFKEVIPISDPELKQKIHQTYRVQYIQDMVLPTPSVFEENMLSTLHSFIFFNKVEIVGMLQEDEKFLTDLFAQLTDEATDEEKRQELVNFLKEFCAFSQTLQPQNRDAFFKTLSNMGILPALEVILGMDDTQVRSAATDIFSYLVEYNPSMVREFVMQEAQQNDDVSKKLTEQKITSKDILLINLIIEHMICDTDPELGGAVQLMGLLRTLVDPENMLATANKTEKTEFLGFFYKHCMHVLTAPLLANTTEDKPSKDDFQTAQLLALVLELLTFCVEHHTYHIKNYIINKDILRRVLVLMASKHAFLAL

SEQ ID NO: 3034 - protein, 46 aa, Artificial Sequence
  Synthetic polypeptide
RHDDRHPAAGEGVHAQRGPAVGRPGHRACVVWLRGAAEGHVPACQG

SEQ ID NO: 3035 - protein, 337 aa, Artificial Sequence
  Synthetic polypeptide
MESIFHEKQEGSLCAQHCLNNLLQGEYFSPVELSSIAHQLDEEERMRMAEGGVTSEDYRTFLQVISNALKVWGLELILFNSPEYQRLRIDPINERSFICNYKEHWFTVRKLGKQWFNLNSLLTGPELISDTYLALFLAQLQQEGYSIFVVKGDLPDCEADQLLQMIRVQQMHRPKLIGEELAQLKEQRVHKTDLERVLEANDGSGMLDEDEEDLQRALALSRQEIDMEDEEADLRRAIQLSMQGSSRNISQDMTQTSGTNLTSEELRKRREAYFEKDQHFHILKQQQKQQQQQQQQQQGDLSGQSSHPCERPATSSGALGSDLGEINSVVAHTKPVW

SEQ ID NO: 3036 - protein, 353 aa, Artificial Sequence
  Synthetic polypeptide
MESIFHEKQEGSLCAQHCLNNLLQGEYFSPVELSSIAHQLDEEERMRMAEGGVTSEDYRTFLQQPSGNMDDSGFFSIQVISNALKVWGLELILFNSPEYQRLRIDPINERSFICNYKEHWFTVRKLGKQWFNLNSLLTGPELISDTYLALFLAQLQQEGYSIFVVKGDLPDCEADQLLQMIRVQQMHRPKLIGEELAQLKEQRVHKTDLERVLEANDGSGMLDEDEEDLQRALALSRQEIDMEDEEADLRRAIQLSMQGSSRNISQDMTQTSGTNLTSEELRKRREAYFEKIYFTFECFRQQQKQQQQQQQQQQGDLSGQSSHPCERPATSSGALGSDLGEINSVVAHTKPVW

SEQ ID NO: 3037 - protein, 344 aa, Artificial Sequence
  Synthetic polypeptide
MESIFHEKQEGSLCAQHCLNNLLQGEYFSPVELSSIAHQLDEEERMRMAEGGVTSEDYRTFLQQPSGNMDDSGFFSIQVISNALKVWGLELILFNSPEYQRLRIDPINERSFICNYKEHWFTVRKLGKQWFNLNSLLTGPELISDTYLALFLAQLQQEGYSIFVVKGDLPDCEADQLLQMIRVQQMHRPKLIGEELAQLKEQRVHKTDLERVLEANDGSGMLDEDEEDLQRALALSRQEIDMEDEEADLRRAIQLSMQGSSRNISQDMTQTSGTNLTSEELRKRREAYFEKQQQKQQQQQQQQQQGDLSGQSSHPCERPATSSGALGSDLGEINSVVAHTKPVW

SEQ ID NO: 3038 - protein, 165 aa, Artificial Sequence
  Synthetic polypeptide
MIRVQQMHRPKLIGEELAQLKEQRVHKTDLERVLEANDGSGMLDEDEEDLQRALALSRQEIDMEDEEADLRRAIQLSMQGSSRNISQDMTQTSGTNLTSEELRKRREAYFEKQQQKQQQQQQQQQQGDLSGQSSHPCERPATSSGALGSDLGEINSVVAHTKPVW

SEQ ID NO: 3039 - protein, 329 aa, Artificial Sequence
  Synthetic polypeptide
MESIFHEKQEGSLCAQHCLNNLLQGEYFSPVELSSIAHQLDEEERMRMAEGGVTSEDYRTFLQVISNALKVWGLELILFNSPEYQRLRIDPINERSFICNYKEHWFTVRKLGKQWFNLNSLLTGPELISDTYLALFLAQLQQEGYSIFVVKGDLPDCEADQLLQMIRVQQMHRPKLIGEELAQLKEQRVHKTDLERVLEANDGSGMLDEDEEDLQRALALSRQEIDMEDEEADLRRAIQLSMQGSSRNISQDMTQTSGTNLTSEELRKRREAYFEKQQQKQQQQQQQQQQGDLSGQSSHPCERPATSSGALGSDLGEINSVVAHTKPVW

SEQ ID NO: 3040 - protein, 289 aa, Artificial Sequence
  Synthetic polypeptide
MESIFHEKQPSGNMDDSGFFSIQVISNALKVWGLELILFNSPEYQRLRIDPINERSFICNYKEHWFTVRKLGKQWFNLNSLLTGPELISDTYLALFLAQLQQEGYSIFVVKGDLPDCEADQLLQMIRVQQMHRPKLIGEELAQLKEQRVHKTDLERVLEANDGSGMLDEDEEDLQRALALSRQEIDMEDEEADLRRAIQLSMQGSSRNISQDMTQTSGTNLTSEELRKRREAYFEKQQQKQQQQQQQQQQGDLSGQSSHPCERPATSSGALGSDLGEINSVVAHTKPVW

SEQ ID NO: 3041 - protein, 343 aa, Artificial Sequence
  Synthetic polypeptide
MESIFHEKQEGSLCAQHCLNNLLQGEYFSPVELSSIAHQLDEEERMRMAEGGVTSEDYRTFLQPSGNMDDSGFFSIQVISNALKVWGLELILFNSPEYQRLRIDPINERSFICNYKEHWFTVRKLGKQWFNLNSLLTGPELISDTYLALFLAQLQQEGYSIFVVKGDLPDCEADQLLQMIRVQQMHRPKLIGEELAQLKEQRVHKTDLERVLEANDGSGMLDEDEEDLQRALALSRQEIDMEDEEADLRRAIQLSMQGSSRNISQDMTQTSGTNLTSEELRKRREAYFEKQQQKQQQQQQQQQQGDLSGQSSHPCERPATSSGALGSDLGEINSVVAHTKPVW

SEQ ID NO: 3042 - protein, 246 aa, Artificial Sequence
  Synthetic polypeptide
MTVVFSLFRNERSFICNYKEHWFTVRKLGKQWFNLNSLLTGPELISDTYLALFLAQLQQEGYSIFVVKGDLPDCEADQLLQMIRVQQMHRPKLIGEELAQLKEQRVHKTDLERVLEANDGSGMLDEDEEDLQRALALSRQEIDMEDEEADLRRAIQLSMQGSSRNISQDMTQTSGTNLTSEELRKRREAYFEKQQQKQQQQQQQQQQGDLSGQSSHPCERPATSSGALGSDLGEINSVVAHTKPVW

SEQ ID NO: 3043 - protein, 274 aa, Artificial Sequence
  Synthetic polypeptide
MESIFHEKVISNALKVWGLELILFNSPEYQRLRIDPINERSFICNYKEHWFTVRKLGKQWFNLNSLLTGPELISDTYLALFLAQLQQEGYSIFVVKGDLPDCEADQLLQMIRVQQMHRPKLIGEELAQLKEQRVHKTDLERVLEANDGSGMLDEDEEDLQRALALSRQEIDMEDEEADLRRAIQLSMQGSSRNISQDMTQTSGTNLTSEELRKRREAYFEKQQQKQQQQQQQQQQGDLSGQSSHPCERPATSSGALGSDLGEINSVVAHTKPVW

SEQ ID NO: 3044 - protein, 63 aa, Artificial Sequence
  Synthetic polypeptide
MICWRHPSAPCGRGEWQVPRSQLPLARVEFPVALGLGVAVGAEAAGSVSLIRMLEIQNAPICE

SEQ ID NO: 3045 - protein, 30 aa, Artificial Sequence
  Synthetic polypeptide
MAPVNGTQTAKNCTDPVLLCDTTCCMEVFE

SEQ ID NO: 3046 - protein, 94 aa, Artificial Sequence
  Synthetic polypeptide
MALRGTLRPLKVRRRREMLPQQVGFVCAVLALVCCASGLFGSLGHKTASASKRVLPDTWRNRKLMAPVNGTQTAKNCTDPVLLCDTTCCMEVFE

SEQ ID NO: 3047 - protein, 77 aa, Artificial Sequence
  Synthetic polypeptide
MLPQQVGFVCAVLALVCCASGLFGSLGHKTASASKRVLPDTWRNRKLMAPVNGTQTAKNCTDPVLLCDTTCCMEVFE

SEQ ID NO: 3048 - protein, 419 aa, Artificial Sequence
  Synthetic polypeptide
MAPVNGTQTAKNCTDPAIHEFPTDLFSNKERQHGAVLLHILGALYMFYALAIVCDDFFVPSLEKICERLHLSEDVAGATFMAAGSSTPELFASVIGVFITHGDVGVGTIVGSAVFNILCIIGVCGLFAGQVVRLTWWAVCRDSVYYTISVIVLIVFIYDEQIVWWEGLVLIILYVFYILIMKYNVKMQAFFTVKQKSIANGNPVNSELEAGNDFYDGSYDDPSVPLLGQVKEKPQYGKNPVVMVDEIMSSSPPKFTFPEAGLRIMITNKFGPRTRLRMASRIIINERQRLINSANGVSSKPLQNGRHENIENGNVPVENPEDPQQNQEQQPPPQPPPPEPEPVEADFLSPFSVPATAASSLSFLEHTVIPRTAHLPQDLCTCLLLECSFPRYPHAHFLTFFRSLLKCHLFTVTFPDYRI

SEQ ID NO: 3049 - protein, 464 aa, Artificial Sequence
  Synthetic polypeptide
MALRGTLRPLKVRRRREMLPQQVGFVCAVLALVCCASGLFGSLGHKTASASKRVLPDTWRNRKLMAPVNGTQTAKNCTDPAIHEFPTDLFSNKERQHGAVLLHILGALYMFYALAIVCDDFFVPSLEKICERLHLSEDVAGATFMAAGSSTPELFASVIGVFITHGDVGVGTIVGSAVFNILCIIGVCGLFAGQVVRLTWWAVCRDSVYYTISVIVLIVFIYDEQIVWWEGLVLIILYVFYILIMKYNVKMQAFFTVKQKSIANGNPVNSELEAVKEKPQYGKNPVVMVDEIMSSSPPKFTFPEAGLRIMITNKFGPRTRLRMASRIIINERQRLINSANGVSSKPLQNGRHENIENGNVPVENPEDPQQNQEQQPPPQPPPPEPEPVEADFLSPFSVPATAASSLSFLEHTVIPRTAHLPQDLCTCLLLECSFPRYPHAHFLTFFRSLLKCHLFTVTFPDYRI

SEQ ID NO: 3050 - protein, 483 aa, Artificial Sequence
  Synthetic polypeptide
MALRGTLRPLKVRRRREMLPQQVGFVCAVLALVCCASGLFGSLGHKTASASKRVLPDTWRNRKLMAPVNGTQTAKNCTDPAIHEFPTDLFSNKERQHGAVLLHILGALYMFYALAIVCDDFFVPSLEKICERLHLSEDVAGATFMAAGSSTPELFASVIGVFITHGDVGVGTIVGSAVFNILCIIGVCGLFAGQVVRLTWWAVCRDSVYYTISVIVLIVFIYDEQIVWWEGLVLIILYVFYILIMKYNVKMQAFFTVKQKSIANGNPVNSELEAGNDFYDGSYDDPSVPLLGQVKEKPQYGKNPVVMVDEIMSSSPPKFTFPEAGLRIMITNKFGPRTRLRMASRIIINERQRLINSANGVSSKPLQNGRHENIENGNVPVENPEDPQQNQEQQPPPQPPPPEPEPVEADFLSPFSVPATAASSLSFLEHTVIPRTAHLPQDLCTCLLLECSFPRYPHAHFLTFFRSLLKCHLFTVTFPDYRI

SEQ ID NO: 3051 - protein, 466 aa, Artificial Sequence
  Synthetic polypeptide
MLPQQVGFVCAVLALVCCASGLFGSLGHKTASASKRVLPDTWRNRKLMAPVNGTQTAKNCTDPAIHEFPTDLFSNKERQHGAVLLHILGALYMFYALAIVCDDFFVPSLEKICERLHLSEDVAGATFMAAGSSTPELFASVIGVFITHGDVGVGTIVGSAVFNILCIIGVCGLFAGQVVRLTWWAVCRDSVYYTISVIVLIVFIYDEQIVWWEGLVLIILYVFYILIMKYNVKMQAFFTVKQKSIANGNPVNSELEAGNDFYDGSYDDPSVPLLGQVKEKPQYGKNPVVMVDEIMSSSPPKFTFPEAGLRIMITNKFGPRTRLRMASRIIINERQRLINSANGVSSKPLQNGRHENIENGNVPVENPEDPQQNQEQQPPPQPPPPEPEPVEADFLSPFSVPATAASSLSFLEHTVIPRTAHLPQDLCTCLLLECSFPRYPHAHFLTFFRSLLKCHLFTVTFPDYRI

SEQ ID NO: 3052 - protein, 447 aa, Artificial Sequence
  Synthetic polypeptide
MLPQQVGFVCAVLALVCCASGLFGSLGHKTASASKRVLPDTWRNRKLMAPVNGTQTAKNCTDPAIHEFPTDLFSNKERQHGAVLLHILGALYMFYALAIVCDDFFVPSLEKICERLHLSEDVAGATFMAAGSSTPELFASVIGVFITHGDVGVGTIVGSAVFNILCIIGVCGLFAGQVVRLTWWAVCRDSVYYTISVIVLIVFIYDEQIVWWEGLVLIILYVFYILIMKYNVKMQAFFTVKQKSIANGNPVNSELEAVKEKPQYGKNPVVMVDEIMSSSPPKFTFPEAGLRIMITNKFGPRTRLRMASRIIINERQRLINSANGVSSKPLQNGRHENIENGNVPVENPEDPQQNQEQQPPPQPPPPEPEPVEADFLSPFSVPATAASSLSFLEHTVIPRTAHLPQDLCTCLLLECSFPRYPHAHFLTFFRSLLKCHLFTVTFPDYRI

SEQ ID NO: 3053 - protein, 3 aa, Artificial Sequence
  Synthetic polypeptide
SVR

SEQ ID NO: 3054 - protein, 582 aa, Artificial Sequence
  Synthetic polypeptide
MSWFVDLAGKAEDLLNRVDQGAATALSRKDNASNIYSKNTDYTELHQQNTDLIYQTGPKSTYISSAADNIRNQKATILAGTANVKVGSRTPVEASHPVENASVPRPSSHFVRRKKSEPDDELLFDFLNSSQKEPTGRVEIRKEKGKTPVFQSSQTSSVSSVNPSVTTIKTIEENSFGSQTHEAASNSDSSHEGQEESSKENVSSNAACPDHTPTPNDDGKSHELSNLRLENQLLRNEVQSLNQEMASLLQRSKETQEELNKARARVEKWNADHSKSDRMTRGLRAQVDDLTEAVAAKDSQLAVLKVRLQEADQLLSTRTEALEALQSEKSRIMQDQSEGNSLQNQALQTFQERLHEADATLKREQESYKQMQSEFAARLNKVEMERQNLAEAITLAERKYSDEKKRVDELQQQVKLYKLNLESSKQELIDYKQKATRILQSKEKLINSLKEGSGFEGLDSSTASSMELEELRHEKEMQREEIQKLMGQIHQLRSELQDMEAQQVNEAESAREQLQDLHDQIAGQKASKQELETELERLKQEFHYIEEDLYRTKNTLQSRIKDRDEEIQKLRNQFADTAFLPN

SEQ ID NO: 3055 - protein, 86 aa, Artificial Sequence
  Synthetic polypeptide
MQTFLKGKRVGYWLSEKKIKKLNFQAFAELCRKRGMEVVQLNLSRPIEEQGPLDVIIHKLTDVILEADQNDSQSLELVHRFQRHCS

SEQ ID NO: 3056 - protein, 104 aa, Artificial Sequence
  Synthetic polypeptide
RRLCPLHTHTHTHTHTHMHAHTRTHTKLSCLLVCPPEAGTCWSLRSTWSGPDVRCVYWLNLSRPIEEQGPLDVIIHKLTDVILEADQNDSQSLELVHRFQRHCS

SEQ ID NO: 3057 - protein, 615 aa, Artificial Sequence
  Synthetic polypeptide
MGANASNYPHSCSPRVGGNSQAQQTFIGTSSYSQQGYGCESKLYSLDHGHEKPQDKKKRTSGLATLKKKFIKRRKSNRSADHAKQMRELLSGWDVRDVNALVEEYEGTSALKELSLQASLARPEARTLQKDMADLYEYKYCTDVDLIFQETCFPVHRAILAARCPFFKTLLSSSPEYGAEIIMDINTAGIDMPMFSALLHYLYTGEFGMEDSRFQNVDILVQLSEEFGTPNSLDVDMRGLFDYMCYYDVVLSFSSDSELVEAFGGNQNCLDEELKAHKAVISARSPFFRNLLQRRIRTGEEITDRTLRTPTRIILDESIIPKKYATVILHCMYTDVVDLSVLHCSPSVGSLSEVQALVAGKPNMTRAEEAMELYHIALFLEFNMLAQGCEDIIAESISLDTLIAILKWSSHPYGSKWVHRQALHFLCEEFSQVMTSDVFYELSKDHLLTAIQSDYLQASEQDILKYLIKWGEHQLMKRIADREPNLLSGTAHSVNKRGVKRRDLDMEELREILSSLLPFVRIEHILPINSEVLSDAMKRGLISTPPSDMLPTTEGGKSNAWLRQKNAGIYVRPRLFSPYVEEAKAWWLTPVISALWEAEAGRSLESRSSRAAWAT

SEQ ID NO: 3058 - protein, 264 aa, Artificial Sequence
  Synthetic polypeptide
MAGGAGAGADGGAGGGGGGGDGSGPSGSSSGGRSLRGCEDIIAESISLDTLIAILKWSSHPYGSKWVHRQALHFLCEEFSQVMTSDVFYELSKDHLLTAIQSDYLQASEQDILKYLIKWGEHQLMKRIADREPNLLSGTAHSVNKRGVKRRDLDMEELREILSSLLPFVRIEHILPINSEVLSDAMKRGLISTPPSDMLPTTEGGKSNAWLRQKNAGIYVRPRLFSPYVEEAKAWWLTPVISALWEAEAGRSLESRSSRAAWAT

SEQ ID NO: 3059 - protein, 189 aa, Artificial Sequence
  Synthetic polypeptide
MYTDVVDLSVLHCSPSVGSLSEVQALVAGKPNMTRAEEAMELYHIALFLEFNMLAQEPNLLSGTAHSVNKRGVKRRDLDMEELREILSSLLPFVRIEHILPINSEVLSDAMKRGLISTPPSDMLPTTEGGKSNAWLRQKNAGIYVRPRLFSPYVEEAKAWWLTPVISALWEAEAGRSLESRSSRAAWAT

SEQ ID NO: 3060 - protein, 230 aa, Artificial Sequence
  Synthetic polypeptide
LLQRRIRTGEEITDRTLRTPTRIILDESIIPKKYATVILHCMYTDVVDLSVLHCSPSVGSLSEVQALVAGKPNMTRAEEAMELYHIALFLEFNMLAQEPNLLSGTAHSVNKRGVKRRDLDMEELREILSSLLPFVRIEHILPINSEVLSDAMKRGLISTPPSDMLPTTEGGKSNAWLRQKNAGIYVRPRLFSPYVEEAKAWWLTPVISALWEAEAGRSLESRSSRAAWAT

SEQ ID NO: 3061 - protein, 1789 aa, Artificial Sequence
  Synthetic polypeptide
MKSPALQPLSMAGLQLMTPASSPMGPFFGLPWQQEAIHDNIYTPRKYQVELLEAALDHNTIVCLNTGSGKTFIAVLLTKELSYQIRGDFSRNGKRTVFLVNSANQVAQQVSAVRTHSDLKVGEYSNLEVNASWTKERWNQEFTKHQVLIMTCYVALNVLKNGYLSLSDINLLVFDECHLAILDHPYREIMKLCENCPSCPRILGLTASILNGKCDPEELEEKIQKLEKILKSNAETATDLVVLDRYTSQPCEIVVDCGPFTDRSGLYERLLMELEEALNFINDCNISVHSKERDSTLISKQILSDCRAVLVVLGPWCADKVAGMMVRELQKYIKHEQEELHRKFLLFTDTFLRKIHALCEEHFSPASLDLKFVTPKVIKLLEILRKYKPYERQQFESVEWYNNRNQDNYVSWSDSEDDDEDEEIEEKEKPETNFPSPFTNILCGIIFVERRYTAVVLNRLIKEAGKQDPELAYISSNFITGHGIGKNQPRNKQMEAEFRKQEEVLRKFRAHETNLLIATSIVEEGVDIPKCNLVVRFDLPTEYRSYVQSKGRARAPISNYIMLADTDKIKSFEEDLKTYKAIEKILRNKCSKSVDTGETDIDPVMDDDDVFPPYVLRPDDGGPRVTINTAIGHINRYCARLPSDPFTHLAPKCRTRELPDGTFYSTLYLPINSPLRASIVGPPMSCVRLAERVVALICCEKLHKIGELDDHLMPVGKETVKYEEELDLHDEEETSVPGRPGSTKRRQCYPKAIPECLRDSYPRPDQPCYLYVIGMVLTTPLPDELNFRRRKLYPPEDTTRCFGILTAKPIPQIPHFPVYTRSGEVTISIELKKSGFMLSLQMLELITRLHQYIFSHILRLEKPALEFKPTDADSAYCVLPLNVVNDSSTLDIDFKFMEDIEKSEARIGIPSTKYTKETPFVFKLEDYQDAVIIPRYRNFDQPHRFYVADVYTDLTPLSKFPSPEYETFAEYYKTKYNLDLTNLNQPLLDVDHTSSRLNLLTPRHLNQKGKALPLSSAEKRKAKWESLQNKQILVPELCAIHPIPASLWRKAVCLPSILYRLHCLLTAEELRAQTASDAGVGVRSLPADFRYPNLDFGWKKSIDSKSFISISNSSSAENDNYCKHSTIVPENAAHQGANRTSSLENHDQMSVNCRTLLSESPGKLHVEVSADLTAINGLSYNQNLANGSYDLANRDFCQGNQLNYYKQEIPVQPTTSYSIQNLYSYENQPQPSDECTLLSNKYLDGNANKSTSDGSPVMAVMPGTTDTIQVLKGRMDSEQSPSIGYSSRTLGPNPGLILQALTLSNASDGFNLERLEMLGDSFLKHAITTYLFCTYPDAHEGRLSYMRSKKVSNCNLYRLGKKKGLPSRMVVSIFDPPVNWLPPGYVVNQDKSNTDKWEKDEMTKDCMLANGKLDEDYEEEDEEEESLMWRAPKEEADYEDDFLEYDQEHIRFIDNMLMGSGAFVKKISLSPFSTTDSAYEWKMPKKSSLGSMPFSSDFEDFDYSSWDAMCYLDPSKAVEEDDFVVGFWNPSEENCGVDTGKQSISYDLHTEQCIADKSIADCVEALLGCYLTSCGERAAQLFLCSLGLKVLPVIKRTDREKALCPTRENFNSQQKNLSVSCAAASVASSRSSVLKDSEYGCLKIPPRCMFDHPDADKTLNHLISGFENFEKKINYRFKNKAYLLQAFTHASYHYNTITDCYQRLEFLGDAILDYLITKHLYEDPRQHSPGVLTDLRSALVNNTIFASLAVKYDYHKYFKAVSPELFHVIDDFVQFQLEKNEMQGMDSEL

SEQ ID NO: 3062 - protein, 687 aa, Artificial Sequence
  Synthetic polypeptide
MLAWESDHFLRILAENDNYCKHSTIVPENAAHQGANRTSSLENHDQMSVNCRTLLSESPGKLHVEVSADLTAINGLSYNQNLANGSYDLANRDFCQGNQLNYYKQEIPVQPTTSYSIQNLYSYENQPQPSDECTLLSNKYLDGNANKSTSDGSPVMAVMPGTTDTIQVLKGRMDSEQSPSIGYSSRTLGPNPGLILQALTLSNASDGFNLERLEMLGDSFLKHAITTYLFCTYPDAHEGRLSYMRSKKVSNCNLYRLGKKKGLPSRMVVSIFDPPVNWLPPGYVVNQDKSNTDKWEKDEMTKDCMLANGKLDEDYEEEDEEEESLMWRAPKEEADYEDDFLEYDQEHIRFIDNMLMGSGAFVKKISLSPFSTTDSAYEWKMPKKSSLGSMPFSSDFEDFDYSSWDAMCYLDPSKAVEEDDFVVGFWNPSEENCGVDTGKQSISYDLHTEQCIADKSIADCVEALLGCYLTSCGERAAQLFLCSLGLKVLPVIKRTDREKALCPTRENFNSQQKNLSVSCAAASVASSRSSVLKDSEYGCLKIPPRCMFDHPDADKTLNHLISGFENFEKKINYRFKNKAYLLQAFTHASYHYNTITDCYQRLEFLGDAILDYLITKHLYEDPRQHSPGVLTDLRSALVNNTIFASLAVKYDYHKYFKAVSPELFHVIDDFVQFQLEKNEMQGMDSEL

SEQ ID NO: 3063 - protein, 678 aa, Artificial Sequence
  Synthetic polypeptide
MAEEEETAALTEKVIRTQRVFINLLDSYSSGNIGKFLSNCVVGASLEEITEEEEEEDENKSAMLEASSTKVKEGTFQIVGTLSKPDSPRPDFAVETYSAISREDLLMRLLECDVIIYNITESSQQMEEAIWAVSALSEEVSHFEKRKLFILLSTVMTWARSKALDPEDSEVPFTEEDYRRRKSHPNFLDHINAEKMVLKFGKKARKFAAYVVAAGLQYGAEGGMLHTFFKMAWLGEIPALPVFGDGTNVIPTIHVLDLAGVIQNVIDHVPKPHYLVAVDESVHTLEDIVKCISKNTGPGKIQKIPRENAYLTKDLTQDCLDHLLVNLRMEALFVKENFNIRWAAQTGFVENINTILKEYKQSRGLMPIKICILGPPAVGKSSIAKELANYYKLHHIQLKDVISEAIAKLEAIVAPNDVGEGEEEVEEEEEEENVEDAQELLDGIKESMEQNAGQLDDQYIIRFMKEKLKSMPCRNQGYILDGFPKTYDQAKDLFNQEDEEEEDDVRGRMFPFDKLIIPEFVCALDASDEFLKERVINLPESIVAGTHYSQDRFLRALSNYRDINIDDETVFNYFDELEIHPIHIDVGKLEDAQNRLAIKQLIKEIGEPRNYGLTDEEKAEEERKAAEERLAREAAEEAEREHQEAVEMAEKIARWEEWVCGLVQAPVCVSVSPSVKWG

SEQ ID NO: 3064 - protein, 4 aa, Artificial Sequence
  Synthetic polypeptide
SPGI

SEQ ID NO: 3065 - protein, 141 aa, Artificial Sequence
  Synthetic polypeptide
MPFPVTTQGSQQTQPPQKHYGITSPISLAAPKETDCVLTQKLIETLKPFGVFEEEEELQRRILILGKLNNLVKEWIREISESKNLPQSVIENVGGKIFTFGSYRLGVHTKELWEAEAGGLLEPREVKAAVSCDCIATLQPG

SEQ ID NO: 3066 - protein, 155 aa, Artificial Sequence
  Synthetic polypeptide
MPFPVTTQGSQQTQPPQKHYGITSPISLAAPKETDCVLTQKLIETLKPFGVFEEEEELQRSNDLEYLIDNCFINRILILGKLNNLVKEWIREISESKNLPQSVIENVGGKIFTFGSYRLGVHTKELWEAEAGGLLEPREVKAAVSCDCIATLQPG

SEQ ID NO: 3067 - protein, 357 aa, Artificial Sequence
  Synthetic polypeptide
MPRVKAAQAGRQSSAKRHLAEQFAVGEIITDMAKKEWKVGLPIGQGGFGCIYLADMNSSESVGSDAPCVVKVEPSDNGPLFTELKFYQRAAKPEQIQKWIRTRKLKYLGVPKYWGSGLHDKNGKSYRFMIMDRFGSDLQKIYEANAKRFSRKTVLQLSLRILDILEYIHEHEYVHGDIKASNLLLNYKNPDQVYLVDYGLAYRYCPEGVHKEYKEDPKRCHDGTIEFTSIDAHNGVAPSRRGDLEILGYCMIQWLTGHLPWEDNLKDPKYVRDSKIRYRENIASLMDKCFPEKNKPGEIAKYMETVKLLDYTEKPLYENLRDILLQGLKAIGSKDDGKLDLSVVENGGLKAKTITKD

SEQ ID NO: 3068 - protein, 27 aa, Artificial Sequence
  Synthetic polypeptide
KCQKVFSENCLAAKLKNSGYSGIYSRA

SEQ ID NO: 3069 - protein, 6 aa, Artificial Sequence
  Synthetic polypeptide
MSRWHY

SEQ ID NO: 3070 - protein, 416 aa, Artificial Sequence
  Synthetic polypeptide
MPRVKAAQAGRQSSAKRHLAEQFAVGEIITDMAKKEWKVGLPIGQGGFGCIYLADMNSSESVGSDAPCVVKVEPSDNGPLFTELKFYQRAAKPEQIQKWIRTRKLKYLGVPKYWGSGLHDKNGKSYRFMIMDRFGSDLQKIYEANAKRFSRKTVLQLSLRILDILEYIHEHEYVHGDIKASNLLLNYKNPDQVYLVDYGLAYRYCPEGVHKEYKEDPKRCHDGTIEFTSIDAHNGVAPSRRGDLEILGYCMIQWLTGHLPWEDNLKDPKYVRDSKIRYRENIASLMDKCFPEKNKPGEIAKYMETVKLLDYTEKPLYENLRDILLQGLKAIGSKDDGKLDLSVVENGGLKAKTITKKRKKEIEESKEPGVEDTEWSNTQTEEAIQTRRAQWLMLVMPAVWEAEAGGSFEVRSSTPA

SEQ ID NO: 3071 - protein, 6 aa, Artificial Sequence
  Synthetic polypeptide
EAKERN

SEQ ID NO: 3072 - protein, 6 aa, Artificial Sequence
  Synthetic polypeptide
EAKERN

SEQ ID NO: 3073 - protein, 437 aa, Artificial Sequence
  Synthetic polypeptide
MPRVKAAQAGRQSSAKRHLAEQFAVGEIITDMAKKEWKVGLPIGQGGFGCIYLADMNSSESVGSDAPCVVKVEPSDNGPLFTELKFYQRAAKPEQIQKWIRTRKLKYLGVPKYWGSGLHDKNGKSYRFMIMDRFGSDLQKIYEANAKRFSRKTVLQLSLRILDILEYIHEHEYVHGDIKASNLLLNYKNPDQVYLVDYGLAYRYCPEGVHKEYKEDPKRCHDGTIEFTSIDAHNGVAPSRRGDLEILGYCMIQWLTGHLPWEDNLKDPKYVRDSKIRYRENIASLMDKCFPEKNKPGEIAKYMETVKLLDYTEKPLYENLRDILLQGLKAIGSKDDGKLDLSVVENGGLKAKTITKKRKKEIEESKEPGVEDTEWSNTQTEEAIQTRLISLQEEEETPGVCMNREETTKDTARRQPPAAEERGLGKSQPAGTLTVDF

SEQ ID NO: 3074 - protein, 284 aa, Artificial Sequence
  Synthetic polypeptide
MGKKSRVKTQKSGTGATATVSPKEILNLTSELLQKCSSPAPGPGKEWEEYVQIRTLVEKIRKKQKGLSVTFDGKREDYFPDLMKWASENGASVEGFEMVNFKEEGFGLRATRDIKAEELFLWVPRKLLMTVESAKNSVLGPLYSQDRILQAMGNIALAFHLLCERASPNSFWQPYIQTLPSEYDTPLYFEEDEVRYLQSTQAIHDVFSQYKNTARQYAYFYKVIQTHPHANKLPLKDSFTYEDYRWAVSSVMTRQNQIPTEDGSRVTLALIPLWDMCNHTNGLV

SEQ ID NO: 3075 - protein, 97 aa, Artificial Sequence
  Synthetic polypeptide
MGRKKIQITRIMDERNRQVTFTKRKFGLMKKAYELSVLCDCEIALIIFNSSNKLFQYASTDMDKVLLKYTEYNEPHESRTNSDIVEVIWINSSVEDI

SEQ ID NO: 3076 - protein, 301 aa, Artificial Sequence
  Synthetic polypeptide
MGRKKIQITRIMDERNRQVTFTKRKFGLMKKAYELSVLCDCEIALIIFNSSNKLFQYASTDMDKVLLKYTEYNEPHESRTNSDIVETLRKKGLNGCESPDADDYFEHSPLSEDRFSKLNEDSDFIFKRGPPGLPPQNFSMSVTVPVTSPNALSYTNPGSSLVSPSLAASSTLTDSSMLSPPQTTLHRNVSPGAPQRPPSTGNAGGMLSTTDLTVPNGAGSSPVGNGFVNSRASPNLIGATGANSLGKVMPTKSPPPPGGGNLGMNSRKPDLRVVIPPSSKGMMPPLTCSTRNVKGSPSAGL

SEQ ID NO: 3077 - protein, 303 aa, Artificial Sequence
  Synthetic polypeptide
MGRKKIQITRIMDERNRQVTFTKRKFGLMKKAYELSVLCDCEIALIIFNSSNKLFQYASTDMDKVLLKYTEYNEPHESRTNSDIVEALNKKEHRGCDSPDPDTSYVLTPHTEEKYKKINEEFDNMMRNHKIAPGLPPQNFSMSVTVPVTSPNALSYTNPGSSLVSPSLAASSTLTDSSMLSPPQTTLHRNVSPGAPQRPPSTGNAGGMLSTTDLTVPNGAGSSPVGNGFVNSRASPNLIGATGANSLGKVMPTKSPPPPGGGNLGMNSRKPDLRVVIPPSSKGMMPPLTCSTRNVKGSPSAGL

SEQ ID NO: 3078 - protein, 233 aa, Artificial Sequence
  Synthetic polypeptide
MGRKKIQITRIMDERNRQTLRKKGLNGCESPDADDYFEHSPLSEDRFSKLNEDSDFIFKRGPPGLPPQNFSMSVTVPVTSPNALSYTNPGSSLVSPSLAASSTLTDSSMLSPPQTTLHRNVSPGAPQRPPSTGNAGGMLSTTDLTVPNGAGSSPVGNGFVNSRASPNLIGATGANSLGKVMPTKSPPPPGGGNLGMNSRKPDLRVVIPPSSKGMMPPLTCSTRNVKGSPSAGL

SEQ ID NO: 3079 - protein, 56 aa, Artificial Sequence
  Synthetic polypeptide
MAGMSQRPPSMYWCVGPEESAVCPERAMETLNDFIVATWAETHMHFPGCLCQHCRD

SEQ ID NO: 3080 - protein, 29 aa, Artificial Sequence
  Synthetic polypeptide
METLNDFIVATWAETHMHFPGCLCQHCRD

SEQ ID NO: 3081 - protein, 1611 aa, Artificial Sequence
  Synthetic polypeptide
MAGMSQRPPSMYWCVGPEESAVCPERAMETLNGAGDTGGKPSTRGGDPAARSRRTEGIRAAYRRGDRGGARDLLEEACDQCASQLEKGQLLSIPAAYGDLEMVRYLLSKRLVELPTEPTDDNPAVVAAYFGHTAVVQELLESLPGPCSPQRLLNWMLALACQRGHLGVVKLLVLTHGADPESYAVRKNEFPVIVRLPLYAAIKSGNEDIAIFLLRHGAYFCSYILLDSPDPSKHLLRKYFIEASPLPSSYPGKTALRVKWSHLRLPWVDLDWLIDISCQITELDLSANCLATLPSVIPWGLINLRKLNLSDNHLGELPGVQSSDEIICSRLLEIDISSNKLSHLPPGFLHLSKLQKLTASKNCLEKLFEEENATNWIGLRKLQELDISDNKLTELPALFLHSFKSLNSLNVSRNNLKVFPDPWACPLKCCKASRNALECLPDKMAVFWKNHLKDVDFSENALKEVPLGLFQLDALMFLRLQGNQLAALPPQEKWTCRQLKTLDLSRNQLGKNEDGLKTKRIAFFTTRGRQRSGTEAASVLEFPAFLSESLEVLCLNDNHLDTVPPSVCLLKSLSELYLGNNPGLRELPPELGQLGNLWQLDTEDLTISNVPAEIQKEGPKAMLSYLRAQLRKAEKCKLMKMIIVGPPRQGKSTLLEILQTGRAPQVVHGEATIRTTKWELQRPAGSRAKVESVEFNVWDIGGPASMATVNQCFFTDKALYVVVWNLALGEEAVANLQFWLLNIEAKAPNAVVLVVGTHLDLIEAKFRVERIATLRAYVLALCRSPSGSRATGFPDITFKHLHEISCKSLEGQEGLRQLIFHVTCSMKDVGSTIGCQRLAGRLIPRSYLSLQEAVLAEQQRRSRDDDVQYLTDRQLEQLVEQTPDNDIKDYEDLQSAISFLIETGTLLHFPDTSHGLRNLYFLDPIWLSECLQRIFNIKGSRSVAKNGVIRAEDLRMLLVGTGFTQQTEEQYFQFLAKFEIALPVANDSYLLPHLLPSKPGLDTHGMRHPTANTIQRVFKMSFVPVGFWQRFIARMLISLAEMDLQLFENKKNTKSRNRKVTIYSFTGNQRNRCSTFRVKRNQTIYWQEGLLVTFDGGYLSVESSDVNWKKKKSGGMKIVCQSEVRDFSAMAFITDHVNSLIDQWFPALTATESDGTPLMEQYVPCPVCETAWAQHTDPSEKSEDVQYFDMEDCVLTAIERDFISCPRHPDLPVPLQELVPELFMTDFPARLFLENSKLEHSEDEGSVLGQGGSGTVIYRARYQGQPVAVKRFHIKKFKNFANVPADTMLRHLRATDAMKNFSEFRQEASMLHALQHPCIVALIGISIHPLCFALELAPLSSLNTVLSENARDSSFIPLGHMLTQKIAYQIASGLAYLHKKNIIFCDLKSDNILVWSLDVKEHINIKLSDYGISRQSFHEGALGVEGTPGYQAPEIRPRIVYDEKVDMFSYGMVLYELLSGQRPALGHHQLQIAKKLSKGIRPVLGQPEEVQFRRLQALMMECWDTKPEKRPLALSVVSQMKDPTFATFMYELCCGKQTAFFSSQGQEYTVVFWDGKEESRNYTVVNTEKGLMEVQRMCCPGMKVSCQLQVQRSLWTATETSLSFSTFLQRA

SEQ ID NO: 3082 - protein, 1608 aa, Artificial Sequence
  Synthetic polypeptide
METLNGAGDTGGKPSTRGGDPAARSRRTEGIRAAYRRGDRGGARDLLEEACDQCASQLEKGQLLSIPAAYGDLEMVRYLLSKRLVELPTEPTDDNPAVVAAYFGHTAVVQELLEPLTPKQTEWEQTAPFSGTFPLSCHLLPGPCSPQRLLNWMLALACQRGHLGVVKLLVLTHGADPESYAVRKNEFPVIVRLPLYAAIKSGNEDIAIFLLRHGAYFCSYILLDSPDPSKHLLRKYFIEASPLPSSYPGKTALRVKWSHLRLPWVDLDWLIDISCQITELDLSANCLATLPSVIPWGLINLRKLNLSDNHLGELPGVQSSDEIICSRLLEIDISSNKLSHLPPGFLHLSKLQKLTASKNCLEKLFEEENATNWIGLRKLQELDISDNKLTELPALFLHSFKSLNSLNVSRNNLKVFPDPWACPLKCCKASRNALECLPDKMAVFWKNHLKDVDFSENALKEVPLGLFQLDALMFLRLQGNQLAALPPQEKWTCRQLKTLDLSRNQLGKNEDGLKTKRIAFFTTRGRQRSGTEAASVLEFPAFLSESLEVLCLNDNHLDTVPPSVCLLKSLSELYLGNNPGLRELPPELGQLGNLWQLDTEDLTISNVPAEIQKEGPKAMLSYLRAQLRKAEKCKLMKMIIVGPPRQGKSTLLEILQTGRAPQVVHGEATIRTTKWELQRPAGSRAKVESVEFNVWDIGGPASMATVNQCFFTDKALYVVVWNLALGEEAVANLQFWLLNIEAKAPNAVVLVVGTHLDLIEAKFRVERIATLRAYVLALCRSPSGSRATGFPDITFKHLHEISCKSLEGQEGLRQLIFHVTCSMKDVGSTIGCQRLAGRLIPRSYLSLQEAVLAEQQRRSRDDDVQYLTDRQLEQLVEQTPDNDIKDYEDLQSAISFLIETGTLLHFPDTSHGLRNLYFLDPIWLSECLQRIFNIKGSRSVAKNGVIRAEDLRMLLVGTGFTQQTEEQYFQFLAKFEIALPVANDSYLLPHLLPSKPGLDTHGMRHPTANTIQRVFKMSFVPVGFWQRFIARMLISLAEMDLQLFENKKNTKSRNRKVTIYSFTGNQRNRCSTFRVKRNQTIYWQEGLLVTFDGGYLSVESSDVNWKKKKSGGMKIVCQSEVRDFSAMAFITDHVNSLIDQWFPALTATESDGTPLMEQYVPCPVCETAWAQHTDPSEKSEDVQYFDMEDCVLTAIERDFISCPRHPDLPVPLQELVPELFMTDFPARLFLENSKLEHSEDEGSVLGQGGSGTVIYRARYQGQPVAVKRFHIKKFKNFANVPADTMLRHLRATDAMKNFSEFRQEASMLHALQHPCIVALIGISIHPLCFALELAPLSSLNTVLSENARDSSFIPLGHMLTQKIAYQIASGLAYLHKKNIIFCDLKSDNILVWSLDVKEHINIKLSDYGISRQSFHEGALGVEGTPGYQAPEIRPRIVYDEKVDMFSYGMVLYELLSGQRPALGHHQLQIAKKLSKGIRPVLGQPEEVQFRRLQALMMECWDTKPEKRPLALSVVSQMKDPTFATFMYELCCGKQTAFFSSQGQEYTVVFWDGKEESRNYTVVNTEKGLMEVQRMCCPGMKVSCQLQVQRSLWTATETSLSFSTFLQRA

SEQ ID NO: 3083 - protein, 42 aa, Artificial Sequence
  Synthetic polypeptide
ASASTRSASPWSSRRSAASTPCCPRTPEILPLYPWDTCSPKK

SEQ ID NO: 3084 - protein, 2020 aa, Artificial Sequence
  Synthetic polypeptide
MAGMSQRPPSMYWCVGPEESAVCPERAMETLNGAGDTGGKPSTRGGDPAARSRRTEGIRAAYRRGDRGGARDLLEEACDQCASQLEKGQLLSIPAAYGDLEMVRYLLSKRLVELPTEPTDDNPAVVAAYFGHTAVVQELLESLPGPCSPQRLLNWMLALACQRGHLGVVKLLVLTHGADPESYAVRKNEFPVIVRLPLYAAIKSGNEDIAIFLLRHGAYFCSYILLDSPDPSKHLLRKYFIEASPLPSSYPGKTALRVKWSHLRLPWVDLDWLIDISCQITELDLSANCLATLPSVIPWGLINLRKLNLSDNHLGELPGVQSSDEIICSRLLEIDISSNKLSHLPPGFLHLSKLQKLTASKNCLEKLFEEENATNWIGLRKLQELDISDNKLTELPALFLHSFKSLNSLNVSRNNLKVFPDPWACPLKCCKASRNALECLPDKMAVFWKNHLKDVDFSENALKEVPLGLFQLDALMFLRLQGNQLAALPPQEKWTCRQLKTLDLSRNQLGKNEDGLKTKRIAFFTTRGRQRSGTEAASVLEFPAFLSESLEVLCLNDNHLDTVPPSVCLLKSLSELYLGNNPGLRELPPELGQLGNLWQLDTEDLTISNVPAEIQKEGPKAMLSYLRAQLRKAEKCKLMKMIIVGPPRQGKSTLLEILQTGRAPQVVHGEATIRTTKWELQRPAGSRAKVESVEFNVWDIGGPASMATVNQCFFTDKALYVVVWNLALGEEAVANLQFWLLNIEAKAPNAVVLVVGTHLDLIEAKFRVERIATLRAYVLALCRSPSGSRATGFPDITFKHLHEISCKSLEGQEGLRQLIFHVTCSMKDVGSTIGCQRLAGRLIPRSYLSLQEAVLAEQQRRSRDDDVQYLTDRQLEQLVEQTPDNDIKDYEDLQSAISFLIETGTLLHFPDTSHGLRNLYFLDPIWLSECLQRIFNIKGSRSVAKNGVIRAEDLRMLLVGTGFTQQTEEQYFQFLAKFEIALPVANDSYLLPHLLPSKPGLDTHGMRHPTANTIQRVFKMSFVPVGFWQRFIARMLISLAEMDLQLFENKKNTKSRNRKVTIYSFTGNQRNRCSTFRVKRNQTIYWQEGLLVTFDGGYLSVESSDVNWKKKKSGGMKIVCQSEVRDFSAMAFITDHVNSLIDQWFPALTATESDGTPLMEQYVPCPVCETAWAQHTDPSEKSEDVQYFDMEDCVLTAIERDFISCPRHPDLPVPLQELVPELFMTDFPARLFLENSKLEHSEDEGSVLGQGGSGTVIYRARYQGQPVAVKRFHIKKFKNFANVPADTMLRHLRATDAMKNFSEFRQEASMLHALQHPCIVALIGISIHPLCFALELAPLSSLNTVLSENARDSSFIPLGHMLTQKIAYQIASGLAYLHKKNIIFCDLKSDNILVWSLDVKEHINIKLSDYGISRQSFHEGALGVEGTPGYQAPEIRPRIVYDEKVDMFSYGMVLYELLSGQRPALGHHQLQIAKKLSKGIRPVLGQPEEVQFRRLQALMMECWDTKPEKRPLALSVVSQMKDPTFATFMYELCCGKQTAFFSSQGQEYTVVFWDGKEESRNYTVVNTEKGLMEVQRMCCPGMKVSCQLQVQRSLWTATEDQKIYIYTLKGMCPLNTPQQALDTPAVVTCFLAVPVIKKNSYLVLAGLADGLVAVFPVVRGTPKDSCSYLCSHTANRSKFSIADEDARQNPYPVKAMEVVNSGSEVWYSNGPGLLVIDCASLEICRRLEPYMAPSMVTSVVCSSEGRGEEVVWCLDDKANSLVMYHSTTYQLCARYFCGVPSPLRDMFPVRPLDTEPPAASHTANPKVPEGDSIADVSIMYSEELGTQILIHQESLTDYCSMSSYSSSPPRQAARSPSSLPSSPASSSSVPFSTDCEDSDMLHTPGAASDRSEHDLTPMDGETFSQHLQAVKILAVRDLIWVPRRGGDVIVIGLEKDSGAQRGRVIAVLKARELTPHGVLVDAAVVAKDTVVCTFENENTEWCLAVWRGWGAREFDIFYQSYEELGRLEACTRKRSSLQHS

SEQ ID NO: 3085 - protein, 2017 aa, Artificial Sequence
  Synthetic polypeptide
METLNGAGDTGGKPSTRGGDPAARSRRTEGIRAAYRRGDRGGARDLLEEACDQCASQLEKGQLLSIPAAYGDLEMVRYLLSKRLVELPTEPTDDNPAVVAAYFGHTAVVQELLEPLTPKQTEWEQTAPFSGTFPLSCHLLPGPCSPQRLLNWMLALACQRGHLGVVKLLVLTHGADPESYAVRKNEFPVIVRLPLYAAIKSGNEDIAIFLLRHGAYFCSYILLDSPDPSKHLLRKYFIEASPLPSSYPGKTALRVKWSHLRLPWVDLDWLIDISCQITELDLSANCLATLPSVIPWGLINLRKLNLSDNHLGELPGVQSSDEIICSRLLEIDISSNKLSHLPPGFLHLSKLQKLTASKNCLEKLFEEENATNWIGLRKLQELDISDNKLTELPALFLHSFKSLNSLNVSRNNLKVFPDPWACPLKCCKASRNALECLPDKMAVFWKNHLKDVDFSENALKEVPLGLFQLDALMFLRLQGNQLAALPPQEKWTCRQLKTLDLSRNQLGKNEDGLKTKRIAFFTTRGRQRSGTEAASVLEFPAFLSESLEVLCLNDNHLDTVPPSVCLLKSLSELYLGNNPGLRELPPELGQLGNLWQLDTEDLTISNVPAEIQKEGPKAMLSYLRAQLRKAEKCKLMKMIIVGPPRQGKSTLLEILQTGRAPQVVHGEATIRTTKWELQRPAGSRAKVESVEFNVWDIGGPASMATVNQCFFTDKALYVVVWNLALGEEAVANLQFWLLNIEAKAPNAVVLVVGTHLDLIEAKFRVERIATLRAYVLALCRSPSGSRATGFPDITFKHLHEISCKSLEGQEGLRQLIFHVTCSMKDVGSTIGCQRLAGRLIPRSYLSLQEAVLAEQQRRSRDDDVQYLTDRQLEQLVEQTPDNDIKDYEDLQSAISFLIETGTLLHFPDTSHGLRNLYFLDPIWLSECLQRIFNIKGSRSVAKNGVIRAEDLRMLLVGTGFTQQTEEQYFQFLAKFEIALPVANDSYLLPHLLPSKPGLDTHGMRHPTANTIQRVFKMSFVPVGFWQRFIARMLISLAEMDLQLFENKKNTKSRNRKVTIYSFTGNQRNRCSTFRVKRNQTIYWQEGLLVTFDGGYLSVESSDVNWKKKKSGGMKIVCQSEVRDFSAMAFITDHVNSLIDQWFPALTATESDGTPLMEQYVPCPVCETAWAQHTDPSEKSEDVQYFDMEDCVLTAIERDFISCPRHPDLPVPLQELVPELFMTDFPARLFLENSKLEHSEDEGSVLGQGGSGTVIYRARYQGQPVAVKRFHIKKFKNFANVPADTMLRHLRATDAMKNFSEFRQEASMLHALQHPCIVALIGISIHPLCFALELAPLSSLNTVLSENARDSSFIPLGHMLTQKIAYQIASGLAYLHKKNIIFCDLKSDNILVWSLDVKEHINIKLSDYGISRQSFHEGALGVEGTPGYQAPEIRPRIVYDEKVDMFSYGMVLYELLSGQRPALGHHQLQIAKKLSKGIRPVLGQPEEVQFRRLQALMMECWDTKPEKRPLALSVVSQMKDPTFATFMYELCCGKQTAFFSSQGQEYTVVFWDGKEESRNYTVVNTEKGLMEVQRMCCPGMKVSCQLQVQRSLWTATEDQKIYIYTLKGMCPLNTPQQALDTPAVVTCFLAVPVIKKNSYLVLAGLADGLVAVFPVVRGTPKDSCSYLCSHTANRSKFSIADEDARQNPYPVKAMEVVNSGSEVWYSNGPGLLVIDCASLEICRRLEPYMAPSMVTSVVCSSEGRGEEVVWCLDDKANSLVMYHSTTYQLCARYFCGVPSPLRDMFPVRPLDTEPPAASHTANPKVPEGDSIADVSIMYSEELGTQILIHQESLTDYCSMSSYSSSPPRQAARSPSSLPSSPASSSSVPFSTDCEDSDMLHTPGAASDRSEHDLTPMDGETFSQHLQAVKILAVRDLIWVPRRGGDVIVIGLEKDSGAQRGRVIAVLKARELTPHGVLVDAAVVAKDTVVCTFENENTEWCLAVWRGWGAREFDIFYQSYEELGRLEACTRKRSSLQHS

SEQ ID NO: 3086 - protein, 2019 aa, Artificial Sequence
  Synthetic polypeptide
MAGMSQRPPSMYWCVGPEESAVCPERAMETLNGAGDTGGKPSTRGGDPAARSRRTEGIRAAYRRGDRGGARDLLEEACDQCASQLEKGQLLSIPAAYGDLEMVRYLLSKRLVELPTEPTDDNPAVVAAYFGHTAVVQELLESLPGPCSPQRLLNWMLALACQRGHLGVVKLLVLTHGADPESYAVRKNEFPVIVRLPLYAAIKSGNEDIAIFLLRHGAYFCSYILLDSPDPSKHLLRKYFIEASPLPSSYPGKTALRVKWSHLRLPWVDLDWLIDISCQITELDLSANCLATLPSVIPWGLINLRKLNLSDNHLGELPGVQSSDEIICSRLLEIDISSNKLSHLPPGFLHLSKLQKLTASKNCLEKLFEEENATNWIGLRKLQELDISDNKLTELPALFLHSFKSLNSLNVSRNNLKVFPDPWACPLKCCKASRNALECLPDKMAVFWKNHLKDVDFSENALKEVPLGLFQLDALMFLRLQGNQLAALPPQEKWTCRQLKTLDLSRNQLGKNEDGLKTKRIAFFTTRGRQRSGTEAASVLEFPAFLSESLEVLCLNDNHLDTVPPSVCLLKSLSELYLGNNPGLRELPPELGQLGNLWQLDTEDLTISNVPAEIQKEGPKAMLSYLRAQLRKAEKCKLMKMIIVGPPRQGKSTLLEILQTGRAPQVVHGEATIRTTKWELQRPAGSRAKVESVEFNVWDIGGPASMATVNQCFFTDKALYVVVWNLALGEEAVANLQFWLLNIEAKAPNAVVLVVGTHLDLIEAKFRVERIATLRAYVLALCRSPSGSRATGFPDITFKHLHEISCKSLEGQEGLRQLIFHVTCSMKDVGSTIGCQRLAGRLIPRSYLSLQEAVLAEQQRRSRDDDVQYLTDRQLEQLVEQTPDNDIKDYEDLQSAISFLIETGTLLHFPDTSHGLRNLYFLDPIWLSECLQRIFNIKGSRSVAKNGVIRAEDLRMLLVGTGFTQQTEEQYFQFLAKFEIALPVANDSYLLPHLLPSKPGLDTHGMRHPTANTIQRVFKMSFVPVGFWQRFIARMLISLAEMDLQLFENKKNTKSRNRKVTIYSFTGNQRNRCSTFRVKRNQTIYWQEGLLVTFDGGYLSVESSDVNWKKKKSGGMKIVCQSEVRDFSAMAFITDHVNSLIDQWFPALTATESDGTPLMEQYVPCPVCETAWAQHTDPSEKSEDVQYFDMEDCVLTAIERDFISCPRHPDLPVPLQELVPELFMTDFPARLFLENSKLEHSEDEGSVLGQGGSGTVIYRARYQGQPVAVKRFHIKKFKNFANVPADTMLRHLRATDAMKNFSEFRQEASMLHALQHPCIVALIGISIHPLCFALELAPLSSLNTVLSENARDSSFIPLGHMLTQKIAYQIASGLAYLHKKNIIFCDLKSDNILVWSLDVKEHINIKLSDYGISRQSFHEGALGVEGTPGYQAPEIRPRIVYDEKVDMFSYGMVLYELLSGQRPALGHHQLQIAKKLSKGIRPVLGQPEEVQFRRLQALMMECWDTKPEKRPLALSVVSQMKDPTFATFMYELCCGKQTAFFSSQGQEYTVVFWDGKEESRNYTVVNTEKGLMEVQRMCCPGMKVSCQLQVQRSLWTATEDQKIYIYTLKGMCPLNTPQQALDTPAVVTCFLAVPVIKKNSYLVLAGLADGLVAVFPVVRGTPKDSCSYLCSHTANRSKFSIADEDARQNPYPVKAMEVVNSGSEVWYSNGPGLLVIDCASLEICRRLEPYMAPSMVTSVVCSSEGRGEEVVWCLDDKANSLVMYHSTTYQLCARYFCGVPSPLRDMFPVRPLDTEPPAASHTANPKVPEGDSIADVSIMYSEELGTQILIHQESLTDYCSMSSYSSSPPRQAARSPSSLPSSPASSSSVPFSTDCEDSDMLHTPGAASDRSEHDLTPMDGETFSQHLQAVKILAVRDLIWVPRRGGDVIVIGLEKDSGAQRGRVIAVLKARELTPHGVLVDAAVVAKDTVVCTFENENTEWCLAVWRGWGAREFDIFYQSYEELGRLEACTRKRSLQHS

SEQ ID NO: 3087 - protein, 2016 aa, Artificial Sequence
  Synthetic polypeptide
METLNGAGDTGGKPSTRGGDPAARSRRTEGIRAAYRRGDRGGARDLLEEACDQCASQLEKGQLLSIPAAYGDLEMVRYLLSKRLVELPTEPTDDNPAVVAAYFGHTAVVQELLEPLTPKQTEWEQTAPFSGTFPLSCHLLPGPCSPQRLLNWMLALACQRGHLGVVKLLVLTHGADPESYAVRKNEFPVIVRLPLYAAIKSGNEDIAIFLLRHGAYFCSYILLDSPDPSKHLLRKYFIEASPLPSSYPGKTALRVKWSHLRLPWVDLDWLIDISCQITELDLSANCLATLPSVIPWGLINLRKLNLSDNHLGELPGVQSSDEIICSRLLEIDISSNKLSHLPPGFLHLSKLQKLTASKNCLEKLFEEENATNWIGLRKLQELDISDNKLTELPALFLHSFKSLNSLNVSRNNLKVFPDPWACPLKCCKASRNALECLPDKMAVFWKNHLKDVDFSENALKEVPLGLFQLDALMFLRLQGNQLAALPPQEKWTCRQLKTLDLSRNQLGKNEDGLKTKRIAFFTTRGRQRSGTEAASVLEFPAFLSESLEVLCLNDNHLDTVPPSVCLLKSLSELYLGNNPGLRELPPELGQLGNLWQLDTEDLTISNVPAEIQKEGPKAMLSYLRAQLRKAEKCKLMKMIIVGPPRQGKSTLLEILQTGRAPQVVHGEATIRTTKWELQRPAGSRAKVESVEFNVWDIGGPASMATVNQCFFTDKALYVVVWNLALGEEAVANLQFWLLNIEAKAPNAVVLVVGTHLDLIEAKFRVERIATLRAYVLALCRSPSGSRATGFPDITFKHLHEISCKSLEGQEGLRQLIFHVTCSMKDVGSTIGCQRLAGRLIPRSYLSLQEAVLAEQQRRSRDDDVQYLTDRQLEQLVEQTPDNDIKDYEDLQSAISFLIETGTLLHFPDTSHGLRNLYFLDPIWLSECLQRIFNIKGSRSVAKNGVIRAEDLRMLLVGTGFTQQTEEQYFQFLAKFEIALPVANDSYLLPHLLPSKPGLDTHGMRHPTANTIQRVFKMSFVPVGFWQRFIARMLISLAEMDLQLFENKKNTKSRNRKVTIYSFTGNQRNRCSTFRVKRNQTIYWQEGLLVTFDGGYLSVESSDVNWKKKKSGGMKIVCQSEVRDFSAMAFITDHVNSLIDQWFPALTATESDGTPLMEQYVPCPVCETAWAQHTDPSEKSEDVQYFDMEDCVLTAIERDFISCPRHPDLPVPLQELVPELFMTDFPARLFLENSKLEHSEDEGSVLGQGGSGTVIYRARYQGQPVAVKRFHIKKFKNFANVPADTMLRHLRATDAMKNFSEFRQEASMLHALQHPCIVALIGISIHPLCFALELAPLSSLNTVLSENARDSSFIPLGHMLTQKIAYQIASGLAYLHKKNIIFCDLKSDNILVWSLDVKEHINIKLSDYGISRQSFHEGALGVEGTPGYQAPEIRPRIVYDEKVDMFSYGMVLYELLSGQRPALGHHQLQIAKKLSKGIRPVLGQPEEVQFRRLQALMMECWDTKPEKRPLALSVVSQMKDPTFATFMYELCCGKQTAFFSSQGQEYTVVFWDGKEESRNYTVVNTEKGLMEVQRMCCPGMKVSCQLQVQRSLWTATEDQKIYIYTLKGMCPLNTPQQALDTPAVVTCFLAVPVIKKNSYLVLAGLADGLVAVFPVVRGTPKDSCSYLCSHTANRSKFSIADEDARQNPYPVKAMEVVNSGSEVWYSNGPGLLVIDCASLEICRRLEPYMAPSMVTSVVCSSEGRGEEVVWCLDDKANSLVMYHSTTYQLCARYFCGVPSPLRDMFPVRPLDTEPPAASHTANPKVPEGDSIADVSIMYSEELGTQILIHQESLTDYCSMSSYSSSPPRQAARSPSSLPSSPASSSSVPFSTDCEDSDMLHTPGAASDRSEHDLTPMDGETFSQHLQAVKILAVRDLIWVPRRGGDVIVIGLEKDSGAQRGRVIAVLKARELTPHGVLVDAAVVAKDTVVCTFENENTEWCLAVWRGWGAREFDIFYQSYEELGRLEACTRKRSLQHS

SEQ ID NO: 3088 - protein, 2021 aa, Artificial Sequence
  Synthetic polypeptide
MAGMSQRPPSMYWCVGPEESAVCPERAMETLNGAGDTGGKPSTRGGDPAARSRRTEGIRAAYRRGDRGGARDLLEEACDQCASQLEKGQLLSIPAAYGDLEMVRYLLSKRLVELPTEPTDDNPAVVAAYFGHTAVVQELLESLPGPCSPQRLLNWMLALACQRGHLGVVKLLVLTHGADPESYAVRKNEFPVIVRLPLYAAIKSGNEDIAIFLLRHGAYFCSYILLDSPDPSKHLLRKYFIEASPLPSSYPGKTALRVKWSHLRLPWVDLDWLIDISCQITELDLSANCLATLPSVIPWGLINLRKLNLSDNHLGELPGVQSSDEIICSRLLEIDISSNKLSHLPPGFLHLSKLQKLTASKNCLEKLFEEENATNWIGLRKLQELDISDNKLTELPALFLHSFKSLNSLNVSRNNLKVFPDPWACPLKCCKASRNALECLPDKMAVFWKNHLKDVDFSENALKEVPLGLFQLDALMFLRLQGNQLAALPPQEKWTCRQLKTLDLSRNQLGKNEDGLKTKRIAFFTTRGRQRSGTEAASVLEFPAFLSESLEVLCLNDNHLDTVPPSVCLLKSLSELYLGNNPGLRELPPELGQLGNLWQLDTEDLTISNVPAEIQKEGPKAMLSYLRAQLRKAEKCKLMKMIIVGPPRQGKSTLLEILQTGRAPQVVHGEATIRTTKWELQRPAGSRAKVESVEFNVWDIGGPASMATVNQCFFTDKALYVVVWNLALGEEAVANLQFWLLNIEAKAPNAVVLVVGTHLDLIEAKFRVERIATLRAYVLALCRSPSGSRATGFPDITFKHLHEISCKSLEGQEGLRQLIFHVTCSMKDVGSTIGCQRLAGRLIPRSYLSLQEAVLAEQQRRSRDDDVQYLTDRQLEQLVEQTPDNDIKDYEDLQSAISFLIETGTLLHFPDTSHGLRNLYFLDPIWLSECLQRIFNIKGSRSVAKNGVIRAEDLRMLLVGTGFTQQTEEQYFQFLAKFEIALPVANDSYLLPHLLPSKPGLDTHGMRHPTANTIQRVFKMSFVPVGFWQRFIARMLISLAEMDLQLFENKKNTKSRNRKVTIYSFTGNQRNRCSTFRVKRNQTIYWQEGLLVTFDGGYLSVESSDVNWKKKKSGGMKIVCQSEVRDFSAMAFITDHVNSLIDQWFPALTATESDGTPLMEQYVPCPVCETAWAQHTDPSEKSEDVQYFDMEDCVLTAIERDFISCPRHPDLPVPLQELVPELFMTDFPARLFLENSKLEHSEDEGSVLGQGGSGTVIYRARYQGQPVAVKRFHIKKFKNFANVPADTMLRHLRATDAMKNFSEFRQEASMLHALQHPCIVALIGISIHPLCFALELAPLSSLNTVLSENARDSSFIPLGHMLTQKIAYQIASGLAYLHKKNIIFCDLKSDNILVWSLDVKEHINIKLSDYGISRQSFHEGALGVEGTPGYQAPEIRPRIVYDEKVDMFSYGMVLYELLSGQRPALGHHQLQIAKKLSKGIRPVLGQPEEVQFRRLQALMMECWDTKPEKRPLALSVVSQMKDPTFATFMYELCCGKQTAFFSSQGQEYTVVFWDGKEESRNYTVVNTEKGLMEVQRMCCPGMKVSCQLQVQRSLWTATEDQKIYIYTLKGMCPLNTPQQALDTPAVVTCFLAVPVIKKNSYLVLAGLADGLVAVFPVVRGTPKDSCSYLCSHTANRSKFSIADEDARQNPYPVKAMEVVNSGSEVWYSNGPGLLVIDCASLEICRRLEPYMAPSMVTSVVCSSEGRGEEVVWCLDDKANSLVMYHSTTYQLCARYFCGVPSPLRDMFPVRPLDTEPPAASHTANPKVPEGDSIADVSIMYSEELGTQILIHQESLTDYCSMSSYSSSPPRQAARSPSSLPSSPASSSSVPFSTDCEDSDMLHTPGAASDRSEHDLTPMDGETFSQHLQAVKILAVRDLIWVPRRGGDVIVIGLEKDSGAQRGRVIAVLKARELTPHGVLVDAAVVAKDTVVCTFENENTEWCLAVWRGWGAREFDIFYQSYEELGRLEACTRKRRSSWLSG

SEQ ID NO: 3089 - protein, 2018 aa, Artificial Sequence
  Synthetic polypeptide
METLNGAGDTGGKPSTRGGDPAARSRRTEGIRAAYRRGDRGGARDLLEEACDQCASQLEKGQLLSIPAAYGDLEMVRYLLSKRLVELPTEPTDDNPAVVAAYFGHTAVVQELLEPLTPKQTEWEQTAPFSGTFPLSCHLLPGPCSPQRLLNWMLALACQRGHLGVVKLLVLTHGADPESYAVRKNEFPVIVRLPLYAAIKSGNEDIAIFLLRHGAYFCSYILLDSPDPSKHLLRKYFIEASPLPSSYPGKTALRVKWSHLRLPWVDLDWLIDISCQITELDLSANCLATLPSVIPWGLINLRKLNLSDNHLGELPGVQSSDEIICSRLLEIDISSNKLSHLPPGFLHLSKLQKLTASKNCLEKLFEEENATNWIGLRKLQELDISDNKLTELPALFLHSFKSLNSLNVSRNNLKVFPDPWACPLKCCKASRNALECLPDKMAVFWKNHLKDVDFSENALKEVPLGLFQLDALMFLRLQGNQLAALPPQEKWTCRQLKTLDLSRNQLGKNEDGLKTKRIAFFTTRGRQRSGTEAASVLEFPAFLSESLEVLCLNDNHLDTVPPSVCLLKSLSELYLGNNPGLRELPPELGQLGNLWQLDTEDLTISNVPAEIQKEGPKAMLSYLRAQLRKAEKCKLMKMIIVGPPRQGKSTLLEILQTGRAPQVVHGEATIRTTKWELQRPAGSRAKVESVEFNVWDIGGPASMATVNQCFFTDKALYVVVWNLALGEEAVANLQFWLLNIEAKAPNAVVLVVGTHLDLIEAKFRVERIATLRAYVLALCRSPSGSRATGFPDITFKHLHEISCKSLEGQEGLRQLIFHVTCSMKDVGSTIGCQRLAGRLIPRSYLSLQEAVLAEQQRRSRDDDVQYLTDRQLEQLVEQTPDNDIKDYEDLQSAISFLIETGTLLHFPDTSHGLRNLYFLDPIWLSECLQRIFNIKGSRSVAKNGVIRAEDLRMLLVGTGFTQQTEEQYFQFLAKFEIALPVANDSYLLPHLLPSKPGLDTHGMRHPTANTIQRVFKMSFVPVGFWQRFIARMLISLAEMDLQLFENKKNTKSRNRKVTIYSFTGNQRNRCSTFRVKRNQTIYWQEGLLVTFDGGYLSVESSDVNWKKKKSGGMKIVCQSEVRDFSAMAFITDHVNSLIDQWFPALTATESDGTPLMEQYVPCPVCETAWAQHTDPSEKSEDVQYFDMEDCVLTAIERDFISCPRHPDLPVPLQELVPELFMTDFPARLFLENSKLEHSEDEGSVLGQGGSGTVIYRARYQGQPVAVKRFHIKKFKNFANVPADTMLRHLRATDAMKNFSEFRQEASMLHALQHPCIVALIGISIHPLCFALELAPLSSLNTVLSENARDSSFIPLGHMLTQKIAYQIASGLAYLHKKNIIFCDLKSDNILVWSLDVKEHINIKLSDYGISRQSFHEGALGVEGTPGYQAPEIRPRIVYDEKVDMFSYGMVLYELLSGQRPALGHHQLQIAKKLSKGIRPVLGQPEEVQFRRLQALMMECWDTKPEKRPLALSVVSQMKDPTFATFMYELCCGKQTAFFSSQGQEYTVVFWDGKEESRNYTVVNTEKGLMEVQRMCCPGMKVSCQLQVQRSLWTATEDQKIYIYTLKGMCPLNTPQQALDTPAVVTCFLAVPVIKKNSYLVLAGLADGLVAVFPVVRGTPKDSCSYLCSHTANRSKFSIADEDARQNPYPVKAMEVVNSGSEVWYSNGPGLLVIDCASLEICRRLEPYMAPSMVTSVVCSSEGRGEEVVWCLDDKANSLVMYHSTTYQLCARYFCGVPSPLRDMFPVRPLDTEPPAASHTANPKVPEGDSIADVSIMYSEELGTQILIHQESLTDYCSMSSYSSSPPRQAARSPSSLPSSPASSSSVPFSTDCEDSDMLHTPGAASDRSEHDLTPMDGETFSQHLQAVKILAVRDLIWVPRRGGDVIVIGLEKDSGAQRGRVIAVLKARELTPHGVLVDAAVVAKDTVVCTFENENTEWCLAVWRGWGAREFDIFYQSYEELGRLEACTRKRRSSWLSG

SEQ ID NO: 3090 - protein, 60 aa, Artificial Sequence
  Synthetic polypeptide
MVKLTAELIEQAAQYTNAVRDRELDLRDSKLHGTGDLRLVQRFLSSILNSGKSCVTRHRC

SEQ ID NO: 3091 - protein, 553 aa, Artificial Sequence
  Synthetic polypeptide
MAAEALAAEAVASRLERQEEDIRWLWSEVERLRDEQLNAPYSCQAEGPCLTREVAQLRAENCDLRHRLCSLRLCLAEERSRQATLESAELEAAQEAGAQPPPSQSQDKDMKKKKMKESEADSEVKHQPIFIKERLKLFEILKKDHQLLLAIYGKKGDTSNIITVRVADGQTVQGEVWKTTPYQVAAEISQELAESTVIAKVNGELWDLDRPLEGDSSLELLTFDNEEAQAVYWHSSAHILGEAMELYYGGHLCYGPPIENGFYYDMFIEDRAVSSTELSALENICKAIIKEKQPFERLEVSKEILLEMFKYNKFKCRILNEKVNTATTTVYRCGPLIDLCKGPHVRHTGKIKTIKIFKNSSTYWEGNPEMETLQRIYGISFPDNKMMRDWEKFQEEAKNRDHRKIGKEQELFFFHDLSPGSCFFLPRGAFIYNTLTDFIREEYHKRDFTEVLSPNMYNSKLWEASGHWQHYSENMFTFEIEKDTFALKPMNCPGHCLMFAHRPRSWREMPIRFADFGVLHRNELSGTLSGLTRVRRFQQDDAHIFCTVEQQCQ

SEQ ID NO: 3092 - protein, 107 aa, Artificial Sequence
  Synthetic polypeptide
MGTAAAAAAAAAAAAAGEGARSPSPAAVSLGLGVAVVSSLVNGSTFVLQKKGIVRAKRRGTSYLTDIVWWAGTIAMAVGQIGNFLAYTAVPTVLVTPLGALGVPFGY

SEQ ID NO: 3093 - protein, 32 aa, Artificial Sequence
  Synthetic polypeptide
MAVGQIGNFLAYTAVPTVLVTPLGALGVPFGY

SEQ ID NO: 3094 - protein, 70 aa, Artificial Sequence
  Synthetic polypeptide
VEPGERVHVRATEEGHRACQAARYFLFNRHCVVGWHNRNGCWPDWKLPGLHGGPHGPGNPPGRPWSTVRV

SEQ ID NO: 3095 - protein, 55 aa, Artificial Sequence
  Synthetic polypeptide
IVRAKRRGTSYLTDIVWWAGTIAMAVGQIGNFLAYTAVPTVLVTPLGALGVPFGY

SEQ ID NO: 3096 - protein, 321 aa, Artificial Sequence
  Synthetic polypeptide
MEEPAAPSEAHEAAGAQAGAEAAREGVSGPDLPVCEPSGESAAPDSALPHAARGWAPFPVAPVPAHLRRGGLRPAPASGGGAWPSPLPSRSSGIWTKQIICRYYIHGQCKEGENCRYSHDLSGRKMATEGGVSPPGASAGGGPSTAAHIEPPTQEVAEAPPAASSLSLPVIGSAAERGFFEAERDNADRGAAGGAGVESWADAIEFVPGQPYRGRWVASAPEAPLQSSETERKQMAVGSGLRFCYYASRGVCFRGESCMYLHGDICDMCGLQTLHPMDAAQREEHMRACIEAHEKDMELSFAVQRGMDKVHSCKELAWSLR

SEQ ID NO: 3097 - protein, 401 aa, Artificial Sequence
  Synthetic polypeptide
MEEPAAPSEAHEAAGAQAGAEAAREGVSGPDLPVCEPSGESAAPDSALPHAARGWAPFPVAPVPAHLRRGGLRPAPASGGGAWPSPLPSRSSGIWTKQIICRYYIHGQCKEGENCRYSHDLSGRKMATEGGVSPPGASAGGGPSTAAHIEPPTQEVAEAPPAASSLSLPVIGSAAERGFFEAERDNADRGAAGGAGVESWADAIEFVPGQPYRGRWVASAPEAPLQSSETERKQMAVGSGLRFCYYASRGVCFRGESCMYLHGDICDMCGLQTLHPMDAAQREEHMRACIEAHEKDMELSFAVQRGMDKVCGICMEVVYEKANPNDRRFGILSNCNHSFCIRCIRRWRSARQFENRIVKSCPQCRVTSELVIPSEFWVEEEEEKQKLIQQYKEAMSNKACR

SEQ ID NO: 3098 - protein, 161 aa, Artificial Sequence
  Synthetic polypeptide
MEEPAAPSEAHEAAGAQAGAEAAREGVSGPDLPVCEPSGESAAPDSALPHAARGWAPFPVAPVPAHLRRGGLRPAPASGGGAWPSPLPSRSSGIWTKQIICRCIRRWRSARQFENRIVKSCPQCRVTSELVIPSEFWVEEEEEKQKLIQQYKEAMSNKACR

SEQ ID NO: 3099 - protein, 26 aa, Artificial Sequence
  Synthetic polypeptide
MERASPSTFGGQGRRITGAWEFKLGY

SEQ ID NO: 3100 - protein, 785 aa, Artificial Sequence
  Synthetic polypeptide
MATACKRSGEPQSDDIEASRMKRAAAKHLIERYYHQLTEGCGNEACTNEFCASCPTFLRMDNNAAAIKALELYKINAKLCDPHPSKKGASSAYLENSKGAPNNSCSEIKMNKKGARIDFKDVTYLTEEKVYEILELCREREDYSPLIRVIGRVFSSAEALVQSFRKVKQHTKEELKSLQAKDEDKDEDEKEKAACSAAAMEEDSEASSSRIGDSSQGDNNLQKLGPDDVSVDIDAIRRVYTRLLSNEKIETAFLNALVYLSPNVECDLTYHNVYSRDPNYLNLFIIVMENRNLHSPEYLEMALPLFCKAMSKLPLAAQGKLIRLWSKYNADQIRRMMETFQQLITYKVISNEFNSRNLVNDDDAIVAASKCLKMVYYANVVGGEVDTNHNEEDDEEPIPESSELTLQELLGEERRNKKGPRVDPLETELGVKTLDCRKPLIPFEEFINEPLNEVLEMDKDYTFFKVETENKFSFMTCPFILNAVTKNLGLYYDNRIRMYSERRITVLYSLVQGQQLNPYLRLKVRRDHIIDDALVRLEMIAMENPADLKKQLYVEFEGEQGVDEGGVSKEFFQLVVEEIFNPDIGMFTYDESTKLFWFNPSSFETEGQFTLIGIVLGLAIYNNCILDVHFPMVVYRKLMGKKGTFRDLGDSHPVLYQSLKDLLEYEGNVEDDMMITFQISQTDLFGNPMMYDLKENGDKIPITNENRKEFVNLYSDYILNKSVEKQFKAFRRGFHMVTNESPLKYLFRPEEIELLICGSRNLDFQALEETTEYDGGYTRDSVLIS

SEQ ID NO: 3101 - protein, 765 aa, Artificial Sequence
  Synthetic polypeptide
MKRAAAKHLIERYYHQLTEGCGNEACTNEFCASCPTFLRMDNNAAAIKALELYKINAKLCDPHPSKKGASSAYLENSKGAPNNSCSEIKMNKKGARIDFKDVTYLTEEKVYEILELCREREDYSPLIRVIGRVFSSAEALVQSFRKVKQHTKEELKSLQAKDEDKDEDEKEKAACSAAAMEEDSEASSSRIGDSSQGDNNLQKLGPDDVSVDIDAIRRVYTRLLSNEKIETAFLNALVYLSPNVECDLTYHNVYSRDPNYLNLFIIVMENRNLHSPEYLEMALPLFCKAMSKLPLAAQGKLIRLWSKYNADQIRRMMETFQQLITYKVISNEFNSRNLVNDDDAIVAASKCLKMVYYANVVGGEVDTNHNEEDDEEPIPESSELTLQELLGEERRNKKGPRVDPLETELGVKTLDCRKPLIPFEEFINEPLNEVLEMDKDYTFFKVETENKFSFMTCPFILNAVTKNLGLYYDNRIRMYSERRITVLYSLVQGQQLNPYLRLKVRRDHIIDDALVRLEMIAMENPADLKKQLYVEFEGEQGVDEGGVSKEFFQLVVEEIFNPDIGMFTYDESTKLFWFNPSSFETEGQFTLIGIVLGLAIYNNCILDVHFPMVVYRKLMGKKGTFRDLGDSHPVLYQSLKDLLEYEGNVEDDMMITFQISQTDLFGNPMMYDLKENGDKIPITNENRKEFVNLYSDYILNKSVEKQFKAFRRGFHMVTNESPLKYLFRPEEIELLICGSRNLDFQALEETTEYDGGYTRDSVLIS

SEQ ID NO: 3102 - protein, 788 aa, Artificial Sequence
  Synthetic polypeptide
MEKLHQCYWKSGEPQSDDIEASRMKRAAAKHLIERYYHQLTEGCGNEACTNEFCASCPTFLRMDNNAAAIKALELYKINAKLCDPHPSKKGASSAYLENSKGAPNNSCSEIKMNKKGARIDFKDVTYLTEEKVYEILELCREREDYSPLIRVIGRVFSSAEALVQSFRKVKQHTKEELKSLQAKDEDKDEDEKEKAACSAAAMEEDSEASSSRIGDSSQGDNNLQKLGPDDVSVDIDAIRRVYTRLLSNEKIETAFLNALVYLSPNVECDLTYHNVYSRDPNYLNLFIIVMENRNLHSPEYLEMALPLFCKAMSKLPLAAQGKLIRLWSKYNADQIRRMMETFQQLITYKVISNEFNSRNLVNDDDAIVAASKCLKMVYYANVVGGEVDTNHNEEDDEEPIPESSELTLQELLGEERRNKKGPRVDPLETELGVKTLDCRKPLIPFEEFINEPLNEVLEMDKDYTFFKVETENKFSFMTCPFILNAVTKNLGLYYDNRIRMYSERRITVLYSLVQGQQLNPYLRLKVRRDHIIDDALVRLEMIAMENPADLKKQLYVEFEGEQGVDEGGVSKEFFQLVVEEIFNPDIGMFTYDESTKLFWFNPSSFETEGQFTLIGIVLGLAIYNNCILDVHFPMVVYRKLMGKKGTFRDLGDSHPVLYQSLKDLLEYEGNVEDDMMITFQISQTDLFGNPMMYDLKENGDKIPITNENRKEFVNLYSDYILNKSVEKQFKAFRRGFHMVTNESPLKYLFRPEEIELLICGSRNLDFQALEETTEYDGGYTRDSVLIS

SEQ ID NO: 3103 - protein, 4 aa, Artificial Sequence
  Synthetic polypeptide
VSLL

SEQ ID NO: 3104 - protein, 623 aa, Artificial Sequence
  Synthetic polypeptide
MATACKRSGEPQSDDIEASRMKRAAAKHLIERYYHQLTEGCGNEACTNEFCASCPTFLRMDNNAAAIKALELYKINAKLCDPHPSKKGASSAYLENSKGAPNNSCSEIKMNKKGARIDFKDVTYLTEEKVYEILELCREREDYSPLIRVIGRVFSSAEALVQSFRKVKQHTKEELKSLQAKDEDKDEDEKEKAACSAAAMEEDSEASSSRIGDSSQGDNNLQKLGPDDVSVDIDAIRRVYTRLLSNEKIETAFLNALVYLSPNVECDLTYHNVYSRDPNYLNLFIIVMENRNLHSPEYLEMALPLFCKAMSKLPLAAQGKLIRLWSKYNADQIRRMMETFQQLITYKVISNEFNSRNLVNDDDAIVAASKCLKMVYYANVVGGEVDTNHNEEDDEEPIPESSELTLQELLGEERRNKKGPRVDPLETELGVKTLDCRKPLIPFEEFINEPLNEVLEMDKDYTFFKVETENKFSFMTCPFILNAVTKNLGLYYDNRIRMYSERRITVLYSLVQGQQLNPYLRLKVRRDHIIDDALVRLEMIAMENPADLKKQLYVEFEGEQGVDEGGVSKEFFQLVVEEIFNPDIGQVWWLTPVIPALWEAEAGRSRGQEVETILANMVKPLLY

SEQ ID NO: 3105 - protein, 603 aa, Artificial Sequence
  Synthetic polypeptide
MKRAAAKHLIERYYHQLTEGCGNEACTNEFCASCPTFLRMDNNAAAIKALELYKINAKLCDPHPSKKGASSAYLENSKGAPNNSCSEIKMNKKGARIDFKDVTYLTEEKVYEILELCREREDYSPLIRVIGRVFSSAEALVQSFRKVKQHTKEELKSLQAKDEDKDEDEKEKAACSAAAMEEDSEASSSRIGDSSQGDNNLQKLGPDDVSVDIDAIRRVYTRLLSNEKIETAFLNALVYLSPNVECDLTYHNVYSRDPNYLNLFIIVMENRNLHSPEYLEMALPLFCKAMSKLPLAAQGKLIRLWSKYNADQIRRMMETFQQLITYKVISNEFNSRNLVNDDDAIVAASKCLKMVYYANVVGGEVDTNHNEEDDEEPIPESSELTLQELLGEERRNKKGPRVDPLETELGVKTLDCRKPLIPFEEFINEPLNEVLEMDKDYTFFKVETENKFSFMTCPFILNAVTKNLGLYYDNRIRMYSERRITVLYSLVQGQQLNPYLRLKVRRDHIIDDALVRLEMIAMENPADLKKQLYVEFEGEQGVDEGGVSKEFFQLVVEEIFNPDIGQVWWLTPVIPALWEAEAGRSRGQEVETILANMVKPLLY

SEQ ID NO: 3106 - protein, 626 aa, Artificial Sequence
  Synthetic polypeptide
MEKLHQCYWKSGEPQSDDIEASRMKRAAAKHLIERYYHQLTEGCGNEACTNEFCASCPTFLRMDNNAAAIKALELYKINAKLCDPHPSKKGASSAYLENSKGAPNNSCSEIKMNKKGARIDFKDVTYLTEEKVYEILELCREREDYSPLIRVIGRVFSSAEALVQSFRKVKQHTKEELKSLQAKDEDKDEDEKEKAACSAAAMEEDSEASSSRIGDSSQGDNNLQKLGPDDVSVDIDAIRRVYTRLLSNEKIETAFLNALVYLSPNVECDLTYHNVYSRDPNYLNLFIIVMENRNLHSPEYLEMALPLFCKAMSKLPLAAQGKLIRLWSKYNADQIRRMMETFQQLITYKVISNEFNSRNLVNDDDAIVAASKCLKMVYYANVVGGEVDTNHNEEDDEEPIPESSELTLQELLGEERRNKKGPRVDPLETELGVKTLDCRKPLIPFEEFINEPLNEVLEMDKDYTFFKVETENKFSFMTCPFILNAVTKNLGLYYDNRIRMYSERRITVLYSLVQGQQLNPYLRLKVRRDHIIDDALVRLEMIAMENPADLKKQLYVEFEGEQGVDEGGVSKEFFQLVVEEIFNPDIGQVWWLTPVIPALWEAEAGRSRGQEVETILANMVKPLLY

SEQ ID NO: 3107 - protein, 159 aa, Artificial Sequence
  Synthetic polypeptide
MATACKRSGEPQSDDIEASRMKRAAAKHLIERYYHQLTEGCGNEACTNEFCASCPTFLRMDNNAAAIKALELYKINAKLCDPHPSKKGASSAYLENSKGAPNNSCSEIKMNKKGARIDFKGQAQWLTPVIPALWEAEAGESRRQEIETNLANVVKPPLY

SEQ ID NO: 3108 - protein, 139 aa, Artificial Sequence
  Synthetic polypeptide
MKRAAAKHLIERYYHQLTEGCGNEACTNEFCASCPTFLRMDNNAAAIKALELYKINAKLCDPHPSKKGASSAYLENSKGAPNNSCSEIKMNKKGARIDFKGQAQWLTPVIPALWEAEAGESRRQEIETNLANVVKPPLY

SEQ ID NO: 3109 - protein, 162 aa, Artificial Sequence
  Synthetic polypeptide
MEKLHQCYWKSGEPQSDDIEASRMKRAAAKHLIERYYHQLTEGCGNEACTNEFCASCPTFLRMDNNAAAIKALELYKINAKLCDPHPSKKGASSAYLENSKGAPNNSCSEIKMNKKGARIDFKGQAQWLTPVIPALWEAEAGESRRQEIETNLANVVKPPLY

SEQ ID NO: 3110 - protein, 455 aa, Artificial Sequence
  Synthetic polypeptide
MEREPAGTEEPGPPGRRRRREGRTRTVRSNLLPPPGAEDPAAGAAKGERRRRRGCAQHLADNRLKTTKYTLLSFLPKNLFEQFHRPANVYFVFIALLNFVPAVNAFQPGLALAPVLFILAITAFRDLWEDYSRHRSDHKINHLGCLVFSREEKKYVNRFWKEIHVGDFVRLRCNEIFPADILLLSSSDPDGLCHIETANLDGETNLKRRQVVRGFSELVSEFNPLTFTSVIECEKPNNDLSRFRGCIIHDNGKKAGLYKENLLLRGCTLRNTDAVVGIVIYAGHETKALLNNSGPRYKRSKLERQMNCDVLWCVLLLVCMSLFSAVGHGLWIWRYQEKKSLFYVPKSDGSSLSPVTAAVYSFLTMIIVLQVLIPISLYVSIEIVKACQVYFINQDMQLYDEETDSQLQCRALNITEDLGQIQYIFSDKTGTLTENKMVFRRCTVSGVEYSHDANE

SEQ ID NO: 3111 - protein, 180 aa, Artificial Sequence
  Synthetic polypeptide
MEREPAGTEEPGPPGRRRRREGRTRTVRSNLLPPPGAEDPAAGAAKGERRRRRGCAQHLADNRLKTTKYTLLSFLPKNLFEQFHRPANVYFVFIALLNFVPAVNAFQPGLALAPVLFILAITAFRDLWEDYSRHRSDHKINHLGCLVFSRMQDEHYKMLMKNIKEHLNKWRDFPCSWIGK

SEQ ID NO: 3112 - protein, 161 aa, Artificial Sequence
  Synthetic polypeptide
MPPAGGPRAPRPAALPRSLSRLRECPGRSRIVLALGATQMALGCLIVAVSFAALALTTSARVRHSCPFWAGFSVLLSGLIGVVSWKRPLSLVITFFMLLSAVCVMLNLAGSILSCQNAQLVNSLEGCQLVQWLTPVIPALWEAKADRLLEVKSSRPAWTTW

SEQ ID NO: 3113 - protein, 65 aa, Artificial Sequence
  Synthetic polypeptide
MLLSAVCVMLNLAGSILSCQNAQLVNSLEGCQLVQWLTPVIPALWEAKADRLLEVKSSRPAWTTW

SEQ ID NO: 3114 - protein, 514 aa, Artificial Sequence
  Synthetic polypeptide
MSARAAAAKSTAMEETAIWEQHTVTLHRAPGFGFGIAISGGRDNPHFQSGETSIVISDVLKGGPAEGQLQENDRVAMVNGVSMDNVEHAFAVQQLRKSGKNAKITIRRKKKVQIPVSRPDPEPVSDNEEDSYDEEIHDPRSGRSGVVNRRSEKIWPRDRSASRERSLSPRSDRRSVASSQPAKPTKVTLVKSRKNEEYGLRLASHIFVKEISQDSLAARDGNIQEGDVVLKINGTVTENMSLTDAKTLIERSKGKLKMVVQRDERATLLNVPDLSDSIHSANASERDDISEIQSLASDHSGRSHDRPPRRSRSRSPDQRSEPSDHSRHSPQQPSNGSLRSRDEERISKPGAVSTPVKHADDHTPKTVEEVTVERNEKQTPSLPEPKPVYAQVGQPDVDLPVSPSDGVLPNSTHEDGILRPSMKLVKFRKGDSVGLRLAGGNDVGIFVAGVLEDSPAAKEGLEEGDQILRVNNVDFTNIIREEAVLFLLDLPKGEEVTILAQKKKDVSSSAKWKY

SEQ ID NO: 3115 - protein, 518 aa, Artificial Sequence
  Synthetic polypeptide
MERNTFSMDCHSKSTAMEETAIWEQHTVTLHRAPGFGFGIAISGGRDNPHFQSGETSIVISDVLKGGPAEGQLQENDRVAMVNGVSMDNVEHAFAVQQLRKSGKNAKITIRRKKKVQIPVSRPDPEPVSDNEEDSYDEEIHDPRSGRSGVVNRRSEKIWPRDRSASRERSLSPRSDRRSVASSQPAKPTKVTLVKSRKNEEYGLRLASHIFVKEISQDSLAARDGNIQEGDVVLKINGTVTENMSLTDAKTLIERSKGKLKMVVQRDERATLLNVPDLSDSIHSANASERDDISEIQSLASDHSGRSHDRPPRRSRSRSPDQRSEPSDHSRHSPQQPSNGSLRSRDEERISKPGAVSTPVKHADDHTPKTVEEVTVERNEKQTPSLPEPKPVYAQVGQPDVDLPVSPSDGVLPNSTHEDGILRPSMKLVKFRKGDSVGLRLAGGNDVGIFVAGVLEDSPAAKEGLEEGDQILRVNNVDFTNIIREEAVLFLLDLPKGEEVTILAQKKKDVSSSAKWKY

SEQ ID NO: 3116 - protein, 47 aa, Artificial Sequence
  Synthetic polypeptide
MSARAAAAKSTAMEETAIWEQHTVTLHRKWGSDSVTFENLGFHKFKM

SEQ ID NO: 3117 - protein, 51 aa, Artificial Sequence
  Synthetic polypeptide
MERNTFSMDCHSKSTAMEETAIWEQHTVTLHRKWGSDSVTFENLGFHKFKM

SEQ ID NO: 3118 - protein, 140 aa, Artificial Sequence
  Synthetic polypeptide
MRRLEGLCLRRRRRRRGPARERSGDKMKYQKYLTVLQMAIGVTPSNRGSLLPLKRKLWVTPSSENPNGATSSVSQGKPSLRRIKGRLHRSKSLDSMDFCELTSTAMEETAIWEQHTVTLHRKWGSDSVTFENLGFHKFKM

SEQ ID NO: 3119 - protein, 431 aa, Artificial Sequence
  Synthetic polypeptide
MAEETQHNKLAAAKKKLKEYWQKNRPRVPAGVNRNRKTNGSIPETATSGGCQPPGDSATGFHREGPTSSATLKDLESPCQERAVVLDSTSVKISRLKNTIKSLKQQKKQVEHQLEEEKKANNERQKAERVLEVQIQTLIIQKEELNTDLYHMERSLRYFEEESKDLAVRLQHSLQCKGELERALSAVIATEKKKANQLSSCSKAHTEWELEQSLQDQALLKAQLTQLKESFQQLQLERDECAEHIEGERARWHQRMSKMSQEICTLKKEKQDMRWVEQLEWSLSKLKNQTAEPLPPEPPAVPSEVELQHLRKELERVAGELQSQVKNNQHISLLNRRQEERIREQEERLRKQEERLQEQHEKLRQLAKPQSVFEELNNENKSTLQLEQQVKELQEKLGEVQWLMPIIPALWEAEAEESLEVGSLRSTWPMW

SEQ ID NO: 3120 - protein, 272 aa, Artificial Sequence
  Synthetic polypeptide
MAEETQHNKLAAAKKKLKEYWQKNRPRVPAGVNRNRKTNGSIPETATSGGCQPPGDSATGFHREGPTSSATLKDLESPCQERAVVLDSTSVKISRLKNTIKSLICTLKKEKQDMRWVEQLEWSLSKLKNQTAEPLPPEPPAVPSEVELQHLRKELERVAGELQSQVKNNQHISLLNRRQEERIREQEERLRKQEERLQEQHEKLRQLAKPQSVFEELNNENKSTLQLEQQVKELQEKLGEVQWLMPIIPALWEAEAEESLEVGSLRSTWPMW

SEQ ID NO: 3121 - protein, 112 aa, Artificial Sequence
  Synthetic polypeptide
MAEETQHNKLAAAKKKLKEYWQKNRPRVPAGVNRNRKTNGSIPETATSGGCQPPGDSATGFHREGPTSSATLKDLESPCQERAVVLDSTSVKISRLKNTIKSLNRTWPIRAQ

SEQ ID NO: 3122 - protein, 64 aa, Artificial Sequence
  Synthetic polypeptide
MAEETQHNKLAAAKKKLKEYWQKNRPRVPAGVNRNRKTNGSIPETATSGGCQPPGDYMACCKHS

SEQ ID NO: 3123 - protein, 112 aa, Artificial Sequence; identical to SEQ ID NO: 3121
  Synthetic polypeptide

SEQ ID NO: 3124 - protein, 541 aa, Artificial Sequence
  Synthetic polypeptide
MFSLKPPKPTFRSYLLPPPQTDDKINSEPKIKKLEPVLLPGEIVVNEVNFVRKCIATDTSQYDLWGKLICSNFKISFITDDPMPLQKFHYRNLLLGEHDVPLTCIEQIVTVNDHKRKQKVLGPNQKLKFNPTELIIYCKDFRIVRFRFDESGPESAKKVCLAIAHYSQPTDLQLLFAFEYVGKKYHNSANKINGIPSGDGGGGGGGGNGAGGGSSQKTPLFETYSDWDREIKRTGASGWRVCSINEGYMISTCLPEYIVVPSSLADQDLKIFSHSFVGRRMPLWCWSHSNGSALVRMALIKDVLQQRKIDQRICNAITKSHPQRSDVYKSDLDKTLPNIQEVQAAFVKLKQLCVNEPFEETEEKWLSSLENTRWLEYVRAFLKHSAELVYMLESKHLSVVLQEEEGRDLSCCVASLVQVMLDPYFRTITGFQSLIQKEWVMAGYQFLDRCNHLKRSEKESPLFLLFLDATWQLLEQYPAAFEFSETYLAVLYDSTRISLFGTFLFNSPHQRVKQSTLTPGQHGFKLHTSTYMWIFFCFCHP

SEQ ID NO: 3125 - protein, 293 aa, Artificial Sequence
  Synthetic polypeptide
MISTCLPEYIVVPSSLADQDLKIFSHSFVGRRMPLWCWSHSNGSALVRMALIKDVLQQRKIDQRICNAITKSHPQRSDVYKSDLDKTLPNIQEVQAAFVKLKQLCVNEPFEETEEKWLSSLENTRWLEYVRAFLKHSAELVYMLESKHLSVVLQEEEGRDLSCCVASLVQVMLDPYFRTITGFQSLIQKEWVMAGYQFLDRCNHLKRSEKESPLFLLFLDATWQLLEQYPAAFEFSETYLAVLYDSTRISLFGTFLFNSPHQRVKQSTLTPGQHGFKLHTSTYMWIFFCFCHP

SEQ ID NO: 3126 - protein, 459 aa, Artificial Sequence
  Synthetic polypeptide
MPLQKFHYRNLLLGEHDVPLTCIEQIVTVNDHKRKQKVLGPNQKLKFNPTELIIYCKDFRIVRFRFDESGPESAKKVCLAIAHYSQPTDLQLLFAFEYVGKKYHNSANKINGIPSGDGGGGGGGGNGAGGGSSQKTPLFETYSDWDREIKRTGASGWRVCSINEGYMISTCLPEYIVVPSSLADQDLKIFSHSFVGRRMPLWCWSHSNGSALVRMALIKDVLQQRKIDQRICNAITKSHPQRSDVYKSDLDKTLPNIQEVQAAFVKLKQLCVNEPFEETEEKWLSSLENTRWLEYVRAFLKHSAELVYMLESKHLSVVLQEEEGRDLSCCVASLVQVMLDPYFRTITGFQSLIQKEWVMAGYQFLDRCNHLKRSEKESPLFLLFLDATWQLLEQYPAAFEFSETYLAVLYDSTRISLFGTFLFNSPHQRVKQSTLTPGQHGFKLHTSTYMWIFFCFCHP

SEQ ID NO: 3127 - protein, 306 aa, Artificial Sequence
  Synthetic polypeptide
ASGWRVCSINEGYMISTCLPEYIVVPSSLADQDLKIFSHSFVGRRMPLWCWSHSNGSALVRMALIKDVLQQRKIDQRICNAITKSHPQRSDVYKSDLDKTLPNIQEVQAAFVKLKQLCVNEPFEETEEKWLSSLENTRWLEYVRAFLKHSAELVYMLESKHLSVVLQEEEGRDLSCCVASLVQVMLDPYFRTITGFQSLIQKEWVMAGYQFLDRCNHLKRSEKESPLFLLFLDATWQLLEQYPAAFEFSETYLAVLYDSTRISLFGTFLFNSPHQRVKQSTLTPGQHGFKLHTSTYMWIFFCFCHP

SEQ ID NO: 3128 - protein, 1200 aa, Artificial Sequence
  Synthetic polypeptide
MKDSNRCCCGQFTNQHIPPLPSATPSKNEEESKQVETQPEKWSVAKHTQSYPTDSYGVLEFQGGGYSNKAMYIRVSYDTKPDSLLHLMVKDWQLELPKLLISVHGGLQNFEMQPKLKQVFGKGLIKAAMTTGAWIFTGGVSTGVISHVGDALKDHSSKSRGRVCAIGIAPWGIVENKEDLVGKDVTRVYQTMSNPLSKLSVLNNSHTHFILADNGTLGKYGAEVKLRRLLEKHISLQKINTRLGQGVPLVGLVVEGGPNVVSIVLEYLQEEPPIPVVICDGSGRASDILSFAHKYCEEGGIINESLREQLLVTIQKTFNYNKAQSHQLFAIIMECMKKKELVTVFRMGSEGQQDIEMAILTALLKGTNVSAPDQLSLALAWNRVDIARSQIFVFGPHWPPLGSLAPPTDSKATEKEKKPPMATTKGGRGKGKGKKKGKVKEEVEEETDPRKIELLNWVNALEQAMLDALVLDRVDFVKLLIENGVNMQHFLTIPRLEELYNTRLGPPNTLHLLVRDVKKSNLPPDYHISLIDIGLVLEYLMGGAYRCNYTRKNFRTLYNNLFGPKRPKALKLLGMEDDEPPAKGKKKKKKKKEEEIDIDVDDPAVSRFQYPFHELMVWAVLMKRQKMAVFLWQRGEESMAKALVACKLYKAMAHESSESDLVDDISQDLDNNSKDFGQLALELLDQSYKHDEQIAMKLLTYELKNWSNSTCLKLAVAAKHRDFIAHTCSQMLLTDMWMGRLRMRKNPGLKVIMGILLPPTILFLEFRTYDDFSYQTSKENEDGKEKEEENTDANADAGSRKGDEENEHKKQRSIPIGTKICEFYNAPIVKFWFYTISYLGYLLLFNYVILVRMDGWPSLQEWIVISYIVSLALEKIREILMSEPGKLSQKIKVWLQEYWNITDLVAISTFMIGAILRLQNQPYMGYGRVIYCVDIIFWYIRVLDIFGVNKYLGPYVMMIGKMMIDMLYFVVIMLVVLMSFGVARQAILHPEEKPSWKLARNIFYMPYWMIYGEVFADQIDLYAMEINPPCGENLYDEEGKRLPPCIPGAWLTPALMACYLLVANILLVNLLIAVFNNTFFEVKSISNQVWKFQRYQLIMTFHDRPVLPPPMIILSHIYIIIMRLSGRCRKKREGDQEERDRGLKLFLSDEELKRLHEFEEQCVQEHFREKEDEQQSSSDERIRVTSERQHDVPAKRQAPE

SEQ ID NO: 3129 - protein, 1222 aa, Artificial Sequence
  Synthetic polypeptide
MGQKSWIEKTFCKRECIFVIPSMKDSNRCCCGQFTNQHIPPLPSATPSKNEEESKQVETQPEKWSVAKHTQSYPTDSYGVLEFQGGGYSNKAMYIRVSYDTKPDSLLHLMVKDWQLELPKLLISVHGGLQNFEMQPKLKQVFGKGLIKAAMTTGAWIFTGGVSTGVISHVGDALKDHSSKSRGRVCAIGIAPWGIVENKEDLVGKDVTRVYQTMSNPLSKLSVLNNSHTHFILADNGTLGKYGAEVKLRRLLEKHISLQKINTRLGQGVPLVGLVVEGGPNVVSIVLEYLQEEPPIPVVICDGSGRASDILSFAHKYCEEGGIINESLREQLLVTIQKTFNYNKAQSHQLFAIIMECMKKKELVTVFRMGSEGQQDIEMAILTALLKGTNVSAPDQLSLALAWNRVDIARSQIFVFGPHWPPLGSLAPPTDSKATEKEKKPPMATTKGGRGKGKGKKKGKVKEEVEEETDPRKIELLNWVNALEQAMLDALVLDRVDFVKLLIENGVNMQHFLTIPRLEELYNTRLGPPNTLHLLVRDVKKSNLPPDYHISLIDIGLVLEYLMGGAYRCNYTRKNFRTLYNNLFGPKRPKALKLLGMEDDEPPAKGKKKKKKKKEEEIDIDVDDPAVSRFQYPFHELMVWAVLMKRQKMAVFLWQRGEESMAKALVACKLYKAMAHESSESDLVDDISQDLDNNSKDFGQLALELLDQSYKHDEQIAMKLLTYELKNWSNSTCLKLAVAAKHRDFIAHTCSQMLLTDMWMGRLRMRKNPGLKVIMGILLPPTILFLEFRTYDDFSYQTSKENEDGKEKEEENTDANADAGSRKGDEENEHKKQRSIPIGTKICEFYNAPIVKFWFYTISYLGYLLLFNYVILVRMDGWPSLQEWIVISYIVSLALEKIREILMSEPGKLSQKIKVWLQEYWNITDLVAISTFMIGAILRLQNQPYMGYGRVIYCVDIIFWYIRVLDIFGVNKYLGPYVMMIGKMMIDMLYFVVIMLVVLMSFGVARQAILHPEEKPSWKLARNIFYMPYWMIYGEVFADQIDLYAMEINPPCGENLYDEEGKRLPPCIPGAWLTPALMACYLLVANILLVNLLIAVFNNTFFEVKSISNQVWKFQRYQLIMTFHDRPVLPPPMIILSHIYIIIMRLSGRCRKKREGDQEERDRGLKLFLSDEELKRLHEFEEQCVQEHFREKEDEQQSSSDERIRVTSERQHDVPAKRQAPE

SEQ ID NO: 3130 - protein, 1239 aa, Artificial Sequence
  Synthetic polypeptide
MSSFKRGSLKSSTSGSQKGQKSWIEKTFCKRECIFVIPSMKDSNRCCCGQFTNQHIPPLPSATPSKNEEESKQVETQPEKWSVAKHTQSYPTDSYGVLEFQGGGYSNKAMYIRVSYDTKPDSLLHLMVKDWQLELPKLLISVHGGLQNFEMQPKLKQVFGKGLIKAAMTTGAWIFTGGVSTGVISHVGDALKDHSSKSRGRVCAIGIAPWGIVENKEDLVGKDVTRVYQTMSNPLSKLSVLNNSHTHFILADNGTLGKYGAEVKLRRLLEKHISLQKINTRLGQGVPLVGLVVEGGPNVVSIVLEYLQEEPPIPVVICDGSGRASDILSFAHKYCEEGGIINESLREQLLVTIQKTFNYNKAQSHQLFAIIMECMKKKELVTVFRMGSEGQQDIEMAILTALLKGTNVSAPDQLSLALAWNRVDIARSQIFVFGPHWPPLGSLAPPTDSKATEKEKKPPMATTKGGRGKGKGKKKGKVKEEVEEETDPRKIELLNWVNALEQAMLDALVLDRVDFVKLLIENGVNMQHFLTIPRLEELYNTRLGPPNTLHLLVRDVKKSNLPPDYHISLIDIGLVLEYLMGGAYRCNYTRKNFRTLYNNLFGPKRPKALKLLGMEDDEPPAKGKKKKKKKKEEEIDIDVDDPAVSRFQYPFHELMVWAVLMKRQKMAVFLWQRGEESMAKALVACKLYKAMAHESSESDLVDDISQDLDNNSKDFGQLALELLDQSYKHDEQIAMKLLTYELKNWSNSTCLKLAVAAKHRDFIAHTCSQMLLTDMWMGRLRMRKNPGLKVIMGILLPPTILFLEFRTYDDFSYQTSKENEDGKEKEEENTDANADAGSRKGDEENEHKKQRSIPIGTKICEFYNAPIVKFWFYTISYLGYLLLFNYVILVRMDGWPSLQEWIVISYIVSLALEKIREILMSEPGKLSQKIKVWLQEYWNITDLVAISTFMIGAILRLQNQPYMGYGRVIYCVDIIFWYIRVLDIFGVNKYLGPYVMMIGKMMIDMLYFVVIMLVVLMSFGVARQAILHPEEKPSWKLARNIFYMPYWMIYGEVFADQIDLYAMEINPPCGENLYDEEGKRLPPCIPGAWLTPALMACYLLVANILLVNLLIAVFNNTFFEVKSISNQVWKFQRYQLIMTFHDRPVLPPPMIILSHIYIIIMRLSGRCRKKREGDQEERDRGLKLFLSDEELKRLHEFEEQCVQEHFREKEDEQQSSSDERIRVTSERQHDVPAKRQAPE

SEQ ID NO: 3131 - protein, 1124 aa, Artificial Sequence
  Synthetic polypeptide
MYIRVSYDTKPDSLLHLMVKDWQLELPKLLISVHGGLQNFEMQPKLKQVFGKGLIKAAMTTGAWIFTGGVSTGVISHVGDALKDHSSKSRGRVCAIGIAPWGIVENKEDLVGKDVTRVYQTMSNPLSKLSVLNNSHTHFILADNGTLGKYGAEVKLRRLLEKHISLQKINTRLGQGVPLVGLVVEGGPNVVSIVLEYLQEEPPIPVVICDGSGRASDILSFAHKIINESLREQLLVTIQKTFNYNKAQSHQLFAIIMECMKKKELVTVFRMGSEGQQDIEMAILTALLKGTNVSAPDQLSLALAWNRVDIARSQIFVFGPHWPPLGSLAPPTDSKATEKEKKPPMATTKGGRGKGKGKKKGKVKEEVEEETDPRKIELLNWVNALEQAMLDALVLDRVDFVKLLIENGVNMQHFLTIPRLEELYNTRLGPPNTLHLLVRDVKKSNLPPDYHISLIDIGLVLEYLMGGAYRCNYTRKNFRTLYNNLFGPKRPKALKLLGMEDDEPPAKGKKKKKKKKEEEIDIDVDDPAVSRFQYPFHELMVWAVLMKRQKMAVFLWQRGEESMAKALVACKLYKAMAHESSESDLVDDISQDLDNNSKDFGQLALELLDQSYKHDEQIAMKLLTYELKNWSNSTCLKLAVAAKHRDFIAHTCSQMLLTDMWMGRLRMRKNPGLKVIMGILLPPTILFLEFRTYDDFSYQTSKENEDGKEKEEENTDANADAGSRKGDEENEHKKQRSIPIGTKICEFYNAPIVKFWFYTISYLGYLLLFNYVILVRMDGWPSLQEWIVISYIVSLALEKIREILMSEPGKLSQKIKVWLQEYWNITDLVAISTFMIGAILRLQNQPYMGYGRVIYCVDIIFWYIRVLDIFGVNKYLGPYVMMIGKMMIDMLYFVVIMLVVLMSFGVARQAILHPEEKPSWKLARNIFYMPYWMIYGEVFADQIDLYAMEINPPCGENLYDEEGKRLPPCIPGAWLTPALMACYLLVANILLVNLLIAVFNNTFFEVKSISNQVWKFQRYQLIMTFHDRPVLPPPMIILSHIYIIIMRLSGRCRKKREGDQEERDRGLKLFLSDEELKRLHEFEEQCVQEHFREKEDEQQSSSDERIRVTSERQHDVPAKRQAPE

SEQ ID NO: 3132 - protein, 315 aa, Artificial Sequence
  Synthetic polypeptide
MKDSNRCCCGQFTNQHIPPLPSATPSKNEEESKQVETQPEKWSVAKHTQSYPTDSYGVLEFQGGGYSNKAMYIRVSYDTKPDSLLHLMVKDWQLELPKLLISVHGGLQNFEMQPKLKQVFGKGLIKAAMTTGAWIFTGGVSTAPCGENLYDEEGKRLPPCIPGAWLTPALMACYLLVANILLVNLLIAVFNNTFFEVKSISNQVWKFQRYQLIMTFHDRPVLPPPMIILSHIYIIIMRLSGRCRKKREGDQEERDRGLKLFLSDEELKRLHEFEEQCVQEHFREKEDEQQSSSDERIRVTSERQHDVPAKRQAPE

SEQ ID NO: 3133 - protein, 10 aa, Artificial Sequence
  Synthetic polypeptide
MKDSNRLGTR

SEQ ID NO: 3134 - protein, 32 aa, Artificial Sequence
  Synthetic polypeptide
MGQKSWIEKTFCKRECIFVIPSMKDSNRLGTR

SEQ ID NO: 3135 - protein, 49 aa, Artificial Sequence
  Synthetic polypeptide
MSSFKRGSLKSSTSGSQKGQKSWIEKTFCKRECIFVIPSMKDSNRLGTR

SEQ ID NO: 3136 - protein, 12 aa, Artificial Sequence
  Synthetic polypeptide
MKDSNRHSKRLG

SEQ ID NO: 3137 - protein, 34 aa, Artificial Sequence
  Synthetic polypeptide
MGQKSWIEKTFCKRECIFVIPSMKDSNRHSKRLG

SEQ ID NO: 3138 - protein, 51 aa, Artificial Sequence
  Synthetic polypeptide
MSSFKRGSLKSSTSGSQKGQKSWIEKTFCKRECIFVIPSMKDSNRHSKRLG

SEQ ID NO: 3139 - protein, 9 aa, Artificial Sequence
  Synthetic polypeptide
MKDSNSSAR

SEQ ID NO: 3140 - protein, 31 aa, Artificial Sequence
  Synthetic polypeptide
MGQKSWIEKTFCKRECIFVIPSMKDSNSSAR

SEQ ID NO: 3141 - protein, 48 aa, Artificial Sequence
  Synthetic polypeptide
MSSFKRGSLKSSTSGSQKGQKSWIEKTFCKRECIFVIPSMKDSNSSAR

SEQ ID NO: 3142 - protein, 432 aa, Artificial Sequence
  Synthetic polypeptide
MAEETQHNKLAAAKKKLKEYWQKNRPRVPAGVNRNRKTNGSIPETATSGGCQPPGDSATGFHREGPTSSATLKDLESPCQERAVVLDSTSVKISRLKNTIKSLKQQKKQVEHQLEEEKKANNERQKAERELEVQIQTLIIQKEELNTDLYHMERSLRYFEEESKDLAVRLQHSLQCKGELESALSAVIATEKKKANQLSSCSKAHTEWELEQSLQDQALLKAQLTQLKESFQQLQLERDECAEHIEGERARWHQRMSKMSQEICTLKKEKQQDMRRVEELERSLSKLKNQMAEPLPPEPPAVPSEVELQHLRKELERVAGELQSQVKNNQHISLLNRRQEERIREQEERLRKQEERLQEQHEKLRQLAKPQSVFEELNNENKSTLQLEQQVKELQEKLGEVQWLMPIIPALWEAEAEESLEVGSLRSTWPMW

SEQ ID NO: 3143 - protein, 273 aa, Artificial Sequence
  Synthetic polypeptide
MAEETQHNKLAAAKKKLKEYWQKNRPRVPAGVNRNRKTNGSIPETATSGGCQPPGDSATGFHREGPTSSATLKDLESPCQERAVVLDSTSVKISRLKNTIKSLICTLKKEKQQDMRRVEELERSLSKLKNQMAEPLPPEPPAVPSEVELQHLRKELERVAGELQSQVKNNQHISLLNRRQEERIREQEERLRKQEERLQEQHEKLRQLAKPQSVFEELNNENKSTLQLEQQVKELQEKLGEVQWLMPIIPALWEAEAEESLEVGSLRSTWPMW

SEQ ID NO: 3144 - protein, 112 aa, Artificial Sequence; identical to SEQ ID NO: 3121
  Synthetic polypeptide

SEQ ID NO: 3145 - protein, 99 aa, Artificial Sequence
  Synthetic polypeptide
MLTLKEYWQKNRPRVPAGVNRNRKTNGSIPETATSGGCQPPGDSATGFHREGPTSSATLKDLESPCQERAVVLDSTSVKISRLKNTIKSLNRTWPIRAQ

SEQ ID NO: 3146 - protein, 64 aa, Artificial Sequence; identical to SEQ ID NO: 3122
  Synthetic polypeptide

SEQ ID NO: 3147 - protein, 51 aa, Artificial Sequence
  Synthetic polypeptide
MLTLKEYWQKNRPRVPAGVNRNRKTNGSIPETATSGGCQPPGDYMACCKHS

SEQ ID NO: 3148 - protein, 64 aa, Artificial Sequence; identical to SEQ ID NO: 3122
  Synthetic polypeptide

SEQ ID NO: 3149 - protein, 432 aa, Artificial Sequence; identical to SEQ ID NO: 3142
  Synthetic polypeptide

SEQ ID NO: 3150 - protein, 396 aa, Artificial Sequence
  Synthetic polypeptide
MAEETQHNKLAAAKKKLKEYWQKNRPRVPAGVNRNRKTNGSIPETATSGGCQPPGDSATGFHREGPTSSATLKDLESPCQERAVVLDSTSVKISRLKNTIKSLKQQKKQVEHQLEEEKKANNERQKAERELEVQIQTLIIQKEELNTDLYHMERSLRYFEEESKDLAVRLQHSLQCKGELESALSAVIATEKKKANQLSSCSKAHTEWELEQSLQDQALLKAQLTQICTLKKEKQQDMRRVEELERSLSKLKNQMAEPLPPEPPAVPSEVELQHLRKELERVAGELQSQVKNNQHISLLNRRQEERIREQEERLRKQEERLQEQHEKLRQLAKPQSVFEELNNENKSTLQLEQQVKELQEKLGEVQWLMPIIPALWEAEAEESLEVGSLRSTWPMW

SEQ ID NO: 3151 - protein, 217 aa, Artificial Sequence
  Synthetic polypeptide
SATGFHREGPTSSATLKDLESPCQERAVVLDSTSVKISRLKNTIKSLICTLKKEKQQDMRRVEELERSLSKLKNQMAEPLPPEPPAVPSEVELQHLRKELERVAGELQSQVKNNQHISLLNRRQEERIREQEERLRKQEERLQEQHEKLRQLAKPQSVFEELNNENKSTLQLEQQVKELQEKLGEVQWLMPIIPALWEAEAEESLEVGSLRSTWPMW

SEQ ID NO: 3152 - protein, 1157 aa, Artificial Sequence
  Synthetic polypeptide
MENVDNSLDGSDVSEPAKPEAGLEVAQSILSKFSMKSLFGFTSKLESVNPEEEDAVLKAFHSLDVNPTSQQDDSSNGLDPQEAGSRVSPDLGNDEKIASVETESEGSQRKEAGTSLLAQELLPLSTLKGTKDDVICVRGTLVHTTSDSDSDDGGQEPEEGSSTNGPKSPSGVLSEPSQESKENPGGFRENTVTGEMNGAELCAEDPQRIPPEMSSKLEAGNGGLQTERRPSQDQVGEEGSQDLPAVTNQNSSVGITESASSKKEVSGEKSFQLPAFFSGLRVLKKGATAEGGETITEIKPKDGDLALLKLTQPVQKSLVQAGLQTVKSEKKATDPKATPTLLEQLSLLLNIDMPKTEPKGADPESPRREEMGCNADQESQSGPGVPQTQGGEVKPKSPETALEAFKALFIRPPRKGTTADTSELEALKRKMRHEKESLRAVFERSNSKPADGPSDSKSPDHSLTEQDDRTPGRLQAVWPPPKTKDTEEKVGLKYTEAEYQAAILHLKREHKEEIENLQAQFELRAFHIRGEHAMITARLEETIENLKHELEHRWRGGCEERKDVCISTDDDCPPKTFRNVCVQTDRETFLKPCESESKTTRSNQLVPKKLNISSLSQLSPPNDHKDIHAALQPMEGMASNQQKALPPPPASIPPPPPLPSGLGSLSPAPPMPPVSAGPPLPPPPPPPPPLPPPSSAGPPPPPPPPPLPNSPAPPNPGGPPPAPPPPGLAPPPPPGLFFGLGSSSSQCPRKPAIEPSCPMKPLYWTRIQISDRSQNATPTLWDSLEEPDIRDPSEFEYLFSKDTTQQKKKPLSETYEKKNKVKKIIKLLDGKRSQTVGILISSLHLEMKDIQQAIFNVDDSVVDLETLAALYENRAQEDELVKIRKYYETSKEEELKLLDKPEQFLHELAQIPNFAERAQCIIFRSVFSEGITSLHRKVEIITRASKDLLHVKSVKDILALILAFGNYMNGGNRTRGQADGYSLEILPKLKDVKSRDNGINLVDYVVKYYLRYYDQEAGTEKSVFPLPEPQDFFLASQVKFEDLIKDLRKLKRQLEASEKQMVVVCKESPKEYLQPFKDKLEEFFQKAKTWNQAKCPSMRDWIKKMWHIYTMEYYAVIKKGKFMPFAGTRMKPETIILSKLSQGQKTKHCMFSLIGGS

SEQ ID NO: 3153 - protein, 1282 aa, Artificial Sequence
  Synthetic polypeptide
MEGTHCTLQLHKPITELCYISFCLPKGEVRGFSYKGTVTLDRSNKGFHNCYQVREESDIISLSQEPDEHPGDIFFKQTPTKDILTELYKLTTERERLLTNLLSSDHILGITMGNQEGKLQELSVSLAPEDDCFQSAGDWQGELPVGPLNKRSTHGNKKPRRSSGRRESFGALPQKRTKRKGRGGRESAPLMGKDKICSSHSLPLSRTRPNLWVLEEKGNLLPNGALACSLQRRESCPPDIPKTPDTDLGFGSFETAFKDTGLGREVLPPDCSSTEAGGDGIRRPPSGLEHQQTGLSESHQDPEKHPEAEKDEMEKPAKRTCKQKPVSKVVAKVQDLSSQVQRVVKTHSKGKETIAIRPAAHAEFVPKADLLTLPGAEAGAHGSRRQGKERQGDRSSQSPAGETASISSVSASAEGAVNKVPLKVIESEKLDEAPEGKRLGFPVHTSVPHTRPETRNKRRAGLPLGGHKSLFLDLPHKVGPDSSQPRGDKKKPSPPAPAALGKVFNNSASQSSTHKQTSPVPSPLSPRLPSPQQHHRILRLPALPGEREAALNDSPCRKSRVFSGCVSADTLEPPSSAKVTETKGASPAFLRAGQPRLVPGETLEKSLGPGKTTAEPQHQSPPEYQAAILHLKREHKEEIENLQAQFELRAFHIRGEHAMITARLEETIENLKHELEHRWRGGCEERKDVCISTDDDCPPKTFRNVCVQTDRETFLKPCESESKTTRSNQLVPKKLNISSLSQLSPPNDHKDIHAALQPMEGMASNQQKALPPPPASIPPPPPLPSGLGSLSPAPPMPPVSAGPPLPPPPPPPPPLPPPSSAGPPPPPPPPPLPNSPAPPNPGGPPPAPPPPGLAPPPPPGLFFGLGSSSSQCPRKPAIEPSCPMKPLYWTRIQISDRSQNATPTLWDSLEEPDIRDPSEFEYLFSKDTTQQKKKPLSETYEKKNKVKKIIKLLDGKRSQTVGILISSLHLEMKDIQQAIFNVDDSVVDLETLAALYENRAQEDELVKIRKYYETSKEEELKLLDKPEQFLHELAQIPNFAERAQCIIFRSVFSEGITSLHRKVEIITRASKDLLHVKSVKDILALILAFGNYMNGGNRTRGQADGYSLEILPKLKDVKSRDNGINLVDYVVKYYLRYYDQEAGTEKSVFPLPEPQDFFLASQVKFEDLIKDLRKLKRQLEASEKQMVVVCKESPKEYLQPFKDKLEEFFQKAKTWNQAKCPSMRDWIKKMWHIYTMEYYAVIKKGKFMPFAGTRMKPETIILSKLSQGQKTKHCMFSLIGGS

SEQ ID NO: 3154 - protein, 1380 aa, Artificial Sequence
  Synthetic polypeptide
MEGTHCTLQLHKPITELCYISFCLPKGEVRGFSYKGTVTLDRSNKGFHNCYQVREESDIISLSQEPDEHPGDIFFKQTPTKDILTELYKLTTERERLLTNLLSSDHILGITMGNQEGKLQELSVSLAPEDDCFQSAGDWQGELPVGPLNKRSTHGNKKPRRSSGRRESFGALPQKRTKRKGRGGRESAPLMGKDKICSSHSLPLSRTRPNLWVLEEKGNLLPNGALACSLQRRESCPPDIPKTPDTDLGFGSFETAFKDTGLGREVLPPDCSSTEAGGDGIRRPPSGLEHQQTGLSESHQDPEKHPEAEKDEMEKPAKRTCKQKPVSKVVAKVQDLSSQVQRVVKTHSKGKETIAIRPAAHAEFVPKADLLTLPGAEAGAHGSRRQGKERQGDRSSQSPAGETASISSVSASAEGAVNKVPLKVIESEKLDEAPEGKRLGFPVHTSVPHTRPETRNKRRAGLPLGGHKSLFLDLPHKVGPDSSQPRGDKKKPSPPAPAALGKVFNNSASQSSTHKQTSPVPSPLSPRLPSPQQHHRILRLPALPGEREAALNDSPCRKSRVFSGCVSADTLEPPSSAKVTETKGASPAFLRAGQPRLVPGETLEKSLGPGKTTAEPQHQSPPGISSEGFPWDGFNEQTPKDLPNRDGGAWVLGYRAGPACPFLLHEEREKSNRSELYLDLHPDHSLTEQDDRTPGRLQAVWPPPKTKDTEEKVGLKYTEAEYQAAILHLKREHKEEIENLQAQFELRAFHIRGEHAMITARLEETIENLKHELEHRWRGGCEERKDVCISTDDDCPPKTFRNVCVQTDRETFLKPCESESKTTRSNQLVPKKLNISSLSQLSPPNDHKDIHAALQPMEGMASNQQKALPPPPASIPPPPPLPSGLGSLSPAPPMPPVSAGPPLPPPPPPPPPLPPPSSAGPPPPPPPPPLPNSPAPPNPGGPPPAPPPPGLAPPPPPGLFFGLGSSSSQCPRKPAIEPSCPMKPLYWTRIQISDRSQNATPTLWDSLEEPDIRDPSEFEYLFSKDTTQQKKKPLSETYEKKNKVKKIIKLLDGKRSQTVGILISSLHLEMKDIQQAIFNVDDSVVDLETLAALYENRAQEDELVKIRKYYETSKEEELKLLDKPEQFLHELAQIPNFAERAQCIIFRSVFSEGITSLHRKVEIITRASKDLLHVKSVKDILALILAFGNYMNGGNRTRGQADGYSLEILPKLKDVKSRDNGINLVDYVVKYYLRYYDQEAGTEKSVFPLPEPQDFFLASQVKFEDLIKDLRKLKRQLEASEKQMVVVCKESPKEYLQPFKDKLEEFFQKAKTWNQAKCPSMRDWIKKMWHIYTMEYYAVIKKGKFMPFAGTRMKPETIILSKLSQGQKTKHCMFSLIGGS

SEQ ID NO: 3155 - protein, 12 aa, Artificial Sequence
  Synthetic polypeptide
TTGFLSGLPSQV

SEQ ID NO: 3156 - protein, 12 aa, Artificial Sequence
  Synthetic polypeptide
TTGFLSGLPSQV

SEQ ID NO: 3157 - protein, 1106 aa, Artificial Sequence
  Synthetic polypeptide
MENVDNSLDGSDVSEPAKPEAGLEVAQSILSKFSMKSLFGFTSKLESVNPEEEDAVLKAFHSLDVNPTSQQDDSSNGLDPQEAGSRVSPDLGNDEKIASVETESEGSQRKEAGTSLLAQELLPLSTLKGTKDDVICVRGTLVHTTSDSDSDDGGQEPEEGSSTNGPKSPSGVLSEPSQESKENPGGFRENTVTGEMNGAELCAEDPQRIPPEMSSKLEAGNGGLQTERRPSQDQVGEEGSQDLPAVTNQNSSVGITESASSKKEVSGEKSFQLPAFFSGLRVLKKGATAEGGETITEIKPKDGDLALLKLTQPVQKSLVQAGLQTVKSEKKATDPKATPTLLEQLSLLLNIDMPKTEPKGADPESPRREEMGCNADQESQSGPGVPQTQGGEVKPKSPETALEAFKALFIRPPRKGTTADTSELEALKRKMRHEKESLRAVFERSNSKPADGPSDSKSPDHSLTEQDDRTPGRLQAVWPPPKTKDTEEKVGLKYTEAEYQAAILHLKREHKEEIENLQAQFELRAFHIRGEHAMITARLEETIENLKHELEHRWRGGCEERKDVCISTDDDCPPKTFRNVCVQTDRETFLKPCESESKTTRSNQLVPKKLNISSLSQLSPPNDHKDIHAALQPMEGMASNQQKALPPPPASIPPPPPLPSGLGSLSPAPPMPPVSAGPPLPPPPPPPPPLPPPSSAGPPPPPPPPPLPNSPAPPNPGGPPPAPPPPGLAPPPPPGLFFGLGSSSSQCPRKPAIEPSCPMKPLYWTRIQISDRSQNATPTLWDSLEEPDIRDPSEFEYLFSKDTTQQKKKPLSETYEKKNKVKKIIKLLDGKRSQTVGILISSLHLEMKDIQQAIFNVDDSVVDLETLAALYENRAQEDELVKIRKYYETSKEEELKLLDKPEQFLHELAQIPNFAERAQCIIFRSVFSEGITSLHRKVEIITRASKDLLHVKSVKDILALILAFGNYMNGGNRTRGQADGYSLEILPKLKDVKSRDNGINLVDYVVKYYLRYYDQEAGTEKSVFPLPEPQDFFLASQVKFEDLIKDLRKLKRQLEASEKQMVVVCKESPKEYLQPFKDKLEEFFQKGVIINITLKSIPEETINYLA

SEQ ID NO: 3158 - protein, 1231 aa, Artificial Sequence
  Synthetic polypeptide
MEGTHCTLQLHKPITELCYISFCLPKGEVRGFSYKGTVTLDRSNKGFHNCYQVREESDIISLSQEPDEHPGDIFFKQTPTKDILTELYKLTTERERLLTNLLSSDHILGITMGNQEGKLQELSVSLAPEDDCFQSAGDWQGELPVGPLNKRSTHGNKKPRRSSGRRESFGALPQKRTKRKGRGGRESAPLMGKDKICSSHSLPLSRTRPNLWVLEEKGNLLPNGALACSLQRRESCPPDIPKTPDTDLGFGSFETAFKDTGLGREVLPPDCSSTEAGGDGIRRPPSGLEHQQTGLSESHQDPEKHPEAEKDEMEKPAKRTCKQKPVSKVVAKVQDLSSQVQRVVKTHSKGKETIAIRPAAHAEFVPKADLLTLPGAEAGAHGSRRQGKERQGDRSSQSPAGETASISSVSASAEGAVNKVPLKVIESEKLDEAPEGKRLGFPVHTSVPHTRPETRNKRRAGLPLGGHKSLFLDLPHKVGPDSSQPRGDKKKPSPPAPAALGKVFNNSASQSSTHKQTSPVPSPLSPRLPSPQQHHRILRLPALPGEREAALNDSPCRKSRVFSGCVSADTLEPPSSAKVTETKGASPAFLRAGQPRLVPGETLEKSLGPGKTTAEPQHQSPPEYQAAILHLKREHKEEIENLQAQFELRAFHIRGEHAMITARLEETIENLKHELEHRWRGGCEERKDVCISTDDDCPPKTFRNVCVQTDRETFLKPCESESKTTRSNQLVPKKLNISSLSQLSPPNDHKDIHAALQPMEGMASNQQKALPPPPASIPPPPPLPSGLGSLSPAPPMPPVSAGPPLPPPPPPPPPLPPPSSAGPPPPPPPPPLPNSPAPPNPGGPPPAPPPPGLAPPPPPGLFFGLGSSSSQCPRKPAIEPSCPMKPLYWTRIQISDRSQNATPTLWDSLEEPDIRDPSEFEYLFSKDTTQQKKKPLSETYEKKNKVKKIIKLLDGKRSQTVGILISSLHLEMKDIQQAIFNVDDSVVDLETLAALYENRAQEDELVKIRKYYETSKEEELKLLDKPEQFLHELAQIPNFAERAQCIIFRSVFSEGITSLHRKVEIITRASKDLLHVKSVKDILALILAFGNYMNGGNRTRGQADGYSLEILPKLKDVKSRDNGINLVDYVVKYYLRYYDQEAGTEKSVFPLPEPQDFFLASQVKFEDLIKDLRKLKRQLEASEKQMVVVCKESPKEYLQPFKDKLEEFFQKGVIINITLKSIPEETINYLA

SEQ ID NO: 3159 - protein, 1329 aa, Artificial Sequence
  Synthetic polypeptide
MEGTHCTLQLHKPITELCYISFCLPKGEVRGFSYKGTVTLDRSNKGFHNCYQVREESDIISLSQEPDEHPGDIFFKQTPTKDILTELYKLTTERERLLTNLLSSDHILGITMGNQEGKLQELSVSLAPEDDCFQSAGDWQGELPVGPLNKRSTHGNKKPRRSSGRRESFGALPQKRTKRKGRGGRESAPLMGKDKICSSHSLPLSRTRPNLWVLEEKGNLLPNGALACSLQRRESCPPDIPKTPDTDLGFGSFETAFKDTGLGREVLPPDCSSTEAGGDGIRRPPSGLEHQQTGLSESHQDPEKHPEAEKDEMEKPAKRTCKQKPVSKVVAKVQDLSSQVQRVVKTHSKGKETIAIRPAAHAEFVPKADLLTLPGAEAGAHGSRRQGKERQGDRSSQSPAGETASISSVSASAEGAVNKVPLKVIESEKLDEAPEGKRLGFPVHTSVPHTRPETRNKRRAGLPLGGHKSLFLDLPHKVGPDSSQPRGDKKKPSPPAPAALGKVFNNSASQSSTHKQTSPVPSPLSPRLPSPQQHHRILRLPALPGEREAALNDSPCRKSRVFSGCVSADTLEPPSSAKVTETKGASPAFLRAGQPRLVPGETLEKSLGPGKTTAEPQHQSPPGISSEGFPWDGFNEQTPKDLPNRDGGAWVLGYRAGPACPFLLHEEREKSNRSELYLDLHPDHSLTEQDDRTPGRLQAVWPPPKTKDTEEKVGLKYTEAEYQAAILHLKREHKEEIENLQAQFELRAFHIRGEHAMITARLEETIENLKHELEHRWRGGCEERKDVCISTDDDCPPKTFRNVCVQTDRETFLKPCESESKTTRSNQLVPKKLNISSLSQLSPPNDHKDIHAALQPMEGMASNQQKALPPPPASIPPPPPLPSGLGSLSPAPPMPPVSAGPPLPPPPPPPPPLPPPSSAGPPPPPPPPPLPNSPAPPNPGGPPPAPPPPGLAPPPPPGLFFGLGSSSSQCPRKPAIEPSCPMKPLYWTRIQISDRSQNATPTLWDSLEEPDIRDPSEFEYLFSKDTTQQKKKPLSETYEKKNKVKKIIKLLDGKRSQTVGILISSLHLEMKDIQQAIFNVDDSVVDLETLAALYENRAQEDELVKIRKYYETSKEEELKLLDKPEQFLHELAQIPNFAERAQCIIFRSVFSEGITSLHRKVEIITRASKDLLHVKSVKDILALILAFGNYMNGGNRTRGQADGYSLEILPKLKDVKSRDNGINLVDYVVKYYLRYYDQEAGTEKSVFPLPEPQDFFLASQVKFEDLIKDLRKLKRQLEASEKQMVVVCKESPKEYLQPFKDKLEEFFQKGVIINITLKSIPEETINYLA

SEQ ID NO: 3160 - protein, 1093 aa, Artificial Sequence
  Synthetic polypeptide
MENVDNSLDGSDVSEPAKPEAGLEVAQSILSKFSMKSLFGFTSKLESVNPEEEDAVLKAFHSLDVNPTSQQDDSSNGLDPQEAGSRVSPDLGNDEKIASVETESEGSQRKEAGTSLLAQELLPLSTLKGTKDDVICVRGTLVHTTSDSDSDDGGQEPEEGSSTNGPKSPSGVLSEPSQESKENPGGFRENTVTGEMNGAELCAEDPQRIPPEMSSKLEAGNGGLQTERRPSQDQVGEEGSQDLPAVTNQNSSVGITESASSKKEVSGEKSFQLPAFFSGLRVLKKGATAEGGETITEIKPKDGDLALLKLTQPVQKSLVQAGLQTVKSEKKATDPKATPTLLEQLSLLLNIDMPKTEPKGADPESPRREEMGCNADQESQSGPGVPQTQGGEVKPKSPETALEAFKALFIRPPRKGTTADTSELEALKRKMRHEKESLRAVFERSNSKPADGPSDSKSPDHSLTEQDDRTPGRLQAVWPPPKTKDTEEKVGLKYTEAEYQAAILHLKREHKEEIENLQAQFELRAFHIRGEHAMITARLEETIENLKHELEHRWRGGCEERKDVCISTDDDCPPKTFRNVCVQTDRETFLKPCESESKTTRSNQLVPKKLNISSLSQLSPPNDHKDIHAALQPMEGMASNQQKALPPPPASIPPPPPLPSGLGSLSPAPPMPPVSAGPPLPPPPPPPPPLPPPSSAGPPPPPPPPPLPNSPAPPNPGGPPPAPPPPGLAPPPPPGLFFGLGSSSSQCPRKPAIEPSCPMKPLYWTRIQISDRSQNATPTLWDSLEEPDIRDPSEFEYLFSKDTTQQKKKPLSETYEKKNKVKKIIKLLDGKRSQTVGILISSLHLEMKDIQQAIFNVDDSVVDLETLAALYENRAQEDELVKIRKYYETSKEEELKLLDKPEQFLHELAQIPNFAERAQCIIFRSVFSEGITSLHRKVEIITRASKDLLHVKSVKDILALILAFGNYMNGGNRTRGQADGYSLEILPKLKDVKSRDNGINLVDYVVKYYLRYYDQEAGTEKSVFPLPEPQDFFLASQVKFEDLIKDLRKLKRQLEASEKQMVVVCKESPKEYLQPFKDKLEEFFQKVQMKDPG

SEQ ID NO: 3161 - protein, 1218 aa, Artificial Sequence
  Synthetic polypeptide
MEGTHCTLQLHKPITELCYISFCLPKGEVRGFSYKGTVTLDRSNKGFHNCYQVREESDIISLSQEPDEHPGDIFFKQTPTKDILTELYKLTTERERLLTNLLSSDHILGITMGNQEGKLQELSVSLAPEDDCFQSAGDWQGELPVGPLNKRSTHGNKKPRRSSGRRESFGALPQKRTKRKGRGGRESAPLMGKDKICSSHSLPLSRTRPNLWVLEEKGNLLPNGALACSLQRRESCPPDIPKTPDTDLGFGSFETAFKDTGLGREVLPPDCSSTEAGGDGIRRPPSGLEHQQTGLSESHQDPEKHPEAEKDEMEKPAKRTCKQKPVSKVVAKVQDLSSQVQRVVKTHSKGKETIAIRPAAHAEFVPKADLLTLPGAEAGAHGSRRQGKERQGDRSSQSPAGETASISSVSASAEGAVNKVPLKVIESEKLDEAPEGKRLGFPVHTSVPHTRPETRNKRRAGLPLGGHKSLFLDLPHKVGPDSSQPRGDKKKPSPPAPAALGKVFNNSASQSSTHKQTSPVPSPLSPRLPSPQQHHRILRLPALPGEREAALNDSPCRKSRVFSGCVSADTLEPPSSAKVTETKGASPAFLRAGQPRLVPGETLEKSLGPGKTTAEPQHQSPPEYQAAILHLKREHKEEIENLQAQFELRAFHIRGEHAMITARLEETIENLKHELEHRWRGGCEERKDVCISTDDDCPPKTFRNVCVQTDRETFLKPCESESKTTRSNQLVPKKLNISSLSQLSPPNDHKDIHAALQPMEGMASNQQKALPPPPASIPPPPPLPSGLGSLSPAPPMPPVSAGPPLPPPPPPPPPLPPPSSAGPPPPPPPPPLPNSPAPPNPGGPPPAPPPPGLAPPPPPGLFFGLGSSSSQCPRKPAIEPSCPMKPLYWTRIQISDRSQNATPTLWDSLEEPDIRDPSEFEYLFSKDTTQQKKKPLSETYEKKNKVKKIIKLLDGKRSQTVGILISSLHLEMKDIQQAIFNVDDSVVDLETLAALYENRAQEDELVKIRKYYETSKEEELKLLDKPEQFLHELAQIPNFAERAQCIIFRSVFSEGITSLHRKVEIITRASKDLLHVKSVKDILALILAFGNYMNGGNRTRGQADGYSLEILPKLKDVKSRDNGINLVDYVVKYYLRYYDQEAGTEKSVFPLPEPQDFFLASQVKFEDLIKDLRKLKRQLEASEKQMVVVCKESPKEYLQPFKDKLEEFFQKVQMKDPG

SEQ ID NO: 3162 - protein, 1316 aa, Artificial Sequence
  Synthetic polypeptide
MEGTHCTLQLHKPITELCYISFCLPKGEVRGFSYKGTVTLDRSNKGFHNCYQVREESDIISLSQEPDEHPGDIFFKQTPTKDILTELYKLTTERERLLTNLLSSDHILGITMGNQEGKLQELSVSLAPEDDCFQSAGDWQGELPVGPLNKRSTHGNKKPRRSSGRRESFGALPQKRTKRKGRGGRESAPLMGKDKICSSHSLPLSRTRPNLWVLEEKGNLLPNGALACSLQRRESCPPDIPKTPDTDLGFGSFETAFKDTGLGREVLPPDCSSTEAGGDGIRRPPSGLEHQQTGLSESHQDPEKHPEAEKDEMEKPAKRTCKQKPVSKVVAKVQDLSSQVQRVVKTHSKGKETIAIRPAAHAEFVPKADLLTLPGAEAGAHGSRRQGKERQGDRSSQSPAGETASISSVSASAEGAVNKVPLKVIESEKLDEAPEGKRLGFPVHTSVPHTRPETRNKRRAGLPLGGHKSLFLDLPHKVGPDSSQPRGDKKKPSPPAPAALGKVFNNSASQSSTHKQTSPVPSPLSPRLPSPQQHHRILRLPALPGEREAALNDSPCRKSRVFSGCVSADTLEPPSSAKVTETKGASPAFLRAGQPRLVPGETLEKSLGPGKTTAEPQHQSPPGISSEGFPWDGFNEQTPKDLPNRDGGAWVLGYRAGPACPFLLHEEREKSNRSELYLDLHPDHSLTEQDDRTPGRLQAVWPPPKTKDTEEKVGLKYTEAEYQAAILHLKREHKEEIENLQAQFELRAFHIRGEHAMITARLEETIENLKHELEHRWRGGCEERKDVCISTDDDCPPKTFRNVCVQTDRETFLKPCESESKTTRSNQLVPKKLNISSLSQLSPPNDHKDIHAALQPMEGMASNQQKALPPPPASIPPPPPLPSGLGSLSPAPPMPPVSAGPPLPPPPPPPPPLPPPSSAGPPPPPPPPPLPNSPAPPNPGGPPPAPPPPGLAPPPPPGLFFGLGSSSSQCPRKPAIEPSCPMKPLYWTRIQISDRSQNATPTLWDSLEEPDIRDPSEFEYLFSKDTTQQKKKPLSETYEKKNKVKKIIKLLDGKRSQTVGILISSLHLEMKDIQQAIFNVDDSVVDLETLAALYENRAQEDELVKIRKYYETSKEEELKLLDKPEQFLHELAQIPNFAERAQCIIFRSVFSEGITSLHRKVEIITRASKDLLHVKSVKDILALILAFGNYMNGGNRTRGQADGYSLEILPKLKDVKSRDNGINLVDYVVKYYLRYYDQEAGTEKSVFPLPEPQDFFLASQVKFEDLIKDLRKLKRQLEASEKQMVVVCKESPKEYLQPFKDKLEEFFQKVQMKDPG

SEQ ID NO: 3163 - protein, 12 aa, Artificial Sequence
  Synthetic polypeptide
TTGFLSGLPSQV

SEQ ID NO: 3164 - protein, 525 aa, Artificial Sequence
  Synthetic polypeptide
MENVDNSLDGSDVSEPAKPEAGLEVAQSILSKFSMKSLFGFTSKLESVNPEEEDAVLKAFHSLDVNPTSQQDDSSNGLDPQEAGSRVSPDLGNDEKIASVETESEGSQRKEAGTSLLAQELLPLSTLKGTKDDVICVRGTLVHTTSDSDSDDGGQEPEEGSSTNGPKSPSGVLSEPSQESKENPGGFRENTVTGEMNGAELCAEDPQRIPPEMSSKLEAGNGGLQTERRPSQDQVGEEGSQDLPAVTNQNSSVGITESASSKKEVSGEKSFQLPAFFSGLRVLKKGATAEGGETITEIKPKDGDLALLKLTQPVQKSLVQAGLQTVKSEKKATDPKATPTLLEQLSLLLNIDMPKTEPKGADPESPRREEMGCNADQESQSGPGVPQTQGGEVKPKSPETALEAFKALFIRPPRKGTTADTSELEALKRKMRHEKESLRAVFERSNSKPADGPSDSKSPDHSLTEQDDRTPGRLQAVWPPPKTKDTEEKVGLKYTEAEYQAAILHLKREHKEEIENLQLWDLIQI

SEQ ID NO: 3165 - protein, 650 aa, Artificial Sequence
  Synthetic polypeptide
MEGTHCTLQLHKPITELCYISFCLPKGEVRGFSYKGTVTLDRSNKGFHNCYQVREESDIISLSQEPDEHPGDIFFKQTPTKDILTELYKLTTERERLLTNLLSSDHILGITMGNQEGKLQELSVSLAPEDDCFQSAGDWQGELPVGPLNKRSTHGNKKPRRSSGRRESFGALPQKRTKRKGRGGRESAPLMGKDKICSSHSLPLSRTRPNLWVLEEKGNLLPNGALACSLQRRESCPPDIPKTPDTDLGFGSFETAFKDTGLGREVLPPDCSSTEAGGDGIRRPPSGLEHQQTGLSESHQDPEKHPEAEKDEMEKPAKRTCKQKPVSKVVAKVQDLSSQVQRVVKTHSKGKETIAIRPAAHAEFVPKADLLTLPGAEAGAHGSRRQGKERQGDRSSQSPAGETASISSVSASAEGAVNKVPLKVIESEKLDEAPEGKRLGFPVHTSVPHTRPETRNKRRAGLPLGGHKSLFLDLPHKVGPDSSQPRGDKKKPSPPAPAALGKVFNNSASQSSTHKQTSPVPSPLSPRLPSPQQHHRILRLPALPGEREAALNDSPCRKSRVFSGCVSADTLEPPSSAKVTETKGASPAFLRAGQPRLVPGETLEKSLGPGKTTAEPQHQSPPEYQAAILHLKREHKEEIENLQLWDLIQI

SEQ ID NO: 3166 - protein, 748 aa, Artificial Sequence
  Synthetic polypeptide
MEGTHCTLQLHKPITELCYISFCLPKGEVRGFSYKGTVTLDRSNKGFHNCYQVREESDIISLSQEPDEHPGDIFFKQTPTKDILTELYKLTTERERLLTNLLSSDHILGITMGNQEGKLQELSVSLAPEDDCFQSAGDWQGELPVGPLNKRSTHGNKKPRRSSGRRESFGALPQKRTKRKGRGGRESAPLMGKDKICSSHSLPLSRTRPNLWVLEEKGNLLPNGALACSLQRRESCPPDIPKTPDTDLGFGSFETAFKDTGLGREVLPPDCSSTEAGGDGIRRPPSGLEHQQTGLSESHQDPEKHPEAEKDEMEKPAKRTCKQKPVSKVVAKVQDLSSQVQRVVKTHSKGKETIAIRPAAHAEFVPKADLLTLPGAEAGAHGSRRQGKERQGDRSSQSPAGETASISSVSASAEGAVNKVPLKVIESEKLDEAPEGKRLGFPVHTSVPHTRPETRNKRRAGLPLGGHKSLFLDLPHKVGPDSSQPRGDKKKPSPPAPAALGKVFNNSASQSSTHKQTSPVPSPLSPRLPSPQQHHRILRLPALPGEREAALNDSPCRKSRVFSGCVSADTLEPPSSAKVTETKGASPAFLRAGQPRLVPGETLEKSLGPGKTTAEPQHQSPPGISSEGFPWDGFNEQTPKDLPNRDGGAWVLGYRAGPACPFLLHEEREKSNRSELYLDLHPDHSLTEQDDRTPGRLQAVWPPPKTKDTEEKVGLKYTEAEYQAAILHLKREHKEEIENLQLWDLIQI

SEQ ID NO: 3167 - protein, 507 aa, Artificial Sequence
  Synthetic polypeptide
MENVDNSLDGSDVSEPAKPEAGLEVAQSILSKFSMKSLFGFTSKLESVNPEEEDAVLKAFHSLDVNPTSQQDDSSNGLDPQEAGSRVSPDLGNDEKIASVETESEGSQRKEAGTSLLAQELLPLSTLKGTKDDVICVRGTLVHTTSDSDSDDGGQEPEEGSSTNGPKSPSGVLSEPSQESKENPGGFRENTVTGEMNGAELCAEDPQRIPPEMSSKLEAGNGGLQTERRPSQDQVGEEGSQDLPAVTNQNSSVGITESASSKKEVSGEKSFQLPAFFSGLRVLKKGATAEGGETITEIKPKDGDLALLKLTQPVQKSLVQAGLQTVKSEKKATDPKATPTLLEQLSLLLNIDMPKTEPKGADPESPRREEMGCNADQESQSGPGVPQTQGGEVKPKSPETALEAFKALFIRPPRKGTTADTSELEALKRKMRHEKESLRAVFERSNSKPADGPSDSKSPDHSLTEQDDRTPGRLQAVWPPPKTKDTEEKVGLKYTEAGRSAASLLSQ

SEQ ID NO: 3168 - protein, 730 aa, Artificial Sequence
  Synthetic polypeptide
MEGTHCTLQLHKPITELCYISFCLPKGEVRGFSYKGTVTLDRSNKGFHNCYQVREESDIISLSQEPDEHPGDIFFKQTPTKDILTELYKLTTERERLLTNLLSSDHILGITMGNQEGKLQELSVSLAPEDDCFQSAGDWQGELPVGPLNKRSTHGNKKPRRSSGRRESFGALPQKRTKRKGRGGRESAPLMGKDKICSSHSLPLSRTRPNLWVLEEKGNLLPNGALACSLQRRESCPPDIPKTPDTDLGFGSFETAFKDTGLGREVLPPDCSSTEAGGDGIRRPPSGLEHQQTGLSESHQDPEKHPEAEKDEMEKPAKRTCKQKPVSKVVAKVQDLSSQVQRVVKTHSKGKETIAIRPAAHAEFVPKADLLTLPGAEAGAHGSRRQGKERQGDRSSQSPAGETASISSVSASAEGAVNKVPLKVIESEKLDEAPEGKRLGFPVHTSVPHTRPETRNKRRAGLPLGGHKSLFLDLPHKVGPDSSQPRGDKKKPSPPAPAALGKVFNNSASQSSTHKQTSPVPSPLSPRLPSPQQHHRILRLPALPGEREAALNDSPCRKSRVFSGCVSADTLEPPSSAKVTETKGASPAFLRAGQPRLVPGETLEKSLGPGKTTAEPQHQSPPGISSEGFPWDGFNEQTPKDLPNRDGGAWVLGYRAGPACPFLLHEEREKSNRSELYLDLHPDHSLTEQDDRTPGRLQAVWPPPKTKDTEEKVGLKYTEAGRSAASLLSQ

SEQ ID NO: 3169 - protein, 93 aa, Artificial Sequence
  Synthetic polypeptide
MAAALWGFFPVLLLLLLSGDVQSSEVPGAAAEGSGGSGVGIGDRFKIEGRAVVPGVKPQDWISAARVLVDGEEHVGFLNLGYRAKPRLSGKKE

SEQ ID NO: 3170 - protein, 20 aa, Artificial Sequence
  Synthetic polypeptide
PAAAAAIGGCPELGGARGCC

SEQ ID NO: 3171 - protein, 354 aa, Artificial Sequence
  Synthetic polypeptide
MAAPAQPKKIVAPTVSQINAEFVTQLACKYWAPHIKKKSPFDIKVIEDIYEKEIVKSRFAIRKIMLLEFSQYLENYLWMNYSPEVSSKAYLMSICCMVNEKFRENVPAWEIFKKKPDHFPFFFKHILKAALAETDGEFSLHEQTVLLLFLDHCFNSLEVDLIRSQVQQLISLPMWMGLQLARLELELKKTPKLRKFWNLIKKNDEKMDPEAREQAYQERRFLSQLIQKFISVLKSVPLSEPVTMDKVHYCERFIELMIDLEALLPTRRWFNTILDDSHLLVHCYLSNLVRREEDGHLFSQLLDMLKFYTGFEINDQTGNALTENEMTTIHYDRITSLQLEASCYLTSNYTTRLQ

SEQ ID NO: 3172 - protein, 320 aa, Artificial Sequence
  Synthetic polypeptide
MILTKAQYDEIAQCLVSVPPTRQSLRKLKQRFPSQSQATLLSIFSQEYQKHIKRTHAKHHTSEAIESYYQRYLNGVVKNGAAPVLLDLANEVDYAPSLMARLILERFLQEHEETPPSKSIINSMLRDPSQIPDGVLANQVYQCIVNDCCYGPLVDCIKHAIGHEHEVLLRDLLLEKNLSFLDEDQLRAKGYDKTPDFILQVPVAVEGHIIHWIESKASFGDECSHHAYLHDQFWSYWNSTIHNSKDVESTQMPINDTVNKENVVHIHHGILCSHKKEQDHVLRRVMDGAGSHYAQQTNAGTENQTLHVVTCKWLLNNENT

SEQ ID NO: 3173 - protein, 326 aa, Artificial Sequence
  Synthetic polypeptide
MILTKAQYDEIAQCLVSVPPTRQSLRKLKQRFPSQSQATLLSIFSQEYQKHIKRTHAKHHTSEAIESYYQRYLNGVVKNGAAPVLLDLANEVDYAPSLMARLILERFLQEHEETPPSKSIINSMLRDPSQIPDGVLANQVYQCIVNDCCYGPLVDCIKHAIGHEHEVLLRDLLLEKNLSFLDEDQLRAKGYDKTPDFILQVPVVMLCPLAVEGHIIHWIESKASFGDECSHHAYLHDQFWSYWNSTIHNSKDVESTQMPINDTVNKENVVHIHHGILCSHKKEQDHVLRRVMDGAGSHYAQQTNAGTENQTLHVVTCKWLLNNENT

SEQ ID NO: 3174 - protein, 222 aa, Artificial Sequence
  Synthetic polypeptide
MARLILERFLQEHEETPPSKSIINSMLRDPSQIPDGVLANQVYQCIVNDCCYGPLVDCIKHAIGHEHEVLLRDLLLEKNLSFLDEDQLRAKGYDKTPDFILQVPVAVEGHIIHWIESKASFGDECSHHAYLHDQFWSYWNSTIHNSKDVESTQMPINDTVNKENVVHIHHGILCSHKKEQDHVLRRVMDGAGSHYAQQTNAGTENQTLHVVTCKWLLNNENT

SEQ ID NO: 3175 - protein, 144 aa, Artificial Sequence
  Synthetic polypeptide
MSVAENEDQLRAKGYDKTPDFILQVPVAVEGHIIHWIESKASFGDECSHHAYLHDQFWSYWNSTIHNSKDVESTQMPINDTVNKENVVHIHHGILCSHKKEQDHVLRRVMDGAGSHYAQQTNAGTENQTLHVVTCKWLLNNENT

SEQ ID NO: 3176 - protein, 94 aa, Artificial Sequence
  Synthetic polypeptide
MAGGRGAPGRGRDEPPESYPQRQDHELQALEAIYGADFQDLRPDACGPHSSLFEITRLLVCISWLGLCLSKFTPALPASRRAPRHNNSVTSERM

SEQ ID NO: 3177 - protein, 1 aa, Artificial Sequence
  Synthetic polypeptide
G

SEQ ID NO: 3178 - protein, 1107 aa, Artificial Sequence
  Synthetic polypeptide
MAGGRGAPGRGRDEPPESYPQRQDHELQALEAIYGADFQDLRPDACGPVKEPPEINLVLYPQGLTGEEVYVKVDLRVKCPPTYPDVVPEIELKNAKGLSNESVNLLKSRLEELAKKHCGEVMIFELAYHVQSFLSEHNKPPPKSFHEEMLERRAQEEQQRLLEAKRKEEQEQREILHEIQRRKEEIKEEKKRKEMAKQERLEIASLSNQDHTSKKDPGGHRTAAILHGGSPDFVGNGKHRANSSGRSRRERQYSVCNSEDSPGSCEILYFNMGSPDQLMVHKGKCIGSDEQLGKLVYNALETATGGFVLLYEWVLQWQKKMGPFLTSQEKEKIDKCKKQIQGTETEFNSLVKLSHPNVVRYLAMNLKEQDDSIVVDILVEHISGVSLAAHLSHSGPIPVHQLRRYTAQLLSGLDYLHSNSVVHKVLSASNVLVDAEGTVKITDYSISKRLADICKEDVFEQTRVRFSDNALPYKTGKKGDVWRLGLLLLSLSQGQECGEYPVTIPSDLPADFQDFLKKCVCLDDKERWSPQQLLKHSFINPQPKMPLVEQSPEDSEGQDYVETVIPSNRLPSAAFFSETQRQFSRYFIEFEELQLLGKGAFGAVIKVQNKLDGCCYAVKRIPINPASRQFRRIKGEVTLLSRLHHENIVRYYNAWIERHERPAGPGTPPPDSGPLAKDDRAARGQPASDTDGLDSVEAAAPPPILSSSVEWSTSGERSASARFPATGPGSSDDEDDDEDEHGGVFSQSFLPASDSESDIIFDNEDENSKSQNQMEYCEKSTLRDTIDQGLYRDTVRLWRLFREILDGLAYIHEKGMIHRDLKPVNIFLDSDDHVKIGDFGLATDHLAFSADSKQDDQTGDLIKSDPSGHLTGMVGTALYVSPEVQGSTKSAYNQKVDLFSLGIIFFEMSYHPMVTASERIFVLNQLRDPTSPKFPEDFDDGEHAKQKSVISWLLNHDPAKRPTATELLKSELLPPPQMEESELHEVLHHTLTNVDGKAYRTMMAQIFSQRISPAIDYTYDSDILKGNFSIRTAKMQQHVCETIIRIFKRHGAVQLCTPLLLPRNRQIYEHNEAALFMDHSGMLVMLPFDLREAEAGESLEPGRRRLQ

SEQ ID NO: 3179 - protein, 1135 aa, Artificial Sequence
  Synthetic polypeptide
MAGGRGAPGRGRDEPPESYPQRQDHELQALEAIYGADFQDLRPDACGPVKEPPEINLVLYPQGLTGEEVYVKVDLRVKCPPTYPDVVPEIELKNAKGLSNESVNLLKSRLEELAKKHCGEVMIFELAYHVQSFLSEHNKPPPKSFHEEMLERRAQEEQQRLLEAKRKEEQEQREILHEIQRRKEEIKEEKKRKEMAKQERLEIASLSNQDHTSKKDPGGHRTAAILHGGSPDFVGNGKHRANSSGRSRRERQYSVCNSEDSPGSCEILYFNMGSPDQLMVHKGKCIGSDEQLGKLVYNALETATGGFVLLYEWVLQWQKKMGPFLTSQEKEKIDKCKKQIQGTETEFNSLVKLSHPNVVRYLAMNLKEQDDSIVVDILVEHISGVSLAAHLSHSGPIPVHQLRRYTAQLLSGLDYLHSNSVVHKVLSASNVLVDAEGTVKITDYSISKRLADICKEDVFEQTRVRFSDNALPYKTGKKGDVWRLGLLLLSLSQGQECGEYPVTIPSDLPADFQDFLKKCVCLDDKERWSPQQLLKHSFINPQPKMPLVEQSPEDSEGQDYVETVIPSNRLPSAAFFSETQRQFSRYFIEFEELQLLGKGAFGAVIKVQNKLDGCCYAVKRIPINPASRQFRRIKGEVTLLSRLHHENIVRYYNAWIERHERPAGPGTPPPDSGPLAKDDRAARGQPASDTDGLDSVEAAAPPPILSSSVEWSTSGERSASARFPATGPGSSDDEDDDEDEHGGVFSQSFLPASDSESDIIFDNEDENSKSQNQDEDCNEKNGCHESEPSVTTEAVHYLYIQMEYCEKSTLRDTIDQGLYRDTVRLWRLFREILDGLAYIHEKGMIHRDLKPVNIFLDSDDHVKIGDFGLATDHLAFSADSKQDDQTGDLIKSDPSGHLTGMVGTALYVSPEVQGSTKSAYNQKVDLFSLGIIFFEMSYHPMVTASERIFVLNQLRDPTSPKFPEDFDDGEHAKQKSVISWLLNHDPAKRPTATELLKSELLPPPQMEESELHEVLHHTLTNVDGKAYRTMMAQIFSQRISPAIDYTYDSDILKGNFSIRTAKMQQHVCETIIRIFKRHGAVQLCTPLLLPRNRQIYEHNEAALFMDHSGMLVMLPFDLREAEAGESLEPGRRRLQ

SEQ ID NO: 3180 - protein, 166 aa, Artificial Sequence
  Synthetic polypeptide
MAAPEAPPLDRVFRTTWLSTECDSHPLPPSYRKFLFETQAADLAGGTTVAAGNLLNESEKDCGQDRRAPGVQPCRLVTMTSVVKTVYSLQPPSALSGGQPADTQTRATSKSLLPVRSKEVDVSKQLHSGGPENDVTKITKLRRENGQMKATDTATRRNVRKGYSGG

SEQ ID NO: 3181 - protein, 8 aa, Artificial Sequence
  Synthetic polypeptide
YLKPRRPT

SEQ ID NO: 3182 - protein, 88 aa, Artificial Sequence
  Synthetic polypeptide
MTSVVKTVYSLQPPSALSGGQPADTQTRATSKSLLPVRSKEVDVSKQLHSGGPENDVTKITKLRRENGQMKATDTATRRNVRKGYSGG

SEQ ID NO: 3183 - protein, 35 aa, Artificial Sequence
  Synthetic polypeptide
SCCRESFKREREGLRAGPAGSWGSAVPPRYDDQCG

SEQ ID NO: 3184 - protein, 1 aa, Artificial Sequence
  Synthetic polypeptide
F

SEQ ID NO: 3185 - protein, 2 aa, Artificial Sequence
  Synthetic polypeptide
MR

SEQ ID NO: 3186 - protein, 4 aa, Artificial Sequence
  Synthetic polypeptide
PLHC

SEQ ID NO: 3187 - protein, 417 aa, Artificial Sequence
  Synthetic polypeptide
MATATRLLGWRVASWRLRPPLAGFVSQRAHSLLPVDDAINGLSEEQRQLRQTMAKFLQEHLAPKAQEIDRSNEFKNLREFWKQLGNLGVLGITAPVQYGGSGLGYLEHVLVMEEISRASGAVGLSYGAHSNLCINQLVRNGNEAQKEKYLPKLISGEYIGALAMSEPNAGSDVVSMKLKAEKKGNHYILNGNKFWITNGPDADVLIVYAKTDLAAVPASRGITAFIVEKGMPGFSTSKKLDKLGMRGSNTCELIFEDCKIPAANILGHENKGVYVLMSGLDLERLVLAGGPLGLMQAVLDHTIPYLHVREAFGQKIGHFQLMQGKMADMYTRLMACRQYVYNVAKACDEGHCTAKDCAGVILYSAECATQVALDGIQCFGKVVCACNPSTLGGQGRWITCSQEFKTSLSNVVKPHLY

SEQ ID NO: 3188 - protein, 420 aa, Artificial Sequence
  Synthetic polypeptide
MAEMATATRLLGWRVASWRLRPPLAGFVSQRAHSLLPVDDAINGLSEEQRQLRQTMAKFLQEHLAPKAQEIDRSNEFKNLREFWKQLGNLGVLGITAPVQYGGSGLGYLEHVLVMEEISRASGAVGLSYGAHSNLCINQLVRNGNEAQKEKYLPKLISGEYIGALAMSEPNAGSDVVSMKLKAEKKGNHYILNGNKFWITNGPDADVLIVYAKTDLAAVPASRGITAFIVEKGMPGFSTSKKLDKLGMRGSNTCELIFEDCKIPAANILGHENKGVYVLMSGLDLERLVLAGGPLGLMQAVLDHTIPYLHVREAFGQKIGHFQLMQGKMADMYTRLMACRQYVYNVAKACDEGHCTAKDCAGVILYSAECATQVALDGIQCFGKVVCACNPSTLGGQGRWITCSQEFKTSLSNVVKPHLY

SEQ ID NO: 3189 - protein, 390 aa, Artificial Sequence
  Synthetic polypeptide
MAEMATATRLLGWRVASWRLRPPLAGFVSQRAHSLLPVDDAINGLSEEQRQEFWKQLGNLGVLGITAPVQYGGSGLGYLEHVLVMEEISRASGAVGLSYGAHSNLCINQLVRNGNEAQKEKYLPKLISGEYIGALAMSEPNAGSDVVSMKLKAEKKGNHYILNGNKFWITNGPDADVLIVYAKTDLAAVPASRGITAFIVEKGMPGFSTSKKLDKLGMRGSNTCELIFEDCKIPAANILGHENKGVYVLMSGLDLERLVLAGGPLGLMQAVLDHTIPYLHVREAFGQKIGHFQLMQGKMADMYTRLMACRQYVYNVAKACDEGHCTAKDCAGVILYSAECATQVALDGIQCFGKVVCACNPSTLGGQGRWITCSQEFKTSLSNVVKPHLY

SEQ ID NO: 3190 - protein, 216 aa, Artificial Sequence
  Synthetic polypeptide
ADVLIVYAKTDLAAVPASRGITAFIVEKGMPGFSTSKKLDKLGMRGSNTCELIFEDCKIPAANILGHENKGVYVLMSGLDLERLVLAGGPLGLMQAVLDHTIPYLHVREAFGQKIGHFQLMQGKMADMYTRLMACRQYVYNVAKACDEGHCTAKDCAGVILYSAECATQVALDGIQCFGKVVCACNPSTLGGQGRWITCSQEFKTSLSNVVKPHLY

SEQ ID NO: 3191 - protein, 14 aa, Artificial Sequence
  Synthetic polypeptide
MDGVSSEANEENFS

SEQ ID NO: 3192 - protein, 128 aa, Artificial Sequence
  Synthetic polypeptide
MAMQMQLEANADTSVEEESFGPQPISRLEQCGINANDVKKLEEAGFHTVEAVAYAPKKELINIKGISEAKADKILAEAAKLVPMGFTTATEFHQRRSEIIQITTGSKELDKLLQGAHAYSGGRGRRIT

SEQ ID NO: 3193 - protein, 216 aa, Artificial Sequence
  Synthetic polypeptide
MGGAQLELPSGARPGVCVRRSFRAHAGDQPRRPPGPIPVPGTMKQESAAPNTPPTSQSPTPSAQFPRNDGDPQALWIFGYGSLVWRPDFAYSDSRVGFVRGYSRRFWQGDTFHRGSDKMPGRVVTLLEDHEGCTWGVAYQVQGEQGRSAASLLRPRAHWKEQTTPEVLPYRAITLTAKVCSFTPEPGRPQTHQKEKTPNTSEHQEGQTPDGPPEKL

SEQ ID NO: 3194 - protein, 49 aa, Artificial Sequence
  Synthetic polypeptide
MGSRASTLLRDEELEEIKKETGFSHSQITRLYSRFTSLDKGENGTLRCR

SEQ ID NO: 3195 - protein, 132 aa, Artificial Sequence
  Synthetic polypeptide
MAAQPLRHRSRCATPPRGDFCGGTERAIDQASFTTSMEWDTQVVKGSSPLGPAGLGAEEPAAGPQLPSWLQPERCAVFQCAQCHAVLADSVHLAWDLSRSLGAVVFSRVTNNVVLEAPFLVGIEGSLKGSKI

SEQ ID NO: 3196 - protein, 3 aa, Artificial Sequence
  Synthetic polypeptide
EGD

SEQ ID NO: 3197 - protein, 663 aa, Artificial Sequence
  Synthetic polypeptide
MLSRPKPGESEVDLLHFQSQFLAAGAAPAVQLVKKGNRGGGDANSDRPPLQDHRDVVMLDNLPDLPPALVPSPPKRARPSPGHCLPEDEDPEERLRRHDQHITAVLTKIIERDTSSVAVNLPVPSGVAFPAVFLRSRDTQGKSATSGKRSIFAQEIAARRIAEAKGPSVGEVVPNVGPPEGAVTCETPTPRNQGCQLPGSSHSFQGPNLVTGKGLRDQEAEQEAQTIHEENIARLQAMAPEEILQEQQRLLAQLDPSLVAFLRSHSHTQEQTGETASEEQRPGGPSANVTKEEPLMSAFASEPRKRDKLEPEAPALALPVTPQKEWLHMDTVELEKLHWTQDLPPVRRQQTQERMQARFSLQGELLAPDVDLPTHLGLHHHGEEAERAGYSLQELFHLTRSQVSQQRALALHVLAQVISRAQAGEFGDRLAGSVLSLLLDAGFLFLLRFSLDDRVDGVIATAIRALRALLVAPGDEELLDSTFSWYHGALTFPLMPSQEDKEDEDEDEECPAGKAKRKSPEEESRPPPDLARHDVIKGLLATSLLPRLRYVLEVTYPGPAVVLDILAVLIRLARHSLESATRVLECPRLIETIVREFLPTSWSPVGAGPTPSLYKVPCATAMKLLRVLASAGRNIAARLAEVGESRGQQFDTSLANIMKPRLY

SEQ ID NO: 3198 - protein, 28 aa, Artificial Sequence
  Synthetic polypeptide
STLCYCHETTSCPGLSWEEYCCPAGRGG

SEQ ID NO: 3199 - protein, 58 aa, Artificial Sequence
  Synthetic polypeptide
MHDAFEPVPILEKLPLQIDCLAAWEEWLLVGTKQGHLLLYRIRKDVVAHAYNPSTLGD

SEQ ID NO: 3200 - protein, 610 aa, Artificial Sequence
  Synthetic polypeptide
MPTVISASVAPRTAAEPRSPGPVPHPAQSKATEAGGGNPSGIYSAIISRNFPIIGVKEKTFEQLHKKCLEKKVLYVDPEFPPDETSLFYSQKFPIQFVWKRPPEICENPRFIIDGANRTDICQGELGDCWFLAAIACLTLNQHLLFRVIPHDQSFIENYAGIFHFQFWRYGEWVDVVIDDCLPTYNNQLVFTKSNHRNEFWSALLEKAYAKLHGSYEALKGGNTTEAMEDFTGGVAEFFEIRDAPSDMYKIMKKAIERGSLMGCSIDDGTNMTYGTSPSGLNMGELIARMVRNMDNSLLQDSDLDPRGSDERPTRTIIPVQYETRMACGLVRGHAYSVTGLDEVPFKGEKVKLVRLRNPWGQVEWNGSWSDRWKDWSFVDKDEKARLQHQVTEDGEFWMSYEDFIYHFTKLEICNLTADALQSDKLQTWTVSVNEGRWVRGCSAGGCRNFPDTFWTNPQYRLKLLEEDDDPDDSEVICSFLVALMQKNRRKDRKLGASLFTIGFAIYEVPKEMHGNKQHLQKDFFLYNASKARSKTYINMREVSQRFRLPPSEYVIVPSTYEPHQEGEFILRVFSEKRNLSEEVENTISVDRPVKKKKTKGCRGSFEVPQ

SEQ ID NO: 3201 - protein, 98 aa, Artificial Sequence
  Synthetic polypeptide
MHGNKQHLQKDFFLYNASKARSKTYINMREVSQRFRLPPSEYVIVPSTYEPHQEGEFILRVFSEKRNLSEEVENTISVDRPVKKKKTKGCRGSFEVPQ

SEQ ID NO: 3202 - protein, 61 aa, Artificial Sequence
  Synthetic polypeptide
REQAAPAEGLLPVQRLQGQEQNLHQHAGGVPALPPASQRVRHRALHLRAPPGGGIHPPGLL

SEQ ID NO: 3203 - protein, 14 aa, Artificial Sequence
  Synthetic polypeptide
KKTKGCRGSFEVPQ

SEQ ID NO: 3204 - protein, 181 aa, Artificial Sequence
  Synthetic polypeptide
MAAANPWDPASAPNGAGLVLGHFIASGMVNQEMLNMSKKTVSCFVNFTRLQQITNIQAEIYQKNLEIELLKLEKDTADVVHPFFLAQKCHTLQSMNNHLEAVLKEKRSLRQRLLKPMCQENLPIEAVYHRYMVHLLELAVTFIERLETHLETIRNIPHLAANLKKMLGVVARACSPTYLGG

SEQ ID NO: 3205 - protein, 150 aa, Artificial Sequence
  Synthetic polypeptide
MAAANPWDPASAPNGAGLVLGHFIASGMVNQKNLEIELLKLEKDTADVVHPFFLAQKCHTLQSMNNHLEAVLKEKRSLRQRLLKPMCQENLPIEAVYHRYMVHLLELAVTFIERLETHLETIRNIPHLAANLKKMLGVVARACSPTYLGG

SEQ ID NO: 3206 - protein, 115 aa, Artificial Sequence
  Synthetic polypeptide
MSGGGEQLDILSVGILVKERWKVLRKIGGGGFGEIYDALDMLTRENVALKVESAQQPKQVLKMEVAVLKKLQGKDHVCRFIGCGRNDRFNYVVMQLQKNLLGMMACTCNPSYSGG

SEQ ID NO: 3207 - protein, 53 aa, Artificial Sequence
  Synthetic polypeptide
MSGGGEQLDILSVGILVKERWKVGKTMFVDLLAVGGMIDSTMWSCSCRKICWA

SEQ ID NO: 3208 - protein, 74 aa, Artificial Sequence [sequence omitted]

SEQ ID NO: 3209 - protein, 68 aa, Artificial Sequence
  Synthetic polypeptide
MSGGGEQLDILSVGILVKERWKVGKCCTEGGISSTTKTSSENGSCCFEKAARRLRQENHLNPRGLRLL

SEQ ID NO: 3210 - protein, 7 aa, Artificial Sequence
  Synthetic polypeptide
FEIQAER

SEQ ID NO: 3211 - protein, 95 aa, Artificial Sequence
  Synthetic polypeptide
MEKTKWLDIKGNHDAFNIPSLDSIKNYYRHTSFYYASPYCTLQMLHFFKLRVCGKPALSKSMGAIFPTACAHFLSLCLILVILTIFQTFSLYLLW

SEQ ID NO: 3212 - protein, 225 aa, Artificial Sequence
  Synthetic polypeptide
MAAVLALRVVAGLAAAALVAMLLEHYGLAGQPSPLPRPAPPRRPHPAPGPGDSNIFWGLQISDIHLSRFRDPGRAVDLEKFCSETIDIIQPALVLATGDLTDAKTKEQLGSRQHEVEWQTYQGILKKTRVMEKTKWLDIKGNHDAFNIPSLDSIKNYYRHTSFYYASPYCTLQMLHFFKLRVCGKPALSKSMGAIFPTACAHFLSLCLILVILTIFQTFSLYLLW

SEQ ID NO: 3213 - protein, 411 aa, Artificial Sequence
  Synthetic polypeptide
MDPTGSQLDSDFSQQDTPCLIIEDSQPESQVLEDDSGSHFSMLSRHLPNLQTHKENPVLDVVSNPEQTAGEERGDGNSGFNEHLKENKVADPVDSSNLDTCGSISQVIEQLPQPNRTSSVLGMSVESAPAVEEEKGEELEQKEKEKEEDTSGNTTHSLGAEDTASSQLGFGVLELSQSQDVEENTVPYEVDKEQLQSVTTNSGYTRLSDVDANTAIKHEEQSNEDIPIAEQSSKDIPVTAQPSKDVHVVKEQNPPPARSEDMPFSPKASVAAMEAKEQLSAQELMESGLQIQKSPEPEVLSTQEDLFDQSNKTVSSDGCSTPSREEGGCSLASTPATTLHLLQLSGQRSLVQDSLSTNSSDLVAPSPDAFRSTPFIVPSSPTEQEGRQASLLKPARPRAHWEERTTLDALP

SEQ ID NO: 3214 - protein, 416 aa, Artificial Sequence
  Synthetic polypeptide
MPGEQMDPTGSQLDSDFSQQDTPCLIIEDSQPESQVLEDDSGSHFSMLSRHLPNLQTHKENPVLDVVSNPEQTAGEERGDGNSGFNEHLKENKVADPVDSSNLDTCGSISQVIEQLPQPNRTSSVLGMSVESAPAVEEEKGEELEQKEKEKEEDTSGNTTHSLGAEDTASSQLGFGVLELSQSQDVEENTVPYEVDKEQLQSVTTNSGYTRLSDVDANTAIKHEEQSNEDIPIAEQSSKDIPVTAQPSKDVHVVKEQNPPPARSEDMPFSPKASVAAMEAKEQLSAQELMESGLQIQKSPEPEVLSTQEDLFDQSNKTVSSDGCSTPSREEGGCSLASTPATTLHLLQLSGQRSLVQDSLSTNSSDLVAPSPDAFRSTPFIVPSSPTEQEGRQASLLKPARPRAHWEERTTLDALP

SEQ ID NO: 3215 - protein, 388 aa, Artificial Sequence
  Synthetic polypeptide
MSRSGAAAEKADSRQRPQMKVNEYKENQNIAYVSLRPAQTTVLIKTAKVYLAPFSLSNYQLDQLMCPKSLSEKNSNNEVACKKTKIKKTCRRIIPPKMKNTSSKAESTLQNSSSAVHTESNKLQPKRTADAMNLSVDVESSQDGDSDEDTTPSLDFSGLSPYERKRLKNISENADFFASLQLSESAARLREMIEKRQPPKSKRKKPKRENGIGCRRSMRLLKVDPSGVSLPAAPTPPTLVADETPLLPPGPLEMTSENQEDNNERFKGFLHTWAGMSKPSSKNTEKGLSSIKSYKANLNGMVISEDTVYKVTTGPIFSMALHPSETRTLVAVGAKFGQVGLCDLPDAVAHTCDPSTLGCQGLADHLRSGVQDQPEQHDEIPSLLKIQN

SEQ ID NO: 3216 - protein, 324 aa, Artificial Sequence
  Synthetic polypeptide
MCPKSLSEKNSNNEVACKKTKIKKTCRRIIPPKMKNTSSKAESTLQNSSSAVHTESNKLQPKRTADAMNLSVDVESSQDGDSDEDTTPSLDFSGLSPYERKRLKNISENADFFASLQLSESAARLREMIEKRQPPKSKRKKPKRENGIGCRRSMRLLKVDPSGVSLPAAPTPPTLVADETPLLPPGPLEMTSENQEDNNERFKGFLHTWAGMSKPSSKNTEKGLSSIKSYKANLNGMVISEDTVYKVTTGPIFSMALHPSETRTLVAVGAKFGQVGLCDLPDAVAHTCDPSTLGCQGLADHLRSGVQDQPEQHDEIPSLLKIQN

SEQ ID NO: 3217 - protein, 47 aa, Artificial Sequence
  Synthetic polypeptide
MLSRLMSGSSRSLEREYSCTVRLLDDSEYTCTIQGPGTNSPQMLRDD

SEQ ID NO: 3218 - protein, 41 aa, Artificial Sequence
  Synthetic polypeptide
DERQQQEPGARVQLHRAAAGRQRVHLHHPGSWNQFPTDAEG

SEQ ID NO: 3219 - protein, 297 aa, Artificial Sequence
  Synthetic polypeptide
MVGFGANRRAGRLPSLVLVVLLVVIVVLAFNYWSISSRHVLLQEEVAELQGQVQRTEVARGRLEKRNSDLLLLVDTHKKQIDQKEADYGRLSSRLQAREGLGKRCEDDKVKLQNNISYQMADIHHLKEQLAELRQEFLRQEDQLQDYRKNNTYLVKRLEYESFQCGQQMKELRAQHEENIKKLADQFLEEQKQETQKIQSNDGKELDINNQVVPKNIPKVAENVADKNEEPSSNHIPHGKEQIKRGGDAGMPGIEENDLAKVDDLPPVAPNLTTVYTEKYLHESQKSGEQSQYLVLT

SEQ ID NO: 3220 - protein, 1340 aa, Artificial Sequence
  Synthetic polypeptide
MAAEEGVASAASAGGSWGTAAMGRVLPMLLVPVPAEAMGQLGSRAQLRTQPEALGSLTAAGSLQVLSLTPGSRGGGRCCLEGPFWHFLWEDSRNSSTPTEKPKLLALGENYELLIYEFNLKDGRCDATILYSCSREALQKLIDDQDISISLLSLRILSFHNNTSLLFINKCVILHIIFPERDAAIRVLNCFTLPLPAQAVDMIIDTQLCRGILFVLSSLGWIYIFDVVDGTYVAHVDLALHKEDMCNEQQQEPAKISSFTSLKVSQDLDVAVIVSSSNSAVALNLNLYFRQHPGHLLCERILEDLPIQGPKGVDEDDPVNSAYNMKLAKFSFQIDRSWKAQLSSLNETIKNSKLEVSCCAPWFQDILHLESPESGNHSTSVQSWAFIPQDIMHGQYNVLQKDHAKTSDPGRSWKIMHISEQEEPIELKCVSVTGFTALFTWEVERMGYTITLWDLETQGMQCFSLGTKCIPVDSSGDQQLCFVLTENGLSLILFGLTQEEFLNRLMIHGSASTVDTLCHLNGWGRCSIPIHALEAGIENRQLDTVNFFLKSKENLFNPSSKSSVSDQFDHLSSHLYLRNVEELIPALDLLCSAIRESYSEPQSKHFSEQLLNLTLSFLNNQIKELFIHTEELDEHLQKGVNILTSYINELRTFMIKFPWKLTDAIDEYDVHENVPKVKESNIWKKLSFEEVIASAILNNKIPEAQTFFRIDSHSAQKLEELIGIGLNLVFDNLKKNNIKEASELLKNMGFDVKGQLLKICFYTTNKNIRDFLVEILKEKNYFSEKEKRTIDFVHQVEKLYLGHFQENMQIQSFPRYWIKEQDFFKHKSVLDSFLKYDCKDEFNKQDHRIVLNWALWWDQLTQESILLPRISPEEYKSYSPEALWRYLTARHDWLNIILWIGEFQTQHSYASLQQNKWPLLTVDVINQNTSCNNYMRNEILDKLARNGVFLASELEDFECFLLRLSRIGGVIQDTLPVQNYKTKEGWDFHSQFILYCLEHSLQHLLYVYLDCYKLSPENCPFLEKKELHEAHPWFEFLVQCRQVASNLTDPKLIFQASLANAQILIPTNQASVSSMLLEGHTLLALATTMYSPGGVSQVVQNEENENCLKKVDPQLLKMALTPYPKLKTALFPQCTPPSVLPSDITIYHLIQSLSPFDPSRLFGWQSANTLAIGDAWSHLPHFSSPDLVNKYAIVERLNFAYYLHNGRPSFAFGTFLVQELIKSKTPKQLIQQVGNEAYVIGLSSFHIPSIGAACVCFLELLGLDSLKLRVDMKVANIILSYKCRNEDAQYSFIRESVAEKLSKLADGEKTTTEELLVLLEEGTWNSIQQQEIKRHSGSHL

SEQ ID NO: 3221 - protein, 1208 aa, Artificial Sequence
  Synthetic polypeptide
MAAEEGVASAASAGGSWGTAAMGRVLPMLLVPVPAEAMGQLGSRAQLRTQPEALGSLTAAGSLQVLSLTPGSRGGGRCCLEGPFWHFLWEDSRNSSTPTEKPKLLALGENYELLIYEFNLKDGRCDATILYSCSREALQKLIDDQDISISLLSLRILSFHNNTSLLFINKCVILHIIFPERDAAIRVLNCFTLPLPAQAVDMIIDTQLCRGILFVLSSLGWIYIFDVVDGTYVAHVDLALHKEDMCNEQQQEPAKISSFTSLKVSQDLDVAVIVSSSNSAVALNLNLYFRQHPGHLLCERILEDLPIQGPKGVDEDDPVNSAYNMKLAKFSFQIDRSWKAQLSSLNETIKNSKLEVSCCAPWFQDILHLESPESGNHSTSVQSWAFIPQDIMHGQYNVLQKDHAKTSDPGRSWKIMHISEQEEPIELKCVSVTGFTALFTWEVERMGYTITLWDLETQGMQCFSLGTKCIPVDSSGDQQLCFVLTENGLSLILFGLTQEEFLNRLMIHGSASTVDTLCHLNGWGRCSIPIHALEAGIENRQLDTVNFFLKSKENLFNPSSKSSVSDQFDHLSSHLYLRNVEELIPALDLLCSAIRESYSEPQSKHFSEQLLNLTLSFLNNQIKELFIHTEELDEHLQKGVNILTSYINELRTFMIKFPWKLTDAIDEYDVHENVPKVKESNIWKKLSFEEVIASAILNNKIPEAQTFFRIDSHSAQKLEELIGIGLNLVFDNLKKNNIKEASELLKNMGFDVKGQLLKICFYTTNKNIRDFLVEILKEKNYFSEKEKRTIDFVHQVEKLYLGHFQENMQIQSFPRYWIKEQDFFKHKSVLDSFLKYDCKDEFNKQDHRIVLNWALWWDQLTQESILLPRISPEEYKSYSPEALWRYLTARHDWLNIILWIGEFQTQHSYASLQQNKWPLLTVDVINQNTSCNNYMRNEILDKLARNGVFLASELEDFECFLLRLSRIGGVIQDTLPVQNYKTKEGWDFHSQFILYCLEHSLQHLLYVYLDCYKLSPENCPFLEKKELHEAHPWFEFLVQCRQVASNLTDPKLIFQASLANAQILIPTNQASVSSMLLEGHTLLALATTMYSPGGVSQVVQNEENENCLKKVDPQLLKMALTPYPKLKTALFPQCTPPSVLPSDITIYHLIQSLSPFDPSRLFGWQSANTLAIGALWEVKVGRSPEARSSRPAWPTWRNPVSTVSTKIS

SEQ ID NO: 3222 - protein, 117 aa, Artificial Sequence
  Synthetic polypeptide
PGGVSQVVQNEENENCLKKVDPQLLKMALTPYPKLKTALFPQCTPPSVLPSDITIYHLIQSLSPFDPSRLFGWQSANTLAIGALWEVKVGRSPEARSSRPAWPTWRNPVSTVSTKIS

SEQ ID NO: 3223 - protein, 17 aa, Artificial Sequence
  Synthetic polypeptide
LLGVSVRLFRMKKMKTV

SEQ ID NO: 3224 - protein, 1200 aa, Artificial Sequence
  Synthetic polypeptide
MAAEEGVASAASAGGSWGTAAMGRVLPMLLVPVPAEAMGQLGSRAQLRTQPEALGSLTAAGSLQVLSLTPGSRGGGRCCLEGPFWHFLWEDSRNSSTPTEKPKLLALGENYELLIYEFNLKDGRCDATILYSCSREALQKLIDDQDISISLLSLRILSFHNNTSLLFINKCVILHIIFPERDAAIRVLNCFTLPLPAQAVDMIIDTQLCRGILFVLSSLGWIYIFDVVDGTYVAHVDLALHKEDMCNEQQQEPAKISSFTSLKVSQDLDVAVIVSSSNSAVALNLNLYFRQHPGHLLCERILEDLPIQGPKGVDEDDPVNSAYNMKLAKFSFQIDRSWKAQLSSLNETIKNSKLEVSCCAPWFQDILHLESPESGNHSTSVQSWAFIPQDIMHGQYNVLQKDHAKTSDPGRSWKIMHISEQEEPIELKCVSVTGFTALFTWEVERMGYTITLWDLETQGMQCFSLGTKCIPVDSSGDQQLCFVLTENGLSLILFGLTQEEFLNRLMIHGSASTVDTLCHLNGWGRCSIPIHALEAGIENRQLDTVNFFLKSKENLFNPSSKSSVSDQFDHLSSHLYLRNVEELIPALDLLCSAIRESYSEPQSKHFSEQLLNLTLSFLNNQIKELFIHTEELDEHLQKGVNILTSYINELRTFMIKFPWKLTDAIDEYDVHENVPKVKESNIWKKLSFEEVIASAILNNKIPEAQTFFRIDSHSAQKLEELIGIGLNLVFDNLKKNNIKEASELLKNMGFDVKGQLLKICFYTTNKNIRDFLVEILKEKNYFSEKEKRTIDFVHQVEKLYLGHFQENMQIQSFPRYWIKEQDFFKHKSVLDSFLKYDCKDEFNKQDHRIVLNWALWWDQLTQESILLPRISPEEYKSYSPEALWRYLTARHDWLNIILWIGEFQTQHSYASLQQNKWPLLTVDVINQNTSCNNYMRNEILDKLARNGVFLASELEDFECFLLRLSRIGGVIQDTLPVQNYKTKEGWDFHSQFILYCLEHSLQHLLYVYLDCYKLSPENCPFLEKKELHEAHPWFEFLVQCRQVASNLTDPKLIFQASLANAQILIPTNQASVSSMLLEGHTLLALATTMYSPGGVSQVVQNEENENCLKKVDPQLLKMALTPYPKLKTALFPQCTPPSVLPSDITIYHLIQSLSPFDPSRLFGWQSANTLAIGEHKILRNKFNQRGQRSVHIKLSNIGER

SEQ ID NO: 3225 - protein, 109 aa, Artificial Sequence
  Synthetic polypeptide
PGGVSQVVQNEENENCLKKVDPQLLKMALTPYPKLKTALFPQCTPPSVLPSDITIYHLIQSLSPFDPSRLFGWQSANTLAIGEHKILRNKFNQRGQRSVHIKLSNIGER

SEQ ID NO: 3226 - protein, 17 aa, Artificial Sequence
  Synthetic polypeptide
LLGVSVRLFRMKKMKTV

SEQ ID NO: 3227 - protein, 190 aa, Artificial Sequence
  Synthetic polypeptide
MAAEEGVASAASAGGSWGTAAMGRVLPMLLVPVPAEAMGQLGSRAQLRTQPEALGSLTAAGSLQVLSLTPGSRGGGRCCLEGPFWHFLWEDSRNSSTPTEKPKLLALGENYELLIYEFNLKDGRCDATILYSCSREALQKLIDDQDISAVAHACNPSTLGGRGGRITRSGVRDQPGQYGETPSLLKIQKN

SEQ ID NO: 3228 - protein, 25 aa, Artificial Sequence
  Synthetic polypeptide
MAAAAKPNNLSLVVHGPGDLRLLHC

SEQ ID NO: 3229 - protein, 134 aa, Artificial Sequence
  Synthetic polypeptide
MQTKGGQTWARRALLLGILWATAHLPLSGTSLPQRLPRATGNSTQCVISPSSEFPEGFFTRQERRDGGIIIYFLIIVYMFMAISIVCDEYFLPSLEIISECQEQWLTPVIPVLWESKVGGLPEPRSSRPAWPTW

SEQ ID NO: 3230 - protein, 291 aa, Artificial Sequence
  Synthetic polypeptide
MRRGRLLEIALGFTVLLASYTSHGADANLEAGNVKETRASRAKRRGGGGHDALKGPNVCGSRYNAYCCPGWKTLPGGNQCIVPICRHSCGDGFCSRPNMCTCPSGQIAPSCGSRSIQHCNIRCMNGGSCSDDHCLCQKGYIGTHCGQPVCESGCLNGGRCVAPNRCACTYGFTGPQCERDYRTGPCFTVISNQMCQGQLSGIVCTKTLCCATVGRAWGHPCEMCPAQPHPCRRGFIPNIRTGACQDVDECQAIPGLCQGGNCINTVGSFECKCPAGHKLNEVSQKCEVPEF

SEQ ID NO: 3231 - protein, 327 aa, Artificial Sequence
  Synthetic polypeptide
MPVLYDRLLKLKEMFNSKFGSIPKFYVRAPGRVNIIGEHIDYCGYSVLPMAVEQDVLIAVEPVKTYALQLANTNPLYPDFSTSANNIQIDKTKPLWHNYFLCGLKGIQEHFGLSNLTGMNCLVDGNIPPSSGLSSSSALVCCAGLVTLTVLGRNLSKVELAEICAKSERYIGTEGGGMDQSISFLAEEGTAKLIEFSPLRATDVKLPSGAVFVIANSCVEMNKAATSHFNIRVMECRLAAKLLAKYKSLQWDKVLRLEEVQAKLGISLEEMLLVTEDALHPEPYNPEEICRCLGISLEELRTQILSPNTQDGIILHIPQCCDENFMR

SEQ ID NO: 3232 - protein, 338 aa, Artificial Sequence
  Synthetic polypeptide
MATESPATRRVQVAEHPRLLKLKEMFNSKFGSIPKFYVRAPGRVNIIGEHIDYCGYSVLPMAVEQDVLIAVEPVKTYALQLANTNPLYPDFSTSANNIQIDKTKPLWHNYFLCGLKGIQEHFGLSNLTGMNCLVDGNIPPSSGLSSSSALVCCAGLVTLTVLGRNLSKVELAEICAKSERYIGTEGGGMDQSISFLAEEGTAKLIEFSPLRATDVKLPSGAVFVIANSCVEMNKAATSHFNIRVMECRLAAKLLAKYKSLQWDKVLRLEEVQAKLGISLEEMLLVTEDALHPEPYNPEEICRCLGISLEELRTQILSPNTQDGIILHIPQCCDENFMR

SEQ ID NO: 3233 - protein, 314 aa, Artificial Sequence
  Synthetic polypeptide
MFNSKFGSIPKFYVRAPGRVNIIGEHIDYCGYSVLPMAVEQDVLIAVEPVKTYALQLANTNPLYPDFSTSANNIQIDKTKPLWHNYFLCGLKGIQEHFGLSNLTGMNCLVDGNIPPSSGLSSSSALVCCAGLVTLTVLGRNLSKVELAEICAKSERYIGTEGGGMDQSISFLAEEGTAKLIEFSPLRATDVKLPSGAVFVIANSCVEMNKAATSHFNIRVMECRLAAKLLAKYKSLQWDKVLRLEEVQAKLGISLEEMLLVTEDALHPEPYNPEEICRCLGISLEELRTQILSPNTQDGIILHIPQCCDENFMR

SEQ ID NO: 3234 - protein, 209 aa, Artificial Sequence
  Synthetic polypeptide
MNCLVDGNIPPSSGLSSSSALVCCAGLVTLTVLGRNLSKVELAEICAKSERYIGTEGGGMDQSISFLAEEGTAKLIEFSPLRATDVKLPSGAVFVIANSCVEMNKAATSHFNIRVMECRLAAKLLAKYKSLQWDKVLRLEEVQAKLGISLEEMLLVTEDALHPEPYNPEEICRCLGISLEELRTQILSPNTQDGIILHIPQCCDENFMR

SEQ ID NO: 3235 - protein, 7 aa, Artificial Sequence
  Synthetic polypeptide
AGCEAPG

SEQ ID NO: 3236 - protein, 38 aa, Artificial Sequence
  Synthetic polypeptide
CRCLGISLEELRTQILSPNTQDGIILHIPQCCDENFMR

SEQ ID NO: 3237 - protein, 52 aa, Artificial Sequence
  Synthetic polypeptide
MAGQRTCQRRSSRAGPGKMQEPPKSIEEFLKFQNWKYQFEQLSLQEKYLYKS

SEQ ID NO: 3238 - protein, 307 aa, Artificial Sequence
  Synthetic polypeptide
MSLNPPIFLKRSEENSSKFVETKQSQTTSIASEDPLQNLCLASQEVLQKAQQSGRSKCLKCGGSRMFYCYTCYVPVENVPIEQIPLVKLPLKIDIIKHPNETDGKSTAIHAKLLAPEFVNIYTYPCIPEYEEKDHEVALIFPGPQSISIKDISFHLQKRIQNNVRGKNDDPDKPSFKRKRTEEQEFCDLNDSKCKGTTLKKIIFIDSTWNQTNKIFTDERLQGLLQVELKTRKTCFWRHQKGKPDTFLSTIEAIYYFLKRKNRWKMEPKSQREEPRSKESNGLGNHYQRDELNHNQGIASSFGVGGP

SEQ ID NO: 3239 - protein, 220 aa, Artificial Sequence
  Synthetic polypeptide
MLPLKIDIIKHPNETDGKSTAIHAKLLAPEFVNIYTYPCIPEYEEKDHEVALIFPGPQSISIKDISFHLQKRIQNNVRGKNDDPDKPSFKRKRTEEQEFCDLNDSKCKGTTLKKIIFIDSTWNQTNKIFTDERLQGLLQVELKTRKTCFWRHQKGKPDTFLSTIEAIYYFLKRKNRWKMEPKSQREEPRSKESNGLGNHYQRDELNHNQGIASSFGVGGP

SEQ ID NO: 3240 - protein, 343 aa, Artificial Sequence [sequence omitted]

SEQ ID NO: 3241 - protein, 355 aa, Artificial Sequence
  Synthetic polypeptide
MSLVDLGKKLLEAARAGQDDEVRILMANGAPFTTDWLGTSPLHLAAQYGHYSTTEVLLRAGVSRDARTKVDRTPLHMAASEGHASIVEVLLKHGADVNAKDMLKMTALHWATEHNHQEVVELLIKYGADVHTQSKFCKTAFDISIDNGNEDLAEILQIAMQNQINTNPESPDTVTIHAATPQFIIGPGGVVNLTGLVSSENSSKATDETGVSAVQFGNSSTSVLATLAALAEASAPLSNSSETPVVATEEVVTAESVDGAIQQVVSSGGQQVITIVTDGIQLGNLHSIPTSGIGQPIIVTMPDGQQVLTVPATDIAEETVISEEPPAKRQCIEIIENRVESAEIEKCSSQGCMTS

SEQ ID NO: 3242 - protein, 279 aa, Artificial Sequence
  Synthetic polypeptide
MAASEGHASIVEVLLKHGADVNAKDMLKMTALHWATEHNHQEVVELLIKYGADVHTQSKFCKTAFDISIDNGNEDLAEILQIAMQNQINTNPESPDTVTIHAATPQFIIGPGGVVNLTGLVSSENSSKATDETGVSAVQFGNSSTSVLATLAALAEASAPLSNSSETPVVATEEVVTAESVDGAIQQVVSSGGQQVITIVTDGIQLGNLHSIPTSGIGQPIIVTMPDGQQVLTVPATDIAEETVISEEPPAKRQCIEIIENRVESAEIEKCSSQGCMTS

SEQ ID NO: 3243 - protein, 32 aa, Artificial Sequence
  Synthetic polypeptide
NTCCNTTVYHWTWRGGEPNRSGIFRKFIQGNR

SEQ ID NO: 3244 - protein, 342 aa, Artificial Sequence
  Synthetic polypeptide
MSLVDLGKKLLEAARAGQDDEVRILMANGAPFTTDWLGTSPLHLAAQYGHYSTTEVLLRAGVSRDARTKVDRTPLHMAASEGHASIVEVLLKHGADVNAKDMLKMTALHWATEHNHQEVVELLIKYGADVHTQSKFCKTAFDISIDNGNEDLAEILQIAMQNQINTNPESPDTVTIHAATPQFIIGPGGVVNLTDETGVSAVQFGNSSTSVLATLAALAEASAPLSNSSETPVATEEVVTAESVDGAIQQVVSSGGQQVITIVTDGIQLGNLHSIPTSGIGQPIIVTMPDGQQVLTVPATDIAEETVISEEPPAKRQCIEIIENRVESAEIEKCSSQGCMTS

SEQ ID NO: 3245 - protein, 14 aa, Artificial Sequence
  Synthetic polypeptide
MQGVVMGTCNPSYS

SEQ ID NO: 3246 - protein, 706 aa, Artificial Sequence
  Synthetic polypeptide
MSDIVEKTLTALPGLFLQNQPGGGPAAAKASFSSRLGSLVRGITALTSKHEEEKLIQQELSSLKATVSAPTTTLKMMKECMVRLIYCEMLGYDASFGYIHAIKLAQQGNLLEKRVGYLAVSLFLHESHELLLLLVNTVVKDLQSTNLVEVCMALTVVSQIFPCEMIPAVLPLIEDKLQHSKEIVRRKAVLALYKFHLIAPNQVQHIHIKFRKALCDRDVGVMAASLHIYLRMIKENSSGYKDLTGSFVTILKQVVGGKLPVEFNYHSVPAPWLQIQLLRILGLLGKDDQRTSELMYDVLDESLRRAELNHNVTYAILFECVHTVYSIYPKSELLEKAAKCIGKFVLSPKINLKYLGLKALTYVIQQDPTLALQHQMTIIECLDHPDPIIKRETLELLYRITNAQNITVIVQKMLEYLHQSKEEYVIVNLVGKIAELAEKYAPDNAWFIQTMNAVFSVGGDVMHPDIPNNFLRLLAEGFDDETEDQQLRLYAVQSYLTLLDMENVFYPQRFLQVMSWVLGEYSYLLDKETPEEVIAKLYKLLMNDSVSSETKAWLIAAVTKLTSQAHSSNTVERLIHEFTISLDTCMRQHAFELKHLHENVELMKSLLPVDRSCEDLVVDASLSFLDGFVAEGLSQGAAPYKPPHQRQEEKLSQEKGSSSGSAECFQGMTSVPFMGLLPRAASSLCSLCSGTAFCGCSSHSLGPGVA

SEQ ID NO: 3247 - protein, 631 aa, Artificial Sequence
  Synthetic polypeptide
MMKECMVRLIYCEMLGYDASFGYIHAIKLAQQGNLLEKRVGYLAVSLFLHESHELLLLLVNTVVKDLQSTNLVEVCMALTVVSQIFPCEMIPAVLPLIEDKLQHSKEIVRRKAVLALYKFHLIAPNQVQHIHIKFRKALCDRDVGVMAASLHIYLRMIKENSSGYKDLTGSFVTILKQVVGGKLPVEFNYHSVPAPWLQIQLLRILGLLGKDDQRTSELMYDVLDESLRRAELNHNVTYAILFECVHTVYSIYPKSELLEKAAKCIGKFVLSPKINLKYLGLKALTYVIQQDPTLALQHQMTIIECLDHPDPIIKRETLELLYRITNAQNITVIVQKMLEYLHQSKEEYVIVNLVGKIAELAEKYAPDNAWFIQTMNAVFSVGGDVMHPDIPNNFLRLLAEGFDDETEDQQLRLYAVQSYLTLLDMENVFYPQRFLQVMSWVLGEYSYLLDKETPEEVIAKLYKLLMNDSVSSETKAWLIAAVTKLTSQAHSSNTVERLIHEFTISLDTCMRQHAFELKHLHENVELMKSLLPVDRSCEDLVVDASLSFLDGFVAEGLSQGAAPYKPPHQRQEEKLSQEKGSSSGSAECFQGMTSVPFMGLLPRAASSLCSLCSGTAFCGCSSHSLGPGVA

SEQ ID NO: 3248 - protein, 401 aa, Artificial Sequence
  Synthetic polypeptide
MALPFRKDLEKYKDLDEDELLGNLSETELKQLETVLDDLDPENALLPAGFRQKNQTSKSTTGPFDREHLLSYLEKEALEHKDREDYVPYTGEKKGKIFIPKQKPVQTFTEEKVSLDPELEEALTSASDTELCDLAAILGMHNLITNTKFCNIMGSSNGVDQEHFSNVVKGEKILPVFDEPPNPTNVEESLKRTKENDAHLVEVNLNNIKNIPIPTLKDFAKALETNTHVKCFSLAATRSNDPVATAFAEMLKVNKTLKSLNVESNFITGVGILALIDALRDNETLAELKIDNQRQQLGTAVELEMAKMLEENTNILKFGYQFTQQGPRTRAANAITKNNDLETGDSLHHVKIQQNSSCLQARKGTLTRNQTMISDVPASRNVSNKFLLFKPPSLWYLVRTI

SEQ ID NO: 3249 - protein, 262 aa, Artificial Sequence
  Synthetic polypeptide
MHNLITNTKFCNIMGSSNGVDQEHFSNVVKGEKILPVFDEPPNPTNVEESLKRTKENDAHLVEVNLNNIKNIPIPTLKDFAKALETNTHVKCFSLAATRSNDPVATAFAEMLKVNKTLKSLNVESNFITGVGILALIDALRDNETLAELKIDNQRQQLGTAVELEMAKMLEENTNILKFGYQFTQQGPRTRAANAITKNNDLETGDSLHHVKIQQNSSCLQARKGTLTRNQTMISDVPASRNVSNKFLLFKPPSLWYLVRTI

SEQ ID NO: 3250 - protein, 20 aa, Artificial Sequence
  Synthetic polypeptide
MWSKVKRFFRYLMSHQIQPM

SEQ ID NO: 3251 - protein, 46 aa, Artificial Sequence
  Synthetic polypeptide
MAASELYTKAGVQWRDLGSLQPPPPSRLPWPPKVPRLQPLPGRHPV

SEQ ID NO: 3252 - protein, 14 aa, Artificial Sequence
  Synthetic polypeptide
MAASELYTKLIIYH

SEQ ID NO: 3253 - protein, 695 aa, Artificial Sequence
  Synthetic polypeptide
MRTSLQAVALWGQKAPPHSITAIMITDDQRTIVTGSQEGQLCLWNLSHELKISAKELLFGHSASVTCLARARDFSKQPYIVSAAENGEMCVWNVTNGQCMEKATLPYRHTAICYYHCSFRMTGEGWLLCCGEYQDVLIIDAKTLAVVHSFRSSQFPDWINCMCIVHSMRIQEDSLLVVSVAGELKVWDLSSSINSIQEKQDVYEKESKFLESLNCQTIRFCTYTERLLLVVFSKCWKVYDYCDFSLLLTEVSRNGQFFAGGEVIAAHRILIWTEDGHSYIYQLLNSGLSKSIYPADGRVLKETIYPHLLCSTSVQENKEQSRPFVMGYMNERKEPFYKVLFSGEVSGRITLWHIPDVPVSKFDGSPREIPVTATWTLQDNFDKHDTMSQSIIDYFSGLKDGAGTAVVTSSEYIPSLDKLICGCEDGTIIITQALNAAKARLLEGGSLVKDSPPHKVLKGHHQSVTSLLYPHGLSSKLDQSWMLSGDLDSCVILWDIFTEEILHKFFLEAGPVTSLLMSPEKFKLRGEQIICCVCGDHSVALLHLEGKSCLLHARKHLFPVRMIKWHPVENFLIVGCADDSVYIWEIETGTLERHETGERARIILNCCDDSQLVKSVLPIASETLKHKSIEQRSSSPYQLGPLPCPGLQVESSCKKNQIEDLAMKNVKIKIRNSMGNLRNILNTGEKTTGKLKEKF

SEQ ID NO: 3254 - protein, 692 aa, Artificial Sequence
  Synthetic polypeptide
MRTSLQAVALWGQKAPPHSITAIMITDDQRTIVTGSQEGQLCLWNLSHELKISAKELLFGHSASVTCLARARDFSKQPYIVSAAENGEMCVWNVTNGQCMEKATLPYRHTAICYYHCSFRMTGEGWLLCCGEYQDVLIIDAKTLAVVHSFRSSQFPDWINCMCIVHSMRIQDSLLVVSVAGELKVWDLSSSINSIQEKQDVYEKESKFLESLNCQTIRFCTYTERLLLVVFSKCWKVYDYCDFSLLLTEVSRNGQFFAGGEVIAAHRILIWTEDGHSYIYQLLNSGLSKSIYPADGRVLKETIYPHLLCSTSVQENKSRPFVMGYMNERKEPFYKVLFSGEVSGRITLWHIPDVPVSKFDGSPREIPVTATWTLQDNFDKHDTMSQSIIDYFSGLKDGAGTAVVTSSEYIPSLDKLICGCEDGTIIITQALNAAKARLLEGGSLVKDSPPHKVLKGHHQSVTSLLYPHGLSSKLDQSWMLSGDLDSCVILWDIFTEEILHKFFLEAGPVTSLLMSPEKFKLRGEQIICCVCGDHSVALLHLEGKSCLLHARKHLFPVRMIKWHPVENFLIVGCADDSVYIWEIETGTLERHETGERARIILNCCDDSQLVKSVLPIASETLKHKSIEQRSSSPYQLGPLPCPGLQVESSCKKNQIEDLAMKNVKIKIRNSMGNLRNILNTGEKTTGKLKEKF

SEQ ID NO: 3255 - protein, 705 aa, Artificial Sequence
  Synthetic polypeptide
MRTSLQAVALWGQKAPPHSITAIMITDDQRTIVTGSQEGQLCLWNLSHELKISAKELLFGHSASVTCLARARDFSKQPYIVSAAENGEMCVWNVTNGQCMEKATLPYRHTAICYYHCSFRMTGEGWLLCCGEYQDVLIIDAKTLAVVHSFRSSQFPDWINCMCIVHSMRIQEDSLLVVSVAGELKVWDLSSSINSIQEKQDVYEKESKFLESLNCQTIRFCTYTERLLLVVFSKCWKVYDYCDFSLLLTEVSRNGQFFAGGEVIAAHRILIWTEDGHSYIYQLLNRWAQMGAAYKTFSGLSKSIYPADGRVLKETIYPHLLCSTSVQENKSRPFVMGYMNERKEPFYKVLFSGEVSGRITLWHIPDVPVSKFDGSPREIPVTATWTLQDNFDKHDTMSQSIIDYFSGLKDGAGTAVVTSSEYIPSLDKLICGCEDGTIIITQALNAAKARLLEGGSLVKDSPPHKVLKGHHQSVTSLLYPHGLSSKLDQSWMLSGDLDSCVILWDIFTEEILHKFFLEAGPVTSLLMSPEKFKLRGEQIICCVCGDHSVALLHLEGKSCLLHARKHLFPVRMIKWHPVENFLIVGCADDSVYIWEIETGTLERHETGERARIILNCCDDSQLVKSVLPIASETLKHKSIEQRSSSPYQLGPLPCPGLQVESSCKKNQIEDLAMKNVKIKIRNSMGNLRNILNTGEKTTGKLKEKF

SEQ ID NO: 3256 - protein, 70 aa, Artificial Sequence
  Synthetic polypeptide
METVLTIIALFYYPLEGSKSMNSVKYSSLVALAFIIRPTAVILWTPLLFRHFCQEPRKLDLILHHFLPVG

SEQ ID NO: 3257 - protein, 265 aa, Artificial Sequence
  Synthetic polypeptide
MRRPLSKCGMEPGGGDASLTLHGLQNRSHGKIKLRKRKSTLYFNTQEKSARRRGDLLGENIYLLLFTIALRILNCFLVQTSFVPDEYWQSLEVSHHMVFNYGYLTWEWTERLRSYTYPLIFASIYKILHLLGKDSVQLLIWIPRLAQALLSAVADVRLYSLMKQLENQEVARWVFFCQLCSWFTWYCCTRTLTNTMETVLTIIALFYYPLEGSKSMNSVKYSSLVALAFIIRPTAVILWTPLLFRHFCQEPRKLDLILHHFLPVG

SEQ ID NO: 3258 - protein, 256 aa, Artificial Sequence [sequence omitted]

SEQ ID NO: 3259 - protein, 295 aa, Artificial Sequence
  Synthetic polypeptide
MSENSSDSDSSCGWTVISHEGSDIEMLNSVTPTDSCEPAPECSSLEQEELQALQIEQGESSQNGTVLMEETAYPALEETSSTIEAEEQKIPEDSIYIGTASDDSDIVTLEPPKLEEIGNQEVVIVEEAQSSEDFNMGSSSSSQYTFCQPETVFSSQPSDDESSSDETSNQPSPAFRRRRARKKTVSASESEDRLVAEQETEPSKELSKRQFSSGLNKCVILALVIAISMGFGHFYGTIQIQKRQQLVRKIHEDELNDMKDYLSQCQQEQESFIDYKPGAVVHAYNASTLGGWRVA

SEQ ID NO: 3260 - protein, 8 aa, Artificial Sequence
  Synthetic polypeptide
SERYMKMN

SEQ ID NO: 3261 - protein, 701 aa, Artificial Sequence
  Synthetic polypeptide
MAPPLRPLARLRPPGMLLRALLLLLLLSPLPGVWCFSELSFVKEPQDVTVTRKDPVVLDCQAHGEVPIKVTWLKNGAKMSENKRIEVLSNGSLYISEVEGRRGEQSDEGFYQCLAMNKYGAILSQKAHLALSTISAFEVQPISTEVHEGGVARFACKISSHPPAVITWEFNRTTLPMTMDRITALPTGVLQIYDVSQRDSGNYRCIAATVAHRRKSMEASLTVIPAKESKSFHTPTIIAGPQNITTSLHQTVVLECMATGNPKPIISWSRLDHKSIDVFNTRVLGNGNLMISDVRLQHAGVYVCRATTPGTRNFTVAMATLTVLAPPSFVEWPESLTRPRAGTARFVCQAEGIPSPKMSWLKNGRKIHSNGRIKMYNSKLVINQIIPEDDAIYQCMAENSQGSILSRARLTVVMSEDRPSAPYNVHAETMSSSAILLAWERPLYNSDKVIAYSVHYMKAEGLNNEEYQVVIGNDTTHYIIDDLEPASNYTFYIVAYMPMGASQMSDHVTQNTLEDVPLRPPEISLTSRSPTDILISWLPIPAKYRRGQVVLYRLSFRLSTENSIQVLELPGTTHEYLLEGLKPDSVYLVRITAATRVGLGESSVWTSHRTPKATSVKAPKSPELHLEPLNCTTISVRWQQDVEDTAAIQGYKLYYKEEGQQENGPIFLDTKDLLYTLSGLVFLSKMFSPNLIMKPSDKSGL

SEQ ID NO: 3262 - protein, 236 aa, Artificial Sequence
  Synthetic polypeptide
EYQVVIGNDTTHYIIDDLEPASNYTFYIVAYMPMGASQMSDHVTQNTLEDVPLRPPEISLTSRSPTDILISWLPIPAKYRRGQVVLYRLSFRLSTENSIQVLELPGTTHEYLLEGLKPDSVYLVRITAATRVGLGESSVWTSHRTPKATSVKAPKSPELHLEPLNCTTISVRWQQDVEDTAAIQGYKLYYKEEGQQENGPIFLDTKDLLYTLSGLVFLSKMFSPNLIMKPSDKSGL

SEQ ID NO: 3263 - protein, 21 aa, Artificial Sequence
  Synthetic polypeptide
MATCAVEVFGLLEDENWKKLL

SEQ ID NO: 3264 - protein, 47 aa, Artificial Sequence
  Synthetic polypeptide
LARWRCSGSWRTRIGKNYFKVHMEPKKSPHRQVNPKPKEQSWRHHTT

SEQ ID NO: 3265 - protein, 53 aa, Artificial Sequence
  Synthetic polypeptide
MAEEQQQPPPQQPDAHQQLPPSAPNSGVALPALVPGLPGTEASALQHKIKNSI

SEQ ID NO: 3266 - protein, 80 aa, Artificial Sequence
  Synthetic polypeptide
MNPQQQRMAAIGTDKELSDLLDFSAMFSPPVNSGKTRPTTLGSSQFSGSGTWMKLETIILSKLSQEQKTKHRMFSLIGGN

SEQ ID NO: 3267 - protein, 198 aa, Artificial Sequence
  Synthetic polypeptide
MVLLRVLILLLSWAAGMGGQYGNPLNKYIRHYEGLSYNVDSLHQKHQRAKRAVSHEDQFLRLDFHAHGRHFNLRMKRDTSLFSDEFKVETSNKVLDYDTSHIYTGHIYGEEGSFSHGSVIDGRFEGFIQTRGGTFYVEPAERYIKDRTLPFHSVIYHEDDINYPHKYGPQGGCADHSVFERMRKYQMTGVEEVTQVCL

SEQ ID NO: 3268 - protein, 216 aa, Artificial Sequence
  Synthetic polypeptide
MVLLRVLILLLSWAAGMGGQYGNPLNKYIRHYEGLSYNVDSLHQKHQRAKRAVSHEDQFLRLDFHAHGRHFNLRMKRDTSLFSDEFKVETSNKVLDYDTSHIYTGHIYGEEGSFSHGSVIDGRFEGFIQTRGGTFYVEPAERYIKDRTLPFHSVIYHEDDINYPHKYGPQGGCADHSVFERMRKYQMTGVEEVTQHVMCLLPLHLLPMLISFLRPL

SEQ ID NO: 3269 - protein, 481 aa, Artificial Sequence
  Synthetic polypeptide
MESSPESLQPLEHGVAAGPASGTGSSQEGLQETRLAAGDGPGVWAAETSGGNGLGAAAARRSLPDSASPAGSPEVPGPCSSSAGLDLKDSGLESPAAAEAPLRGQYKVTASPETAVAGVGHELGTAGDAGARPDLAGTCQAELTAAGSEEPSSAGGLSSSCSDPSPPGESPSLDSLESFSNLHSFPSSCEFNSEEGAENRVPEEEEGAAVLPGAVPLCKEEEGEETAQVLAASKERFPGQSVYHIKWIQWKEENTPIITQNENGPCPLLAILNVLLLAWKVKLPPMMEIITAEQLMEYLGDYMLDAKPKEISEIQRLNYEQNMSDAMAILHKLQTGLDVNVRFTGVRVFEYTPECIVFDLLDIPLYHGWLVDPQIDDIVKAVGNCSYNQLVEKIISCKQSDNSELVSEGFVAEQFLNNTATQLTYHGLCELTSTVQEGELCVFFRNNHFSTMTKYKLLRSLRQENHLDLVDGGCSEPRSHH

SEQ ID NO: 3270 - protein, 155 aa, Artificial Sequence
  Synthetic polypeptide
MENMHLRRVRTMPRHSQSLTMAPYSSVSLVEQLEDRILCHEKTTAALVEHAFRIKDDIVNSLQKMQNKGGGDRLARLFLEEHIRNITAIVKQLNRDIEVLQEQIRARDNISYGTNSALKTLEMRQLSGLGDLRGRVASIGLGKIGNLEKRSFFSV

SEQ ID NO: 3271 - protein, 164 aa, Artificial Sequence
  Synthetic polypeptide
MAQRSTVFPSRVTKERRVRTMPRHSQSLTMAPYSSVSLVEQLEDRILCHEKTTAALVEHAFRIKDDIVNSLQKMQNKGGGDRLARLFLEEHIRNITAIVKQLNRDIEVLQEQIRARDNISYGTNSALKTLEMRQLSGLGDLRGRVASIGLGKIGNLEKRSFFSV

SEQ ID NO: 3272 - protein, 19 aa, Artificial Sequence
  Synthetic polypeptide
MSTVHEILCKLSLEAWATE

SEQ ID NO: 3273 - protein, 37 aa, Artificial Sequence
  Synthetic polypeptide
MGRQLAGCGDAGKKASFKMSTVHEILCKLSLEAWATE

SEQ ID NO: 3274 - protein, 47 aa, Artificial Sequence
  Synthetic polypeptide
MSWPCDSVINQDHKTKEKNICFQKASFKMSTVHEILCKLSLEAWATE

SEQ ID NO: 3275 - protein, 182 aa, Artificial Sequence
  Synthetic polypeptide
MVLESVVADLLNRFLGDYVENLNKSQLKLGIWGGNVALDNLQIKENALSELDVPFKVKAGQIDKLTLKIPWKNLYGEAVVATLEGLYLLVVPGASIKYDAVKEEKSLQDVKQKELSRIEEALQKAAEKDKPKEAKKDTFVEKLATQVIKNVQVKITDIHIKYEDDTSTRGLGTYLQRIRGNC

SEQ ID NO: 3276 - protein, 225 aa, Artificial Sequence
  Synthetic polypeptide
MVLESVVADLLNRFLGDYVENLNKSQLKLGIWGGNVALDNLQIKENALSELDVPFKVKAGQIDKLTLKIPWKNLYGEAVVATLEGLYLLVVPGASIKYDAVKEEKSLQDVKQKELSRIEEALQKAAEKGTHSGEFIYGLENFVYKDIKPGRKRKKHKKHFKKPFKGLDRSKDKPKEAKKDTFVEKLATQVIKNVQVKITDIHIKYEDDTSTRGLGTYLQRIRGNC

SEQ ID NO: 3277 - protein, 112 aa, Artificial Sequence
  Synthetic polypeptide
MDAIKKKMQMLKLDKENALDRAEQAEADKKAAEDRSKQLEDELVSLQKKLKGTEDELDKYSEALKDAQEKLELAEKKATDFPVCKVWIVTASTCRLKELLCKDSTLMLGAKG

SEQ ID NO: 3278 - protein, 154 aa, Artificial Sequence
  Synthetic polypeptide
MDAIKKKMQMLKLDKENALDRAEQAEADKKAAEDRSKQLEEDIAAKEKLLRVSEDERDRVLEELHKAEDSLLAAEEAAAKLEDELVSLQKKLKGTEDELDKYSEALKDAQEKLELAEKKATDFPVCKVWIVTASTCRLKELLCKDSTLMLGAKG

SEQ ID NO: 3279 - protein, 68 aa, Artificial Sequence
  Synthetic polypeptide
IELSRRRPTRRRRKTGASSWKMSWCHCKRNSRAPKMNWTNTLRLSKMPRRSWSWQRKRPPISLCVKCG

SEQ ID NO: 3280 - protein, 36 aa, Artificial Sequence
  Synthetic polypeptide
KATDFPVCKVWIVTASTCRLKELLCKDSTLMLGAKG

SEQ ID NO: 3281 - protein, 1 aa, Artificial Sequence
  Synthetic polypeptide
H

SEQ ID NO: 3282 - protein, 265 aa, Artificial Sequence
  Synthetic polypeptide
MDAIKKKMQMLKLDKENALDRAEQAEADKKAAEDRSKQLEDELVSLQKKLKGTEDELDKYSEALKDAQEKLELAEKKATDAEADVASLNRRIQLVEEELDRAQERLATALQKLEEAEKAADESERGMKVIESRAQKDEEKMEIQEIQLKEAKHIAEDADRKYEEVARKLVIIESDLERAEERAELSEGQVRQLEEQLRIMDQTLKALMAAEDKYSQKEDRYEEEIKVLSDKLKEAETRAEFAERSVTKLEKSIDDLEAGRGGGCL

SEQ ID NO: 3283 - protein, 265 aa, Artificial Sequence
  Synthetic polypeptide
MDAIKKKMQMLKLDKENALDRAEQAEADKKAAEDRSKQLEDELVSLQKKLKGTEDELDKYSEALKDAQEKLELAEKKATDAEADVASLNRRIQLVEEELDRAQERLATALQKLEEAEKAADESERGMKVIESRAQKDEEKMEIQEIQLKEAKHIAEDADRKYEEVARKLVIIESDLERAEERAELSEGKCAELEEELKTVTNNLKSLEAQAEKYSQKEDRYEEEIKVLSDKLKEAETRAEFAERSVTKLEKSIDDLEAGRGGGCL

SEQ ID NO: 3284 - protein, 307 aa, Artificial Sequence
  Synthetic polypeptide
MDAIKKKMQMLKLDKENALDRAEQAEADKKAAEDRSKQLEEDIAAKEKLLRVSEDERDRVLEELHKAEDSLLAAEEAAAKLEDELVSLQKKLKGTEDELDKYSEALKDAQEKLELAEKKATDAEADVASLNRRIQLVEEELDRAQERLATALQKLEEAEKAADESERGMKVIESRAQKDEEKMEIQEIQLKEAKHIAEDADRKYEEVARKLVIIESDLERAEERAELSEGKCAELEEELKTVTNNLKSLEAQAEKYSQKEDRYEEEIKVLSDKLKEAETRAEFAERSVTKLEKSIDDLEAGRGGGCL

SEQ ID NO: 3285 - protein, 265 aa, Artificial Sequence
  Synthetic polypeptide
MDAIKKKMQMLKLDKENALDRAEQAEADKKAAEDRSKQLEEDIAAKEKLLRVSEDERDRVLEELHKAEDSLLAAEEAAAKAEADVASLNRRIQLVEEELDRAQERLATALQKLEEAEKAADESERGMKVIESRAQKDEEKMEIQEIQLKEAKHIAEDADRKYEEVARKLVIIESDLERAEERAELSEGQVRQLEEQLRIMDQTLKALMAAEDKYSQKEDRYEEEIKVLSDKLKEAETRAEFAERSVTKLEKSIDDLEAGRGGGCL

SEQ ID NO: 3286 - protein, 265 aa, Artificial Sequence
  Synthetic polypeptide
MDAIKKKMQMLKLDKENALDRAEQAEADKKAAEDRSKQLEEDIAAKEKLLRVSEDERDRVLEELHKAEDSLLAAEEAAAKAEADVASLNRRIQLVEEELDRAQERLATALQKLEEAEKAADESERGMKVIESRAQKDEEKMEIQEIQLKEAKHIAEDADRKYEEVARKLVIIESDLERAEERAELSEGKCAELEEELKTVTNNLKSLEAQAEKYSQKEDRYEEEIKVLSDKLKEAETRAEFAERSVTKLEKSIDDLEAGRGGGCL

SEQ ID NO: 3287 - protein, 65 aa, Artificial Sequence
  Synthetic polypeptide
IELSRRRPTRRRRKTGASSWKMSWCHCKRNSRAPKMNWTNTLRLSKMPRRSWSWQRKRPPMLKPT

SEQ ID NO: 3288 - protein, 23 aa, Artificial Sequence
  Synthetic polypeptide
RSCTRRRTASWPPKRPPPRLKPT

SEQ ID NO: 3289 - protein, 229 aa, Artificial Sequence
  Synthetic polypeptide
MAGSSSLEAVRRKIRSLQEQADAAEERAGTLQRELDHERKLRETAEADVASLNRRIQLVEEELDRAQERLATALQKLEEAEKAADESERGMKVIESRAQKDEEKMEIQEIQLKEAKHIAEDADRKYEEVARKLVIIESDLERAEERAELSEGKCAELEEELKTVTNNLKSLEAQAEKYSQKEDRYEEEIKVLSDKLKEAETRAEFAERSVTKLEKSIDDLEAGRGGGCL

SEQ ID NO: 3290 - protein, 229 aa, Artificial Sequence
  Synthetic polypeptide
MAGSSSLEAVRRKIRSLQEQADAAEERAGTLQRELDHERKLRETAEADVASLNRRIQLVEEELDRAQERLATALQKLEEAEKAADESERGMKVIESRAQKDEEKMEIQEIQLKEAKHIAEDADRKYEEVARKLVIIESDLERAEERAELSEGQVRQLEEQLRIMDQTLKALMAAEDKYSQKEDRYEEEIKVLSDKLKEAETRAEFAERSVTKLEKSIDDLEAGRGGGCL

SEQ ID NO: 3291 - protein, 94 aa, Artificial Sequence
  Synthetic polypeptide
MPLARDLLHPSLEEEKKKHKKKRLVQSPNSYFMDVKCPGCYKITTVFSHAQTVVLCVGCSTVLCQPTGGKARLTEELPVSCMSSTSLLFEEDGI

SEQ ID NO: 3292 - protein, 110 aa, Artificial Sequence
  Synthetic polypeptide
MCQRCGLKLIVIICFFVQLARDLLHPSLEEEKKKHKKKRLVQSPNSYFMDVKCPGCYKITTVFSHAQTVVLCVGCSTVLCQPTGGKARLTEELPVSCMSSTSLLFEEDGI

SEQ ID NO: 3293 - protein, 62 aa, Artificial Sequence
  Synthetic polypeptide
MDVKCPGCYKITTVFSHAQTVVLCVGCSTVLCQPTGGKARLTEELPVSCMSSTSLLFEEDGI

SEQ ID NO: 3294 - protein, 92 aa, Artificial Sequence
  Synthetic polypeptide
MPLARDLLHPSLEEEKKKHKKKRLVQSPNSYFMDVKCPGCYKITTVFSHAQTVVLCVGCSTVLCQPTGGKARLTEEQRMEVGRTLRKVLMKT

SEQ ID NO: 3295 - protein, 108 aa, Artificial Sequence
  Synthetic polypeptide
MCQRCGLKLIVIICFFVQLARDLLHPSLEEEKKKHKKKRLVQSPNSYFMDVKCPGCYKITTVFSHAQTVVLCVGCSTVLCQPTGGKARLTEEQRMEVGRTLRKVLMKT

SEQ ID NO: 3296 - protein, 60 aa, Artificial Sequence
  Synthetic polypeptide
MDVKCPGCYKITTVFSHAQTVVLCVGCSTVLCQPTGGKARLTEEQRMEVGRTLRKVLMKT

SEQ ID NO: 3297 - protein, 67 aa, Artificial Sequence
  Synthetic polypeptide
MPRRSLHAAAVLLLVILKEQPSSPAPVNGSKWTYFGRNATTWMNLGNIMPDERSHLQLTTYCMILFI

SEQ ID NO: 3298 - protein, 265 aa, Artificial Sequence
  Synthetic polypeptide
MECPHLSSSVCIAPDSAKFPNGSPSSWCCSVCRSNKSPWVCLTCSSVHCGSYRCDDFVVNDTKLGLVQKVREHLQNLENSAFTADRHKKRKLLENSTLNSKLLKVNGSTTAICATGLRNLGNTCFMNAILQSLSNIEQFCCYFKELPAVELRNGKTAGRRTYHTRSQGDNNVSLVEEFRKTLCALWQGSQTAFSPESLFYVVWKIMPNFRGYQQQDAHEFMRYLLDHLHLELQGGFNGVSRSAILQENSTLSASNKCCMCVVKIN

SEQ ID NO: 3299 - protein, 309 aa, Artificial Sequence
  Synthetic polypeptide
MECPHLSSSVCIAPDSAKFPNGSPSSWCCSVCRSNKSPWVCLTCSSVHCGRYVNGHAKKHYEDAQVPLTNHKKSEKQDKVQHTVCMDCSSYSTYCYRCDDFVVNDTKLGLVQKVREHLQNLENSAFTADRHKKRKLLENSTLNSKLLKVNGSTTAICATGLRNLGNTCFMNAILQSLSNIEQFCCYFKELPAVELRNGKTAGRRTYHTRSQGDNNVSLVEEFRKTLCALWQGSQTAFSPESLFYVVWKIMPNFRGYQQQDAHEFMRYLLDHLHLELQGGFNGVSRSAILQENSTLSASNKCCMCVVKIN

SEQ ID NO: 3300 - protein, 287 aa, Artificial Sequence
  Synthetic polypeptide
MQSPPHLAVCRSNKSPWVCLTCSSVHCGRYVNGHAKKHYEDAQVPLTNHKKSEKQDKVQHTVCMDCSSYSTYCYRCDDFVVNDTKLGLVQKVREHLQNLENSAFTADRHKKRKLLENSTLNSKLLKVNGSTTAICATGLRNLGNTCFMNAILQSLSNIEQFCCYFKELPAVELRNGKTAGRRTYHTRSQGDNNVSLVEEFRKTLCALWQGSQTAFSPESLFYVVWKIMPNFRGYQQQDAHEFMRYLLDHLHLELQGGFNGVSRSAILQENSTLSASNKCCMCVVKIN

SEQ ID NO: 3301 - protein, 60 aa, Artificial Sequence
  Synthetic polypeptide
MPNFRGYQQQDAHEFMRYLLDHLHLELQGGFNGVSRSAILQENSTLSASNKCCMCVVKIN

SEQ ID NO: 3302 - protein, 82 aa, Artificial Sequence
  Synthetic polypeptide
MECPHLSSSVCIAPDSAKFPNGSPSSWCCSGAINSRTPMNSCATFWTTYTWNFRAVSTVFPAQQFCRRILLCLQVTSVACVL

SEQ ID NO: 3303 - protein, 292 aa, Artificial Sequence
  Synthetic polypeptide
MMQLVYCVFFFLLVCRSNKSPWVCLTCSSVHCGRYVNGHAKKHYEDAQVPLTNHKKSEKQDKVQHTVCMDCSSYSTYCYRCDDFVVNDTKLGLVQKVREHLQNLENSAFTADRHKKRKLLENSTLNSKLLKVNGSTTAICATGLRNLGNTCFMNAILQSLSNIEQFCCYFKELPAVELRNGKTAGRRTYHTRSQGDNNVSLVEEFRKTLCALWQGSQTAFSPESLFYVVWKIMPNFRGYQQQDAHEFMRYLLDHLHLELQGGFNGVSRSAILQENSTLSASNKCCMCVVKIN

SEQ ID NO: 3304 - protein, 64 aa, Artificial Sequence
  Synthetic polypeptide
IKFSTQYVWIAVATVHTVIAVMILWLMTPSWDWYRKSENTYRTWKTQLSQLTGIRKENFWKTQH

SEQ ID NO: 3305 - protein, 220 aa, Artificial Sequence
  Synthetic polypeptide
MENTEGYRCDDFVVNDTKLGLVQKVREHLQNLENSAFTADRHKKRKLLENSTLNSKLLKVNGSTTAICATGLRNLGNTCFMNAILQSLSNIEQFCCYFKELPAVELRNGKTAGRRTYHTRSQGDNNVSLVEEFRKTLCALWQGSQTAFSPESLFYVVWKIMPNFRGYQQQDAHEFMRYLLDHLHLELQGGFNGVSRSAILQENSTLSASNKCCMCVVKIN

SEQ ID NO: 3306 - protein, 4725 aa, Artificial Sequence
  Synthetic polypeptide
MATMIPPVKLKWLEHLNSSWITEDSESIATREGVAVLYSKLVSNKEVVPLPQQVLCLKGPQLPDFERESLSSDEQDHYLDALLSSQLALAKMVCSDSPFAGALRKRLLVLQRVFYALSNKYHDKGKVKQQQHSPESSSGSADVHSVSERPRSSTDALIEMGVRTGLSLLFALLRQSWMMPVSGPGLSLCNDVIHTAIEVVSSLPPLSLANESKIPPMGLDCLSQVTTFLKGVTIPNSGADTLGRRLASELLLGLAAQRGSLRYLLEWIEMALGASAVVHTMEKGKLLSSQEGMISFDCFMTILMQMRRSLGSSADRSQWREPTRTSDGLCSLYEAALCLFEEVCRMASDYSRTCASPDSIQTGDAPIVSETCEVYVWGSNSSHQLVEGTQEKILQPKLAPSFSDAQTIEAGQYCTFVISTDGSVRACGKGSYGRLGLGDSNNQSTLKKLTFEPHRSIKKVSSSKGSDGHTLAFTTEGEVFSWGDGDYGKLGHGNSSTQKYPKLIQGPLQGKVVVCVSAGYRHSAAVTEDGELYTWGEGDFGRLGHGDSNSRNIPTLVKDISNVGEVSCGSSHTIALSKDGRTVWSFGGGDNGKLGHGDTNRVYKPKVIEALQGMFIRKVCAGSQSSLALTSTGQVYAWGCGACLGCGSSEATALRPKLIEELAATRIVDVSIGDSHCLALSHDNEVYAWGNNSMGQCGQGNSTGPITKPKKVSGLDGIAIQQISAGTSHSLAWTALPRDRQVVAWHRPYCVDLEESTFSHLRSFLERYCDKINSEIPPLPFPSSREHHSFLKLCLKLLSNHLALALAGGVATSILGRQAGPLRNLLFRLMDSTVPDEIQEVVIETLSVGATMLLPPLRERMELLHSLLPQGPDRWESLSKGQRMQLDIILTSLQDHTHVASLLGYSSPSDAADLSSVCTGYGNLSDQPYGTQSCHPDTHLAEILMKTLLRNLGFYTDQAFGELEKNSDKFLLGTSSSENSQPAHLHELLCSLQKQLLAFCHINNISENSSSVALLHKHLQLLLPHATDIYSRSANLLKESPWNGSVGEKLRDVIYVSAAGSMLCQIVNSLLLLPVSVARPLLSYLLDLLPPLDCLNRLLPAADLLEDQELQWPLHGGPELIDPAGLPLPQPAQSWVWLVDLERTIALLIGRCLGGMLQGSPVSPEEQDTAYWMKTPLFSDGVEMDTPQLDKCMSCLLEVALSGNEEQKPFDYKLRPEIAVYVDLALGCSKEPARSLWISMQDYAVSKDWDSATLSNESLLDTVSRFVLAALLKHTNLLSQACGESRYQPGKHLSEVYRCVYKVRSRLLACKNLELIQTRSSSRDRWISENQDSADVDPQEHSFTRTIDEEAEMEEQAERDREEGHPEPEDEEEEREHEVMTAGKIFQCFLSAREVARSRDRDRMNSGAGSGARADDPPPQSQQERRVSTDLPEGQDVYTAACNSVIHRCALLILGVSPVIDELQKRREEGQLQQPSTSASEGGGLMTRSESLTAESRLVHTSPNYRLIKSRSESDLSQPESDEEGYALSGRRNVDLDLAASHRKRGPMHSQLESLSDSWARLKHSRDWLCNSSYSFESDFDLTKSLGVHTLIENVVSFVSGDVGNAPGFKEPEESMSTSPQASIIAMEQQQLRAELRLEALHQILVLLSGMEEKGSISLAGSRLSSGFQSSTLLTSVRLQFLAGCFGLGTVGHTGGKGESGRLHHYQDGIRAAKRNIQIEIQVAVHKIYQQLSATLERALQANKHHIEAQQRLLLVTVFALSVHYQPVDVSLAISTGLLNVLSQLCGTDTMLGQPLQLLPKTGVSQLSTALKVASTRLLQILAITTGTYADKLSPKVVQSLLDLLCSQLKNLLSQTGVLHMASFGEGEQEDGEEEEKKVDSSGETEKKDFRAALRKQHAAELHLGDFLVFLRRVVSSKAIQSKMASPKWTEVLLNIASQKCSSGIPLVGNLRTRLLALHVLEAVLPACESGVEDDQMAQIVERLFSLLSDCMWETPIAQAKHAIQIKEKEQEIKLQKQGELEEEDENLPIQEVSFDPEKAQCCLVENGQILTHGSGGKGYGLASTGVTSGCYQWKFYIVKENRGNEGTCVGVSRWPVHDFNHRTTSDMWLYRAYSGNLYHNGEQTLTLSSFTQGDFITCVLDMEARTISFGKNGEEPKLAFEDVDAAELYPCVMFYSSNPGEKVKICDMQMRGTPRDLLPGDPICSPVAAVLAEATIQLIRILHRTDRWTYCINKKMMERLHKIKICIKESGQKLKKSRSVQSREENEMREEKESKEEEKGKHTRHGLADLSELQLRTLCIEVWPVLAVIGGVDAGLRVGGRCVHKQTGRHATLLGVVKEGSTSAKVQWDEAEITISFPTFWSPSDTPLYNLEPCEPLPFDVARFRGLTASVLLDLTYLTGVHEDMGKQSTKRHEKKHRHESEEKGDVEQKPESESALDMRTGLTSDDVKSQSTTSSKSENEIASFSLDPTLPSVESQHQITEGKRKNHEHMSKNHDVAQSEIRAVQLSYLYLGAMKSLSALLGCSKYAELLLIPKVLAENGHNSDCASSPVVHEDVEMRAALQFLMRHMVKRAVMRSPIKRALGLADLERAQAMIYKLVVHGLLEDQFGGKIKQEIDQQAEESDPAQQAQTPVTTSPSASSTTSFMSSSLEDTTTATTPVTDTETVPASESPGVMPLSLLRQMFSSYPTTTVLPTRRAQTPPISSLPTSPSDEVGRRQSLTSPDSQSARPANRTALSDPSSRLSTSPPPPAIAVPLLEMGFSLRQIAKAMEATGARGEADAQNITVLAMWMIEHPGHEDEEEPQSGSTADSRPGAAVLGSGGKSNDPCYLQSPGDIPSADAAEMEEGFSESPDNLDHTENAASGSGPSARGRSAVTRRHKFDLAARTLLARAAGLYRSVQAHRNQSRREGISLQQDPGALYDFNLDEELEIDLDDEAMEAMFGQDLTSDNDILGMWIPEVLDWPTWHVCESEDREEVVVCELCECSVVSFNQHMKRNHPGCGRSANRQGYRSNGSYVDGWFGGECGSGNPYYLLCGTCREKYLAMKTKSKSTSSERYKGQAPDLIGKQDSVYEEDWDMLDVDEDEKLTGEEEFELLAGPLGLNDRRIVPEPVQFPDSDPLGASVAMVTATNSMEETLMQIGCHGSVEKSSSGRITLGEQAAALANPHDRVVALRRVTAAAQVLLARTMVMRALSLLSVSGSSCSLAAGLESLGLTDIRTLVRLMCLAAAGRAGLSTSPSAMASTSERSRGGHSKANKPISCLAYLSTAVGCLASNAPSAAKLLVQLCTQNLISAATGVNLTTVDDSIQRKFLPSFLRGIAEENKLVTSPNFVVTQALVALLADKGAKLRPNYDKSEVEKKGPLELANALAACCLSSRLSSQHRQWAAQQLVRTLAAHDRDNQTTLQTLADMGGDLRKCSFIKLEAHQNRVMTCVWCNKKGLLATSGNDGTIRVWNVTKKQYSLQQTCVFNRLEGDAEESLGSPSDPSFSPVSWSISGKYLAGALEKMVNIWQVNGGKGLVDIQPHWVSALAWPEEGPATAWSGESPELLLVGRMDGSLGLIEVVDVSTMHRRELEHCYRKDVSVTCIAWFSEDRPFAVGYFDGKLLLGTKEPLEKGGIVLIDAHKDTLISMKWDPTGHILMTCAKEDSVKLWGSISGCWCCLHSLCHPSIVNGIAWCRLPGKGSKLQLLMATGCQSGLVCVWRIPQDTTQTNVTSAEGWWEQESNCQDGYRKSSGAKCVYQLRGHITPVRTVAFSSDGLALVSGGLGGLMNIWSLRDGSVLQTVVIGSGAIQTTVWIPEVGVAACSNRSKDVLVVNCTAEWAAANHVLATCRTALKQQGVLGLNMAPCMRAFLERLPMMLQEQYAYEKPHVVCGDQLVHSPYMQCLASLAVGLHLDQLLCNPPVPPHHQNCLPDPASWNPNEWAWLECFSTTIKAAEALTNGAQFPESFTVPDLEPVPEDELVFLMDNSKWINGMDEQIMSWATSRPEDWHLGGKCDVYLWGAGRHGQLAEAGRNVMVPAAAPSFSQAQQVICGQNCTFVIQANGTVLACGEGSYGRLGQGNSDDLHVLTVISALQGFVVTQLVTSCGSDGHSMALTESGEVFSWGDGDYGKLGHGNSDRQRRPRQIEALQGEEVVQMSCGFKHSAVVTSDGKLFTFGNGDYGRLGLGNTSNKKLPERVTALEGYQIGQVACGLNHTLAVSADGSMVWAFGDGDYGKLGLGNSTAKSSPQKIDVLCGIGIKKVACGTQFSVALTKDGHVYTFGQDRLIGLPEGRARNHNRPQQIPVLAGVIIEDVAVGAEHTLALASNGDVYAWGSNSEGQLGLGHTNHVREPTLVTGLQGKNVRQISAGRCHSAAWTAPPVPPRAPGVSVPLQLGLPDTVPPQYGALREVSIHTVRARLRLLYHFSDLMYSSWRLLNLSPNNQNSTSHYNAGTWGIVQGQLRPLLAPRVYTLPMVRSIGKTMVQGKNYGPQITVKRISTRGRKCKPIFVQIARQVVKLNASDLRLPSRAWKVKLVGEGADDAGGVFDDTITEMCQELETGIVDLLIPSPNATAEVGYNRDSSSPATEQSWTENDFDELREEGFRRSNYPELKEEVRTHGKEVKNLEKKLDEWLTRITNAEKSLKDLMELKTVARKLRDECTSLSNRFDQLEERVSVMEDQMNEMKREEKFREKRIKRNEQSLQEIWDYVKRPNLHLIGVPESGRMEPSWKTLCRIVSRRTSPV

SEQ ID NO: 3307 - protein, 840 aa, Artificial Sequence
  Synthetic polypeptide
MATMIPPVKLKWLEHLNSSWITEDSESIATREGVAVLYSKLVSNKEVVPLPQQVLCLKGPQLPDFERESLSSDEQDHYLDALLSSQLALAKMVCSDSPFAGALRKRLLVLQRVFYALSNKYHDKGKVKQQQHSPESSSGSADVHSVSERPRSSTDALIEMGVRTGLSLLFALLRQSWMMPVSGPGLSLCNDVIHTAIEVVSSLPPLSLANESKIPPMGLDCLSQVTTFLKGVTIPNSGADTLGRRLASELLLGLAAQRGSLRYLLEWIEMALGASAVVHTMEKGKLLSSQEGMISFDCFMTILMQMRRSLGSSADRSQWREPTRTSDGLCSLYEAALCLFEEVCRMASDYSRTCASPDSIQTGDAPIVSETCEVYVWGSNSSHQLVEGTQEKILQPKLAPSFSDAQTIEAGQYCTFVISTDGSVRACGKGSYGRLGLGDSNNQSTLKKLTFEPHRSIKKVSSSKGSDGHTLAFTTEGEVFSWGDGDYGKLGHGNSSTQKYPKLIQGPLQGKVVVCVSAGYRHSAAVTEDGELYTWGEGDFGRLGHGDSNSRNIPTLVKDISNVGEVSCGSSHTIALSKDGRTVWSFGGGDNGKLGHGDTNRVYKPKVIEALQGMFIRKVCAGSQSSLALTSTGQVYAWGCGACLGCGSSEATALRPKLIEELAATRIVDVSIGDSHCLALSHDNEVYAWGNNSMGQCGQGNSTGPITKPKKVSGLDGIAIQQISAGTSHSLAWTALPRDRQVVAWHRPYCVDLEESTFSHLRSFLERYCDKINSEIPPLPFPSSREHHSFLKLCLKLLSNHLALALAGGVATSILGRQAGPLRNLLFRLMDSTVPDEIQE

SEQ ID NO: 3308 - protein, 130 aa, Artificial Sequence
  Synthetic polypeptide
MQRVSGLLSWTLSRVLWLSGLSEPGAARQPRIMEEKALEVYDLIRTIRDPEKPNTLEELEVVSESCVEVQEINEEEYLVIIRFTPTVPHCSLATLIGLCLRVKLQRCLPFKHKLEIYISEGTHSTEEDTI

SEQ ID NO: 3309 - protein, 294 aa, Artificial Sequence
  Synthetic polypeptide
MGEIKVSPDYNWFRGTVPLKKIIVDDDDSKIWSLYDAGPRSIRCPLIFLPPVSGTADVFFRQILALTGWGYRVIALQYPVYWDHLEFCDGFRKLLDHLQLDKVHLFGASLGGFLAQKFAEYTHKSPRVHSLILCNSFSDTSIFNQTWTANSFWLMPAFMLKKIVLGNFSSGPVDPMMADAIDFMVDRLESLGQSELASRLTLNCQNSYVEPHKIRDIPVTIMDVFDQSALSTEAKEEMYKLYPNARRAHLKTGGNFPYLCRSAEVNLYVQPGHHGQTPSLLKIQKLASCDGMHL

SEQ ID NO: 3310 - protein, 140 aa, Artificial Sequence
  Synthetic polypeptide
MPAFMLKKIVLGNFSSGPVDPMMADAIDFMVDRLESLGQSELASRLTLNCQNSYVEPHKIRDIPVTIMDVFDQSALSTEAKEEMYKLYPNARRAHLKTGGNFPYLCRSAEVNLYVQPGHHGQTPSLLKIQKLASCDGMHL

SEQ ID NO: 3311 - protein, 267 aa, Artificial Sequence
  Synthetic polypeptide
MGEIKVSPDYNWFRGTVPLKKIIVDDDDSKIWSLYDAGPRSIRCPLIFLPPVSGTADVFFRQILALTGWGYRVIAVHLFGASLGGFLAQKFAEYTHKSPRVHSLILCNSFSDTSIFNQTWTANSFWLMPAFMLKKIVLGNFSSGPVDPMMADAIDFMVDRLESLGQSELASRLTLNCQNSYVEPHKIRDIPVTIMDVFDQSALSTEAKEEMYKLYPNARRAHLKTGGNFPYLCRSAEVNLYVQPGHHGQTPSLLKIQKLASCDGMHL

SEQ ID NO: 3312 - protein, 7 aa, Artificial Sequence
  Synthetic polypeptide
QTSENQT

SEQ ID NO: 3313 - protein, 311 aa, Artificial Sequence
  Synthetic polypeptide
MQPSGWAAAREAAGRDMLAADLRCSLFASALQSYKRDSVLRPFPASYARGDCKDFEALLADASKLPNLKELLQSSGDNHKRAWDLVSWILSSKVLTIHSAGKAEFEKIQKLTGAPHTPVPAPDFLFEIEYFDPANAKFYETKGERDLIYAFHGSRLENFHSIIHNGLHCHLNKTSLFGEGTYLTSDLSLALIYSPHGHGWQHSLLGPILSCVAVCEVIDHPDVKCQTKKKDSKEIDRRRARIKHSEGGDIPPKYFVVTNNQLLRVKYLLVYSQKPPKSRASSQLSWFSSHWFTVMISLYLLLLLIDPPAML

SEQ ID NO: 3314 - protein, 195 aa, Artificial Sequence
  Synthetic polypeptide
MQPSGWAAAREAAGRDMLAADLRCSLFASALQSYKRDSVLRPFPASYARGDCKDFEALTSLFGEGTYLTSDLSLALIYSPHGHGWQHSLLGPILSCVAVCEVIDHPDVKCQTKKKDSKEIDRRRARIKHSEGGDIPPKYFVVTNNQLLRVKYLLVYSQKPPKRASSQLSWFSSHWFTVMISLYLLLLLIDPPAML

SEQ ID NO: 3315 - protein, 634 aa, Artificial Sequence
  Synthetic polypeptide
MAVQRAASPRRPPAPLWPRLLLPLLLLLLPAPSEGLGHSAELAFAVEPSDDVAVPGQPIVLDCRVEGTPPVRITWRKNGVELPESTHSTLLANGSLMIRHFRLEPGGSPSDEGDYECVAQNRFGLVVSRKARIQAATMSDFHVHPQATVGEEGGVARFQCQIHGLPKPLITWEKNRVPIDTDNERYTLLPKGVLQITGLRAEDGGIFHCVASNIASIRISHGARLTVSGSGSGAYKEPAILVGPENLTLTVHQTAVLECVATGNPRPIVSWSRLDGRPIGVEGIQVLGTGNLIISDVTVQHSGVYVCAANRPGTRVRRTAQGRLVVQAPAEFVQHPQSISRPAGTTAMFTCQAQGEPPPHVTWLKNGQVLGPGGHVRLKNNNSTLTISGIGPEDEAIYQCVAENSAGSSQASARLTVLWAEGLPGPPRNVRAVSVSSTEVRVSWSEPLANTKEIIGYVLHIRKAADPPELEYQEAVSKSTFQHLVSDLEPSTAYSFYIKAYTPRGASSASVPTLASTLGEAPAPPPLSVRVLGSSSLQLLWEPWPRLAQHEGGFKLFYRPASKTSFTGPILLPGTVSSYNLSQLDPTAVYEVKLLAYNQHGDGNATVRFVSLRGASERTGIIVPTLQSCGKDEM

SEQ ID NO: 3316 - protein, 497 aa, Artificial Sequence
  Synthetic polypeptide
MSDFHVHPQATVGEEGGVARFQCQIHGLPKPLITWEKNRVPIDTDNERYTLLPKGVLQITGLRAEDGGIFHCVASNIASIRISHGARLTVSGSGSGAYKEPAILVGPENLTLTVHQTAVLECVATGNPRPIVSWSRLDGRPIGVEGIQVLGTGNLIISDVTVQHSGVYVCAANRPGTRVRRTAQGRLVVQAPAEFVQHPQSISRPAGTTAMFTCQAQGEPPPHVTWLKNGQVLGPGGHVRLKNNNSTLTISGIGPEDEAIYQCVAENSAGSSQASARLTVLWAEGLPGPPRNVRAVSVSSTEVRVSWSEPLANTKEIIGYVLHIRKAADPPELEYQEAVSKSTFQHLVSDLEPSTAYSFYIKAYTPRGASSASVPTLASTLGEAPAPPPLSVRVLGSSSLQLLWEPWPRLAQHEGGFKLFYRPASKTSFTGPILLPGTVSSYNLSQLDPTAVYEVKLLAYNQHGDGNATVRFVSLRGASERTGIIVPTLQSCGKDEM

SEQ ID NO: 3317 - protein, 307 aa, Artificial Sequence
  Synthetic polypeptide
MWKRSEQMKIKSGKCNMAAAMETEQLGVEIFETADCEENIESQDRPKLEPFYVERYSWSQLKKLLADTRKYHGYMMAKAPHDFMFVKRNDPDGPHSDRIYYLAMSGENRENTLFYSEIPKTINRAAVLMLSWKPLLDLFQATLDYGMYSREEELLRERKRIGTVGIASYDYHQGSGTFLFQAGSGIYHVKDGGPQGFTQQPLRPNLVETSCPNIRMDPKLCPADPDWIAFIHSNDIWISNIVTREERRLTYVHNGQPPRFMPVILALWKAEAGRSRGQEIETILANTVKPCLYENYKKLAGRGGGCL

SEQ ID NO: 3318 - protein, 291 aa, Artificial Sequence
  Synthetic polypeptide
MAAAMETEQLGVEIFETADCEENIESQDRPKLEPFYVERYSWSQLKKLLADTRKYHGYMMAKAPHDFMFVKRNDPDGPHSDRIYYLAMSGENRENTLFYSEIPKTINRAAVLMLSWKPLLDLFQATLDYGMYSREEELLRERKRIGTVGIASYDYHQGSGTFLFQAGSGIYHVKDGGPQGFTQQPLRPNLVETSCPNIRMDPKLCPADPDWIAFIHSNDIWISNIVTREERRLTYVHNGQPPRFMPVILALWKAEAGRSRGQEIETILANTVKPCLYENYKKLAGRGGGCL

SEQ ID NO: 3319 - protein, 70 aa, Artificial Sequence
  Synthetic polypeptide
MENQVLTPHVYWAQRHRELYLRVELSDVQKLPQPLQPSAVTTWISPQPSTLRQDPPPAKRLQLPESSHDH

SEQ ID NO: 3320 - protein, 108 aa, Artificial Sequence
  Synthetic polypeptide
MENQVLTPHVYWAQRHRELYLRVELSDVQGLTLLPRLECSSVIIAHRSLELLGLSSPPGSAYQVGLQKLPQPLQPSAVTTWISPQPSTLRQDPPPAKRLQLPESSHDH

SEQ ID NO: 3321 - protein, 74 aa, Artificial Sequence
  Synthetic polypeptide
MPTVVVMDVSLSMTRPVSIEGSEEYQRKHLAAHGLTMLFEHMATNYKLEFTALVVFSSLWELMVPFTRDYNTLQ

SEQ ID NO: 3322 - protein, 110 aa, Artificial Sequence
  Synthetic polypeptide
MKLYLRTGEGLPEADGKAKEQLSVCILIGNTGIIFIMPTVVVMDVSLSMTRPVSIEGSEEYQRKHLAAHGLTMLFEHMATNYKLEFTALVVFSSLWELMVPFTRDYNTLQ

SEQ ID NO: 3323 - protein, 106 aa, Artificial Sequence
  Synthetic polypeptide
MPTESLCRRTVSGDGHGLSVCILIGNTGIIFIMPTVVVMDVSLSMTRPVSIEGSEEYQRKHLAAHGLTMLFEHMATNYKLEFTALVVFSSLWELMVPFTRDYNTLQ

SEQ ID NO: 3324 - protein, 1392 aa, Artificial Sequence
  Synthetic polypeptide
MIEDKGPRVADYFVVAGLTDVSKPLEEEIHFNDACHKVAKPKEPITDVSVIIKSLGEEVPQDYICIDVTPTGLSADLNNGSLVGPQIYLCYRRGRDKPPLTDLGVLYDWKERLKQGCEIIQSTPYGRPANISGSTSSQRIYITYRRASENMTQNTLAVTDICIIIPSKGESPPHTFCKVDKNLNNSMWGSAVYLCYKKSVAKTNTVSYKAGLICRYPQEDYESFSLPESVPLFCLPMGATIECWPSNSKYPLPVFSTFVLTGASAEKVYGAAIQFYEPYSEENLTEKQRLLLGLTSADGKSDSSKTIHTNKCICLLSHWPFFDAFRKFLTFLYRYSISGPHVLPIEKHISHFMHKVPFPSPQRPRILVQLSPHDNLILSQPVSSPLPLSGGKFSTLLQNLGPENAVTLLVFAVTEHKILIHSLRPSVLTSVTEALVSMIFPFHWPCPYVPLCPLALADVLSAPCPFIVGIDSRYFDLYDPPPDVSCVDVDTNTISQIGDKKNVAWKILPKKPCKNLMNTLNNLHQQLAKLQQRPRDDGLMDLAINDYDFNSGKRLHMIDLEIQEAFLFFMASILKGYRSYLRPITQAPSETATDAASLFALQAFLRSRDRSHQKFYNMMTKTQMFIRFIEECSFVSDKDASLAFFDDCVDKVDMDKSGEVRLIELDESFKSEHTVFVTPPEIPHLPNGEEPPLQYSYNGFPVLRNNLFERPEGFLQAKKNKLPSKSSSPNSPLPMFRRTKQEIKSAHKIAKRYSSIPQMWSRCLLRHCYGLWFICLPAYVKVCHSKVRALKTAYDVLKKMQSKKMDPPDEVCYRILMQLCGQYDQPVLAVRVLFEMQKAGIDPNAITYGYYNKAVLESTWPSRSRSGYFLWTKVRNVVLGVTQFKRALKKHAHLSQTTLSDGSDLDAVSHGSMDSGHGTHTVEQAPFNTGLIKVYATDDRSSTGGQSDLGYNSLSKDEVRRGDTSTEDIQEEKDKKGSDCSSLSESESTKGSADCLPKLSYQNSSSIVRLTGTSNNSAGKISGESMESTPELLLISSLEDTNETRNIQSRCFRKRHKSDNETNLQQQVVWGNRNRNLSGGVLMGFMLNRINQEATPGDIVEKLGADAKILSNVISKSTRPNTLDIGKPPLRSKRDSLEKESSDDDTPFDGSNYLADKVDSPVIFDLEDLDSETDVSKAGCVATQNPKRIQRMNSSFSVKPFEKTDVATGFDPLSLLVAETEQQQKEEEEEDEDDSKSISTPSARRDLAEEIVMYMNNMSSPLTSRTPSIDLQRACDDKLNKKSPPLVKACRRSSLPPNSPKPVRLTKSKSYTKSEEKPRDRLWSSPAFSPTCPFREESQDTLTHSSPSFNLDTLLVPKLDVLRNSMFTAGKGVAEKASKWYSRFTMYTTSSK

SEQ ID NO: 3325 - protein, 1349 aa, Artificial Sequence
  Synthetic polypeptide
MIEDKGPRVADYFVVAGLTDVSKPLEEEIHFNDACHKVAKPKEPITDVSVIIKSLGEEVPQDYICIDVTPTGLSADLNNGSLVGPQIYLCYRRGRDKPPLTDLGVLYDWKERLKQGCEIIQSTPYGRPANISGSTSSQRIYITYRRASENMTQNTLAVTDICIIIPSKGESPPHTFCKVDKNLNNSMWGSAVYLCYKKSVAKTNTVSYKAGLICRYPQEDYESFSLPESVPLFCLPMGATIECWPSNSKYPLPVFSTFVLTGASAEKVYGAAIQFYEPYSEENLTEKQRLLLGLTSADGKSDSSKTIHTNKCICLLSHWPFFDAFRKFLTFLYRYSISGPHVLPIEKHISHFMHKVPFPSPQRPRILVQLSPHDNLILSQPVSSPLPLSGGKFSTLLQNLGPENAVTLLVFAVTEHKILIHSLRPSVLTSVTEALVSMIFPFHWPCPYVPLCPLALADVLSAPCPFIVGIDSRYFDLYDPPPDVSCVDVDTNTISQIGDKKNVAWKILPKKPCKNLMNTLNNLHQQLAKLQQRPRDDGLMDLAINDYDFNSGKRLHMIDLEIQEAFLFFMASILKGYRSYLRPITQAPSETATDAASLFALQAFLRSRDRSHQKFYNMMTKTQMFIRFIEECSFVSDKDASLAFFDDCVDKVDMDKSGEVRLIELDESFKSEHTVFVTPPEIPHLPNGEEPPLQYSYNGFPVLRNNLFERPEGFLQAKKNKLPSKSSSPNSPLPMFRRTKQEIKSAHKIAKRYSSIPQMWSRCLLRHCYGLWFICLPAYVKVCHSKVRALKTAYDVLKKMQSKKMDPPDEVCYRILMQLCGQYDQPVLAVRVLFEMQKAGIDPNAITYGYYNKAVLESTWPSRSRSGYFLWTKVRNVVLGVTQFKRALKKHAHLSQTTLSGGQSDLGYNSLSKDEVRRGDTSTEDIQEEKDKKGSDCSSLSESESTKGSADCLPKLSYQNSSSIVRLTGTSNNSAGKISGESMESTPELLLISSLEDTNETRNIQSRCFRKRHKSDNETNLQQQVVWGNRNRNLSGGVLMGFMLNRINQEATPGDIVEKLGADAKILSNVISKSTRPNTLDIGKPPLRSKRDSLEKESSDDDTPFDGSNYLADKVDSPVIFDLEDLDSETDVSKAGCVATQNPKRIQRMNSSFSVKPFEKTDVATGFDPLSLLVAETEQQQKEEEEEDEDDSKSISTPSARRDLAEEIVMYMNNMSSPLTSRTPSIDLQRACDDKLNKKSPPLVKACRRSSLPPNSPKPVRLTKSKSYTKSEEKPRDRLWSSPAFSPTCPFREESQDTLTHSSPSFNLDTLLVPKLDVLRNSMFTAGKGVAEKASKWYSRFTMYTTSSK

SEQ ID NO: 3326 - protein, 1402 aa, Artificial Sequence
  Synthetic polypeptide
MIEDKGPRVADYFVVAGLTDVSKPLEEEIHFNDACHKVAKPKEPITDVSVIIKSLGEEVPQDYICIDVTPTGLSADLNNGSLVGPQIYLCYRRGRDKPPLTDLGVLYDWKERLKQGCEIIQSTPYGRPANISGSTSSQRIYITYRRASENMTQNTLAVTDICIIIPSKGESPPHTFCKVDKNLNNSMWGSAVYLCYKKSVAKTNTVSYKAGLICRYPQEDYESFSLPESVPLFCLPMGATIECWPSNSKYPLPVFSTFVLTGASAEKVYGAAIQFYEPYSEENLTEKQRLLLGLTSADGKSDSSKTIHTNKCICLLSHWPFFDAFRKFLTFLYRYSISGPHVLPIEKHISHFMHKVPFPSPQRPRILVQLSPHDNLILSQPVSSPLPLSGGKFSTLLQNLGPENAVTLLVFAVTEHKILIHSLRPSVLTSVTEALVSMIFPFHWPCPYVPLCPLALADVLSAPCPFIVGIDSRYFDLYDPPPDVSCVDVDTNTISQIGDKKNVAWKILPKKPCKNLMNTLNNLHQQLAKLQQRPRDDGLMDLAINDYDFNSGKRLHMIDLEIQEAFLFFMASILKGYRSYLRPITQAPSETATDAASLFALQAFLRSRDRSHQKFYNMMTKTQMFIRFIEECSFVSDKDASLAFFDDCVDKVDMDKSGEVRLIELDESFKSEHTVFVTPPEIPHLPNGEEPPLQYSYNGFPVLRNNLFERPEGFLQAKKNKLPSKSSSPNSPLPMFRRTKQEIKSAHKIAKRYSSIPQMWSRCLLRHCYGLWFICLPAYVKVCHSKVRALKTAYDVLKKMQSKKMDPPDEVCYRILMQLCGQYDQPVLAVRVLFEMQKAGIDPNAITYGYYNKAVLESTWPSRSRSGYFLWTKVRNVVLGVTQFKRALKKHAHLSQTTLSDGSDLDAVSHGSMDSGHGTHTVEQAPFNTGLIKVYATDDRSSTGGQSDLGYNSLSKDEVRRGDTSTEDIQEEKDKKGSDCSSLSESESTKGSADCLPKLSYQNSSSIVRLTGTSNNSAGKISGESMESTPELLLISSLEDTNETRNIQSRCFRKRHKSDNETNLQQQVVWGNRNRNLSGGVLMGFMLNRINQEATPGDIVEKLGADAKILSNVISKSTRPNTLDIGKPPLRSKRDSLEKESSDDDTPFDGSNYLADKVDSPVIFDLEDLDSETDVSKAGCVATQNPKRIQRMNSSFSVKPFEKTDVATGFDPLSLLVAETEQQQKEEEEEDEDDSKSISTPSARRDLAEEIVMYMNNMSSPLTSRTPSIDLQRACDDKLNKKSPPLVKACRRSSLPPNSPKPVRLTKSKSYTKSEEKPRDRLWSSPAFSPTCPFREESQDTLTHSSPSFNLDTLLVPKLDVLRNSMFTAGKGVAEKASKWYSRFTMYTTSSKAFLFLETQQY

SEQ ID NO: 3327 - protein, 1359 aa, Artificial Sequence
  Synthetic polypeptide
MIEDKGPRVADYFVVAGLTDVSKPLEEEIHFNDACHKVAKPKEPITDVSVIIKSLGEEVPQDYICIDVTPTGLSADLNNGSLVGPQIYLCYRRGRDKPPLTDLGVLYDWKERLKQGCEIIQSTPYGRPANISGSTSSQRIYITYRRASENMTQNTLAVTDICIIIPSKGESPPHTFCKVDKNLNNSMWGSAVYLCYKKSVAKTNTVSYKAGLICRYPQEDYESFSLPESVPLFCLPMGATIECWPSNSKYPLPVFSTFVLTGASAEKVYGAAIQFYEPYSEENLTEKQRLLLGLTSADGKSDSSKTIHTNKCICLLSHWPFFDAFRKFLTFLYRYSISGPHVLPIEKHISHFMHKVPFPSPQRPRILVQLSPHDNLILSQPVSSPLPLSGGKFSTLLQNLGPENAVTLLVFAVTEHKILIHSLRPSVLTSVTEALVSMIFPFHWPCPYVPLCPLALADVLSAPCPFIVGIDSRYFDLYDPPPDVSCVDVDTNTISQIGDKKNVAWKILPKKPCKNLMNTLNNLHQQLAKLQQRPRDDGLMDLAINDYDFNSGKRLHMIDLEIQEAFLFFMASILKGYRSYLRPITQAPSETATDAASLFALQAFLRSRDRSHQKFYNMMTKTQMFIRFIEECSFVSDKDASLAFFDDCVDKVDMDKSGEVRLIELDESFKSEHTVFVTPPEIPHLPNGEEPPLQYSYNGFPVLRNNLFERPEGFLQAKKNKLPSKSSSPNSPLPMFRRTKQEIKSAHKIAKRYSSIPQMWSRCLLRHCYGLWFICLPAYVKVCHSKVRALKTAYDVLKKMQSKKMDPPDEVCYRILMQLCGQYDQPVLAVRVLFEMQKAGIDPNAITYGYYNKAVLESTWPSRSRSGYFLWTKVRNVVLGVTQFKRALKKHAHLSQTTLSGGQSDLGYNSLSKDEVRRGDTSTEDIQEEKDKKGSDCSSLSESESTKGSADCLPKLSYQNSSSIVRLTGTSNNSAGKISGESMESTPELLLISSLEDTNETRNIQSRCFRKRHKSDNETNLQQQVVWGNRNRNLSGGVLMGFMLNRINQEATPGDIVEKLGADAKILSNVISKSTRPNTLDIGKPPLRSKRDSLEKESSDDDTPFDGSNYLADKVDSPVIFDLEDLDSETDVSKAGCVATQNPKRIQRMNSSFSVKPFEKTDVATGFDPLSLLVAETEQQQKEEEEEDEDDSKSISTPSARRDLAEEIVMYMNNMSSPLTSRTPSIDLQRACDDKLNKKSPPLVKACRRSSLPPNSPKPVRLTKSKSYTKSEEKPRDRLWSSPAFSPTCPFREESQDTLTHSSPSFNLDTLLVPKLDVLRNSMFTAGKGVAEKASKWYSRFTMYTTSSKAFLFLETQQY

SEQ ID NO: 3328 - protein, 65 aa, Artificial Sequence
  Synthetic polypeptide
MIMKPPQPCGTVGSPYVAQAELQLLGSSNAPISVSQSAEITGRGHKPRNAGCPWKLVKARKRILS

SEQ ID NO: 3329 - protein, 103 aa, Artificial Sequence
  Synthetic polypeptide
MIMKPPQPCGTVGSPYVAQAELQLLGSSNAPISVSQSAEITVSLCCPVWSTGMILAYCKLRLPGSSNSSASVSQAAGIIGRGHKPRNAGCPWKLVKARKRILS

SEQ ID NO: 3330 - protein, 80 aa, Artificial Sequence
  Synthetic polypeptide
MIMKPPQPCGTVGSPYVAQAELQLLGSSNAPISVSQSAEITVSLCCPVWSTGMILAYCKLRLPGSSNSSASVSQAAGIIG

SEQ ID NO: 3331 - protein, 93 aa, Artificial Sequence
  Synthetic polypeptide
MIMKPPQPCGTVGSPYVAQAELQLLGSSNAPISVSQSAEITVSLCCPVWSTGMILAYCKLRLPGSSNSSASVSQAAGIIANTQTTTRQVSETS

SEQ ID NO: 3332 - protein, 106 aa, Artificial Sequence
  Synthetic polypeptide
MIMKPPQPCGTVGSPYVAQAELQLLGSSNAPISVSQSAEITVSLCCPVWSTGMILAYCKLRLPGSSNSSASVSQAAGIIGPRRQGREQEPEPEEEEDSRRDVLQGV

SEQ ID NO: 3333 - protein, 75 aa, Artificial Sequence
  Synthetic polypeptide
MSSILPFTPPIVKRLLGWKKGEQNGQEEKWCEKAVKSLVKKLKKTGQLDELEKAITTQNVNTKCITIPRKKAMTF

SEQ ID NO: 3334 - protein, 248 aa, Artificial Sequence
  Synthetic polypeptide
MAAGVPCALVTSCSSVFSGDQLVQHILGTEDLIVEVTSNDAVRFYPWTIDNKYYSADINLCVVPNKFLVTAEIAESVQAFVVYFDSTQKSGLDSVSSWLPLAKAWLPEVMILVCDRVSEDGINRQKAQEWCIKHGFELVELSPEELPEEDDDFPESTGVKRIVQALNANVWSNVVMKNDRNQGFSLLNSLTGTNHSIGSADPCHPEQPHLPAADSTESLSDHRGGASNTTDAQVDSIVGLLQRCSGTM

SEQ ID NO: 3335 - protein, 139 aa, Artificial Sequence
  Synthetic polypeptide
MILVCDRVSEDGINRQKAQEWCIKHGFELVELSPEELPEEDDDFPESTGVKRIVQALNANVWSNVVMKNDRNQGFSLLNSLTGTNHSIGSADPCHPEQPHLPAADSTESLSDHRGGASNTTDAQVDSIVGLLQRCSGTM

SEQ ID NO: 3336 - protein, 209 aa, Artificial Sequence
  Synthetic polypeptide
MLWLALGPFPAMENQVLVIRIKIPNSGAVDWTVHSGPQLLFRDVLDVIGQVLPEATTTAFEYEDEDGDRITVRSDEEMKAMLSYYYSTVMEQQVNGQLIEPLQIFPRACKPPGERNIHGLKVNTRAGPSQHSSPAVSDSLPSNSLKKSSAELKKILANGQMNEQDIRYRDTLGHGNGGTVYKAYHVPSGKILAVKTPSSSAFGLLDLHQ

SEQ ID NO: 3337 - protein, 173 aa, Artificial Sequence
  Synthetic polypeptide
MMEGHFPQSDVIGQVLPEATTTAFEYEDEDGDRITVRSDEEMKAMLSYYYSTVMEQQVNGQLIEPLQIFPRACKPPGERNIHGLKVNTRAGPSQHSSPAVSDSLPSNSLKKSSAELKKILANGQMNEQDIRYRDTLGHGNGGTVYKAYHVPSGKILAVKTPSSSAFGLLDLHQ

SEQ ID NO: 3338 - protein, 142 aa, Artificial Sequence
  Synthetic polypeptide
DRITVRSDEEMKAMLSYYYSTVMEQQVNGQLIEPLQIFPRACKPPGERNIHGLKVNTRAGPSQHSSPAVSDSLPSNSLKKSSAELKKILANGQMNEQDIRYRDTLGHGNGGTVYKAYHVPSGKILAVKTPSSSAFGLLDLHQ

SEQ ID NO: 3339 - protein, 289 aa, Artificial Sequence
  Synthetic polypeptide
MLWLALGPFPAMENQVLVIRIKIPNSGAVDWTVHSGPQLLFRDVLDVIGQVLPEATTTAFEYEDEDGDRITVRSDEEMKAMLSYYYSTVMEQQVNGQLIEPLQIFPRACKPPGERNIHGLKVNTRAGPSQHSSPAVSDSLPSNSLKKSSAELKKILANGQMNEQDIRYRDTLGHGNGGTVYKAYHVPSGKILAVKVILLDITLELQKQIMSELEILYKCDSSYIIGFYGAFFVENRISICTEFMDGGSLDVYRKMPEHVLGRIAVAVVKGLTYLWSLKILHRANKDLCT

SEQ ID NO: 3340 - protein, 253 aa, Artificial Sequence
  Synthetic polypeptide
MMEGHFPQSDVIGQVLPEATTTAFEYEDEDGDRITVRSDEEMKAMLSYYYSTVMEQQVNGQLIEPLQIFPRACKPPGERNIHGLKVNTRAGPSQHSSPAVSDSLPSNSLKKSSAELKKILANGQMNEQDIRYRDTLGHGNGGTVYKAYHVPSGKILAVKVILLDITLELQKQIMSELEILYKCDSSYIIGFYGAFFVENRISICTEFMDGGSLDVYRKMPEHVLGRIAVAVVKGLTYLWSLKILHRANKDLCT

SEQ ID NO: 3341 - protein, 99 aa, Artificial Sequence
  Synthetic polypeptide
MEDFEVILLDITLELQKQIMSELEILYKCDSSYIIGFYGAFFVENRISICTEFMDGGSLDVYRKMPEHVLGRIAVAVVKGLTYLWSLKILHRANKDLCT

SEQ ID NO: 3342 - protein, 88 aa, Artificial Sequence
  Synthetic polypeptide
MEGLAGYVYKAASEGKVLTLAALLLNRSESDIRYLLGYVSQQGGQRSTPLIIAARNGHAKVVRLLLEHYRVQTQQTGTVRFDGKCHGI

SEQ ID NO: 3343 - protein, 971 aa, Artificial Sequence
  Synthetic polypeptide
MVSHFMGSLSVLCFLLLLGFQFVCPQPSTQHRKVPQRMAAEGAPEDDGGGGAPGVWGAWGPWSACSRSCSGGVMEQTRPCLPRSYRLRGGQRPGAPARAFADHVVSAVRTSVPLHRSRDETPALAGTDASRQGPTVLRGSRHPQPQGLEVTGDRRSRTRGTIGPGKYGYGKAPYILPLQTDTAHTPQRLRRQKLSSRHSRSQGASSARHGYSSPAHQVPQHGPLYQSDSGPRSGLQAAEAPIYQLPLTHDQGYPAASSLFHSPETSNNHGVGTHGATQSFSQPARSTAISCIGAYRQYKLCNTNVCPESSRSIREVQCASYNNKPFMGRFYEWEPFAEVKGNRKCELNCQAMGYRFYVRQAEKVIDGTPCDQNGTAICVSGQCKSIGCDDYLGSDKVVDKCGVCGGDNTGCQVVSGVFKHALTSLGYHRVVEIPEGATKINITEMYKSNNYLALRSRSGRSIINGNWAIDRPGKYEGGGTMFTYKRPNEISSTAGESFLAEGPTNEILDVYMIHQQPNPGVHYEYVIMGTNAISPQVPPHRRPGEPFNGQMVTEGRSQEEGEQKGRNEEKEDLRGEAPEMFTSESAQTFPVRHPDRFSPHRPDNLVPPAPQPPRRSRDHNWKQLGTTECSTTCGKGSQYPIFRCVHRSTHEEAPESYCDSSMKPTPEEEPCNIFPCPAFWDIGEWSECSKTCGLGMQHRQVLCRQVYANRSLTVQPYRCQHLEKPETTSTCQLKICSEWQIRTDWTSCSVPCGVGQRTRDVKCVSNIGDVVDDEECNMKLRPNDIENCDMGPCAKSWFLTEWSERCSAECGAGVRTRSVVCMTNHVSSLPLEGCGNNRPAEATPCDNGPCTGKVEWFAGSWSQCSIECGSGTQQREVICVRKNADTFEVLDPSECSFLEKPPSQQSCHLKPCGAKWFSTEWSMQVNGQTMVHPHSGTKNSATKIWMNFRCVLLSKKKSQVQKTTCCMSPSI

SEQ ID NO: 3344 - protein, 611 aa, Artificial Sequence
  Synthetic polypeptide
MFVSYLILTLLHVQTAVLARPGGESIGCDDYLGSDKVVDKCGVCGGDNTGCQVVSGVFKHALTSLGYHRVVEIPEGATKINITEMYKSNNYLALRSRSGRSIINGNWAIDRPGKYEGGGTMFTYKRPNEISSTAGESFLAEGPTNEILDVYMIHQQPNPGVHYEYVIMGTNAISPQVPPHRRPGEPFNGQMVTEGRSQEEGEQKGRNEEKEDLRGEAPEMFTSESAQTFPVRHPDRFSPHRPDNLVPPAPQPPRRSRDHNWKQLGTTECSTTCGKGSQYPIFRCVHRSTHEEAPESYCDSSMKPTPEEEPCNIFPCPAFWDIGEWSECSKTCGLGMQHRQVLCRQVYANRSLTVQPYRCQHLEKPETTSTCQLKICSEWQIRTDWTSCSVPCGVGQRTRDVKCVSNIGDVVDDEECNMKLRPNDIENCDMGPCAKSWFLTEWSERCSAECGAGVRTRSVVCMTNHVSSLPLEGCGNNRPAEATPCDNGPCTGKVEWFAGSWSQCSIECGSGTQQREVICVRKNADTFEVLDPSECSFLEKPPSQQSCHLKPCGAKWFSTEWSMQVNGQTMVHPHSGTKNSATKIWMNFRCVLLSKKKSQVQKTTCCMSPSI

SEQ ID NO: 3345 - protein, 70 aa, Artificial Sequence
  Synthetic polypeptide
MSKPHSEAGTAFIQTQQLHAAMADTFLEHMCRLDIDSPPITARNTGIICTIALATRTKLCLKKKRKKKEK

SEQ ID NO: 3346 - protein, 86 aa, Artificial Sequence
  Synthetic polypeptide
MSPEAQPQRTKGPQQPCRSPIVKPGLPSFRPSSCTQPWLTHSWSTCAAWTLIHHPSQPGTLASSVPLPWQQERNSASKKKGRKKKK

SEQ ID NO: 3347 - protein, 565 aa, Artificial Sequence
  Synthetic polypeptide
MTSSRLWFSLLLAAAFAGRATALWPWPQNFQTSDQRYVLYPNNFQFQYDVSSAAQPGCSVLDEAFQRYRDLLFGSGSWPRPYLTGKRHTLEKNVLVVSVVTPGCNQLPTLESVENYTLTINDDQCLLLSETVWGALRGLETFSQLVWKSAEGTFFINKTEIEDFPRFPHRGLLLDTSRHYLPLSSILDTLDVMAYNKLNVFHWHLVDDPSFPYESFTFPELMRKGSYNPVTHIYTAQDVKEVIEYARLRGIRVLAEFDTPGHTLSWGPGIPGLLTPCYSGSEPSGTFGPVNPSLNNTYEFMSTFFLEVSSVFPDFYLHLGGDEVDFTCWKSNPEIQDFMRKKGFGEDFKQLESFYIQTLLDIVSSYGKGYVVWQEVFDNKVKIQPDTIIQVWREDIPVNYMKELELVTKAGFRALLSAPWYLNRISYGPDWKDFYIVEPLAFEGTPEQKALVIGGEACMWGEYVDNTNLVPRLWPRAGAVAERLWSNKLTSDLTFAYERLSHFRCELLSGHNLISCQCSWNKAGRRTWKDRLAESSGLHLSPVLDASCLQTSDSKFFSYWTLGLK

SEQ ID NO: 3348 - protein, 576 aa, Artificial Sequence
  Synthetic polypeptide
MTSSRLWFSLLLAAAFAGRATALWPWPQNFQTSDQRYVLYPNNFQFQYDVSSAAQPGCSVLDEAFQRYRDLLFGSGSWPRPYLTGWPHQAYPVFLGKRHTLEKNVLVVSVVTPGCNQLPTLESVENYTLTINDDQCLLLSETVWGALRGLETFSQLVWKSAEGTFFINKTEIEDFPRFPHRGLLLDTSRHYLPLSSILDTLDVMAYNKLNVFHWHLVDDPSFPYESFTFPELMRKGSYNPVTHIYTAQDVKEVIEYARLRGIRVLAEFDTPGHTLSWGPGIPGLLTPCYSGSEPSGTFGPVNPSLNNTYEFMSTFFLEVSSVFPDFYLHLGGDEVDFTCWKSNPEIQDFMRKKGFGEDFKQLESFYIQTLLDIVSSYGKGYVVWQEVFDNKVKIQPDTIIQVWREDIPVNYMKELELVTKAGFRALLSAPWYLNRISYGPDWKDFYIVEPLAFEGTPEQKALVIGGEACMWGEYVDNTNLVPRLWPRAGAVAERLWSNKLTSDLTFAYERLSHFRCELLSGHNLISCQCSWNKAGRRTWKDRLAESSGLHLSPVLDASCLQTSDSKFFSYWTLGLK

SEQ ID NO: 3349 - skipped

SEQ ID NO: 3350 - protein, 93 aa, Artificial Sequence
  Synthetic polypeptide
MALWRGSAYAGFLALAVGCVFLLEPELPGSALRSLWSSLCLGPAPAPPGPVSPEGRLAAAWDALIVRPVRRWRRVAVGGSSLLFTRHGSFLTP

SEQ ID NO: 3351 - protein, 95 aa, Artificial Sequence
  Synthetic polypeptide
GARAARLGAALSLELAVSGARACAPGTRLPRGPVGGSLGRAYRAASPALAPRGSGGLFPAIHSARLLPDTLRRRCLASPSPSTMNVSFLRPSQPC

SEQ ID NO: 3352 - protein, 72 aa, Artificial Sequence
  Synthetic polypeptide
MLEPELPGSALRSLWSSLCLGPAPAPPGPVSPEGRLAAAWDALIVRPVRRWRRVAVGGSSLLFTRHGSFLTP

SEQ ID NO: 3353 - protein, 49 aa, Artificial Sequence
  Synthetic polypeptide
MLRRRGSPGMGVHVGAALGALWFCLTGTAETAPNWPPPCPATVQSPQRS

SEQ ID NO: 3354 - protein, 88 aa, Artificial Sequence
  Synthetic polypeptide
MSLKAPMSSRKKKLYLQQHCEAGAAFHHGEPSCQPPHRKMLRRRGSPGMGVHVGAALGALWFCLTGTAETAPNWPPPCPATVQSPQRS

SEQ ID NO: 3355 - protein, 576 aa, Artificial Sequence
  Synthetic polypeptide
MEPAPARSPRPQQDPARPQEPTMPPPETPSEGRQPSPSPSPTERAPASEEEFQFLRCQQCQAEAKCPKLLPCLHTLCSGCLEASGMQCPICQAPWPLGADTPALDNVFFESLQRRLSVYRQIVDAQAVCTRCKESADFWCFECEQLLCAKCFEAHQWFLKHEARPLAELRNQSVREFLDGTRKTNNIFCSNPNHRTPTLTSIYCRGCSKPLCCSCALLDSSHSELKCDISAEIQQRQEELDAMTQALQEQDSAFGAVHAQMHAAVGQLGRARAETEELIRERVRQVVAHVRAQERELLEAVDARYQRDYEEMASRLGRLDAVLQRIRTGSALVQRMKCYASDQEVLDMHGFLRQALCRLRQEEPQSLQAAVRTDGFDEFKVRLQDLSSCITQGKDAAVSKKASPEAASTPRDPIDVDLPEEAERVKAQVQALGLAEAQPMAVVQSVPGAHPVPVYAFSIKGPSYGEDVSNTTTAQKRKCSQTQCPRKVIKMESEEGKEARLARSSPEQPRPSTSKAVSPPHLDGPPSPRSPVIGSEVFLPNSNHVASGAGEAEERVVVISSSEDSDAENSVGLGGP

SEQ ID NO: 3356 - protein, 528 aa, Artificial Sequence
  Synthetic polypeptide
MEPAPARSPRPQQDPARPQEPTMPPPETPSEGRQPSPSPSPTERAPASEEEFQFLRCQQCQAEAKCPKLLPCLHTLCSGCLEASGMQCPICQAPWPLGADTPALDNVFFESLQRRLSVYRQIVDAQAVCTRCKESADFWCFECEQLLCAKCFEAHQWFLKHEARPLAELRNQSVREFLDGTRKTNNIFCSNPNHRTPTLTSIYCRGCSKPLCCSCALLDSSHSELKCDISAEIQQRQEELDAMTQALQEQDSAFGAVHAQMHAAVGQLGRARAETEELIRERVRQVVAHVRAQERELLEAVDARYQRDYEEMASRLGRLDAVLQRIRTGSALVQRMKCYASDQEVLDMHGFLRQALCRLRQEEPQSLQAAVRTDGFDEFKVRLQDLSSCITQGKDAAVSKKASPEAASTPRDPIDVDLDVSNTTTAQKRKCSQTQCPRKVIKMESEEGKEARLARSSPEQPRPSTSKAVSPPHLDGPPSPRSPVIGSEVFLPNSNHVASGAGEAEERVVVISSSEDSDAENSVGLGGP

SEQ ID NO: 3357 - protein, 68 aa, Artificial Sequence
  Synthetic polypeptide
AACARRSPRACKLPCAPMASTSSRCACRTSALASPRGKMQLYPRKPAQRLPALPGTLLTLTCPRRQRE

SEQ ID NO: 3358 - protein, 584 aa, Artificial Sequence
  Synthetic polypeptide
MEPAPARSPRPQQDPARPQEPTMPPPETPSEGRQPSPSPSPTERAPASEEEFQFLRCQQCQAEAKCPKLLPCLHTLCSGCLEASGMQCPICQAPWPLGADTPALDNVFFESLQRRLSVYRQIVDAQAVCTRCKESADFWCFECEQLLCAKCFEAHQWFLKHEARPLAELRNQSVREFLDGTRKTNNIFCSNPNHRTPTLTSIYCRGCSKPLCCSCALLDSSHSELKCDISAEIQQRQEELDAMTQALQEQDSAFGAVHAQMHAAVGQLGRARAETEELIRERVRQVVAHVRAQERELLEAVDARYQRDYEEMASRLGRLDAVLQRIRTGSALVQRMKCYASDQEVLDMHGFLRQALCRLRQEEPQSLQAAVRTDGFDEFKVRLQDLSSCITQGKDAAVSKKASPEAASTPRDPIDVDLPEEAERVKAQVQALGLAEAQPMAVVQSVPGAHPVPVYAFSIKGPSYGEDVSNTTTAQKRKCSQTQCPRKVIKMESEEGKEARLARSSPEQPRPSTSKAVSPPHLDGPPSPRSPVIGSEVFLPNSNHVASGAGEAEERVVVISSSEDSDAENSVLSATPLTSVTAQG

SEQ ID NO: 3359 - protein, 536 aa, Artificial Sequence
  Synthetic polypeptide
MEPAPARSPRPQQDPARPQEPTMPPPETPSEGRQPSPSPSPTERAPASEEEFQFLRCQQCQAEAKCPKLLPCLHTLCSGCLEASGMQCPICQAPWPLGADTPALDNVFFESLQRRLSVYRQIVDAQAVCTRCKESADFWCFECEQLLCAKCFEAHQWFLKHEARPLAELRNQSVREFLDGTRKTNNIFCSNPNHRTPTLTSIYCRGCSKPLCCSCALLDSSHSELKCDISAEIQQRQEELDAMTQALQEQDSAFGAVHAQMHAAVGQLGRARAETEELIRERVRQVVAHVRAQERELLEAVDARYQRDYEEMASRLGRLDAVLQRIRTGSALVQRMKCYASDQEVLDMHGFLRQALCRLRQEEPQSLQAAVRTDGFDEFKVRLQDLSSCITQGKDAAVSKKASPEAASTPRDPIDVDLDVSNTTTAQKRKCSQTQCPRKVIKMESEEGKEARLARSSPEQPRPSTSKAVSPPHLDGPPSPRSPVIGSEVFLPNSNHVASGAGEAEERVVVISSSEDSDAENSVLSATPLTSVTAQG

SEQ ID NO: 3360 - protein, 68 aa, Artificial Sequence; identical to SEQ ID NO: 3357
  Synthetic polypeptide

SEQ ID NO: 3361 - protein, 473 aa, Artificial Sequence
  Synthetic polypeptide
MSSQPAGNQTSPGATEDYSYGSWYIDEPQGGEELQPEGEVPSCHTSIPPGLYHACLASLSILVLLLLAMLVRRRQLWPDCVRGRPGLPSPVDFLAGDRPRAVPAAVFMVLLSSLCLLLPDEDALPFLTLASAPSQDGKTEAPRGAWKILGLFYYAALYYPLAACATAGHTAAHLLGSTLSWAHLGVQVWQRAECPQVPKIYKYYSLLASLPLLLGLGFLSLWYPVQLVRSFSRRTGAGSKGLQSSYSEEYLRNLLCRKKLGSSYHTSKHGFLSWARVCLRHCIYTPQPGFHLPLKLVLSATLTGTAIYQVALLLLVGVVPTIQKVRAGVTTDVSYLLAGFGIVLSEDKQEVVELVKHHLWALEVCYISALVLSCLLTFLVLMRSLVTHRTNLRALHRGAALDLSPLHRSPHPSRQAIFCWMSFSAYQTAFICLAGYGGVHLQFQLFGRMRQENRLNPGGGGCSEPRLHHCAPA

SEQ ID NO: 3362 - protein, 464 aa, Artificial Sequence
  Synthetic polypeptide
MSSQPAGNQTSPGATEDYSYGSWYIDEPQGGEELQPEGEVPSCHTSIPPGLYHACLASLSILVLLLLAMLVRRRQLWPDCVRGRPGLPRPRAVPAAVFMVLLSSLCLLLPDEDALPFLTLASAPSQDGKTEAPRGAWKILGLFYYAALYYPLAACATAGHTAAHLLGSTLSWAHLGVQVWQRAECPQVPKIYKYYSLLASLPLLLGLGFLSLWYPVQLVRSFSRRTGAGSKGLQSSYSEEYLRNLLCRKKLGSSYHTSKHGFLSWARVCLRHCIYTPQPGFHLPLKLVLSATLTGTAIYQVALLLLVGVVPTIQKVRAGVTTDVSYLLAGFGIVLSEDKQEVVELVKHHLWALEVCYISALVLSCLLTFLVLMRSLVTHRTNLRALHRGAALDLSPLHRSPHPSRQAIFCWMSFSAYQTAFICLAGYGGVHLQFQLFGRMRQENRLNPGGGGCSEPRLHHCAPA

SEQ ID NO: 3363 - protein, 465 aa, Artificial Sequence
  Synthetic polypeptide
MSSQPAGNQTSPGATEDYSYGSWYIDEPQGGEELQPEGEVPSCHTSIPPGLYHACLASLSILVLLLLAMLVRRRQLWPDCVRGRPGLPSPVDFLAGDRPRAVPAAVFMVLLSSLCLLLPDEDALPFLTLASAPSQGAWKILGLFYYAALYYPLAACATAGHTAAHLLGSTLSWAHLGVQVWQRAECPQVPKIYKYYSLLASLPLLLGLGFLSLWYPVQLVRSFSRRTGAGSKGLQSSYSEEYLRNLLCRKKLGSSYHTSKHGFLSWARVCLRHCIYTPQPGFHLPLKLVLSATLTGTAIYQVALLLLVGVVPTIQKVRAGVTTDVSYLLAGFGIVLSEDKQEVVELVKHHLWALEVCYISALVLSCLLTFLVLMRSLVTHRTNLRALHRGAALDLSPLHRSPHPSRQAIFCWMSFSAYQTAFICLAGYGGVHLQFQLFGRMRQENRLNPGGGGCSEPRLHHCAPA

SEQ ID NO: 3364 - protein, 510 aa, Artificial Sequence
  Synthetic polypeptide
MQIRLLRAELVVPLWQFIRQWPPGSDGWGQMEEKGQRMSSQPAGNQTSPGATEDYSYGSWYIDEPQGGEELQPEGEVPSCHTSIPPGLYHACLASLSILVLLLLAMLVRRRQLWPDCVRGRPGLPSPVDFLAGDRPRAVPAAVFMVLLSSLCLLLPDEDALPFLTLASAPSQDGKTEAPRGAWKILGLFYYAALYYPLAACATAGHTAAHLLGSTLSWAHLGVQVWQRAECPQVPKIYKYYSLLASLPLLLGLGFLSLWYPVQLVRSFSRRTGAGSKGLQSSYSEEYLRNLLCRKKLGSSYHTSKHGFLSWARVCLRHCIYTPQPGFHLPLKLVLSATLTGTAIYQVALLLLVGVVPTIQKVRAGVTTDVSYLLAGFGIVLSEDKQEVVELVKHHLWALEVCYISALVLSCLLTFLVLMRSLVTHRTNLRALHRGAALDLSPLHRSPHPSRQAIFCWMSFSAYQTAFICLAGYGGVHLQFQLFGRMRQENRLNPGGGGCSEPRLHHCAPA

SEQ ID NO: 3365 - protein, 512 aa, Artificial Sequence
  Synthetic polypeptide
MGGKGGGDTRGPVLFPCQLAQALSPRRAFPRELKEKGQRMSSQPAGNQTSPGATEDYSYGSWYIDEPQGGEELQPEGEVPSCHTSIPPGLYHACLASLSILVLLLLAMLVRRRQLWPDCVRGRPGLPSPVDFLAGDRPRAVPAAVFMVLLSSLCLLLPDEDALPFLTLASAPSQDGKTEAPRGAWKILGLFYYAALYYPLAACATAGHTAAHLLGSTLSWAHLGVQVWQRAECPQVPKIYKYYSLLASLPLLLGLGFLSLWYPVQLVRSFSRRTGAGSKGLQSSYSEEYLRNLLCRKKLGSSYHTSKHGFLSWARVCLRHCIYTPQPGFHLPLKLVLSATLTGTAIYQVALLLLVGVVPTIQKVRAGVTTDVSYLLAGFGIVLSEDKQEVVELVKHHLWALEVCYISALVLSCLLTFLVLMRSLVTHRTNLRALHRGAALDLSPLHRSPHPSRQAIFCWMSFSAYQTAFICLAGYGGVHLQFQLFGRMRQENRLNPGGGGCSEPRLHHCAPA

SEQ ID NO: 3366 - protein, 488 aa, Artificial Sequence
  Synthetic polypeptide
MDSQGDWAAQEKGQRMSSQPAGNQTSPGATEDYSYGSWYIDEPQGGEELQPEGEVPSCHTSIPPGLYHACLASLSILVLLLLAMLVRRRQLWPDCVRGRPGLPSPVDFLAGDRPRAVPAAVFMVLLSSLCLLLPDEDALPFLTLASAPSQDGKTEAPRGAWKILGLFYYAALYYPLAACATAGHTAAHLLGSTLSWAHLGVQVWQRAECPQVPKIYKYYSLLASLPLLLGLGFLSLWYPVQLVRSFSRRTGAGSKGLQSSYSEEYLRNLLCRKKLGSSYHTSKHGFLSWARVCLRHCIYTPQPGFHLPLKLVLSATLTGTAIYQVALLLLVGVVPTIQKVRAGVTTDVSYLLAGFGIVLSEDKQEVVELVKHHLWALEVCYISALVLSCLLTFLVLMRSLVTHRTNLRALHRGAALDLSPLHRSPHPSRQAIFCWMSFSAYQTAFICLAGYGGVHLQFQLFGRMRQENRLNPGGGGCSEPRLHHCAPA

SEQ ID NO: 3367 - protein, 506 aa, Artificial Sequence
  Synthetic polypeptide
MSSQPAGNQTSPGATEDYSYGSWYIDEPQGGEELQPEGEVPSCHTSIPPGLYHACLASLSILVLLLLAMLVRRRQLWPDCVRGRPGLPSPVDFLAGDRPRAVPAAVFMVLLSSLCLLLPDEDALPFLTLASAPSQDGKTEAPRGAWKILGLFYYAALYYPLAACATAGHTAAHLLGSTLSWAHLGVQVWQRAECPQVPKIYKYYSLLASLPLLLGLGFLSLWYPVQLVRSFSRRTGAGSKGLQSSYSEEYLRNLLCRKKLGSRMAAVEDWLLLPRILVIKRDNYQLGTAGRPWPGLGHLGSCWPFSWAPWEGGGLPGLSGAVHHTPSFEDYRIPSPAEAGAFSYTDRDGHLPGGPAAAGGRGTHYPEGEGRGHHGCLLPAGRLWNRALRGQAGGGGAGEAPSVGSGSVLHLSLGLVLLTHLPGPDALTGDTQDQPSSSAPRSCPGLESLASESPSLPPSHILLDELQCLPDSLYLPCRVWWCAPAVPAIREDEAGESLEPRRWRLQ

SEQ ID NO: 3368 - protein, 461 aa, Artificial Sequence
  Synthetic polypeptide
MSSQPAGNQTSPGATEDYSYGSWYIDEPQGGEELQPEGEVPSCHTSIPPGLYHACLASLSILVLLLLAMLVRRRQLWPDCVRGRPGLPSPVDFLAGDRPRAVPAAVFMVLLSSLCLLLPDEDALPFLTLASAPSQDGKTEAPRGAWKILGLFYYAALYYPLAACATAGHTAAHLLGSTLSWAHLGVQVWQRAECPQVPKIYKYYSLLASLPLLLGLGFLSLWYPVQLVRSFSRRTGAGSKGLQSSYSEEYLRNLLCRKKLGSSYHTSKHGFLSWARVCLRHCIYTPQPGFHLPLKLVLSATLTGTAIYQVALLLLVGVVPTIQKVRAGVTTDVSYLLAGFGIVLSEDKQEVVELVKHHLWALEVCYISALVLSCLLTFLVLMRSLVTHRTNLRALHRGAALDLSPLHRSPHPSRQAIFCWMSFSAYQTAFICLALWEAEAGGSRSQEMKTSLANMVRPRLY

SEQ ID NO: 3369 - protein, 452 aa, Artificial Sequence
  Synthetic polypeptide
MSSQPAGNQTSPGATEDYSYGSWYIDEPQGGEELQPEGEVPSCHTSIPPGLYHACLASLSILVLLLLAMLVRRRQLWPDCVRGRPGLPRPRAVPAAVFMVLLSSLCLLLPDEDALPFLTLASAPSQDGKTEAPRGAWKILGLFYYAALYYPLAACATAGHTAAHLLGSTLSWAHLGVQVWQRAECPQVPKIYKYYSLLASLPLLLGLGFLSLWYPVQLVRSFSRRTGAGSKGLQSSYSEEYLRNLLCRKKLGSSYHTSKHGFLSWARVCLRHCIYTPQPGFHLPLKLVLSATLTGTAIYQVALLLLVGVVPTIQKVRAGVTTDVSYLLAGFGIVLSEDKQEVVELVKHHLWALEVCYISALVLSCLLTFLVLMRSLVTHRTNLRALHRGAALDLSPLHRSPHPSRQAIFCWMSFSAYQTAFICLALWEAEAGGSRSQEMKTSLANMVRPRLY

SEQ ID NO: 3370 - protein, 453 aa, Artificial Sequence
  Synthetic polypeptide
MSSQPAGNQTSPGATEDYSYGSWYIDEPQGGEELQPEGEVPSCHTSIPPGLYHACLASLSILVLLLLAMLVRRRQLWPDCVRGRPGLPSPVDFLAGDRPRAVPAAVFMVLLSSLCLLLPDEDALPFLTLASAPSQGAWKILGLFYYAALYYPLAACATAGHTAAHLLGSTLSWAHLGVQVWQRAECPQVPKIYKYYSLLASLPLLLGLGFLSLWYPVQLVRSFSRRTGAGSKGLQSSYSEEYLRNLLCRKKLGSSYHTSKHGFLSWARVCLRHCIYTPQPGFHLPLKLVLSATLTGTAIYQVALLLLVGVVPTIQKVRAGVTTDVSYLLAGFGIVLSEDKQEVVELVKHHLWALEVCYISALVLSCLLTFLVLMRSLVTHRTNLRALHRGAALDLSPLHRSPHPSRQAIFCWMSFSAYQTAFICLALWEAEAGGSRSQEMKTSLANMVRPRLY

SEQ ID NO: 3371 - protein, 498 aa, Artificial Sequence
  Synthetic polypeptide
MQIRLLRAELVVPLWQFIRQWPPGSDGWGQMEEKGQRMSSQPAGNQTSPGATEDYSYGSWYIDEPQGGEELQPEGEVPSCHTSIPPGLYHACLASLSILVLLLLAMLVRRRQLWPDCVRGRPGLPSPVDFLAGDRPRAVPAAVFMVLLSSLCLLLPDEDALPFLTLASAPSQDGKTEAPRGAWKILGLFYYAALYYPLAACATAGHTAAHLLGSTLSWAHLGVQVWQRAECPQVPKIYKYYSLLASLPLLLGLGFLSLWYPVQLVRSFSRRTGAGSKGLQSSYSEEYLRNLLCRKKLGSSYHTSKHGFLSWARVCLRHCIYTPQPGFHLPLKLVLSATLTGTAIYQVALLLLVGVVPTIQKVRAGVTTDVSYLLAGFGIVLSEDKQEVVELVKHHLWALEVCYISALVLSCLLTFLVLMRSLVTHRTNLRALHRGAALDLSPLHRSPHPSRQAIFCWMSFSAYQTAFICLALWEAEAGGSRSQEMKTSLANMVRPRLY

SEQ ID NO: 3372 - protein, 500 aa, Artificial Sequence
  Synthetic polypeptide
MGGKGGGDTRGPVLFPCQLAQALSPRRAFPRELKEKGQRMSSQPAGNQTSPGATEDYSYGSWYIDEPQGGEELQPEGEVPSCHTSIPPGLYHACLASLSILVLLLLAMLVRRRQLWPDCVRGRPGLPSPVDFLAGDRPRAVPAAVFMVLLSSLCLLLPDEDALPFLTLASAPSQDGKTEAPRGAWKILGLFYYAALYYPLAACATAGHTAAHLLGSTLSWAHLGVQVWQRAECPQVPKIYKYYSLLASLPLLLGLGFLSLWYPVQLVRSFSRRTGAGSKGLQSSYSEEYLRNLLCRKKLGSSYHTSKHGFLSWARVCLRHCIYTPQPGFHLPLKLVLSATLTGTAIYQVALLLLVGVVPTIQKVRAGVTTDVSYLLAGFGIVLSEDKQEVVELVKHHLWALEVCYISALVLSCLLTFLVLMRSLVTHRTNLRALHRGAALDLSPLHRSPHPSRQAIFCWMSFSAYQTAFICLALWEAEAGGSRSQEMKTSLANMVRPRLY

SEQ ID NO: 3373 - protein, 476 aa, Artificial Sequence
  Synthetic polypeptide
MDSQGDWAAQEKGQRMSSQPAGNQTSPGATEDYSYGSWYIDEPQGGEELQPEGEVPSCHTSIPPGLYHACLASLSILVLLLLAMLVRRRQLWPDCVRGRPGLPSPVDFLAGDRPRAVPAAVFMVLLSSLCLLLPDEDALPFLTLASAPSQDGKTEAPRGAWKILGLFYYAALYYPLAACATAGHTAAHLLGSTLSWAHLGVQVWQRAECPQVPKIYKYYSLLASLPLLLGLGFLSLWYPVQLVRSFSRRTGAGSKGLQSSYSEEYLRNLLCRKKLGSSYHTSKHGFLSWARVCLRHCIYTPQPGFHLPLKLVLSATLTGTAIYQVALLLLVGVVPTIQKVRAGVTTDVSYLLAGFGIVLSEDKQEVVELVKHHLWALEVCYISALVLSCLLTFLVLMRSLVTHRTNLRALHRGAALDLSPLHRSPHPSRQAIFCWMSFSAYQTAFICLALWEAEAGGSRSQEMKTSLANMVRPRLY

SEQ ID NO: 3374 - protein, 481 aa, Artificial Sequence
  Synthetic polypeptide
MSSQPAGNQTSPGATEDYSYGSWYIDEPQGGEELQPEGEVPSCHTSIPPGLYHACLASLSILVLLLLAMLVRRRQLWPDCVRGRPGLPSPVDFLAGDRPRAVPAAVFMVLLSSLCLLLPDEDALPFLTLASAPSQDGKTEAPRGAWKILGLFYYAALYYPLAACATAGHTAAHLLGSTLSWAHLGVQVWQRAECPQVPKIYKYYSLLASLPLLLGLGFLSLWYPVQLVRSFSRRTGAGSKGLQSSYSEEYLRNLLCRKKLGSRMAAVEDWLLLPRILVIKRDNYQLGTAGRPWPGLGHLGSCWPFSWAPWEGGGLPGLSGAVHHTPSFEDYRIPSPAEAGAFSYTDRDGHLPGGPAAAGGRGTHYPEGEGRGHHGCLLPAGRLWNRALRGQAGGGGAGEAPSVGSGSVLHLSLGLVLLTHLPGPDALTGDTQDQPSSSAPRSCPGLESLASESPSLPPSHILLDELQCLPDSLYLPCTLGG

SEQ ID NO: 3375 - protein, 388 aa, Artificial Sequence
  Synthetic polypeptide
MSSQPAGNQTSPGATEDYSYGSWYIDEPQGGEELQPEGEVPSCHTSIPPGLYHACLASLSILVLLLLAMLVRRRQLWPDCVRGRPGLPSPVDFLAGDRPRAVPAAVFMVLLSSLCLLLPDEDALPFLTLASAPSQDGKTEAPRGAWKILGLFYYAALYYPLAACATAGHTAAHLLGSTLSWAHLGVQVWQRAECPQVPKIYKYYSLLASLPLLLGLGFLSLWYPVQLVRSFSRRTGAGSKGLQSSYSEEYLRNLLCRKKLGSSYHTSKHGFLSWARVCLRHCIYTPQPGFHLPLKLVLSATLTGTAIYQVALLLLVGVVPTIQKVRAGVTTDVSYLLAGFGIVLSEDKQEVVELVKHHLWALEAWLSGRSPLSEPQLPLQPSGNSSSV

SEQ ID NO: 3376 - protein, 379 aa, Artificial Sequence
  Synthetic polypeptide
MSSQPAGNQTSPGATEDYSYGSWYIDEPQGGEELQPEGEVPSCHTSIPPGLYHACLASLSILVLLLLAMLVRRRQLWPDCVRGRPGLPRPRAVPAAVFMVLLSSLCLLLPDEDALPFLTLASAPSQDGKTEAPRGAWKILGLFYYAALYYPLAACATAGHTAAHLLGSTLSWAHLGVQVWQRAECPQVPKIYKYYSLLASLPLLLGLGFLSLWYPVQLVRSFSRRTGAGSKGLQSSYSEEYLRNLLCRKKLGSSYHTSKHGFLSWARVCLRHCIYTPQPGFHLPLKLVLSATLTGTAIYQVALLLLVGVVPTIQKVRAGVTTDVSYLLAGFGIVLSEDKQEVVELVKHHLWALEAWLSGRSPLSEPQLPLQPSGNSSSV

SEQ ID NO: 3377 - protein, 380 aa, Artificial Sequence
  Synthetic polypeptide
MSSQPAGNQTSPGATEDYSYGSWYIDEPQGGEELQPEGEVPSCHTSIPPGLYHACLASLSILVLLLLAMLVRRRQLWPDCVRGRPGLPSPVDFLAGDRPRAVPAAVFMVLLSSLCLLLPDEDALPFLTLASAPSQGAWKILGLFYYAALYYPLAACATAGHTAAHLLGSTLSWAHLGVQVWQRAECPQVPKIYKYYSLLASLPLLLGLGFLSLWYPVQLVRSFSRRTGAGSKGLQSSYSEEYLRNLLCRKKLGSSYHTSKHGFLSWARVCLRHCIYTPQPGFHLPLKLVLSATLTGTAIYQVALLLLVGVVPTIQKVRAGVTTDVSYLLAGFGIVLSEDKQEVVELVKHHLWALEAWLSGRSPLSEPQLPLQPSGNSSSV

SEQ ID NO: 3378 - protein, 425 aa, Artificial Sequence
  Synthetic polypeptide
MQIRLLRAELVVPLWQFIRQWPPGSDGWGQMEEKGQRMSSQPAGNQTSPGATEDYSYGSWYIDEPQGGEELQPEGEVPSCHTSIPPGLYHACLASLSILVLLLLAMLVRRRQLWPDCVRGRPGLPSPVDFLAGDRPRAVPAAVFMVLLSSLCLLLPDEDALPFLTLASAPSQDGKTEAPRGAWKILGLFYYAALYYPLAACATAGHTAAHLLGSTLSWAHLGVQVWQRAECPQVPKIYKYYSLLASLPLLLGLGFLSLWYPVQLVRSFSRRTGAGSKGLQSSYSEEYLRNLLCRKKLGSSYHTSKHGFLSWARVCLRHCIYTPQPGFHLPLKLVLSATLTGTAIYQVALLLLVGVVPTIQKVRAGVTTDVSYLLAGFGIVLSEDKQEVVELVKHHLWALEAWLSGRSPLSEPQLPLQPSGNSSSV

SEQ ID NO: 3379 - protein, 427 aa, Artificial Sequence
  Synthetic polypeptide
MGGKGGGDTRGPVLFPCQLAQALSPRRAFPRELKEKGQRMSSQPAGNQTSPGATEDYSYGSWYIDEPQGGEELQPEGEVPSCHTSIPPGLYHACLASLSILVLLLLAMLVRRRQLWPDCVRGRPGLPSPVDFLAGDRPRAVPAAVFMVLLSSLCLLLPDEDALPFLTLASAPSQDGKTEAPRGAWKILGLFYYAALYYPLAACATAGHTAAHLLGSTLSWAHLGVQVWQRAECPQVPKIYKYYSLLASLPLLLGLGFLSLWYPVQLVRSFSRRTGAGSKGLQSSYSEEYLRNLLCRKKLGSSYHTSKHGFLSWARVCLRHCIYTPQPGFHLPLKLVLSATLTGTAIYQVALLLLVGVVPTIQKVRAGVTTDVSYLLAGFGIVLSEDKQEVVELVKHHLWALEAWLSGRSPLSEPQLPLQPSGNSSSV

SEQ ID NO: 3380 - protein, 403 aa, Artificial Sequence
  Synthetic polypeptide
MDSQGDWAAQEKGQRMSSQPAGNQTSPGATEDYSYGSWYIDEPQGGEELQPEGEVPSCHTSIPPGLYHACLASLSILVLLLLAMLVRRRQLWPDCVRGRPGLPSPVDFLAGDRPRAVPAAVFMVLLSSLCLLLPDEDALPFLTLASAPSQDGKTEAPRGAWKILGLFYYAALYYPLAACATAGHTAAHLLGSTLSWAHLGVQVWQRAECPQVPKIYKYYSLLASLPLLLGLGFLSLWYPVQLVRSFSRRTGAGSKGLQSSYSEEYLRNLLCRKKLGSSYHTSKHGFLSWARVCLRHCIYTPQPGFHLPLKLVLSATLTGTAIYQVALLLLVGVVPTIQKVRAGVTTDVSYLLAGFGIVLSEDKQEVVELVKHHLWALEAWLSGRSPLSEPQLPLQPSGNSSSV

SEQ ID NO: 3381 - protein, 49 aa, Artificial Sequence
  Synthetic polypeptide
GEGRGHHGCLLPAGRLWNRALRGQAGGGGAGEAPSVGSGSMAVWAKPSL

SEQ ID NO: 3382 - protein, 416 aa, Artificial Sequence
  Synthetic polypeptide
MSSQPAGNQTSPGATEDYSYGSWYIDEPQGGEELQPEGEVPSCHTSIPPGLYHACLASLSILVLLLLAMLVRRRQLWPDCVRGRPGLPSPVDFLAGDRPRAVPAAVFMVLLSSLCLLLPDEDALPFLTLASAPSQDGKTEAPRGAWKILGLFYYAALYYPLAACATAGHTAAHLLGSTLSWAHLGVQVWQRAECPQVPKIYKYYSLLASLPLLLGLGFLSLWYPVQLVRSFSRRTGAGSKGLQSSYSEEYLRNLLCRKKLGSRMAAVEDWLLLPRILVIKRDNYQLGTAGRPWPGLGHLGSCWPFSWAPWEGGGLPGLSGAVHHTPSFEDYRIPSPAEAGAFSYTDRDGHLPGGPAAAGGRGTHYPEGEGRGHHGCLLPAGRLWNRALRGQAGGGGAGEAPSVGSGSMAVWAKPSL

SEQ ID NO: 3383 - protein, 389 aa, Artificial Sequence
  Synthetic polypeptide
MSSQPAGNQTSPGATEDYSYGSWYIDEPQGGEELQPEGEVPSCHTSIPPGLYHACLASLSILVLLLLAMLVRRRQLWPDCVRGRPGLPSPVDFLAGDRPRAVPAAVFMVLLSSLCLLLPDEDALPFLTLASAPSQDGKTEAPRGAWKILGLFYYAALYYPLAACATAGHTAAHLLGSTLSWAHLGVQVWQRAECPQVPKIYKYYSLLASLPLLLGLGFLSLWYPVQLVRSFSRRTGAGSKGLQSSYSEEYLRNLLCRKKLGSSYHTSKHGFLSWARVCLRHCIYTPQPGFHLPLKLVLSATLTGTAIYQVALLLLVGVVPTIQKVRAGVTTDVSYLLAGFGIVLSEDKQEVVELVKHHLWALEAAWLSGRSPLSEPQLPLQPSGNSSSV

SEQ ID NO: 3384 - protein, 380 aa, Artificial Sequence
  Synthetic polypeptide
MSSQPAGNQTSPGATEDYSYGSWYIDEPQGGEELQPEGEVPSCHTSIPPGLYHACLASLSILVLLLLAMLVRRRQLWPDCVRGRPGLPRPRAVPAAVFMVLLSSLCLLLPDEDALPFLTLASAPSQDGKTEAPRGAWKILGLFYYAALYYPLAACATAGHTAAHLLGSTLSWAHLGVQVWQRAECPQVPKIYKYYSLLASLPLLLGLGFLSLWYPVQLVRSFSRRTGAGSKGLQSSYSEEYLRNLLCRKKLGSSYHTSKHGFLSWARVCLRHCIYTPQPGFHLPLKLVLSATLTGTAIYQVALLLLVGVVPTIQKVRAGVTTDVSYLLAGFGIVLSEDKQEVVELVKHHLWALEAAWLSGRSPLSEPQLPLQPSGNSSSV

SEQ ID NO: 3385 - protein, 381 aa, Artificial Sequence
  Synthetic polypeptide
MSSQPAGNQTSPGATEDYSYGSWYIDEPQGGEELQPEGEVPSCHTSIPPGLYHACLASLSILVLLLLAMLVRRRQLWPDCVRGRPGLPSPVDFLAGDRPRAVPAAVFMVLLSSLCLLLPDEDALPFLTLASAPSQGAWKILGLFYYAALYYPLAACATAGHTAAHLLGSTLSWAHLGVQVWQRAECPQVPKIYKYYSLLASLPLLLGLGFLSLWYPVQLVRSFSRRTGAGSKGLQSSYSEEYLRNLLCRKKLGSSYHTSKHGFLSWARVCLRHCIYTPQPGFHLPLKLVLSATLTGTAIYQVALLLLVGVVPTIQKVRAGVTTDVSYLLAGFGIVLSEDKQEVVELVKHHLWALEAAWLSGRSPLSEPQLPLQPSGNSSSV

SEQ ID NO: 3386 - protein, 426 aa, Artificial Sequence
  Synthetic polypeptide
MQIRLLRAELVVPLWQFIRQWPPGSDGWGQMEEKGQRMSSQPAGNQTSPGATEDYSYGSWYIDEPQGGEELQPEGEVPSCHTSIPPGLYHACLASLSILVLLLLAMLVRRRQLWPDCVRGRPGLPSPVDFLAGDRPRAVPAAVFMVLLSSLCLLLPDEDALPFLTLASAPSQDGKTEAPRGAWKILGLFYYAALYYPLAACATAGHTAAHLLGSTLSWAHLGVQVWQRAECPQVPKIYKYYSLLASLPLLLGLGFLSLWYPVQLVRSFSRRTGAGSKGLQSSYSEEYLRNLLCRKKLGSSYHTSKHGFLSWARVCLRHCIYTPQPGFHLPLKLVLSATLTGTAIYQVALLLLVGVVPTIQKVRAGVTTDVSYLLAGFGIVLSEDKQEVVELVKHHLWALEAAWLSGRSPLSEPQLPLQPSGNSSSV

SEQ ID NO: 3387 - protein, 428 aa, Artificial Sequence
  Synthetic polypeptide
MGGKGGGDTRGPVLFPCQLAQALSPRRAFPRELKEKGQRMSSQPAGNQTSPGATEDYSYGSWYIDEPQGGEELQPEGEVPSCHTSIPPGLYHACLASLSILVLLLLAMLVRRRQLWPDCVRGRPGLPSPVDFLAGDRPRAVPAAVFMVLLSSLCLLLPDEDALPFLTLASAPSQDGKTEAPRGAWKILGLFYYAALYYPLAACATAGHTAAHLLGSTLSWAHLGVQVWQRAECPQVPKIYKYYSLLASLPLLLGLGFLSLWYPVQLVRSFSRRTGAGSKGLQSSYSEEYLRNLLCRKKLGSSYHTSKHGFLSWARVCLRHCIYTPQPGFHLPLKLVLSATLTGTAIYQVALLLLVGVVPTIQKVRAGVTTDVSYLLAGFGIVLSEDKQEVVELVKHHLWALEAAWLSGRSPLSEPQLPLQPSGNSSSV

SEQ ID NO: 3388 - protein, 404 aa, Artificial Sequence
  Synthetic polypeptide
MDSQGDWAAQEKGQRMSSQPAGNQTSPGATEDYSYGSWYIDEPQGGEELQPEGEVPSCHTSIPPGLYHACLASLSILVLLLLAMLVRRRQLWPDCVRGRPGLPSPVDFLAGDRPRAVPAAVFMVLLSSLCLLLPDEDALPFLTLASAPSQDGKTEAPRGAWKILGLFYYAALYYPLAACATAGHTAAHLLGSTLSWAHLGVQVWQRAECPQVPKIYKYYSLLASLPLLLGLGFLSLWYPVQLVRSFSRRTGAGSKGLQSSYSEEYLRNLLCRKKLGSSYHTSKHGFLSWARVCLRHCIYTPQPGFHLPLKLVLSATLTGTAIYQVALLLLVGVVPTIQKVRAGVTTDVSYLLAGFGIVLSEDKQEVVELVKHHLWALEAAWLSGRSPLSEPQLPLQPSGNSSSV

SEQ ID NO: 3389 - protein, 50 aa, Artificial Sequence
  Synthetic polypeptide
GEGRGHHGCLLPAGRLWNRALRGQAGGGGAGEAPSVGSGSSMAVWAKPSL

SEQ ID NO: 3390 - protein, 417 aa, Artificial Sequence
  Synthetic polypeptide
MSSQPAGNQTSPGATEDYSYGSWYIDEPQGGEELQPEGEVPSCHTSIPPGLYHACLASLSILVLLLLAMLVRRRQLWPDCVRGRPGLPSPVDFLAGDRPRAVPAAVFMVLLSSLCLLLPDEDALPFLTLASAPSQDGKTEAPRGAWKILGLFYYAALYYPLAACATAGHTAAHLLGSTLSWAHLGVQVWQRAECPQVPKIYKYYSLLASLPLLLGLGFLSLWYPVQLVRSFSRRTGAGSKGLQSSYSEEYLRNLLCRKKLGSRMAAVEDWLLLPRILVIKRDNYQLGTAGRPWPGLGHLGSCWPFSWAPWEGGGLPGLSGAVHHTPSFEDYRIPSPAEAGAFSYTDRDGHLPGGPAAAGGRGTHYPEGEGRGHHGCLLPAGRLWNRALRGQAGGGGAGEAPSVGSGSSMAVWAKPSL

SEQ ID NO: 3391 - protein, 851 aa, Artificial Sequence
  Synthetic polypeptide
MAAAPALKHWRTTLERVEKFVSPLYFTDCNLRGRLFGASCPVAVLSSFLTPERLPYQEAVQRDFRPAQVGDSFGPTWWTCWFRVELTIPEAWVGQEVHLCWESDGEGLVWRDGEPVQGLTKEGEKTSYVLTDRLGERDPRSLTLYVEVACNGLLGAGKGSMIAAPDPEKMFQLSRAELAVFHRDVHMLLVDLELLLGIAKGLGKDNQRSFQALYTANQMVNVCDPAQPETFPVAQALASRFFGQHGGESQHTIHATGHCHIDTAWLWPFKETVRKCARSWVTALQLMERNPEFIFACSQAQQLEWVKSRYPGLYSRIQEFACRGQFVPVGGTWVEMDGNLPSGEAMVRQFLQGQNFFLQEFGKMCSEFWLPDTFGYSAQLPQIMHGCGIRRFLTQKLSWNLVNSFPHHTFFWEGLDGSRVLVHFPPGDSYGMQGSVEEVLKTVANNRDKGRANHSAFLFGFGDGGGGPTQTMLDRLKRLSNTDGLPRVQLSSPRQLFSALESDSEQLCTWVGELFLELHNGTYTTHAQIKKGNRECERILHDVELLSSLALARSAQFLYPAAQLQHLWRLLLLNQFHDVVTGSCIQMVAEEAMCHYEDIRSHGNTLLSAAAAALCAGEPGPEGLLIVNTLPWKRIEVMALPKPGGAHSLALVTVPSMGYAPVPPPTSLQPLLPQQPVFVVQETDGSVTLDNGIIRVKLDPTGRLTSLVLVASGREAIAEGAVGNQFVLFDDVPLYWDAWDVMDYHLETRKPVLGQAGTLAVGTEGGLRGSAWFLLQISPNSRLSQEVVLDVGCPYVRFHTEVHWHEAHKFLKVEFPARVRSSQATYEIQFGHLQRPTHYNTSWDWARFEKN

SEQ ID NO: 3392 - protein, 868 aa, Artificial Sequence
  Synthetic polypeptide
MAAAPALKHWRTTLERVEKFVSPLYFTDCNLRGRLFGASCPVAVLSSFLTPERLPYQEAVQRDFRPAQVGDSFGPTWWTCWFRVELTIPEAWVGQEVHLCWESDGEGLVWRDGEPVQGLTKEGEKTSYVLTDRLGERDPRSLTLYVEVACNGLLGAGKGSMIAAPDPEKMFQLSRAELAVFHRDVHMLLVDLELLLGIAKGLGKDNQRSFQALYTANQMVNVCDPAQPETFPVAQALASRFFGQHGGESQHTIHATGHCHIDTAWLWPFKETVRKCARSWVTALQLMERNPEFIFACSQAQQLEWVKSRYPGLYSRIQEFACRGQFVPVGGTWVEMDGNLPSGEAMVRQFLQGQNFFLQEFGKMCSEFWLPDTFGYSAQLPQIMHGCGIRRFLTQKLSWNLVNSFPHHTFFWEGLDGSRVLVHFPPGDSYGMQGSVEEVLKTVANNRDKGRANHSAFLFGFGDGGGGPTQTMLDRLKRLSNTDGLPRVQLSSPRQLFSALESDSEQLCTWVGELFLELHNGTYTTHAQIKKGNRECERILHDVELLSSLALARSAQFLYPAAQLQHLWRLLLLNQFHDVVTGSCIQMVAEEAMCHYEDIRSHGNTLLSAAAAALCAGEPGPEGLLIVNTLPWKRIEVMALPKPGGAHSLGLTPSPGDSAQHGLCSCSSPHLTAAPAAPAACVRSARAPTDSASRPPPTKTDGSVTLDNGIIRVKLDPTGRLTSLVLVASGREAIAEGAVGNQFVLFDDVPLYWDAWDVMDYHLETRKPVLGQAGTLAVGTEGGLRGSAWFLLQISPNSRLSQEVVLDVGCPYVRFHTEVHWHEAHKFLKVEFPARVRSSQATYEIQFGHLQRPTHYNTSWDWARFEKN

SEQ ID NO: 3393 - protein, 752 aa, Artificial Sequence
  Synthetic polypeptide
MAAAPALKHWRTTLERVEKFVSPLYFTDCNLRGRLFGASCPVAVLSSFLTPERLPYQEAVQRDFRPAQVGDSFGPTWWTCWFRVELTIPEAWVGQEVHLCWESDGEGLVWRDGEPVQGLTKEGEKTSYVLTDRLGERDPRSLTLYVEVACNGLLGAGKGSMIAAPDPEKMFQLSRAELAVFHRDVHMLLVDLELLLGIAKAQQLEWVKSRYPGLYSRIQEFACRGQFVPVGGTWVEMDGNLPSGEAMVRQFLQGQNFFLQEFGKMCSEFWLPDTFGYSAQLPQIMHGCGIRRFLTQKLSWNLVNSFPHHTFFWEGLDGSRVLVHFPPGDSYGMQGSVEEVLKTVANNRDKGRANHSAFLFGFGDGGGGPTQTMLDRLKRLSNTDGLPRVQLSSPRQLFSALESDSEQLCTWVGELFLELHNGTYTTHAQIKKGNRECERILHDVELLSSLALARSAQFLYPAAQLQHLWRLLLLNQFHDVVTGSCIQMVAEEAMCHYEDIRSHGNTLLSAAAAALCAGEPGPEGLLIVNTLPWKRIEVMALPKPGGAHSLALVTVPSMGYAPVPPPTSLQPLLPQQPVFVVQETDGSVTLDNGIIRVKLDPTGRLTSLVLVASGREAIAEGAVGNQFVLFDDVPLYWDAWDVMDYHLETRKPVLGQAGTLAVGTEGGLRGSAWFLLQISPNSRLSQEVVLDVGCPYVRFHTEVHWHEAHKFLKVEFPARVRSSQATYEIQFGHLQRPTHYNTSWDWARFEKN

SEQ ID NO: 3394 - protein, 801 aa, Artificial Sequence
  Synthetic polypeptide
MKRRLDDQESPVYAAQQRRIPGSTEAFPHQHRVLAPAPPVYEAVSETMQSATGIQYSVTPSYQVSAMPQSSGSHGPAIAAVHSSHHHPTAVQPHGGQVVQSHAHPAPPVAPVQGQQQFQRLKVEDALSYLDQVKLQFGSQPQVYNDFLDIMKEFKSQSIDTPGVISRVSQLFKGHPDLIMGFNTFLPPGYKIEVQTNDMVNVTTPGQVHQIPTHGIQPQPQPPPQHPSQPSAQSAPAPAQPAPQPPPAKVSKPSQLQAHTPASQQTPPLPPYASPRSPPVQPHTPVTISLGTAPSLQNNQPVEFNHAINYVNKIKNRFQGQPDIYKAFLEILHTYQKEQRNAKEAGGNYTPALTEQEVYAQVARLFKNQEDLLSEFGQFLPDANSSVLLSKTTAEKVDSVRNDHGGTVKKPQLNNKPQRPSQNGCQIRRHPTGTTPPVKKKPKLLNLKDSSMADASKHGGGTESLFFDKVRKALRSAEAYENFLRCLVIFNQEVISRAELVQLVSPFLGKFPELFNWFKNFLGYKESVHLETYPKERATEGIAMEIDYASCKRLGSSYRALPKSYQQPKCTGRTPLCKEVLNDTWVSFPSWSEDSTFVSSKKTQYEEHIYRCEDERFELDVVLETNLATIRVLEAIQKKLSRLSAEEQAKFRLDNTLGGTSEVIHRKALQRIYADKAADIIDGLRKNPSIAVPIVLKRLKMKEEEWREAQRGFNKVWREQNEKYYLKSLDHQGINFKQNDTKVLRSKSLLNEIESIYDELLRRLKHKNGLNPGDGGYNEPRLLHCTPAWVTEQDPAKKKKE

SEQ ID NO: 3395 - protein, 592 aa, Artificial Sequence
  Synthetic polypeptide
MALKGRALYDFHSENKEEISIQQDEDLVIFSETSLDGWLQGQNSRGETGLFPASYVEIVRSGISTNHADYSSSPAGSPGAQVSLYNSPSVASPARSGGGSGFLSNQGSFEEDDDDDWDDWDDGCTVVEEPRAGGLGTNGHPPLNLSYPGAYPSQHMAFRPKPPLERQDSLASAKRGSVVGRNLNRFSCFVRSGVEAFILGDVPMMAKIAETYSIEMGPRGPQWKANPHPFACSVEDPTKQTKFKGIKSYISYKLTPTHAASPVYRRYKHFDWLYNRLLHKFTVISVPHLPEKQATGRFEEDFIEKRKRRLILWMDHMTSHPVLSQYEGFQHFLSCLDDKQWKMGKRRAEKDEMVGASFLLTFQIPTEHQDLQDVEDRVDTFKAFSKKMDDSVLQLSTVASELVRKHVGGFRKEFQKLGSAFQAISHSFQMDPPFCSEALNSAISHTGRTYEAIGEMFAEQPKNDLFQMLDTLSLYQGLLSNFPDIIHLQKGAFAKVKESQRMSDEGRMVQDEADGIRRRCRVVGFALQAEMNHFHQRRELDFKHMMQNYLRQQILFYQRVGQQLEKTLRITTFATMEKFHPTSGPQLPPAEW

SEQ ID NO: 3396 - protein, 52 aa, Artificial Sequence
  Synthetic polypeptide
SWPPVEGQSPPICLLCGGPHKTDQIQGHQKLHLLQAHTHPCCLTRLPALQTL

SEQ ID NO: 3397 - protein, 327 aa, Artificial Sequence
  Synthetic polypeptide
MSVSGLKAELKFLASIFDKNHERFRIVSWKLDELHCQFLVPQQGSPHSLPPPLTLHCNITESYPSSSPIWFVDSEDPNLTSVLERLEDTKNNNLLRQQLKWLICELCSLYNLPKHLDVEMLDQPLPTGQNGTTEEVTSEEEEEEEEMAEDIEDLDHYEMKEEEPISGKKSEDEGIEKENLAILEKIRKTQRQDHLNGAVSGSVQASDRLMKELRDIYRSQSYKTGIYSVELINDSLYDWHVKLQKVDPDSPLHSDLQILKEKEGIEYILLNFSFKVELQGGDDLGGKWLNFCWICVSGPWLLIPQRRAFSGVGVFLERPRKNVIALS

SEQ ID NO: 3398 - protein, 292 aa, Artificial Sequence
  Synthetic polypeptide
MSVSGLKAELKFLASIFDKNHERFRIVSWKLDELHCQFLVPQQGSPHSLPPPLTLHCNITESYPSSSPIWFVDSEDPNLTSVLERLEDTKNNNLNGTTEEVTSEEEEEEEEMAEDIEDLDHYEMKEEEPISGKKSEDEGIEKENLAILEKIRKTQRQDHLNGAVSGSVQASDRLMKELRDIYRSQSYKTGIYSVELINDSLYDWHVKLQKVDPDSPLHSDLQILKEKEGIEYILLNFSFKVELQGGDDLGGKWLNFCWICVSGPWLLIPQRRAFSGVGVFLERPRKNVIALS

SEQ ID NO: 3399 - protein, 311 aa, Artificial Sequence
  Synthetic polypeptide
MRMDSLTEEKLECRLWCCLSDPSPPGLAARCCVLERSIVPSLRQESYPSSSPIWFVDSEDPNLTSVLERLEDTKNNNLLRQQLKWLICELCSLYNLPKHLDVEMLDQPLPTGQNGTTEEVTSEEEEEEEEMAEDIEDLDHYEMKEEEPISGKKSEDEGIEKENLAILEKIRKTQRQDHLNGAVSGSVQASDRLMKELRDIYRSQSYKTGIYSVELINDSLYDWHVKLQKVDPDSPLHSDLQILKEKEGIEYILLNFSFKVELQGGDDLGGKWLNFCWICVSGPWLLIPQRRAFSGVGVFLERPRKNVIALS

SEQ ID NO: 3400 - protein, 3 aa, Artificial Sequence
  Synthetic polypeptide
PGC

SEQ ID NO: 3401 - protein, 318 aa, Artificial Sequence
  Synthetic polypeptide
MEPVGCCGECRGSSVDPRSTFVLSNLAEVVERVLTFLPAKALLRVACVCRLWRECVRRVLRTHRSVTWISAGLAEAGHLEGHCLVRVVAEELENVRILPHTVLYMADSETFISLEECRGHKRARKRTSMETALALEKLFPKQCQVLGIVTPGIVVTPMGSGSNRPQEIEIGESGFALLFPQIEGIKIQPFHFIKDPKNLTLERHQLTEVGLLDNPELRVVLVFGYNCCKVGASNYLQQVVSTFSDMNIILAGGQVDNLSSLTSENEPSWTLKRRQHTIVEEKQQKDPGPCTTSLKKHHKWRGLSTSRLFYKREISIFH

SEQ ID NO: 3402 - protein, 214 aa, Artificial Sequence
  Synthetic polypeptide
MADSETFISLEECRGHKRARKRTSMETALALEKLFPKQCQVLGIVTPGIVVTPMGSGSNRPQEIEIGESGFALLFPQIEGIKIQPFHFIKDPKNLTLERHQLTEVGLLDNPELRVVLVFGYNCCKVGASNYLQQVVSTFSDMNIILAGGQVDNLSSLTSENEPSWTLKRRQHTIVEEKQQKDPGPCTTSLKKHHKWRGLSTSRLFYKREISIFH

SEQ ID NO: 3403 - protein, 257 aa, Artificial Sequence
  Synthetic polypeptide
CGECRGSSVDPRSTFVLSNLAEVVERVLTFLPAKALLRVACVCRLWRECVRRVLRTHRSVTWISAGLAEAGHLEGHCLVRVVAEELENVRILPHTVLYMADSETFISLEECRGHKRARKRTSMETALALEKLFPKQCQVLGIVTPGIVGLLDNPELRVVLVFGYNCCKVGASNYLQQVVSTFSDMNIILAGGQVDNLSSLTSENEPSWTLKRRQHTIVEEKQQKDPGPCTTSLKKHHKWRGLSTSRLFYKREISIFH

SEQ ID NO: 3404 - protein, 5 aa, Artificial Sequence
  Synthetic polypeptide
RVSWP

SEQ ID NO: 3405 - protein, 380 aa, Artificial Sequence [sequence omitted]

SEQ ID NO: 3406 - protein, 276 aa, Artificial Sequence
  Synthetic polypeptide
MADSETFISLEECRGHKRARKRTSMETALALEKLFPKQCQVLGIVTPGIVVTPMGSGSNRPQEIEIGESGFALLFPQIEGIKIQPFHFIKDPKNLTLERHQLTEVGLLDNPELRVVLVFGYNCCKVGASNYLQQVVSTFSDMNIILAGGQVDNLSSLTSEKNPLDIDASGVVGLSFSGHRIQSATVLLNEDVSDEKTAEAAMQRLKAANIPEHNTIGFMFACVGRGFQYYRAKGNVEADAFRKFFPSVPLFGFFGNGEIGCDRIVTGNFILRKCNE

SEQ ID NO: 3407 - protein, 77 aa, Artificial Sequence
  Synthetic polypeptide
AAMQRLKAANIPEHNTIGFMFACVGRGFQYYRAKGNVEADAFRKFFPSVPLFGFFGNGEIGCDRIVTGNFILRKCNE

SEQ ID NO: 3408 - protein, 436 aa, Artificial Sequence
  Synthetic polypeptide
MKTKYIFCNITERKDAEGWETVQRGRPIRSRSTAVMPKVSLATEATRSKDDSDKENVCLLPDESIQKGQFVGDGTSNTIESHPKDSLHSCDHPLAEKTQFTVSTLDDVKNSGSIRDNYVRTSEISAVHIDTECVSVMLQAGTPPLQVNEEKFPAEKARIENEMDPSDISNSMAEVLAKKEELADRLEKANEEAIASAIAEEEQLTREIEAEENNDINIETDNDSDFSASMGSGSVSFCGMSMDWNDVLADYEARESWRQNTSWGDIVEEEPARPPGHGIHMHEKLSSPSRKRTIAESKKKHEEKQMKAQQLREKLREEKTLKLQKLLEREKDVRKWKEELLDQRRRMMEEKLLHAEFKREVQLQAIVKKAQEEEAKHKKSDASNLDMPNRSCKVLPLNESVKVLNLLRKGKKSYAEVTEISGKNESSICDIVKKEK

SEQ ID NO: 3409 - protein, 682 aa, Artificial Sequence
  Synthetic polypeptide
MMASFQRSNSHDKVRRIVAEEGRTARNLIAWSVPLESKDDDGKPKCQTGGKSKRTIQGTHKTTKQSTAVDCKITSSTTGDKHFDKSPTKTRHPRKIDLRARYWAFLFDNLRRAVDEIYVTCESDQSVVECKEVLMMLDNYVRDFKALIDWIQLQEKLEKTDAQSRPTSLAWEVKKMSPGRHVIPSPSTDRINVTSNARRSLNFGGSTGTVPAPRLAPTGVSWADKVKAHHTGSTASSEITPAQSCPPMTVQKASRKNERKDAEGWETVQRGRPIRSRSTAVMPKVSLATEATRSKDDSDKENVCLLPDESIQKGQFVGDGTSNTIESHPKDSLHSCDHPLAEKTQFTVSTLDDVKNSGSIRDNYVRTSEISAVHIDTECVSVMLQAGTPPLQVNEEKFPAEKARIENEMDPSDISNSMAEVLAKKEELADRLEKANEEAIASAIAEEEQLTREIEAEENNDINIETDNDSDFSASMGSGSVSFCGMSMDWNDVLADYEARESWRQNTSWGDIVEEEPARPPGHGIHMHEKLSSPSRKRTIAESKKKHEEKQMKAQQLREKLREEKTLKLQKLLEREKDVRKWKEELLDQRRRMMEEKLLHAEFKREVQLQAIVKKAQEEEAKHKKSDASNLDMPNRSCKVLPLNESVKVLNLLRKGKKSYAEVTEISGKNESSICDIVKKEK

SEQ ID NO: 3410 - protein, 688 aa, Artificial Sequence
  Synthetic polypeptide
MMASFQRSNSHDKVRRIVAEEGRTARNLIAWSVPLESKDDDGKPKCQTGGKSKRTIQGTHKTTKQSTAVDCKITSSTTGDKHFDKSPTKTRHPRKIDLRARYWAFLFDNLRRAVDEIYVTCESDQSVVECKEVLMMLDNYVRDFKALIDWIQLQEKLEKTDAQSRPTSLAWEVKKMSPGRHVIPSPSTDRINVTSNARRSLNFGGSTGTVPAPRLAPTGVSWADKVKAHHTGSTASSEITPAQSCPPMTVQKASRKNERKDAEGWETVQRGRPIRSRSTAVMPKVSLATEATRSKDDSDKENVCLLPDESIQKGQFVGDGTSNTIESHPKDSLHSCDHPLAEKTQFTVSTLDDVKNSGSIRDNYVRTSEISAVHIDTECVSVMLQAGTPPLQVNEEKFPAEKARIENEMDPSDISNVSAANLSMAEVLAKKEELADRLEKANEEAIASAIAEEEQLTREIEAEENNDINIETDNDSDFSASMGSGSVSFCGMSMDWNDVLADYEARESWRQNTSWGDIVEEEPARPPGHGIHMHEKLSSPSRKRTIAESKKKHEEKQMKAQQLREKLREEKTLKLQKLLEREKDVRKWKEELLDQRRRMMEEKLLHAEFKREVQLQAIVKKAQEEEAKHKKSDASNLDMPNRSCKVLPLNESVKVLNLLRKGKKSYAEVTEISGKNESSICDIVKKEK

SEQ ID NO: 3411 - protein, 2 aa, Artificial Sequence
  Synthetic polypeptide
MM

SEQ ID NO: 3412 - protein, 173 aa, Artificial Sequence
  Synthetic polypeptide
MNDRCPRPGSSSLARGCLLSVADGAGREGGPGPALPGLGRCCWRLALHQASLWQESELCRGRRLRMMPQLQFKDAFWCRDFTAHTGYEVLLQRLLDGRKMCKDMEELLRQRAQAEERYGKELVQIARKAGGQTEINLWAFAPAVALLLPCPVPPIPQGLPEMSPPSESCHLHS

SEQ ID NO: 3413 - protein, 108 aa, Artificial Sequence
  Synthetic polypeptide
MMPQLQFKDAFWCRDFTAHTGYEVLLQRLLDGRKMCKDMEELLRQRAQAEERYGKELVQIARKAGGQTEINLWAFAPAVALLLPCPVPPIPQGLPEMSPPSESCHLHS

SEQ ID NO: 3414 - protein, 107 aa, Artificial Sequence
  Synthetic polypeptide
MPQLQFKDAFWCRDFTAHTGYEVLLQRLLDGRKMCKDMEELLRQRAQAEERYGKELVQIARKAGGQTEINLWAFAPAVALLLPCPVPPIPQGLPEMSPPSESCHLHS

SEQ ID NO: 3415 - protein, 74 aa, Artificial Sequence
  Synthetic polypeptide
MCKDMEELLRQRAQAEERYGKELVQIARKAGGQTEINLWAFAPAVALLLPCPVPPIPQGLPEMSPPSESCHLHS

SEQ ID NO: 3416 - protein, 99 aa, Artificial Sequence
  Synthetic polypeptide
MASCRDFTAHTGYEVLLQRLLDGRKMCKDMEELLRQRAQAEERYGKELVQIARKAGGQTEINLWAFAPAVALLLPCPVPPIPQGLPEMSPPSESCHLHS

SEQ ID NO: 3417 - protein, 62 aa, Artificial Sequence
  Synthetic polypeptide
AQAEERYGKELVQIARKAGGQTEINLWAFAPAVALLLPCPVPPIPQGLPEMSPPSESCHLHS

SEQ ID NO: 3418 - protein, 392 aa, Artificial Sequence
  Synthetic polypeptide
MMPQLQFKDAFWCRDFTAHTGYEVLLQRLLDGRKMCKDMEELLRQRAQAEERYGKELVQIARKAGGQTEINSLRASFDSLKQQMENVGSSHIQLALTLREELRSLEEFRERQKEQRKKYEAVMDRVQKSKLSLYKKAMESKKTYEQKCRDADDAEQAFERISANGHQKQVEKSQNKARQCKDSATEAERVYRQSIAQLEKVRAEWEQEHRTTCEAFQLQEFDRLTILRNALWVHSNQLSMQCVKDDELYEEVRLTLEGCSIDADIDSFIQAKSTGTEPPAPVPYQNYYDREVTPLTSSPGIQPSCGMIKRFSGLLHGSPKTTSLAASAASTETLTPTPERNEGVYTAIAVQEIQGNPASPAQEYRALYDYTAQNPDELDLSAGDILETKLWK

SEQ ID NO: 3419 - protein, 372 aa, Artificial Sequence
  Synthetic polypeptide
MPQLQFKDAFWCRDFTAHTGYEVLLQRLLDGRKMCKDMEELLRQRAQAEERYGKELVQIARKAGGQTEINSLRASFDSLKQQMENVGSSHIQLALTLREELRSLEEFRERQKEQRKKYEAVMDRVQKSKLSLYKKAMESKKTYEQKCRDADDAEQAFERISANGHQKQVEKSQNKARQCKDSATEAERVYRQSIAQLEKVRAEWEQEHRTTCEAFQLQEFDRLTILRNALWVHSNQLSMQCVKDDELYEEVRLTLEGCSIDADIDSFIQAKSTGTEPPGEVRLADSAASRFSGLLHGSPKTTSLAASAASTETLTPTPERNEGVYTAIAVQEIQGNPASPAQEYRALYDYTAQNPDELDLSAGDILETKLWK

SEQ ID NO: 3420 - protein, 389 aa, Artificial Sequence
  Synthetic polypeptide
MMPQLQFKDAFWCRDFTAHTGYEVLLQRLLDGRKMCKDMEELLRQRAQAEERYGKELVQIARKAGGQTEINSLRASFDSLKQQMENVGSSHIQLALTLREELRSLEEFRERQKEQRKKYEAVMDRVQKSKLSLYKKAMESKKTYEQKCRDADDAEQAFERISANGHQKQVEKSQNKARQCKDSATEAERVYRQSIAQLEKVRAEWEQEHRTTCEAFQLQEFDRLTILRNALWVHSNQLSMQCVKDDELYEEVRLTLEGCSIDADIDSFIQAKSTGTEPPAPVPYQNYYDREVTPLTSSPGIQPSCGMIKRFSGLLHGSPKTTSLAASAETLTPTPERNEGVYTAIAVQEIQGNPASPAQEYRALYDYTAQNPDELDLSAGDILETKLWK

SEQ ID NO: 3421 - protein, 373 aa, Artificial Sequence
  Synthetic polypeptide
MMPQLQFKDAFWCRDFTAHTGYEVLLQRLLDGRKMCKDMEELLRQRAQAEERYGKELVQIARKAGGQTEINSLRASFDSLKQQMENVGSSHIQLALTLREELRSLEEFRERQKEQRKKYEAVMDRVQKSKLSLYKKAMESKKTYEQKCRDADDAEQAFERISANGHQKQVEKSQNKARQCKDSATEAERVYRQSIAQLEKVRAEWEQEHRTTCEAFQLQEFDRLTILRNALWVHSNQLSMQCVKDDELYEEVRLTLEGCSIDADIDSFIQAKSTGTEPPGEVRLADSAASRFSGLLHGSPKTTSLAASAASTETLTPTPERNEGVYTAIAVQEIQGNPASPAQEYRALYDYTAQNPDELDLSAGDILETKLWK

SEQ ID NO: 3422 - skipped

SEQ ID NO: 3423 - protein, 1144 aa, Artificial Sequence
  Synthetic polypeptide
MSACNTFTEHVWKPGECKNCFKPKSLHQLPPDPEKAPITHGNVKTNANHSNNHRIRNTGNFRPPVAKKPTIAVKPTMIVADGQSICGELSIQEHCENKPVIIGWNRNRAALSQKPLNNNNEDDEGISHVPKPYGNNDSAKKMSDNNNGLTEVLKEIAGLDTAPQIRGNETNSRETFLGRINDCYKRSLERKLPPSCMIGGIKETQGKHVILSGSTEVISNEGGRFCYPEFSSGEESEEDVLFSNMEEEHESWDESDEELLAMEIRMRGQPRFANFRANTLSPVRFFVDKKWNTIPLRNKSLQRICAVDYDDSYDEILNGYEENSVVSYGQGSIQSMVSSDSTSPDSSLTEESRSETASSLSQKICNGGLSPGNPGDSKDMKEIEPNYESPSSNNQDKDSSQASKSSIKVPETHKAVLALRLEEKDGKIAVQTEKEESKASTDVAGQAVTINLVPTEEQAKPYRVVNLEQPLCKPYTVVDVSAAMASEHLEGPVNSPKTKSSSSTPNSPVTSSSLTPGQISAHFQKSSAIRYQEVWTSSTSPRQKIPKVELITSGTGPNVPPRKNCHKSAPTSPTATNISSKTIPVKSPNLSEIKFNSYNNAGMPPFPIIIHDEPTYARSSKNAIKVPIVINPNAYDNLAIYKSFLGTSGELSVKEKTTSVISHTYEEIETESKVPDNTTSKTTDCLQTKGFSNSTEHKRGSVAQKVQEFNNCLNRGQSSPQRSYSSSHSSPAKIQRATQEPVAKIEGTQESQMVGSSSTREKASTVLSQIVASIQPPQSPPETPQSGPKACSVEELYAIPPDADVAKSTPKSTPVRPKSLFTSQPSGEAEAPQTTDSPTTKVQKDPSIKPVTPSPSKLVTSPQSEPPAPFPPPRSTSSPYHAGNLLQRHFTNWTKPTSPTRSTEAESVLHSEGSRRAADAKPKRWISFKSFFRRRKTDEEDDKEKEREKGKLVGLDGTVIHMLPPPPVQRHHWFTEAKGESSEKPAIVFMYRCDPAQGQLSVDQSKARTDQAAVMEKGRAENALLQDSEKKRSHSSPSQIPKKILSHMTHEVTEDFSPRDPRTVVGKQDGRGCTSVTTALSLPELEREDGKEDISDPMDPNPCSATYSNLDGRIGTAPVYSSQHEQRRRRVISAFPSEVPGSSH

SEQ ID NO: 3424 - protein, 87 aa, Artificial Sequence
  Synthetic polypeptide
MENLMTSSTLPPLFADEDGSKESNDLATTGLNHPEVPYSSGATSSTNNPEFVEDLSQGQLLQSESSNAAEGNEQRHEDEAGCSGSRL

SEQ ID NO: 3425 - protein, 182 aa, Artificial Sequence
  Synthetic polypeptide
MSRRYDSRTTIFSPEAERRNIHKLLDEVFFSEKIYKLNEDMACSVAGITSDANVLTNELRLIAQRYLLQYQEPIPCEQLVTALCDIKQAYTQFGGKRPFGVSLLYIGWDKHYGFQLYQSDPSGNYGGWKATCIGNNSAAAVSMLKQDYKEGEMTLKSALALAIKVLNKTMDVSKLSAEKGQV

SEQ ID NO: 3426 - protein, 213 aa, Artificial Sequence
  Synthetic polypeptide
MSRRYDSRTTIFSPEGRLYQVEYAMEAIGHAGTCLGILANDGVLLAAERRNIHKLLDEVFFSEKIYKLNEDMACSVAGITSDANVLTNELRLIAQRYLLQYQEPIPCEQLVTALCDIKQAYTQFGGKRPFGVSLLYIGWDKHYGFQLYQSDPSGNYGGWKATCIGNNSAAAVSMLKQDYKEGEMTLKSALALAIKVLNKTMDVSKLSAEKGQV

SEQ ID NO: 3427 - protein, 142 aa, Artificial Sequence
  Synthetic polypeptide
MACSVAGITSDANVLTNELRLIAQRYLLQYQEPIPCEQLVTALCDIKQAYTQFGGKRPFGVSLLYIGWDKHYGFQLYQSDPSGNYGGWKATCIGNNSAAAVSMLKQDYKEGEMTLKSALALAIKVLNKTMDVSKLSAEKGQV

SEQ ID NO: 3428 - protein, 125 aa, Artificial Sequence
  Synthetic polypeptide
MCPSLYPRYLLQYQEPIPCEQLVTALCDIKQAYTQFGGKRPFGVSLLYIGWDKHYGFQLYQSDPSGNYGGWKATCIGNNSAAAVSMLKQDYKEGEMTLKSALALAIKVLNKTMDVSKLSAEKGQV

SEQ ID NO: 3429 - protein, 149 aa, Artificial Sequence
  Synthetic polypeptide
MGSTVPRSASVLLLLLLLRRAEQPCGAELTFELPDNAKQCFHEEVEQGVKFSLDYQVITGGHYDVDCYVEDPQGNTIYRETKKQYDSFTYRAEVKGVYQFCFSNEFSTFSHKTVYFDFQVGDEPPILPDMGNRVTALTQEFIPHISAVL

SEQ ID NO: 3430 - protein, 31 aa, Artificial Sequence
  Synthetic polypeptide
MSFIPVAEDSDFPIHNLPYGVFSTRGDPHCP

SEQ ID NO: 3431 - protein, 253 aa, Artificial Sequence
  Synthetic polypeptide
MATPAAVNPPEMASDIPGSVTLPVAPMAATGQVRMAGAMPARGGKRRSGMDFDDEDGEGPSKFSRENHSEIERRRRNKMTQYITELSDMVPTCSALARKPDKLTILRMAVSHMKSMRGTGNKSTDGAYKPSFLTEQELKHLILEAADGFLFVVAAETGRVIYVSDSVTPVLNQPQSEWFGSTLYEQVHPDDVEKLREQLCTSENSMTGRILDLKTGTVKKEGQQSSMRMCMGSRRSFICRMSTIHNSKDMEST

SEQ ID NO: 3432 - protein, 242 aa, Artificial Sequence
  Synthetic polypeptide
MASDIPGSVTLPVAPMAATGQVRMAGAMPARGGKRRSGMDFDDEDGEGPSKFSRENHSEIERRRRNKMTQYITELSDMVPTCSALARKPDKLTILRMAVSHMKSMRGTGNKSTDGAYKPSFLTEQELKHLILEAADGFLFVVAAETGRVIYVSDSVTPVLNQPQSEWFGSTLYEQVHPDDVEKLREQLCTSENSMTGRILDLKTGTVKKEGQQSSMRMCMGSRRSFICRMSTIHNSKDMEST

SEQ ID NO: 3433 - protein, 27 aa, Artificial Sequence
  Synthetic polypeptide
MRMCMGSRRSFICRMSTIHNSKDMEST

SEQ ID NO: 3434 - protein, 135 aa, Artificial Sequence
  Synthetic polypeptide
MGAAGRQDFLFKAMLTISWLTLTCFPGATSTVAAGCPDQSPELQPWNPGHDQDHHVHIGQGKTLLLTSSATVYSIHISEGGIISNLEMISSIWEDVHRLDANMQILCHLISDWSIHGVWYLGGAGTNSLQILRDD

SEQ ID NO: 3435 - protein, 212 aa, Artificial Sequence
  Synthetic polypeptide
MAQNVYGPGVRIGNWNEDVYLEEELMKDFLEKRDKGKLLIQRSRRLKQNLLRPMQLSVTEDGYIHYGDKVMLVNPDDPDTEADVFLRGDLSLCMTPDEIQSHLKDELEVPCGLSAVQAKTPIGRNTFIILSVHRDATGQVLRYGQDFCLGITGGFDNKMLYLSSDHRTLLKSSKRSWLQEVYLTDEVSHVNCWQAAFPDPQLRLEYEGFPVP

SEQ ID NO: 3436 - protein, 591 aa, Artificial Sequence
  Synthetic polypeptide
MVLNSLDKMIQLQKNTANIRNICVLAHVDHGKTTLADCLISSNGIISSRLAGKLRYMDSREDEQIRGITMKSSAISLHYATGNEEYLINLIDSPGHVDFSSEVSTAVRICDGCIIVVDAVEGVCPQTQAVLRQAWLENIRPVLVINKIDRLIVELKFTPQEAYSHLKNILEQINALTGTLFTSKVLEERAERETESQVNPNSEQGEQVYDWSTGLEDTDDSHLYFSPEQGNVVFTSAIDGWGFGIEHFARIYSQKIGIKKEVLMKTLWGDYYINMKAKKIMKGDQAKGKKPLFVQLILENIWSLYDAVLKKDKDKIDKIVTSLGLKIGAREARHSDPKVQINAICSQWLPISHAVLAMVCQKLPSPLDITAERVERLMCTGSQTFDSFPPETQALKAAFMKCGSEDTAPVIIFVSKMFAVDAKALPQNKPRPLTQEEIAQRRERARQRHAEKLAAAQGQAPLEPTQDGSAIETCPKGEEPRGDEQQVESMTPKPVLQEENNQESFIAFARVFSGVARRGKKIFVLGPKYSPLEFLRRVPLGFSAPPDGLPQVPHMAYCALENLYLLMGRELEYLEEVPPGNVLGRPYNVGC

SEQ ID NO: 3437 - protein, 540 aa, Artificial Sequence
  Synthetic polypeptide
MVLNSLDKMIQLQKNTANIRNICVLAHVDHGNEEYLINLIDSPGHVDFSSEVSTAVRICDGCIIVVDAVEGVCPQTQAVLRQAWLENIRPVLVINKIDRLIVELKFTPQEAYSHLKNILEQINALTGTLFTSKVLEERAERETESQVNPNSEQGEQVYDWSTGLEDTDDSHLYFSPEQGNVVFTSAIDGWGFGIEHFARIYSQKIGIKKEVLMKTLWGDYYINMKAKKIMKGDQAKGKKPLFVQLILENIWSLYDAVLKKDKDKIDKIVTSLGLKIGAREARHSDPKVQINAICSQWLPISHAVLAMVCQKLPSPLDITAERVERLMCTGSQTFDSFPPETQALKAAFMKCGSEDTAPVIIFVSKMFAVDAKALPQNKPRPLTQEEIAQRRERARQRHAEKLAAAQGQAPLEPTQDGSAIETCPKGEEPRGDEQQVESMTPKPVLQEENNQESFIAFARVFSGVARRGKKIFVLGPKYSPLEFLRRVPLGFSAPPDGLPQVPHMAYCALENLYLLMGRELEYLEEVPPGNVLGRPYNVGC

SEQ ID NO: 3438 - protein, 407 aa, Artificial Sequence
  Synthetic polypeptide
MVLNSLDKMIQLQKNTANIRNICVLAHVDHGKTTLADCLISSNGIISSRLAGKLRYMDSREDEQIRGITMKSSAISLHYATGNEEYLINLIDSPGHVDFSSEVSTAVRICDGCIIVVDAVEGVCPQTQAVLRQAWLENIRPVLVINKIDRLIVELKFTPQEAYSHLKNILEQINALTGTLFTSKVLEERAERETESQVNPNSEQGEQVYDWSTGLEDTDDSHLYFSPEQGNVVFTSAIDGWGFGIEHFARIYSQKIGIKKEVLMKTLWGDYYINMKAKKIMKGDQAKGKKPLFVQLILENIWSLYDAVLKKDKDKIDKIVTSLGLKIGAREARHSDPKVQINAICSQWLPISHAVLAMVCQKLPSPLDITAERVERLMCTGSQTFDSFPPETQALKAEFNYFPMFSL

SEQ ID NO: 3439 - protein, 356 aa, Artificial Sequence
  Synthetic polypeptide
MVLNSLDKMIQLQKNTANIRNICVLAHVDHGNEEYLINLIDSPGHVDFSSEVSTAVRICDGCIIVVDAVEGVCPQTQAVLRQAWLENIRPVLVINKIDRLIVELKFTPQEAYSHLKNILEQINALTGTLFTSKVLEERAERETESQVNPNSEQGEQVYDWSTGLEDTDDSHLYFSPEQGNVVFTSAIDGWGFGIEHFARIYSQKIGIKKEVLMKTLWGDYYINMKAKKIMKGDQAKGKKPLFVQLILENIWSLYDAVLKKDKDKIDKIVTSLGLKIGAREARHSDPKVQINAICSQWLPISHAVLAMVCQKLPSPLDITAERVERLMCTGSQTFDSFPPETQALKAEFNYFPMFSL

SEQ ID NO: 3440 - protein, 332 aa, Artificial Sequence
  Synthetic polypeptide
MWPQPRLPPHPAMSEKTQQGKLAAAKKKLKAYWQRKSPGIPAGANRKKKVNGSSPDTATSGGYHSPGDSATGIYGEGRASSTTLQDLESQYQELAVALDSSSAIISQLTENINSLVRTSKEEKKHEIHLVQKLGRSLFKLKNQTAEPLAPQPPAGPSKVEQLQDETNHLRKELESVGRQLQAEVENNQMLSLLNRRQEERLREQEERLREQEERLCEQEERLCEQEERLREQEERLCEQEKLPGQERLLEEVEKLLKQERRQEEQERLLERERLLDEVEKLLEQERRQEEQERLLERERLLEEVEKLLEQERRQEEQERLLERERLLDEVEE

SEQ ID NO: 3441 - protein, 306 aa, Artificial Sequence
  Synthetic polypeptide
MWPQPRLPPHPAMSEKTQQGKLAAAKKKLKAYWQRKSPGIPAGANRKKKVNGSSPDTATSGGYHSPGDSATGIYGEGRASSTTLQDLESQYQELAVALDSSSAIISQLTENINSLVRTSKEEKKHEIHLVQKLGRSLFKLKNQTAEPLAPQPPAGPSKVEQLQDETNHLRKELESVGRQLQAEVENNQMLSLLNRRQEERLREQEERLREQEERLCEQEERLCEQEERLREQEERLCEQEKLPGQERLLEEVEKLLKQERRQEEQERLLERERLLDEVEKLLEQERRQEEQERLLERERLLDEVEE

SEQ ID NO: 3442 - protein, 318 aa, Artificial Sequence
  Synthetic polypeptide
MWPQPRLPPHPAMSEKTQQGKLAAAKKKLKAYWQRKSPGIPAGANRKKKVNGSSPDTATSGGYHSPGDSATGIYGEGRASSTTLQDLESQYQELAVALDSSSAIISQLTENINSLVRTSKEEKKHEIHLVQKLGRSLFKLKNQTAEPLAPQPPAGPSKVEQLQDETNHLRKELESVGRQLQAEVENNQMLSLLNRRQEERLREQEERLREQEERLCEQEERLCEQEERLREQEERLCEQEKLPGQERLLEEVEKLLKQERRQEEQERLLERERLLDEVEELLEQERLRQQDERLWQQETLRELERLLERERLLDEVEE

SEQ ID NO: 3443 - protein, 312 aa, Artificial Sequence
  Synthetic polypeptide
MWPQPRLPPHPAMSEKTQQGKLAAAKKKLKAYWQRKSPGIPAGANRKKKVNGSSPDTATSGGYHSPGDSATGIYGEGRASSTTLQDLESQYQELAVALDSSSAIISQLTENINSLVRTSKEEKKHEIHLVQKLGRSLFKLKNQTAEPLAPQPPAGPSKVEQLQDETNHLRKELESVGRQLQAEVENNQMLSLLNRRQEERLREQEERLREQEERLCEQEERLCEQEERLREQEERLCEQEKLPGQERLLEEVEKLLKQERRQEEQERLLERERLLDEVEELLEQERLRQQDERLWQQETLRELERLLDEVEE

SEQ ID NO: 3444 - protein, 332 aa, Artificial Sequence; identical to SEQ ID NO: 3440
  Synthetic polypeptide

SEQ ID NO: 3445 - protein, 306 aa, Artificial Sequence; identical to SEQ ID NO: 3441
  Synthetic polypeptide

SEQ ID NO: 3446 - protein, 318 aa, Artificial Sequence; identical to SEQ ID NO: 3442
  Synthetic polypeptide

SEQ ID NO: 3447 - protein, 96 aa, Artificial Sequence
  Synthetic polypeptide
MFSGIATSTSSSMSGTGLEHSSLSDCLLLIPLEEEAGRIKDCWDNQEAPALSTCSNANIFRRINAILDNSLDFSRVCTTPINRGIHDHLPGKKLSP

SEQ ID NO: 3448 - protein, 69 aa, Artificial Sequence
  Synthetic polypeptide
MALSLEEEAGRIKDCWDNQEAPALSTCSNANIFRRINAILDNSLDFSRVCTTPINRGIHDHLPGKKLSP

SEQ ID NO: 3449 - protein, 69 aa, Artificial Sequence
  Synthetic polypeptide
MAFPLEEEAGRIKDCWDNQEAPALSTCSNANIFRRINAILDNSLDFSRVCTTPINRGIHDHLPGKKLSP

SEQ ID NO: 3450 - protein, 100 aa, Artificial Sequence
  Synthetic polypeptide
MFSGIATSTSSSMSGTGLEHSSLSDCLLLIPLEEEAGRIKDCWDNQEAPALSTCSNANIFRRINAILDNSLDFSRVCTTPINRGIHDHLPGLREEAVSVT

SEQ ID NO: 3451 - protein, 73 aa, Artificial Sequence
  Synthetic polypeptide
MALSLEEEAGRIKDCWDNQEAPALSTCSNANIFRRINAILDNSLDFSRVCTTPINRGIHDHLPGLREEAVSVT

SEQ ID NO: 3452 - protein, 73 aa, Artificial Sequence
  Synthetic polypeptide
MAFPLEEEAGRIKDCWDNQEAPALSTCSNANIFRRINAILDNSLDFSRVCTTPINRGIHDHLPGLREEAVSVT

SEQ ID NO: 3453 - protein, 385 aa, Artificial Sequence
  Synthetic polypeptide
MEDEQPDSLEGWVPVREGLFAEPERHRLRFLVAWNGAEGKFAVTCHDRTAQQRRLREGARLGPEPEPKPEAAVSPSSWAGLLSAAGLRGAHRQLAALWPPLERCFPRLPPELDVGGGGAWGLGLGLWALLWPTRAGPGEAALQELCGQLERYLGAAADGCGGATVRDALFPAEGGAADCESPREFRERALRARWVEADARLRQVIQGHGKANTMVALMNVYQEEDEAYQELVTVATMFFQYLLQPFRAMREVATLCKLDILKSLDEDDLGPRRVVALEKEAEEWTRRAEEAVVSIQDITVNYFKETVKALAVARVSDTLCRINKIESRMMILVLWSNYPYEPVCLARHRNNMEASVPKYKKQLPQLGEIMTYCLFKNGIPKILYQ

SEQ ID NO: 3454 - protein, 71 aa, Artificial Sequence
  Synthetic polypeptide
NAELCRYLSKVLELRKSDVVLDKPPALASQSAEIAASARPPPRLGSEECLCLAAHRLGCEEPLCLAAQSGK

SEQ ID NO: 3455 - protein, 170 aa, Artificial Sequence
  Synthetic polypeptide
MLRLRSGLRHLRATPNTRGSARLLCAEMPKKAGATTKGKSQSKEPERPLPPLGPVAVDPKGCVTIAIHAKPGSKQNAVTDLTAEAVNVAIAAPPSEGEANAELCRYLSKVLELRKSDVVLDKPPALASQSAEIAASARPPPRLGSEECLCLAAHRLGCEEPLCLAAQSGK

SEQ ID NO: 3456 - protein, 143 aa, Artificial Sequence
  Synthetic polypeptide
MPKKAGATTKGKSQSKEPERPLPPLGPVAVDPKGCVTIAIHAKPGSKQNAVTDLTAEAVNVAIAAPPSEGEANAELCRYLSKVLELRKSDVVLDKPPALASQSAEIAASARPPPRLGSEECLCLAAHRLGCEEPLCLAAQSGK

SEQ ID NO: 3457 - skipped

SEQ ID NO: 3458 - protein, 28 aa, Artificial Sequence
  Synthetic polypeptide
NAELCRYLSKVLELRKSDVVLDKPAQCL

SEQ ID NO: 3459 - protein, 127 aa, Artificial Sequence
  Synthetic polypeptide
MLRLRSGLRHLRATPNTRGSARLLCAEMPKKAGATTKGKSQSKEPERPLPPLGPVAVDPKGCVTIAIHAKPGSKQNAVTDLTAEAVNVAIAAPPSEGEANAELCRYLSKVLELRKSDVVLDKPAQCL

SEQ ID NO: 3460 - protein, 100 aa, Artificial Sequence
  Synthetic polypeptide
MPKKAGATTKGKSQSKEPERPLPPLGPVAVDPKGCVTIAIHAKPGSKQNAVTDLTAEAVNVAIAAPPSEGEANAELCRYLSKVLELRKSDVVLDKPAQCL

SEQ ID NO: 3461 - skipped

SEQ ID NO: 3462 - protein, 102 aa, Artificial Sequence
  Synthetic polypeptide
MLRLRSGLRHLRATPNTRGSARLLCAEMPKKAGATTKGKSQSKEPERPLPPLGPVAVDPKGCVTIAIHAKPGSKQNAVTAACLGLPKCRDCSLCPAATPSGK

SEQ ID NO: 3463 - protein, 101 aa, Artificial Sequence
  Synthetic polypeptide
MRLRSGLRHLRATPNTRGSARLLCAEMPKKAGATTKGKSQSKEPERPLPPLGPVAVDPKGCVTIAIHAKPGSKQNAVTAACLGLPKCRDCSLCPAATPSGK

SEQ ID NO: 3464 - protein, 75 aa, Artificial Sequence
  Synthetic polypeptide
MPKKAGATTKGKSQSKEPERPLPPLGPVAVDPKGCVTIAIHAKPGSKQNAVTAACLGLPKCRDCSLCPAATPSGK

SEQ ID NO: 3465 - skipped

SEQ ID NO: 3466 - protein, 116 aa, Artificial Sequence
  Synthetic polypeptide
MGPAVLGQGQEGQPEARACSGLLQPPKRPIVFKEKLTMKTDSLMEEKLECSLWCCLSDPSIPGRCCVLERRIVPWMQQESYSSSSPIWSVDSDEPNLTSVLERLEDTKENSSVLQF

SEQ ID NO: 3467 - protein, 32 aa, Artificial Sequence
  Synthetic polypeptide
MLSLDFLDDVRRMNKRQLGVMTHACSPSDSGG

SEQ ID NO: 3468 - protein, 28 aa, Artificial Sequence
  Synthetic polypeptide
DFLDDVRRMNKRQLGVMTHACSPSDSGG

SEQ ID NO: 3469 - protein, 29 aa, Artificial Sequence
  Synthetic polypeptide
MKLNPQQAPLYAKAGGLLEFRSLRPSWAT

SEQ ID NO: 3470 - protein, 28 aa, Artificial Sequence
  Synthetic polypeptide
MWPFPEGGNTIPILHTDPAQIFPPLGNF

SEQ ID NO: 3471 - protein, 1062 aa, Artificial Sequence
  Synthetic polypeptide
MGLEAQRLPGAEEAPVRVALRVRPLLPKELLHGHQSCLQVEPGLGRVTLGRDRHFGFHVVLAEDAGQEAVYQACVQPLLEAFFEGFNATVFAYGQTGSGKTYTMGEASVASLLEDEQGIVPRAMAEAFKLIDENDLLDCLVHVSYLEVYKEEFRDLLEVGTASRDIQLREDERGNVVLCGVKEVDVEGLDEVLSLLEMGNAARHTGATHLNHLSSRSHTVFTVTLEQRGRAPSRLPRPAPGQLLVSKFHFVDLAGSERVLKTGSTGERLKESIQINSSLLALGNVISALGDPQRRGSHIPYRDSKITRILKDSLGGNAKTVMIACVSPSSSDFDETLNTLNYASRAQNIRNRATVNWRPEAERPPEETASGARGPPRHRSETRIIHRGRRAPGPATASAAAAMRLGAECARYRACTDAAYSLLRELQAEPGLPGAAARKVRDWLCAVEGERSALSSASGPDSGIESASVEDQAAQGAGGRKEDEGAQQLLTLQNQVARLEEENRDFLAALEDAMEQYKLQSDRLREQQEEMVELRLRLELVRPGWGGPRLLNGLPPGSFVPRPHTAPLGGAHAHVLGMVPPACLPGDEVGSEQRGEQVTNGREAGAELLTEVNRLGSGSSAASEEEEEEEEPPRRTLHLRRNRISNCSQRAGARPGSLPERKGPELCLEELDAAIPGSRAVGGSKARVQARQVPPATASEWRLAQAQQKIRELAINIRMKEELIGELVRTGKAAQALNRQHSQRIRELEQEAEQVRAELSEGQRQLRELEGKELQDAGERSRLQEFRRRVAAAQSQVQVLKEKKQATERLVSLSAQSEKRLQELERNVQLMRQQQGQLQRRLREETEQKRRLEAEMSKRQHRVKELELKHEQQQKILKIKTEEIAAFQRKRRSGSNGSVVSLEQQQKIEEQKKWLDQEMEKVLQQRRALEELGEELHKREAILAKKEALMQEKTGLESKRLRSSQALNEDIVRVSSRLEHLEKELSEKSGQLRQGSAQSQQQIRGEIDSLRQEKDSLLKQRLEIDGKLRQGSLLSPEIHKYSPWLTTAYSIQYSHMLSRLVA

SEQ ID NO: 3472 - protein, 159 aa, Artificial Sequence
  Synthetic polypeptide
MIQAILVFNNHGKPRLVRFYQRFPEEIQQQIVRETFHLVLKRDDNICNFLEGGSLIGGSDYKLIYRHYATLYFVFCVDSSESELGILDLIQVFVETLDKCFENVCELDLIFHMDKPTEQLGNSSELSSWRRRICHQSEGSILLQEPKNRILHWERGWSR

SEQ ID NO: 3473 - protein, 360 aa, Artificial Sequence
  Synthetic polypeptide
MSRIYHDGALRNKAVQSVRLPGAWDPAAHQGGNGVLLEGELIDVSRHSILDTHGRKERYYVLYIRPSHIHRRKFDAKGNEIEPNFSATRKVNTGFLMSSYKVEAKGDTDRLTPEALKGLVNKPELLALTESLTPDHTVAFWMPESEMEVMELELGAGVRLKTRGDGPFLDSLAKLEAGTVTKCNFTGDGKTGASWTDNIMAQKCSKGAAAEIREQGDGAEDEEWPEEIQQQIVRETFHLVLKRDDNICNFLEGGSLIGGSDYKLIYRHYATLYFVFCVDSSESELGILDLIQVFVETLDKCFENVCELDLIFHMDKPTEQLGNSSELSSWRRRICHQSEGSILLQEPKNRILHWERGWSR

SEQ ID NO: 3474 - protein, 171 aa, Artificial Sequence
  Synthetic polypeptide
MIQAILVFNNHGKPRLVRFYQRFPEEIQQQIVRETFHLVLKRDDNICNFLEGGSLIGGSDYKLIYRHYATLYFVFCVDSSESELGILDLIQVHLEVVFFIAPKVFVETLDKCFENVCELDLIFHMDKPTEQLGNSSELSSWRRRICHQSEGSILLQEPKNRILHWERGWSR

SEQ ID NO: 3475 - protein, 196 aa, Artificial Sequence
  Synthetic polypeptide
MSSYKVEAKGDTDRLTPEALKGLVNKPELLALTESLTPDHTVAFWMPESEMEVMELELGAGVRLKTRGDGPFLDSLAKLEAGTVTKCNFTGDGKTGASWTDNIMAQKCSKGAAAEIREQGDGAEDEEWVFVETLDKCFENVCELDLIFHMDKPTEQLGNSSELSSWRRRICHQSEGSILLQEPKNRILHWERGWSR

SEQ ID NO: 3476 - protein, 195 aa, Artificial Sequence
  Synthetic polypeptide
MSSYNSLAKLEAGTVTKCNFTGDGKTGASWTDNIMAQKCSKGAAAEIREQGDGAEDEEWPEEIQQQIVRETFHLVLKRDDNICNFLEGGSLIGGSDYKLIYRHYATLYFVFCVDSSESELGILDLIQVFVETLDKCFENVCELDLIFHMDKPTEQLGNSSELSSWRRRICHQSEGSILLQEPKNRILHWERGWSR

SEQ ID NO: 3477 - protein, 279 aa, Artificial Sequence
  Synthetic polypeptide
MAAVPQNNLQEQLERHSARTLNNKLSLSKPKFSGFTFKKKTSSDNNVSVTNVSVAKTPVLRNKDVNVTEDFSFSEPLPNTTNQQRVKDFFKNAPAGQETQRGGSKSLLPDFLQTPKEVVCTTQNTPTVKKSRDTALKKLEFSSSPDSLSTINDWDDMDDFDTSETSKSFVTPPQSHFVRVSTAQKSKKGKRNFFKAQLYTTNTVKTDLPPPSSESEQIDLTEEQKDDSEWLSSDVICIDDGPIAEVHINEDAQESDSLKTHLEDERALHSLRFQLPAAG

SEQ ID NO: 3478 - protein, 130 aa, Artificial Sequence
  Synthetic polypeptide
MTASSVEQLRKEGNELFKCGDYGGALAAYTQALGLDATPQDQAVLHRNRAACHLKLEDYDKAETEASKAIEKDGGDVKALYRRSQALEKLGRLDQAVLDLQRCVSLEPKNKVFQEALRNIGGQIQEKPFL

SEQ ID NO: 3479 - protein, 145 aa, Artificial Sequence
  Synthetic polypeptide
MTVSGPGTPEPRPATPGASSVEQLRKEGNELFKCGDYGGALAAYTQALGLDATPQDQAVLHRNRAACHLKLEDYDKAETEASKAIEKDGGDVKALYRRSQALEKLGRLDQAVLDLQRCVSLEPKNKVFQEALRNIGGQIQEKPFL

SEQ ID NO: 3480 - protein, 502 aa, Artificial Sequence
  Synthetic polypeptide
MTASSVEQLRKEGNELFKCGDYGGALAAYTQALGLDATPQDQAVLHRNRAACHLKLEDYDKAETEASKAIEKDGGDVKALYRRSQALEKLGRLDQAVLDLQRCVSLEPKNKVFQEALRNIGGQIQEKVRYMSSTDAKVEQMFQILLDPEEKGTEKKQKASQNLVVLAREDAGAEKIFRSNGVQLLQRLLDMGETDLMLAALRTLVGICSEHQSRTVATLSILGTRRVVSILGVESQAVSLAACHLLQVMFDALKEGVKKGFRGKEGAIIVDPARELKVLISNLLDLLTEVGVSGQGRDNALTLLIKAVPRKSLKDPNNSLTLWVIDQGLKKILEVGGSLQDPPGELAVTANSRMSASILLSKLFDDLKCDAERENFHRLCENYIKSWFEGQGLAGKLRAIQTVSCLLQGPCDAGNRALELSGVMESVIALCASEQEEEQLVAVEALIHAAGKAKRASFITANGVSLLKDLYKCSEKDSIRIRALVVQLLGRLRQEDHLSSGG

SEQ ID NO: 3481 - protein, 517 aa, Artificial Sequence
  Synthetic polypeptide
MTVSGPGTPEPRPATPGASSVEQLRKEGNELFKCGDYGGALAAYTQALGLDATPQDQAVLHRNRAACHLKLEDYDKAETEASKAIEKDGGDVKALYRRSQALEKLGRLDQAVLDLQRCVSLEPKNKVFQEALRNIGGQIQEKVRYMSSTDAKVEQMFQILLDPEEKGTEKKQKASQNLVVLAREDAGAEKIFRSNGVQLLQRLLDMGETDLMLAALRTLVGICSEHQSRTVATLSILGTRRVVSILGVESQAVSLAACHLLQVMFDALKEGVKKGFRGKEGAIIVDPARELKVLISNLLDLLTEVGVSGQGRDNALTLLIKAVPRKSLKDPNNSLTLWVIDQGLKKILEVGGSLQDPPGELAVTANSRMSASILLSKLFDDLKCDAERENFHRLCENYIKSWFEGQGLAGKLRAIQTVSCLLQGPCDAGNRALELSGVMESVIALCASEQEEEQLVAVEALIHAAGKAKRASFITANGVSLLKDLYKCSEKDSIRIRALVVQLLGRLRQEDHLSSGG

SEQ ID NO: 3482 - protein, 666 aa, Artificial Sequence
  Synthetic polypeptide
MAFPHRPDAPELPDFSMLKRLARDQLIYLLEQLPGKKDLFIEADLMSPLDRIANVSILKQHEVDKLYKVENKPALSSNEQLCFLVRPRIKNMRYIASLVNADKLAGRTRKYKVIFSPQKFYACEMVLEEEGIYGDVSCDEWAFSLLPLDVDLLSMELPEFFRDYFLEGDQRWINTVAQALHLLSTLYGPFPNCYGIGRCAKMAYELWRNLEEEEDGETKGRRPEIGHIFLLDRDVDFVTALCSQVVYEGLVDDTFRIKCGSVDFGPEVTSSDKSLKVLLNAEDKVFNEIRNEHFSNVFGFLSQKARNLQAQYDRRRGMDIKQMKNFVSQELKGLKQEHRLLSLHIGACESIMKKKTKQDFQELIKTEHALLEGFNIRESTSYIEEHIDRQVSPIESLRLMCLLSITENGLIPKDYRSLKTQYLQSYGPEHLLTFSNLRRAGLLTEQAPGDTLTAVESKVSKLVTDKAAGKITDAFSSLAKRSNFRAISKKLNLIPRVDGEYDLKVPRDMAYVFGGAYVPLSCRIIEQVLERRSWQGLDEVVRLLNCSDFAFTDMTKEDKASSESLRLILVVFLGGCTFSEISALRFLGREKGQVLWLMPVITALLEAEARGTLEPRSLRPAWITWEDPVSTKNKKISRGWWHTPVFLATGEAEVGGSFEPRRSRLQ

SEQ ID NO: 3483 - protein, 575 aa, Artificial Sequence
  Synthetic polypeptide
MRYIASLVNADKLAGRTRKYKVIFSPQKFYACEMVLEEEGIYGDVSCDEWAFSLLPLDVDLLSMELPEFFRDYFLEGDQRWINTVAQALHLLSTLYGPFPNCYGIGRCAKMAYELWRNLEEEEDGETKGRRPEIGHIFLLDRDVDFVTALCSQVVYEGLVDDTFRIKCGSVDFGPEVTSSDKSLKVLLNAEDKVFNEIRNEHFSNVFGFLSQKARNLQAQYDRRRGMDIKQMKNFVSQELKGLKQEHRLLSLHIGACESIMKKKTKQDFQELIKTEHALLEGFNIRESTSYIEEHIDRQVSPIESLRLMCLLSITENGLIPKDYRSLKTQYLQSYGPEHLLTFSNLRRAGLLTEQAPGDTLTAVESKVSKLVTDKAAGKITDAFSSLAKRSNFRAISKKLNLIPRVDGEYDLKVPRDMAYVFGGAYVPLSCRIIEQVLERRSWQGLDEVVRLLNCSDFAFTDMTKEDKASSESLRLILVVFLGGCTFSEISALRFLGREKGQVLWLMPVITALLEAEARGTLEPRSLRPAWITWEDPVSTKNKKISRGWWHTPVFLATGEAEVGGSFEPRRSRLQ

SEQ ID NO: 3484 - protein, 639 aa, Artificial Sequence
  Synthetic polypeptide
MAFPHRPDAPELPDFSMLKRLARDQLIYLLEQQHEVDKLYKVENKPALSSNEQLCFLVRPRIKNMRYIASLVNADKLAGRTRKYKVIFSPQKFYACEMVLEEEGIYGDVSCDEWAFSLLPLDVDLLSMELPEFFRDYFLEGDQRWINTVAQALHLLSTLYGPFPNCYGIGRCAKMAYELWRNLEEEEDGETKGRRPEIGHIFLLDRDVDFVTALCSQVVYEGLVDDTFRIKCGSVDFGPEVTSSDKSLKVLLNAEDKVFNEIRNEHFSNVFGFLSQKARNLQAQYDRRRGMDIKQMKNFVSQELKGLKQEHRLLSLHIGACESIMKKKTKQDFQELIKTEHALLEGFNIRESTSYIEEHIDRQVSPIESLRLMCLLSITENGLIPKDYRSLKTQYLQSYGPEHLLTFSNLRRAGLLTEQAPGDTLTAVESKVSKLVTDKAAGKITDAFSSLAKRSNFRAISKKLNLIPRVDGEYDLKVPRDMAYVFGGAYVPLSCRIIEQVLERRSWQGLDEVVRLLNCSDFAFTDMTKEDKASSESLRLILVVFLGGCTFSEISALRFLGREKGQVLWLMPVITALLEAEARGTLEPRSLRPAWITWEDPVSTKNKKISRGWWHTPVFLATGEAEVGGSFEPRRSRLQ

SEQ ID NO: 3485 - protein, 143 aa, Artificial Sequence
  Synthetic polypeptide
MAFPHRPDAPELPDFSMLKRLARDQLIYLLEQLPGKKDLFIEADLMSPLDRIANVSILKQHEVDKLYKVENKPALSSNEQLCFLVRPRIKNMRYIASLVNADKLAGRTRKYKVIFSPQKFYACEMVLEEEGIYGASSCAASFS

SEQ ID NO: 3486 - protein, 52 aa, Artificial Sequence
  Synthetic polypeptide
MRYIASLVNADKLAGRTRKYKVIFSPQKFYACEMVLEEEGIYGASSCAASFS

SEQ ID NO: 3487 - protein, 116 aa, Artificial Sequence
  Synthetic polypeptide
MAFPHRPDAPELPDFSMLKRLARDQLIYLLEQQHEVDKLYKVENKPALSSNEQLCFLVRPRIKNMRYIASLVNADKLAGRTRKYKVIFSPQKFYACEMVLEEEGIYGASSCAASFS

SEQ ID NO: 3488 - protein, 171 aa, Artificial Sequence
  Synthetic polypeptide
MRAVPLPAPLLPLLLLALLAAPAARASRAESVSAPWPEPERESRPPPGPGPGNTTRFGSGAAGGSGSSSSNSSGDALVTRISILLRDLPTLKAAVIVAFAFTTLLIACLLLRVFRSGKRLKKTRKYDIITTPAERVEMAPLNEEDDEDEDSTVFDIKYRRSWNQFSEDTKG

SEQ ID NO: 3489 - protein, 30 aa, Artificial Sequence
  Synthetic polypeptide
MKRMMKMRTPQYSTSNTGGLGTNSLRIPRD

SEQ ID NO: 3490 - protein, 27 aa, Artificial Sequence
  Synthetic polypeptide
MMKMRTPQYSTSNTGGLGTNSLRIPRD

SEQ ID NO: 3491 - protein, 61 aa, Artificial Sequence
  Synthetic polypeptide
MQAVWDLEQGKYGFGGGGSSSSSGSGGGSSGSSDFSGGGGARRSGSGPDPAASAAAPAAAA

SEQ ID NO: 3492 - protein, 259 aa, Artificial Sequence
  Synthetic polypeptide
MQESQETHISNHLDEVVAAVSITHRKKFQNKLLQTALFQPPREKLHLCEEKAKSYSNSHEYKQAVHELVRCVALTRICYGDSHWKLAEAHVNLAQGYLQLKGLSLQAKQHAEKARQILANSIVPPYSENTDVFKFSIELFHTMGRALLSLQKFKEAAENLTKAERLSKELLQCGRIIKEEWIEIEARIRLSFAQVYQGQKKSKEALSHYQAALEYVEISKGETSRECVPILRELAGVEQALGLHDVSINHFLQCPFPQT

SEQ ID NO: 3493 - protein, 93 aa, Artificial Sequence
  Synthetic polypeptide
MLLFCPGCGNGLIVEEGQRCHRFSCNTCPYVHNITRKVTNRKYPKLKEVDDVLGGAAAWENVDSTAEVPFAMIVGFLRHPQPRRTVSKLDLFS

SEQ ID NO: 3494 - protein, 25 aa, Artificial Sequence
  Synthetic polypeptide
MRCLAPRPAGSYLSEPQAGHGGAHL

SEQ ID NO: 3495 - protein, 146 aa, Artificial Sequence
  Synthetic polypeptide
MRCLAPRPAGSYLSEPQGSSQCATMELGPLEGGYLELLNSDADPLCLYHFYDQMDLAGEEEIELYSEPDTDTINCDQFSRLLCDMEGDEETREAYANIAELDQYVFQDSQLEGLSKDIFKHIGPDEVIGESMEMPAEVGQKSQKRL

SEQ ID NO: 3496 - protein, 122 aa, Artificial Sequence
  Synthetic polypeptide
MELGPLEGGYLELLNSDADPLCLYHFYDQMDLAGEEEIELYSEPDTDTINCDQFSRLLCDMEGDEETREAYANIAELDQYVFQDSQLEGLSKDIFKHIGPDEVIGESMEMPAEVGQKSQKRL

SEQ ID NO: 3497 - protein, 1060 aa, Artificial Sequence
  Synthetic polypeptide
MRCLAPRPAGSYLSEPQGSSQCATMELGPLEGGYLELLNSDADPLCLYHFYDQMDLAGEEEIELYSEPDTDTINCDQFSRLLCDMEGDEETREAYANIAELDQYVFQDSQLEGLSKDIFKHIGPDEVIGESMEMPAEVGQKSQKRPFPEELPADLKHWKPAEPPTVVTGSLLVRPVSDCSTLPCLPLPALFNQEPASGQMRLEKTDQIPMPFSSSSLSCLNLPEGPIQFVPTISTLPHGLWQISEAGTGVSSIFIYHGEVPQASQVPPPSGFTVHGLPTSPDRPGSTSPFAPSATDLPSMPEPALTSRANMTEHKTSPTQCPAAGEVSNKLPKWPEPVEQFYRSLQDTYGAEPAGPDGILVEVDLVQARLERSSSKSLERELATPDWAERQLAQGGLAEVLLAAKEHRRPRETRVIAVLGKAGQGKSYWAGAVSRAWACGRLPQYDFVFSVPCHCLNRPGDAYGLQDLLFSLGPQPLVAADEVFSHILKRPDRVLLILDGFEELEAQDGFLHSTCGPAPAEPCSLRGLLAGLFQKKLLRGCTLLLTARPRGRLVQSLSKADALFELSGFSMEQAQAYVMRYFESSGMTEHQDRALTLLRDRPLLLSHSHSPTLCRAVCQLSEALLELGEDAKLPSTLTGLYVGLLGRAALDSPPGALAELAKLAWELGRRHQSTLQEDQFPSADVRTWAMAKGLVQHPPRAAESELAFPSFLLQCFLGALWLALSGEIKDKELPQYLALTPRKKRPYDNWLEGVPRFLAGLIFQPPARCLGALLGPSAAASVDRKQKVLARYLKRLQPGTLRARQLLELLHCAHEAEEAGIWQHVVQELPGRLSFLGTRLTPPDAHVLGKALEAAGQDFSLDLRSTGICPSGLGSLVGLSCVTRFRAALSDTVALWESLQQHGETKLLQAAEEKFTIEPFKAKSLKDVEDLGKLVQTQRTRSSSEDTAGELPAVRDLKKLEFALGPVSGPQAFPKLVRILTAFSSLQHLDLDALSENKIGDEGVSQLSATFPQLKSLETLNLSQNNITDLGAYKLAEALPSLAASLLRLSRCFLTWKMGT

SEQ ID NO: 3498 - protein, 476 aa, Artificial Sequence
  Synthetic polypeptide
MRCLAPRPAGSYLSEPQGSSQCATMELGPLEGGYLELLNSDADPLCLYHFYDQMDLAGEEEIELYSEPDTDTINCDQFSRLLCDMEGDEETREAYANIAELDQYVFQDSQLEGLSKDIFKHIGPDEVIGESMEMPAEVGQKSQKRPFPEELPADLKHWKPVPFSSSSLSCLNLPEGPIQFVPTISTLPHGLWQISEAGTGVSSIFIYHGEVPQASQVPPPSGFTVHGLPTSPDRPGSTSPFAPSATDLPSMPEPALTSRANMTEHKTSPTQCPAAGEVSNKLPKWPGLAWSPCLGLRPSLHRAALSDTVALWESLQQHGETKLLQAAEEKFTIEPFKAKSLKDVEDLGKLVQTQRTRSSSEDTAGELPAVRDLKKLEFALGPVSGPQAFPKLVRILTAFSSLQHLDLDALSENKIGDEGVSQLSATFPQLKSLETLNLSQNNITDLGAYKLAEALPSLAASLLRLSRCFLTWKMGT

SEQ ID NO: 3499 - protein, 105 aa, Artificial Sequence
  Synthetic polypeptide
MSNVSEERRKRQQNIKEGLQFIQSPLSYPGTQEQYAAWWLTPVIPAFSEAEAGGSLETRSLRPAWATWRNPVSTKNTKISRVWWQVPVIPATREAKTRESLELRR

SEQ ID NO: 3500 - protein, 476 aa, Artificial Sequence
  Synthetic polypeptide
MDPGSGGGGGGGGGGGSSSGSSSSDSAPDCWDQADMEAPGPGPCGGGGSLAAAAEAQRENLSAAFSRQLNVNAKPFVPNVHAAEFVPSFLRGPAAPPPPVGGAANNHGAGSGAGGRAAPVESSQEEQSLCEGSNSAVSMELSEPIVENGETEMSPEESWEHKEEISEAEPGGGSLGDGRPPEESAHEMMEEEEEIPKPKSVVAPPGAPKKEHVNVVFIGHVDAGKSTIGGQIMYLTGMVDKRTLEKYEREAKEKNRETWYLSWALDTNQEERDKGKTVEVGRAYFETEKKHFTILDAPGHKSFVPNMIGGASQADLAVLVISARKGEFETGFEKGGQTREHAMLAKTAGVKHLIVLINKMDDPTVNWSNERYEECKEKLVPFLKKVGFNPKKDIHFMPCSGLTGANLKEQSDFCPWYIGLPFIPYLDNLPNFNRSVDGPIRLPIVDKYKDMGTVVLGKLESGSICKGQQLVMMPNK

SEQ ID NO: 3501 - protein, 475 aa, Artificial Sequence
  Synthetic polypeptide
MDPGSGGGGGGGGGGGSSSGSSSSDSAPDCWDQADMEAPGPGPCGGGGSLAAAAEAQRENLSAAFSRQLNVNAKPFVPNVHAAEFVPSFLRGPAAPPPPVGGAANNHGAGSGAGGRAAPVESSQEEQSLCEGSNSAVSMELSEPIENGETEMSPEESWEHKEEISEAEPGGGSLGDGRPPEESAHEMMEEEEEIPKPKSVVAPPGAPKKEHVNVVFIGHVDAGKSTIGGQIMYLTGMVDKRTLEKYEREAKEKNRETWYLSWALDTNQEERDKGKTVEVGRAYFETEKKHFTILDAPGHKSFVPNMIGGASQADLAVLVISARKGEFETGFEKGGQTREHAMLAKTAGVKHLIVLINKMDDPTVNWSNERYEECKEKLVPFLKKVGFNPKKDIHFMPCSGLTGANLKEQSDFCPWYIGLPFIPYLDNLPNFNRSVDGPIRLPIVDKYKDMGTVVLGKLESGSICKGQQLVMMPNK

SEQ ID NO: 3502 - protein, 32 aa, Artificial Sequence
  Synthetic polypeptide
VQIQLLAWNFQNLLKMERQKCLQKNHGSTKKK

SEQ ID NO: 3503 - protein, 338 aa, Artificial Sequence
  Synthetic polypeptide
MELSEPIVENGETEMSPEESWEHKEEISEAEPGGGSLGDGRPPEESAHEMMEEEEEIPKPKSVVAPPGAPKKEHVNVVFIGHVDAGKSTIGGQIMYLTGMVDKRTLEKYEREAKEKNRETWYLSWALDTNQEERDKGKTVEVGRAYFETEKKHFTILDAPGHKSFVPNMIGGASQADLAVLVISARKGEFETGFEKGGQTREHAMLAKTAGVKHLIVLINKMDDPTVNWSNERYEECKEKLVPFLKKVGFNPKKDIHFMPCSGLTGANLKEQSDFCPWYIGLPFIPYLDNLPNFNRSVDGPIRLPIVDKYKDMGTVVLGKLESGSICKGQQLVMMPNK

SEQ ID NO: 3504 - protein, 3 aa, Artificial Sequence
  Synthetic polypeptide
MSG

SEQ ID NO: 3505 - protein, 44 aa, Artificial Sequence
  Synthetic polypeptide
MSGSQNNDKRQFLLERLLDAVKQCQIRFGGRKEIASDSDSRTPR

SEQ ID NO: 3506 - protein, 789 aa, Artificial Sequence
  Synthetic polypeptide
MSGSQNNDKRQFLLERLLDAVKQCQIRFGGRKEIASDSDSRVTCLCAQFEAVLQHGLKRSRGLALTAAAIKQAAGFASKTETEPVFWYYVKEVLNKHELQRFYSLRHIASDVGRGRAWLRCALNEHSLERYLHMLLADRCRLSTFYEDWSFVMDEERSSMLPTMAAGLNSILFAINIDNKDLNGQSKFAPTVSDLLKESTQNVTSLLKESTQGVSSLFREITASSAVSILIKPEQETDPLPVVSRNVSADAKCKKERKKKKKVTNIISFDDEEDEQNSGDVFKKTPGAGESSEDNSDRSSVNIMSAFESPFGPNSNGSQSSNSWKIDSLSLNGEFGYQKLDVKSIDDEDVDENEDDVYGNSSGRKHRGHSESPEKPLEGNTCLSQMHSWAPLKVLHNDSDILFPVSGVGSYSPADAPLGSLENGTGPEDHVLPDPGLRYSVEASSPGHGSPLSSLLPSASVPESMTISELRQATVAMMNRKDELEEENRSLRNLLDGEMEHSAALRQEVDTLKRKVAEQEERQGMKVQALARENEVLKVQLKKYVGAVQMLKREGQTAEVPNLWSVDGEVTVAEQKPGEIAEELASSYERKLIEVAEMHGELIEFNERLHRALVAKEALVSQMRQELIDLRGPVPGDLSQTSEDQSLSDFEISNRALINVWIPSVFLRGKAANAFHVYQVYIRIKDDEWNIYRRYTEFRSLHHKLQNKYPQVRAYNFPPKKAIGNKDAKFVEERRKQLQNYLRSVMNKVIQMVPEFAASPKKETLIQLMPFFVRSKNHLSRDCIRNPFM

SEQ ID NO: 3507 - protein, 404 aa, Artificial Sequence
  Synthetic polypeptide
MHSWAPLKVLHNDSDILFPVSGVGSYSPADAPLGSLENGTGPEDHVLPDPGLRYSVEASSPGHGSPLSSLLPSASVPESMTISELRQATVAMMNRKDELEEENRSLRNLLDGEMEHSAALRQEVDTLKRKVAEQEERQGMKVQALARENEVLKVQLKKYVGAVQMLKREGQTAEVPNLWSVDGEVTVAEQKPGEIAEELASSYERKLIEVAEMHGELIEFNERLHRALVAKEALVSQMRQELIDLRGPVPGDLSQTSEDQSLSDFEISNRALINVWIPSVFLRGKAANAFHVYQVYIRIKDDEWNIYRRYTEFRSLHHKLQNKYPQVRAYNFPPKKAIGNKDAKFVEERRKQLQNYLRSVMNKVIQMVPEFAASPKKETLIQLMPFFVRSKNHLSRDCIRNPFM

SEQ ID NO: 3508 - protein, 278 aa, Artificial Sequence
  Synthetic polypeptide
MKRKVAEQEERQGMKVQALARENEVLKVQLKKYVGAVQMLKREGQTAEVPNLWSVDGEVTVAEQKPGEIAEELASSYERKLIEVAEMHGELIEFNERLHRALVAKEALVSQMRQELIDLRGPVPGDLSQTSEDQSLSDFEISNRALINVWIPSVFLRGKAANAFHVYQVYIRIKDDEWNIYRRYTEFRSLHHKLQNKYPQVRAYNFPPKKAIGNKDAKFVEERRKQLQNYLRSVMNKVIQMVPEFAASPKKETLIQLMPFFVRSKNHLSRDCIRNPFM

SEQ ID NO: 3509 - protein, 337 aa, Artificial Sequence
  Synthetic polypeptide
MRRVLRLLLGCFLTELCARVCRAQERAGHGQLAQLGGVLLLAGGNRSGAASGEASEGAEASDAPPTRAPTPDFCRGYFDVMGQWDPPFNCSSGDFIFCCGTCGFRFCCTFKKRRLNQSTCTNYDTPLWLNTGKPPARKDDPLHDPTKDKTNLIVYIICGVVAVMVLVGIFTKLGLEKAHRPQREHMSRALADVMRPQGHCNTDHMERDLNIVVHVQHYENMDTRTPINNLHATQMNNAVPTSPLLQQMGHPHSYPNLGQISNPYEQQPPGKELNKYASLKAVGVHLCVNFLPPLPPLRQQDQALTFLSLLKVKMTRMKTSMMIHFHLINSKYVFSSL

SEQ ID NO: 3510 - protein, 378 aa, Artificial Sequence
  Synthetic polypeptide
MCGPRRLAAPGSSLGSFGRASRGGRRGSSGGRAAEPGLGDTMRRVLRLLLGCFLTELCARVCRAQERAGHGQLAQLGGVLLLAGGNRSGAASGEASEGAEASDAPPTRAPTPDFCRGYFDVMGQWDPPFNCSSGDFIFCCGTCGFRFCCTFKKRRLNQSTCTNYDTPLWLNTGKPPARKDDPLHDPTKDKTNLIVYIICGVVAVMVLVGIFTKLGLEKAHRPQREHMSRALADVMRPQGHCNTDHMERDLNIVVHVQHYENMDTRTPINNLHATQMNNAVPTSPLLQQMGHPHSYPNLGQISNPYEQQPPGKELNKYASLKAVGVHLCVNFLPPLPPLRQQDQALTFLSLLKVKMTRMKTSMMIHFHLINSKYVFSSL

SEQ ID NO: 3511 - protein, 291 aa, Artificial Sequence
  Synthetic polypeptide
MRRVLRLLLGCFLTELCARVCRAQERAGHGQLAQLGGVLLLAGGNRSGAASGEASEGAEASDAPPTRAPTPDFCRGYFDVMGQWDPPFNCSSGDFIFCCGTCGFRFCCTFKKRRLNQSTCTNYDTPLWLNTGKPPARKDDPLHDPTKDKTNLIVYIICGVVAVMVLVGIFTKLGLEKAHRPQREHMSRALADVMRPQGHCNTDHMERDLNIVVHVQHYENMDTRTPINNLHATQMNNAVPTSPLLQQMGHPHSYPNLGQISNPYEQQPPGKELNKYASLKAVGSSLLQPKK

SEQ ID NO: 3512 - protein, 332 aa, Artificial Sequence
  Synthetic polypeptide
MCGPRRLAAPGSSLGSFGRASRGGRRGSSGGRAAEPGLGDTMRRVLRLLLGCFLTELCARVCRAQERAGHGQLAQLGGVLLLAGGNRSGAASGEASEGAEASDAPPTRAPTPDFCRGYFDVMGQWDPPFNCSSGDFIFCCGTCGFRFCCTFKKRRLNQSTCTNYDTPLWLNTGKPPARKDDPLHDPTKDKTNLIVYIICGVVAVMVLVGIFTKLGLEKAHRPQREHMSRALADVMRPQGHCNTDHMERDLNIVVHVQHYENMDTRTPINNLHATQMNNAVPTSPLLQQMGHPHSYPNLGQISNPYEQQPPGKELNKYASLKAVGSSLLQPKK

SEQ ID NO: 3513 - protein, 92 aa, Artificial Sequence
  Synthetic polypeptide
MSGIALSRLAQERKAWRKDHPFGFVAVPTKNPDGTMNLMNWECAIPGKKGTPWEGGLFKLRMLFKDDYPSSPPKSNAARQEKEVTTEEVGRK

SEQ ID NO: 3514 - protein, 53 aa, Artificial Sequence
  Synthetic polypeptide
PQQTRPGEESMEERPPIWFRGCPNKKSRWHDEPHELGVRHSRKERDSVGRRLV

SEQ ID NO: 3515 - protein, 338 aa, Artificial Sequence
  Synthetic polypeptide
MADGNEGPQSPFHHILPKCKLARDLKEAYDSLCTSGVVRLHINSWLEVSFCLPHKIHYAASSLIPPEAIERSLKAIRPYHALLLLSDEKSLLGELPIDCSPALVRVIKTTSAVKNLQQLAQDADLALLQVFQLAAHLVYWGKAIIIYPLCENNVYMLSPNASVCLYSPLAEQFSHQFPSHDLPSVLAKFSLPVSLSEFRNPLAPAVQETQLIQMVVWMLQRRLLIQLHTYVCLMASPSEEEPRPREDDVPFTARVGGRSLSTPNALSFGSPTSSDDMTLTSPSMDNSSAELLPSGDSPLNQRMTENLGQLSEHERAAILSVPAAQNPEDLRMFARKKK

SEQ ID NO: 3516 - protein, 517 aa, Artificial Sequence
  Synthetic polypeptide
MRDNTSPISVILVSSGSRGNKLLFRYPFQRSQEHPASQTSKPRSRYAASNTGDHADEQDGDSRFSDVILATILATKSEMCGQKFELKIDNVRFVGHPTLLQHALGQISKTDPSPKREAPTMILFNVVFALRANADPSVINCLHNLSRRIATVLQHEERRCQYLTREAKLILALQDEVSAMADGNEGPQSPFHHILPKCKLARDLKEAYDSLCTSGVVRLHINSWLEVSFCLPHKIHYAASSLIPPEAIERSLKAIRPYHALLLLSDEKSLLGELPIDCSPALVRVIKTTSAVKNLQQLAQDADLALLQVFQLAAHLVYWGKAIIIYPLCENNVYMLSPNASVCLYSPLAEQFSHQFPSHDLPSVLAKFSLPVSLSEFRNPLAPAVQETQLIQMVVWMLQRRLLIQLHTYVCLMASPSEEEPRPREDDVPFTARVGGRSLSTPNALSFGSPTSSDDMTLTSPSMDNSSAELLPSGDSPLNQRMTENLLASSEHERAAILSVPAAQNPEDLRMFARKKK

SEQ ID NO: 3517 - protein, 129 aa, Artificial Sequence
  Synthetic polypeptide
MADGNEGPQSPFHHILPKCKLARDLKEAYDSLCTSGVVRLHINSWLEVSFCLPHKIHYAASSLIPPEAIERSLKAIRPYHALLLLSDEKSLLGELPIDCSPALVRVIKTTSAVKNLQQLAQDADLALLQ

SEQ ID NO: 3518 - protein, 308 aa, Artificial Sequence
  Synthetic polypeptide
MRDNTSPISVILVSSGSRGNKLLFRYPFQRSQEHPASQTSKPRSRYAASNTGDHADEQDGDSRFSDVILATILATKSEMCGQKFELKIDNVRFVGHPTLLQHALGQISKTDPSPKREAPTMILFNVVFALRANADPSVINCLHNLSRRIATVLQHEERRCQYLTREAKLILALQDEVSAMADGNEGPQSPFHHILPKCKLARDLKEAYDSLCTSGVVRLHINSWLEVSFCLPHKIHYAASSLIPPEAIERSLKAIRPYHALLLLSDEKSLLGELPIDCSPALVRVIKTTSAVKNLQQLAQDADLALLQ

SEQ ID NO: 3519 - protein, 255 aa, Artificial Sequence
  Synthetic polypeptide
MVKLSIVLTPRFLSHDQGQLTKELQQHVKSVTCPCEYLRKVINTLADHRHRGTDFGGSPWLLIITVFLRSYKFAISLCTSYLCVSFLKTIFPSQNGHDGSTDVQQRARRSNRRRQEGIKIVLEDIFTLWRQVETKVRAKICKMKVTTKVNRHDKINGKRKTAKEHLRKLSMKEREHGEKERQVSEAEENGKLDMKEIHTYMEMFQRAQALRRRAEDYYRCKITPSARKPLCNRIWSRVVTLTLQSSENQRQNIKG

SEQ ID NO: 3520 - protein, 236 aa, Artificial Sequence
  Synthetic polypeptide
MFCCLGYEWLSGGCKTWHSAWVINTLADHRHRGTDFGGSPWLLIITVFLRSYKFAISLCTSYLCVSFLKTIFPSQNGHDGSTDVQQRARRSNRRRQEGIKIVLEDIFTLWRQVETKVRAKICKMKVTTKVNRHDKINGKRKTAKEHLRKLSMKEREHGEKERQVSEAEENGKLDMKEIHTYMEMFQRAQALRRRAEDYYRCKITPSARKPLCNRIWSRVVTLTLQSSENQRQNIKG

SEQ ID NO: 3521 - protein, 255 aa, Artificial Sequence; identical to SEQ ID NO: 3519
  Synthetic polypeptide

SEQ ID NO: 3522 - protein, 236 aa, Artificial Sequence; identical to SEQ ID NO: 3520
  Synthetic polypeptide

SEQ ID NO: 3523 - protein, 258 aa, Artificial Sequence
  Synthetic polypeptide
MVKLSIVLTPRFLSHDQGQLTKELQQHVKSVTCPCEYLRKVINTLADHRHRGTDFGGSPWLLIITVFLRSYKFAISLCTSYLCVSFLKTIFPSQNGHDGSTDVQQRARRSNRRRQEGIKIVLEDIFTLWRQVETKVRAKICKMKVTTKVNRHDKINGKRKTAKEHLRKLSMKEREHGEKERQVSEAEENGKLDMKEIHTYMEMFQRAQALRRRAEDYYRCKITPSARKPLCNRIWSRVVTLTLQSSENQRQNIKGLEN

SEQ ID NO: 3524 - protein, 239 aa, Artificial Sequence
  Synthetic polypeptide
MFCCLGYEWLSGGCKTWHSAWVINTLADHRHRGTDFGGSPWLLIITVFLRSYKFAISLCTSYLCVSFLKTIFPSQNGHDGSTDVQQRARRSNRRRQEGIKIVLEDIFTLWRQVETKVRAKICKMKVTTKVNRHDKINGKRKTAKEHLRKLSMKEREHGEKERQVSEAEENGKLDMKEIHTYMEMFQRAQALRRRAEDYYRCKITPSARKPLCNRIWSRVVTLTLQSSENQRQNIKGLEN

SEQ ID NO: 3525 - protein, 255 aa, Artificial Sequence; identical to SEQ ID NO: 3519
  Synthetic polypeptide

SEQ ID NO: 3526 - protein, 236 aa, Artificial Sequence; identical to SEQ ID NO: 3520
  Synthetic polypeptide

SEQ ID NO: 3527 - protein, 258 aa, Artificial Sequence; identical to SEQ ID NO: 3523
  Synthetic polypeptide

SEQ ID NO: 3528 - protein, 239 aa, Artificial Sequence; identical to SEQ ID NO: 3524
  Synthetic polypeptide

SEQ ID NO: 3529 - protein, 1175 aa, Artificial Sequence
  Synthetic polypeptide
MLVGQGAGPLGPAVVTAAVVLLLSGVGPAHGSEDIVVGCGGFVKSDVEINYSLIEIKLYTKHGTLKYQTDCAPNNGYFMIPLYDKGDFILKIEPPLGWSFEPTTVELHVDGVSDICTKGGDINFVFTGFSVNGKVLSKGQPLGPAGVQVSLRNTGTEAKIQSTVTQPGGKFAFFKVLPGDYEILATHPTWALKEASTTVRVTNSNANAASPLIVAGYNVSGSVRSDGEPMKGVKFLLFSSLVTKEDVLGCNVSPVPGFQPQDESLVYLCYTVSREDGSFSFYSLPSGGYTVIPFYRGERITFDVAPSRLDFTVEHDSLKIEPVFHVMGFSVTGRVLNGPEGDGVPEAVVTLNNQIKVKTKADGSFRLENITTGTYTIHAQKEHLYFETVTIKIAPNTPQLADIIATGFSVCGQISIIRFPDTVKQMNKYKVVLSSQDKDKSLVTVETDAHGSFCFKAKPGTYKVQVMVPEAETRAGLTLKPQTFPLTVTNRPMMDVAFVQFLASVSGKVSCLDTCGDLLVTLQSLSRQGEKRSLQLSGKVNAMTFTFDNVLPGKYKISIMHEDWCWKNKSLEVEVLEDDMSAVEFRQTGYMLRCSLSHAITLEFYQDGNGRENVGIYNLSKGVNRFCLSKPGVYKVTPRSCHRFEQAFYTYDTSSPSILTLTAIRHHVLGTITTDKMMDVTVTIKSSIDSEPALVLGPLKSVQELRREQQLAEIEARRQEREKNGNEEGEERMTKPPVQEMVDELQGPFSYDFSYWARSGEKITVTPSSKELLFYPPSMEAVVSGESCPGKLIEIHGKAGLFLEGQIHPELEGVEIVISEKGASSPLITVFTDDKGAYSVGPLHSDLEYTVTSQKEGYVLTAVEGTIGDFKAYALAGVSFEIKAEDDQPLPGVLLSLSGGLFRSNLLTQDNGILTFSNLSPGQYYFKPMMKEFRFEPSSQMIEVQEGQNLKITITGYRTAYSCYGTVSSLNGEPEQGVAMEAVGQNDCSIYGEDTVTDEEGKFRLRGLLPGCVYHVQLKAEGNDHIERALPHHRVIEVGNNDIDDVNIIVFRQINQFDLSGNVITSSEYLPTLWVKLYKSENLDNPIQTVSLGQSLFFHFPPLLRDGENYVVLLDSTLPRSQYDYILPQVSFTAVGYHKHITLIFNPTEIGRTQEHANDSTGMQDNHLEPDLFDK

SEQ ID NO: 3530 - protein, 44 aa, Artificial Sequence
  Synthetic polypeptide
KRKPRQSNPDSFPWPVPVLPFPPTAQRRRELCCASGLHTPQIPV

SEQ ID NO: 3531 - protein, 473 aa, Artificial Sequence
  Synthetic polypeptide
MANVSKKVSWSGRDRDDEEAAPLLRRTARPGGGTPLLNGAGPGAARQDMDPPHPFPKEIPHNEKLLSLKYESLDYDNSENQLFLEEERRINHTAFRTVEIKRWVICALIGILTGLVACFIDIVVENLAGLKYRVIKGNIDKFTEKGGLSFSLLLWATLNAAFVLVGSVIVAFIEPVAAGSGIPQIKCFLNGVKIPHVVRLKTLVIKVSGVILSVVGGLAVGKEGPMIHSGSVIAAGISQGRSTSLKRDFKIFEYFRRDTEKRDFVSAGAAAGVSAAFGAPVGGVLFSLEEGASFWNQFLTWRIFFASMISTFTLNFVLSIYHGNMWDLSSPGLINFGRFDSEKMAYTIHEIPVFIAMGVVGGVLGAVFNALNYWLTMFRIRYIHRPCLQVIEAVLVAAVTATVAFVLIYSSRDCQPLQGGSMSYPLQLFCADGEYNSMAAAFFNTPEKSVVSLFHDPPAWVTQRDPLSKNKRK

SEQ ID NO: 3532 - protein, 497 aa, Artificial Sequence
  Synthetic polypeptide
MANVSKKVSWSGRDRDDEEAAPLLRRTARPGGGTPLLNGAGPGAARQSPRSALFRVGHMSSVELDDELLDPDMDPPHPFPKEIPHNEKLLSLKYESLDYDNSENQLFLEEERRINHTAFRTVEIKRWVICALIGILTGLVACFIDIVVENLAGLKYRVIKGNIDKFTEKGGLSFSLLLWATLNAAFVLVGSVIVAFIEPVAAGSGIPQIKCFLNGVKIPHVVRLKTLVIKVSGVILSVVGGLAVGKEGPMIHSGSVIAAGISQGRSTSLKRDFKIFEYFRRDTEKRDFVSAGAAAGVSAAFGAPVGGVLFSLEEGASFWNQFLTWRIFFASMISTFTLNFVLSIYHGNMWDLSSPGLINFGRFDSEKMAYTIHEIPVFIAMGVVGGVLGAVFNALNYWLTMFRIRYIHRPCLQVIEAVLVAAVTATVAFVLIYSSRDCQPLQGGSMSYPLQLFCADGEYNSMAAAFFNTPEKSVVSLFHDPPAWVTQRDPLSKNKRK

SEQ ID NO: 3533 - protein, 239 aa, Artificial Sequence
  Synthetic polypeptide
MFCCLGYEWLSGGCKTWHSAWVINTLADHRHRGTDFGGSPWLLIITVFLRSYKFAISLCTSYLCVSFLKTIFPSQNGHDGSTDVQQRARRSNRRRQEGIKIVLEDIFTLWRQVETKVRAKIRKMKVTTKVNRHDKINGKRKTAKEHLRKLSMKEREHGEKERQVSEAEENGKLDMKEIHTYMEMFQRAQALRRRAEDYYRCKITPSARKPLCNRIWSRVVTLTLQSSENQRQNIKGLEN

SEQ ID NO: 3534 - protein, 10 aa, Artificial Sequence
  Synthetic polypeptide
KPKFELKSVR

SEQ ID NO: 3535 - protein, 414 aa, Artificial Sequence
  Synthetic polypeptide
MACSILEGCRREVRRETWKPGPGSEIADPTLAEMGKNLKEAVKMLEDSQRRTEEENGKKLISGDIPGPLQGSGQDMVSILQLVQNLMHGDEDEEPQSPRIQNIGEQGHMALLGHSLGAYISTLDKEKLRKLTTRILSDTTLWLCRIFRYENGCAYFHEEEREGLAKICRLAIHSRYEDFVVDGFNVLYNKKPVIYLSAAARPGLGQYLCNQLGLPFPCLCRVPCNTVFGSQHQMDVAFLEKLIKDDIERGRLPLLLVANAGTAAVGHTDKIGRLKELCEQYGIWLHVEGVNLATLALGYVSSSVLAAAKCDSMTMTPGPWLGLPAVPAVTLYKHDDPALTLVAGLTSNKPTDKLRALPLWLSLQYLGLDGFVERIKHACQLSQRLQESLKKVNYIKILILIQISPLQKGLSWPP

SEQ ID NO: 3536 - protein, 381 aa, Artificial Sequence
  Synthetic polypeptide
MGKNLKEAVKMLEDSQRRTEEENGKKLISGDIPGPLQGSGQDMVSILQLVQNLMHGDEDEEPQSPRIQNIGEQGHMALLGHSLGAYISTLDKEKLRKLTTRILSDTTLWLCRIFRYENGCAYFHEEEREGLAKICRLAIHSRYEDFVVDGFNVLYNKKPVIYLSAAARPGLGQYLCNQLGLPFPCLCRVPCNTVFGSQHQMDVAFLEKLIKDDIERGRLPLLLVANAGTAAVGHTDKIGRLKELCEQYGIWLHVEGVNLATLALGYVSSSVLAAAKCDSMTMTPGPWLGLPAVPAVTLYKHDDPALTLVAGLTSNKPTDKLRALPLWLSLQYLGLDGFVERIKHACQLSQRLQESLKKVNYIKILILIQISPLQKGLSWPP

SEQ ID NO: 3537 - protein, 305 aa, Artificial Sequence
  Synthetic polypeptide
MGKNLKEAVKMLEDSQRRTEEENGKKLISGDIPGPLQGRYENGCAYFHEEEREGLAKICRLAIHSRYEDFVVDGFNVLYNKKPVIYLSAAARPGLGQYLCNQLGLPFPCLCRVPCNTVFGSQHQMDVAFLEKLIKDDIERGRLPLLLVANAGTAAVGHTDKIGRLKELCEQYGIWLHVEGVNLATLALGYVSSSVLAAAKCDSMTMTPGPWLGLPAVPAVTLYKHDDPALTLVAGLTSNKPTDKLRALPLWLSLQYLGLDGFVERIKHACQLSQRLQESLKKVNYIKILILIQISPLQKGLSWPP

SEQ ID NO: 3538 - protein, 396 aa, Artificial Sequence
  Synthetic polypeptide
MDASLEKIADPTLAEMGKNLKEAVKMLEDSQRRTEEENGKKLISGDIPGPLQGSGQDMVSILQLVQNLMHGDEDEEPQSPRIQNIGEQGHMALLGHSLGAYISTLDKEKLRKLTTRILSDTTLWLCRIFRYENGCAYFHEEEREGLAKICRLAIHSRYEDFVVDGFNVLYNKKPVIYLSAAARPGLGQYLCNQLGLPFPCLCRVPCNTVFGSQHQMDVAFLEKLIKDDIERGRLPLLLVANAGTAAVGHTDKIGRLKELCEQYGIWLHVEGVNLATLALGYVSSSVLAAAKCDSMTMTPGPWLGLPAVPAVTLYKHDDPALTLVAGLTSNKPTDKLRALPLWLSLQYLGLDGFVERIKHACQLSQRLQESLKKVNYIKILILIQISPLQKGLSWPP

SEQ ID NO: 3539 - protein, 373 aa, Artificial Sequence
  Synthetic polypeptide
MDASLEKIADPTLAEMGKNLKEAVKMLEDSQRRTEEENGKKLISGDIPGPLQGSGQDMVSILQLVQNLMHGDEDEEPQSPRIQNIGEQGHMALLGHSLGAYISTLDKEKLRKLTTRILSDTTLWLCRIFRYENGCAYFHEEEREGLAKICRLAIHSRYEDFVVDGFNVLYNKKPVIYLSAAARPGLGQYLCNQDVAFLEKLIKDDIERGRLPLLLVANAGTAAVGHTDKIGRLKELCEQYGIWLHVEGVNLATLALGYVSSSVLAAAKCDSMTMTPGPWLGLPAVPAVTLYKHDDPALTLVAGLTSNKPTDKLRALPLWLSLQYLGLDGFVERIKHACQLSQRLQESLKKVNYIKILILIQISPLQKGLSWPP

SEQ ID NO: 3540 - protein, 369 aa, Artificial Sequence
  Synthetic polypeptide
MDASLEKIADPTLAEMGKNLKEAVKMLEDSQRRTEEENGKKLISGDIPGPLQGRIQNIGEQGHMALLGHSLGAYISTLDKEKLRKLTTRILSDTTLWLCRIFRYENGCAYFHEEEREGLAKICRLAIHSRYEDFVVDGFNVLYNKKPVIYLSAAARPGLGQYLCNQLGLPFPCLCRVPCNTVFGSQHQMDVAFLEKLIKDDIERGRLPLLLVANAGTAAVGHTDKIGRLKELCEQYGIWLHVEGVNLATLALGYVSSSVLAAAKCDSMTMTPGPWLGLPAVPAVTLYKHDDPALTLVAGLTSNKPTDKLRALPLWLSLQYLGLDGFVERIKHACQLSQRLQESLKKVNYIKILILIQISPLQKGLSWPP

SEQ ID NO: 3541 - protein, 368 aa, Artificial Sequence
  Synthetic polypeptide
MDASLEKIADPTLAEMGKNLKEAVKMLEDSQRTEEENGKKLISGDIPGPLQGRIQNIGEQGHMALLGHSLGAYISTLDKEKLRKLTTRILSDTTLWLCRIFRYENGCAYFHEEEREGLAKICRLAIHSRYEDFVVDGFNVLYNKKPVIYLSAAARPGLGQYLCNQLGLPFPCLCRVPCNTVFGSQHQMDVAFLEKLIKDDIERGRLPLLLVANAGTAAVGHTDKIGRLKELCEQYGIWLHVEGVNLATLALGYVSSSVLAAAKCDSMTMTPGPWLGLPAVPAVTLYKHDDPALTLVAGLTSNKPTDKLRALPLWLSLQYLGLDGFVERIKHACQLSQRLQESLKKVNYIKILILIQISPLQKGLSWPP

SEQ ID NO: 3542 - protein, 511 aa, Artificial Sequence
  Synthetic polypeptide
MACSILEGCRREVRRETWKPGPGSEIADPTLAEMGKNLKEAVKMLEDSQRRTEEENGKKLISGDIPGPLQGSGQDMVSILQLVQNLMHGDEDEEPQSPRIQNIGEQGHMALLGHSLGAYISTLDKEKLRKLTTRILSDTTLWLCRIFRYENGCAYFHEEEREGLAKICRLAIHSRYEDFVVDGFNVLYNKKPVIYLSAAARPGLGQYLCNQLGLPFPCLCRVPCNTVFGSQHQMDVAFLEKLIKDDIERGRLPLLLVANAGTAAVGHTDKIGRLKELCEQYGIWLHVEGVNLATLALGYVSSSVLAAAKCDSMTMTPGPWLGLPAVPAVTLYKHDDPALTLVAGLTSNKPTDKLRALPLWLSLQYLGLDGFVERIKHACQLSQRLQESLKKVNYIKILVEDELSSPVVVFRFFQELPGSDPVFKAVPVPNMTPSGVGRERHSCDALNRWLGEQLKQLVPASGLTVMDLEAEGTCLRFSPLMTAAGAPTNQNRHGDQTGTATPVDTSGMSTL

SEQ ID NO: 3543 - protein, 478 aa, Artificial Sequence
  Synthetic polypeptide
MGKNLKEAVKMLEDSQRRTEEENGKKLISGDIPGPLQGSGQDMVSILQLVQNLMHGDEDEEPQSPRIQNIGEQGHMALLGHSLGAYISTLDKEKLRKLTTRILSDTTLWLCRIFRYENGCAYFHEEEREGLAKICRLAIHSRYEDFVVDGFNVLYNKKPVIYLSAAARPGLGQYLCNQLGLPFPCLCRVPCNTVFGSQHQMDVAFLEKLIKDDIERGRLPLLLVANAGTAAVGHTDKIGRLKELCEQYGIWLHVEGVNLATLALGYVSSSVLAAAKCDSMTMTPGPWLGLPAVPAVTLYKHDDPALTLVAGLTSNKPTDKLRALPLWLSLQYLGLDGFVERIKHACQLSQRLQESLKKVNYIKILVEDELSSPVVVFRFFQELPGSDPVFKAVPVPNMTPSGVGRERHSCDALNRWLGEQLKQLVPASGLTVMDLEAEGTCLRFSPLMTAAGAPTNQNRHGDQTGTATPVDTSGMSTL

SEQ ID NO: 3544 - protein, 402 aa, Artificial Sequence
  Synthetic polypeptide
MGKNLKEAVKMLEDSQRRTEEENGKKLISGDIPGPLQGRYENGCAYFHEEEREGLAKICRLAIHSRYEDFVVDGFNVLYNKKPVIYLSAAARPGLGQYLCNQLGLPFPCLCRVPCNTVFGSQHQMDVAFLEKLIKDDIERGRLPLLLVANAGTAAVGHTDKIGRLKELCEQYGIWLHVEGVNLATLALGYVSSSVLAAAKCDSMTMTPGPWLGLPAVPAVTLYKHDDPALTLVAGLTSNKPTDKLRALPLWLSLQYLGLDGFVERIKHACQLSQRLQESLKKVNYIKILVEDELSSPVVVFRFFQELPGSDPVFKAVPVPNMTPSGVGRERHSCDALNRWLGEQLKQLVPASGLTVMDLEAEGTCLRFSPLMTAAGAPTNQNRHGDQTGTATPVDTSGMSTL

SEQ ID NO: 3545 - protein, 493 aa, Artificial Sequence
  Synthetic polypeptide
MDASLEKIADPTLAEMGKNLKEAVKMLEDSQRRTEEENGKKLISGDIPGPLQGSGQDMVSILQLVQNLMHGDEDEEPQSPRIQNIGEQGHMALLGHSLGAYISTLDKEKLRKLTTRILSDTTLWLCRIFRYENGCAYFHEEEREGLAKICRLAIHSRYEDFVVDGFNVLYNKKPVIYLSAAARPGLGQYLCNQLGLPFPCLCRVPCNTVFGSQHQMDVAFLEKLIKDDIERGRLPLLLVANAGTAAVGHTDKIGRLKELCEQYGIWLHVEGVNLATLALGYVSSSVLAAAKCDSMTMTPGPWLGLPAVPAVTLYKHDDPALTLVAGLTSNKPTDKLRALPLWLSLQYLGLDGFVERIKHACQLSQRLQESLKKVNYIKILVEDELSSPVVVFRFFQELPGSDPVFKAVPVPNMTPSGVGRERHSCDALNRWLGEQLKQLVPASGLTVMDLEAEGTCLRFSPLMTAAGAPTNQNRHGDQTGTATPVDTSGMSTL

SEQ ID NO: 3546 - protein, 466 aa, Artificial Sequence
  Synthetic polypeptide
MDASLEKIADPTLAEMGKNLKEAVKMLEDSQRRTEEENGKKLISGDIPGPLQGRIQNIGEQGHMALLGHSLGAYISTLDKEKLRKLTTRILSDTTLWLCRIFRYENGCAYFHEEEREGLAKICRLAIHSRYEDFVVDGFNVLYNKKPVIYLSAAARPGLGQYLCNQLGLPFPCLCRVPCNTVFGSQHQMDVAFLEKLIKDDIERGRLPLLLVANAGTAAVGHTDKIGRLKELCEQYGIWLHVEGVNLATLALGYVSSSVLAAAKCDSMTMTPGPWLGLPAVPAVTLYKHDDPALTLVAGLTSNKPTDKLRALPLWLSLQYLGLDGFVERIKHACQLSQRLQESLKKVNYIKILVEDELSSPVVVFRFFQELPGSDPVFKAVPVPNMTPSGVGRERHSCDALNRWLGEQLKQLVPASGLTVMDLEAEGTCLRFSPLMTAAGAPTNQNRHGDQTGTATPVDTSGMSTL

SEQ ID NO: 3547 - protein, 465 aa, Artificial Sequence
  Synthetic polypeptide
MDASLEKIADPTLAEMGKNLKEAVKMLEDSQRTEEENGKKLISGDIPGPLQGRIQNIGEQGHMALLGHSLGAYISTLDKEKLRKLTTRILSDTTLWLCRIFRYENGCAYFHEEEREGLAKICRLAIHSRYEDFVVDGFNVLYNKKPVIYLSAAARPGLGQYLCNQLGLPFPCLCRVPCNTVFGSQHQMDVAFLEKLIKDDIERGRLPLLLVANAGTAAVGHTDKIGRLKELCEQYGIWLHVEGVNLATLALGYVSSSVLAAAKCDSMTMTPGPWLGLPAVPAVTLYKHDDPALTLVAGLTSNKPTDKLRALPLWLSLQYLGLDGFVERIKHACQLSQRLQESLKKVNYIKILVEDELSSPVVVFRFFQELPGSDPVFKAVPVPNMTPSGVGRERHSCDALNRWLGEQLKQLVPASGLTVMDLEAEGTCLRFSPLMTAAGAPTNQNRHGDQTGTATPVDTSGMSTL

SEQ ID NO: 3548 - protein, 206 aa, Artificial Sequence
  Synthetic polypeptide
MEPAPSEVRLAVREAIHALSSSEDGGHIFCTLESLKRYLGEMEPPALPREKEEFASAHFSPVLRCLASRLSPAWLELLPHGRLEELWASFFLEGPADQAFLVLMETIEGAAGPSFRLMKMARLLARFLREGRLAVLMEAQCRQQTQPGFILLRETLLGKVVALPDHLGNRLQQENLAEFFPQNYFRLLGEEVVRVLQAVVDSLQVG

SEQ ID NO: 3549 - protein, 237 aa, Artificial Sequence
  Synthetic polypeptide
MFCCLGYEWLSGGCKTWHSAWVINTLADHRHRGTDFGGSPWLLIITVFLRSYKFAISLCTSYLCVSFLKTIFPSQNGHDGSTDVQQRARRSNCRRQEGIKIVLEDIFTLWRQVETKVRAKIRKMKVTTKVNRHDKINGKRKTAKEHLRKLSMKEREHGEKERQVSEAEENGKLDMKEIHTYMEMFQRAQALRRRAEDYYRCKITPSARKPLCNRIWSRVVTLTLQSSENQRQNIKGL

SEQ ID NO: 3550 - protein, 114 aa, Artificial Sequence
  Synthetic polypeptide
MKVTTKVNRHDKINGKRKTAKEHLRKLSMKEREHGEKERQVSEAEENGKLDMKEIHTYMEMFQRAQALRRRAEDYYRCKITPSARKPLCNRIWSRVVTLTLQSSENQRQNIKGL

SEQ ID NO: 3551 - protein, 256 aa, Artificial Sequence
  Synthetic polypeptide
MVKLSIVLTPRFLSHDQGQLTKELQQHVKSVTCPCEYLRKVINTLADHRHRGTDFGGSPWLLIITVFLRSYKFAISLCTSYLCVSFLKTIFPSQNGHDGSTDVQQRARRSNCRRQEGIKIVLEDIFTLWRQVETKVRAKIRKMKVTTKVNRHDKINGKRKTAKEHLRKLSMKEREHGEKERQVSEAEENGKLDMKEIHTYMEMFQRAQALRRRAEDYYRCKITPSARKPLCNRIWSRVVTLTLQSSENQRQNIKGL

SEQ ID NO: 3552 - protein, 236 aa, Artificial Sequence
  Synthetic polypeptide
MFCCLGYEWLSGGCKTWHSAWVINTLADHRHRGTDFGGSPWLLIITVFLRSYKFAISLCTSYLCVSFLKTIFPSQNGHDGSTDVQQRARRSNCRRQEGIKIVLEDIFTLWRQVETKVRAKIRKMKVTTKVNRHDKINGKRKTAKEHLRKLSMKEREHGEKERQVSEAEENGKLDMKEIHTYMEMFQRAQALRRRAEDYYRCKITPSARKPLCNRIWSRVVTLTLQSSENQRQNIKG

SEQ ID NO: 3553 - protein, 113 aa, Artificial Sequence
  Synthetic polypeptide
MKVTTKVNRHDKINGKRKTAKEHLRKLSMKEREHGEKERQVSEAEENGKLDMKEIHTYMEMFQRAQALRRRAEDYYRCKITPSARKPLCNRIWSRVVTLTLQSSENQRQNIKG

SEQ ID NO: 3554 - protein, 255 aa, Artificial Sequence
  Synthetic polypeptide
MVKLSIVLTPRFLSHDQGQLTKELQQHVKSVTCPCEYLRKVINTLADHRHRGTDFGGSPWLLIITVFLRSYKFAISLCTSYLCVSFLKTIFPSQNGHDGSTDVQQRARRSNCRRQEGIKIVLEDIFTLWRQVETKVRAKIRKMKVTTKVNRHDKINGKRKTAKEHLRKLSMKEREHGEKERQVSEAEENGKLDMKEIHTYMEMFQRAQALRRRAEDYYRCKITPSARKPLCNRIWSRVVTLTLQSSENQRQNIKG

SEQ ID NO: 3555 - protein, 108 aa, Artificial Sequence
  Synthetic polypeptide
MELKQSLSTHLEAEKPLRRYGAVEETAWKTERLGRNQLDIISMAETTMMPEEIELEMAKIQRLREVLVRRESELRFMKGPPGLSKNIKELKLTRLPHPEMRYQTPHSS

SEQ ID NO: 3556 - protein, 91 aa, Artificial Sequence
  Synthetic polypeptide
MWGDLTETGCMGRRSAKKDQLDIISMAETTMMPEEIELEMAKIQRLREVLVRRESELRFMKGPPGLSKNIKELKLTRLPHPEMRYQTPHSS

SEQ ID NO: 3557 - protein, 12 aa, Artificial Sequence
  Synthetic polypeptide
ISWTSSPWRRQP

SEQ ID NO: 3558 - protein, 60 aa, Artificial Sequence
  Synthetic polypeptide
MPEEIELEMAKIQRLREVLVRRESELRFMKGPPGLSKNIKELKLTRLPHPEMRYQTPHSS

SEQ ID NO: 3559 - protein, 276 aa, Artificial Sequence
  Synthetic polypeptide
MEDSGKTFSSEEEEANYWKDLAMTYKQRAENTQEELREFQEGSREYEAELETQLQQIETRNRDLLSENNRLRMELETIKEKFEVQHSEGYRQISALEDDLAQTKAIKDQLQKYIRELEQANDDLERAKRATIMSLEDFEQRLNQAIERNAFLESELDEKENLLESVQRLKDEARDLRQELAVQQKQEKPRTPMPSSVEAERTDTAVQATGSVPSTPIAHRGPSSSLNTPGSFRRGLDDSTGGTPLTPAARISALNIVGDLLRKVGGVRITEKATRR

SEQ ID NO: 3560 - protein, 21 aa, Artificial Sequence
  Synthetic polypeptide
MTTWKEPSAPRSCLSKTLSSA

SEQ ID NO: 3561 - protein, 130 aa, Artificial Sequence
  Synthetic polypeptide
ERNAFLESELDEKENLLESVQRLKDEARDLRQELAVQQKQEKPRTPMPSSVEAERTDTAVQATGSVPSTPIAHRGPSSSLNTPGSFRRGLDDSTGGTPLTPAARISALNIVGDLLRKVGGVRITEKATRR

SEQ ID NO: 3562 - protein, 18 aa, Artificial Sequence
  Synthetic polypeptide
RAAEAGETQDPHAQLSGS

SEQ ID NO: 3563 - protein, 83 aa, Artificial Sequence
  Synthetic polypeptide
PSSVEAERTDTAVQATGSVPSTPIAHRGPSSSLNTPGSFRRGLDDSTGGTPLTPAARISALNIVGDLLRKVGGVRITEKATRR

SEQ ID NO: 3564 - protein, 69 aa, Artificial Sequence
  Synthetic polypeptide
ATGSVPSTPIAHRGPSSSLNTPGSFRRGLDDSTGGTPLTPAARISALNIVGDLLRKVGGVRITEKATRR

SEQ ID NO: 3565 - protein, 326 aa, Artificial Sequence
  Synthetic polypeptide
MEDSGKTFSSEEEEANYWKDLAMTYKQRAENTQEELREFQEGSREYEAELETQLQQIETRNRDLLSENNRLRMELETIKEKFEVQHSEGYRQISALEDDLAQTKAIKDQLQKYIRELEQANDDLERAKRATIMSLEDFEQRLNQAIERNAFLESELDEKENLLESVQRLKDEARDLRQELAVQQKQEKPRTPMPSSVEAERTDTAVQATGSVPSTPIAHRGPSSSLNTPGSFRRGLDDSTGGTPLTPAARISALNIVGDLLRKVGALESKLASCRNLVYDQSPNRTGGPASGRSSKNRDGGERRPSSTSVPLGDKGACELLKKLLE

SEQ ID NO: 3566 - protein, 180 aa, Artificial Sequence
  Synthetic polypeptide
ERNAFLESELDEKENLLESVQRLKDEARDLRQELAVQQKQEKPRTPMPSSVEAERTDTAVQATGSVPSTPIAHRGPSSSLNTPGSFRRGLDDSTGGTPLTPAARISALNIVGDLLRKVGALESKLASCRNLVYDQSPNRTGGPASGRSSKNRDGGERRPSSTSVPLGDKGACELLKKLLE

SEQ ID NO: 3567 - protein, 133 aa, Artificial Sequence
  Synthetic polypeptide
PSSVEAERTDTAVQATGSVPSTPIAHRGPSSSLNTPGSFRRGLDDSTGGTPLTPAARISALNIVGDLLRKVGALESKLASCRNLVYDQSPNRTGGPASGRSSKNRDGGERRPSSTSVPLGDKGACELLKKLLE

SEQ ID NO: 3568 - protein, 119 aa, Artificial Sequence
  Synthetic polypeptide
ATGSVPSTPIAHRGPSSSLNTPGSFRRGLDDSTGGTPLTPAARISALNIVGDLLRKVGALESKLASCRNLVYDQSPNRTGGPASGRSSKNRDGGERRPSSTSVPLGDKGACELLKKLLE

SEQ ID NO: 3569 - protein, 69 aa, Artificial Sequence
  Synthetic polypeptide
GPSVSGQPNSLGHHHAACYLFNSAGEEEGSSVFRDHAHFLAGSPSVCPSHPEIQNYDSLKRGCPGGPVS

SEQ ID NO: 3570 - protein, 674 aa, Artificial Sequence
  Synthetic polypeptide
MALRGFCSADGSDPLWDWNVTWNTSNPDFTKCFQNTVLVWVPCFYLWACFPFYFLYLSRHDRGYIQMTPLNKTKTALGFLLWIVCWADLFYSFWERSRGIFLAPVFLVSPTLLGITMLLATFLIQLERRKGVQSSGIMLTFWLVALVCALAILRSKIMTALKEDAQVDLFRDITFYVYFSLLLIQLVLSCFSDRSPLFSETIHDPNPCPESSASFLSRITFWWITGLIVRGYRQPLEGSDLWSLNKEDTSEQVVPVLVKNWKKECAKTRKQPVKVVYSSKDPAQPKESSKVDANEEVEALIVKSPQKEWNPSLFKVLYKTFGPYFLMSFFFKAIHDLMMFSGPQILKLLIKFVNDTKAPDWQGYFYTVLLFVTACLQTLVLHQYFHICFVSGMRIKTAVIGAVYRKALVITNSARKSSTVGEIVNLMSVDAQRFMDLATYINMIWSAPLQVILALYLLWLNLGPSVLAGVAVMVLMVPVNAVMAMKTKTYQVAHMKSKDNRIKLMNEILNGIKVLKLYAWELAFKDKVLAIRQEELKVLKKSAYLSAVGTFTWVCTPFLVALCTFAVYVTIDENNILDAQTAFVSLALFNILRFPLNILPMVISSIVQASVSLKRLRIFLSHEELEPDSIERRPVKDGGGTNSITVRNATFTWARSDPPTLNGDTLSWNQVTML

SEQ ID NO: 3571 - protein, 239 aa, Artificial Sequence
  Synthetic polypeptide
MFCCLGYEWLSGGCKTWHSAWVINTLADHRHRGTDFGGSPWLLIITVFLRSYKFAISLCTSYLCVSFLKTIFPSQNGHDGSTDVQQRARRSNCRRQEGIKIVLEDIFTLWRQVETKVRAKIRKMKVTTKVNRHDKINGKRKTAKEHLRKLSMKEREHGEKERQVSEAEENGKLDMKEIHTYMEMFQRAQALRRRAEDYYRCKITPSARKPLCNRIWSRVVTLTLQSSENQRQNIKGLEN

SEQ ID NO: 3572 - protein, 20 aa, Artificial Sequence
  Synthetic polypeptide
IVIVGLTLVEVLGYLSLLCF

SEQ ID NO: 3573 - protein, 121 aa, Artificial Sequence
  Synthetic polypeptide
AKIRKMKVTTKVNRHDKINGKRKTAKEHLRKLSMKEREHGEKERQVSEAEENGKLDMKEIHTYMEMFQRAQALRRRAEDYYRCKITPSARKPLCNRIWSRVVTLTLQSSENQRQNIKGLEN

SEQ ID NO: 3574 - protein, 239 aa, Artificial Sequence; identical to SEQ ID NO: 3571
  Synthetic polypeptide

SEQ ID NO: 3575 - protein, 20 aa, Artificial Sequence
  Synthetic polypeptide
IVIVGLTLVEVLGYLSLLCF

SEQ ID NO: 3576 - protein, 121 aa, Artificial Sequence; identical to SEQ ID NO: 3573
  Synthetic polypeptide

SEQ ID NO: 3577 - protein, 239 aa, Artificial Sequence
  Synthetic polypeptide
MFCCLGYEWLSGGCTTWHSAWVINTLADHRHRGTDFGGSPWLLIITVFLRSYKFAISLCTSYLCVSFLKTIFPSQNGHDGSTDVQQRARRSNRRRQEGIKIVLEDIFTLWRQVETKVRAKIRKMKVTTKVNRHDKINGKRKTAKEHLRKLSMKEREHREEERQVSEAEENGKLDMKEIHTYMEMFQRAQALRRRAEDYYRCKITPSARKPLCNRIWSRVVTLTLQSSENQRQNIKGLEN

SEQ ID NO: 3578 - protein, 116 aa, Artificial Sequence
  Synthetic polypeptide
MKVTTKVNRHDKINGKRKTAKEHLRKLSMKEREHREEERQVSEAEENGKLDMKEIHTYMEMFQRAQALRRRAEDYYRCKITPSARKPLCNRIWSRVVTLTLQSSENQRQNIKGLEN

SEQ ID NO: 3579 - protein, 71 aa, Artificial Sequence
  Synthetic polypeptide
ENGKLDMKEIHTYMEMFQRAQALRRRAEDYYRCKITPSARKPLCNRIWSRVVTLTLQSSENQRQNIKGLEN

SEQ ID NO: 3580 - protein, 236 aa, Artificial Sequence
  Synthetic polypeptide
MFCCLGYEWLSGGCTTWHSAWVINTLADHRHRGTDFGGSPWLLIITVFLRSYKFAISLCTSYLCVSFLKTIFPSQNGHDGSTDVQQRARRSNRRRQEGIKIVLEDIFTLWRQVETKVRAKIRKMKVTTKVNRHDKINGKRKTAKEHLRKLSMKEREHREEERQVSEAEENGKLDMKEIHTYMEMFQRAQALRRRAEDYYRCKITPSARKPLCNRIWSRVVTLTLQSSENQRQNIKG

SEQ ID NO: 3581 - protein, 26 aa, Artificial Sequence
  Synthetic polypeptide
ELKLSWKTSLLYGDRWKPKFELKSVR

SEQ ID NO: 3582 - protein, 20 aa, Artificial Sequence
  Synthetic polypeptide
IVIVGLTLVEVLGYLSLLCF

SEQ ID NO: 3583 - protein, 236 aa, Artificial Sequence; identical to SEQ ID NO: 3552
  Synthetic polypeptide

SEQ ID NO: 3584 - protein, 239 aa, Artificial Sequence; identical to SEQ ID NO: 3571
  Synthetic polypeptide

SEQ ID NO: 3585 - protein, 20 aa, Artificial Sequence
  Synthetic polypeptide
IVIVGLTLVEVLGYLSLLCF

SEQ ID NO: 3586 - protein, 1175 aa, Artificial Sequence
  Synthetic polypeptide
MLVGQGAGLLGPAVVTAAVVLLLSGVGPAHGSEDIVVGCGGFVKSDVEINYSLIEIKLYTKHGTLKYQTDCAPNNGYFMIPLYDKGDFILKIEPPLGWSFEPTTVELHVDGVSDICTKGGDINFVFTGFSVNGKVLSKGQPLGPAGVQVSLRNTGTEAKIQSTVTQPGGKFAFFKVLPGDYEILATHPTWALKEASTTVRVTNSNANAASPLIVAGYNVSGSVRSDGEPMKGVKFLLFSSLVTKEDVLGCNVSPVPGFQPQDESLVYLCYTVSREDGSFSFYSLPSGGYTVIPFYRGERITFDVAPSRLDFTVEHDSLKIEPVFHVMGFSVTGRVLNGPEGDGVPEAVVTLNNQIKVKTKADGSFRLENITTGTYTIHAQKEHLYFETVTIKIAPNTPQLADIVATGFSVCGRISIIRFPDTVKQMNKYKVVLSSQDKDKSLVTVETDAHGSFCFKAKPGTYKVQVMVPEAETRAGLTLKPQTFPLTVTDRPVMDVAFVQFLASVSGKVSCLDTCGDLLVTLQSLSRQGEKRSLQLSGKVNAMTFTFDNVLPGKYKISIMHEDWCWKNKSLEVEVLEDDVSAVEFRQTGYMLRCSLSHAITLEFYQDGNGRENVGIYNLSKGVNRFCLSKPGVYKVTPRSCHRFEQAFYTYDTSSPSILTLTAIRHHVLGTITTDKMMDVTVTIKSSIDSEPALVLGPLKSVQELRREQQLAEIEARRQEREKNGNEEGEERMTKPPVQEMVDELQGPFSYDFSYWARSGEKITVTPSSKELLFYPPSMEAVVSGESCPGKLIEIHGKAGLFLEGQIHPELEGVEIVISEKGASSPLITVFTDDKGAYSVGPLHSDLEYTVTSQKEGYVLTAVEGTIGDFKAYALAGVSFEIKAEDDQPLPGVLLSLSGGLFRSNLLTQDNGILTFSNLSPGQYYFKPMMKEFRFEPSSQMIEVQEGQNLKITITGYRTAYSCYGTVSSLNGEPEQGVAMEAVGQNDCSIYGEDTVTDEEGKFRLRGLLPGCVYHVQLKAEGNDHIERALPHHRVIEVGNNDIDDVNIIVFRQINQFDLSGNVITSSEYLPTLWVKLYKSENLDNPIQTVSLGQSLFFHFPPLLRDGENYVVLLDSTLPRSQYDYILPQVSFTAVGYHKHITLIFNPTEIGRTQEHANDSTGMQDNHLEPDLFDK

SEQ ID NO: 3587 - protein, 1008 aa, Artificial Sequence
  Synthetic polypeptide
MARFAFFKVLPGDYEILATHPTWALKEASTTVRVTNSNANAASPLIVAGYNVSGSVRSDGEPMKGVKFLLFSSLVTKEDVLGCNVSPVPGFQPQDESLVYLCYTVSREDGSFSFYSLPSGGYTVIPFYRGERITFDVAPSRLDFTVEHDSLKIEPVFHVMGFSVTGRVLNGPEGDGVPEAVVTLNNQIKVKTKADGSFRLENITTGTYTIHAQKEHLYFETVTIKIAPNTPQLADIVATGFSVCGRISIIRFPDTVKQMNKYKVVLSSQDKDKSLVTVETDAHGSFCFKAKPGTYKVQVMVPEAETRAGLTLKPQTFPLTVTDRPVMDVAFVQFLASVSGKVSCLDTCGDLLVTLQSLSRQGEKRSLQLSGKVNAMTFTFDNVLPGKYKISIMHEDWCWKNKSLEVEVLEDDVSAVEFRQTGYMLRCSLSHAITLEFYQDGNGRENVGIYNLSKGVNRFCLSKPGVYKVTPRSCHRFEQAFYTYDTSSPSILTLTAIRHHVLGTITTDKMMDVTVTIKSSIDSEPALVLGPLKSVQELRREQQLAEIEARRQEREKNGNEEGEERMTKPPVQEMVDELQGPFSYDFSYWARSGEKITVTPSSKELLFYPPSMEAVVSGESCPGKLIEIHGKAGLFLEGQIHPELEGVEIVISEKGASSPLITVFTDDKGAYSVGPLHSDLEYTVTSQKEGYVLTAVEGTIGDFKAYALAGVSFEIKAEDDQPLPGVLLSLSGGLFRSNLLTQDNGILTFSNLSPGQYYFKPMMKEFRFEPSSQMIEVQEGQNLKITITGYRTAYSCYGTVSSLNGEPEQGVAMEAVGQNDCSIYGEDTVTDEEGKFRLRGLLPGCVYHVQLKAEGNDHIERALPHHRVIEVGNNDIDDVNIIVFRQINQFDLSGNVITSSEYLPTLWVKLYKSENLDNPIQTVSLGQSLFFHFPPLLRDGENYVVLLDSTLPRSQYDYILPQVSFTAVGYHKHITLIFNPTEIGRTQEHANDSTGMQDNHLEPDLFDK

SEQ ID NO: 3588 - protein, 138 aa, Artificial Sequence
  Synthetic polypeptide
MVRMNVLADALKSINNAEKRGKRQVLIRPCSKVIVRFLTVMMKHGYIGEFEIIDDHRAGKIVVNLTGRLNKCGVISPRFDVQLKDLEKWQNNLLPSRQFGPRRVDHLRSRVPDQPGQYGETLSLLKLQKLAGWGGRRL

SEQ ID NO: 3589 - protein, 3 aa, Artificial Sequence
  Synthetic polypeptide
SVG

SEQ ID NO: 3590 - protein, 109 aa, Artificial Sequence
  Synthetic polypeptide
MVRMNVLADALKSINNAEKRGKRQVLIRPCSKVIVRFLTVMMKHGYIGEFEIIDDHRAGKIVVNLTGRLNKCGVISPRFDVQLKDLEKWQNNLLPSRQFGHEILGKSQP

SEQ ID NO: 3591 - protein, 3 aa, Artificial Sequence
  Synthetic polypeptide
SVG

SEQ ID NO: 3592 - protein, 678 aa, Artificial Sequence
  Synthetic polypeptide
MSAYYRNNWSEEDPDYPDYSGSQNRTQGYLKTQGYPDVPGPLNNPDYPGTRSNPYSVASRTRPDYPGSLAEPNYPRSLSNPDYSGTRSNAYSAASRTSPDHPTSLPEPDYSEFQSHPYHRASSRQPDYPGSQRNPDFAGSSSSGNYAGSRTHPDHFGSLEPDYPGAQSNSDHPGPRANLNHPGSRKNLEHTSFRINPYADSLGKPDYPGADIQPNSPPFFGEPDYPSAEDNQNLPSTWREPDYSDAENGHDYGSSETPKMTRGVLSRTSSIQPSFRHRSDDPVGSLWGENDYPEGIEMASMEMANSYGHSLPGAPGSGYVNPAYVGESGPVHAYGNPPLSECDWHKSPQGQKLIASLIPMTSRDRIKAIRNQPRTMEEKRNLRKIVDKEKSKQTHRILQLNCCIQCLNSISRAYRRSKNSLSEILNSISLWQKTLKIIGGKFGTSVLSYFNFLRWLLKFNIFSFILNFSFIIIPQFTVAKKNTLQFTGLEFFTGVGYFRDTVMYYGFYTNSTIQHGNSGASYNMQLAYIFTIGACLTTCFFSLLFSMAKYFRNNFINPHIYSGGITKLIFCWDFTVTHEKAVKLKQKNLSTEIRFLKTHSNPGAVLLLPFVVSCINLAVPCIYSMFRLVERYEMPRHEVYVLLIRQVQWLVPVILALWVAKVGGLLEPRSSRPALATW

SEQ ID NO: 3593 - protein, 730 aa, Artificial Sequence
  Synthetic polypeptide
MSAYYRNNWSEEDPDYPDYSGSQNRTQGYLKTQGYPDVPGPLNNPDYPGTRSNPYSVASRTRPDYPGSLAEPNYPRSLSNPDYSGTRSNAYSAASRTSPDHPTSLPEPDYSEFQSHPYHRASSRQPDYPGSQRNPDFAGSSSSGNYAGSRTHPDHFGSLEPDYPGAQSNSDHPGPRANLNHPGSRKNLEHTSFRINPYADSLGKPDYPGADIQPNSPPFFGEPDYPSAEDNQNLPSTWREPDYSDAENGHDYGSSETPKMTRGVLSRTSSIQPSFRHRSDDPVGSLWGENDYPEGIEMASMEMANSYGHSLPGAPGSGYVNPAYVGESGPVHAYGNPPLSECDWHKSPQGQKLIASLIPMTSRDRIKAIRNQPRTMEEKRNLRKIVDKEKSKQTHRILQLNCCIQCLNSISRAYRRSKNSLSEILNSISLWQKTLKIIGGKFGTSVLSYFNFLRWLLKFNIFSFILNFSFIIIPQFTVAKKNTLQFTGLEFFTGVGYFRDTVMYYGFYTNSTIQHGNSGASYNMQLAYIFTIGACLTTCFFSLLFSMAKYFRNNFINPHIYSGGITKLIFCWDFTVTHEKAVKLKQKNLSTEIRENLSELRQENSKLTFNQLLTRFSAYMVAWVVSTGVAIACCAAVYYLAEYNLEFLKTHSNPGAVLLLPFVVSCINLAVPCIYSMFRLVERYEMPRHEVYVLLIRQVQWLVPVILALWVAKVGGLLEPRSSRPALATW

SEQ ID NO: 3594 - protein, 484 aa, Artificial Sequence
  Synthetic polypeptide
MLSDDHVNEIIIQVENVSSGVQSHPSSNQIFQEKVLLDSSINMVLSISDIDVIDSQTVSKRNDQKGNQVLRFSTSLNESMSQTLHSLECMGIDTPGSSHETVQGQKLIASLIPMTSRDRIKAIRNQPRTMEEKRNLRKIVDKEKSKQTHRILQLNCCIQCLNSISRAYRRSKNSLSEILNSISLWQKTLKIIGGKFGTSVLSYFNFLRWLLKFNIFSFILNFSFIIIPQFTVAKKNTLQFTGLEFFTGVGYFRDTVMYYGFYTNSTIQHGNSGASYNMQLAYIFTIGACLTTCFFSLLFSMAKYFRNNFINPHIYSGGITKLIFCWDFTVTHEKAVKLKQKNLSTEIRENLSELRQENSKLTFNQLLTRFSAYMVAWVVSTGVAIACCAAVYYLAEYNLEFLKTHSNPGAVLLLPFVVSCINLAVPCIYSMFRLVERYEMPRHEVYVLLIRQVQWLVPVILALWVAKVGGLLEPRSSRPALATW

SEQ ID NO: 3595 - protein, 371 aa, Artificial Sequence
  Synthetic polypeptide
MTSRDRIKAIRNQPRTMEEKRNLRKIVDKEKSKQTHRILQLNCCIQCLNSISRAYRRSKNSLSEILNSISLWQKTLKIIGGKFGTSVLSYFNFLRWLLKFNIFSFILNFSFIIIPQFTVAKKNTLQFTGLEFFTGVGYFRDTVMYYGFYTNSTIQHGNSGASYNMQLAYIFTIGACLTTCFFSLLFSMAKYFRNNFINPHIYSGGITKLIFCWDFTVTHEKAVKLKQKNLSTEIRENLSELRQENSKLTFNQLLTRFSAYMVAWVVSTGVAIACCAAVYYLAEYNLEFLKTHSNPGAVLLLPFVVSCINLAVPCIYSMFRLVERYEMPRHEVYVLLIRQVQWLVPVILALWVAKVGGLLEPRSSRPALATW

SEQ ID NO: 3596 - protein, 413 aa, Artificial Sequence
  Synthetic polypeptide
MLSDDHVNEIIIQKLIASLIPMTSRDRIKAIRNQPRTMEEKRNLSRGGLTITTEDEGRAKAHLTWWKIVDKEKSKQTHRILQLNCCIQCLNSISRAYRRSKNSLSEILNSISLWQKTLKIIGGKFGTSVLSYFNFLRWLLKFNIFSFILNFSFIIIPQFTVAKKNTLQFTGLEFFTGVGYFRDTVMYYGFYTNSTIQHGNSGASYNMQLAYIFTIGACLTTCFFSLLFSMAKYFRNNFINPHIYSGGITKLIFCWDFTVTHEKAVKLKQKNLSTEIRENLSELRQENSKLTFNQLLTRFSAYMVAWVVSTGVAIACCAAVYYLAEYNLEFLKTHSNPGAVLLLPFVVSCINLAVPCIYSMFRLVERYEMPRHEVYVLLIRQVQWLVPVILALWVAKVGGLLEPRSSRPALATW

SEQ ID NO: 3597 - protein, 35 aa, Artificial Sequence
  Synthetic polypeptide
CLSLCPALIWPCHASTPCSGLWRGTRCHGTKSTFS

SEQ ID NO: 3598 - protein, 615 aa, Artificial Sequence
  Synthetic polypeptide
MAPAGVVTRAVRSGELPLTSMASAENEACAVRSVACPSQAWRLQKVLCGRCGAASCPSQTWRPRGAGSGGVRMGSRADGPRTSGHVTGKMAVFPWHSRNRNYKAEFASCRLEAVPLEFGDYHPLKPITVTESKTKKVNRKGSTSSTSSSSSSSVVDPLSSVLDGTDPLSMFAATADPAALAAAMDSSRRKRDRDDNSVVGSDFEPWTNKRGEILARYTTTEKLSINLFMGSEKGKAGTATLAMSEKVRTRLEELDDFEEGSQKELLNLTQQDYVNRIEELNQSLKDAWASDQKVKALKIVIQCSKLLSDTSVIQFYPSKFVLITDILDTFGKLVYERIFSMCVDSRSVLPDHFSPENANDTAKETCLNWFFKIASIRELIPRFYVEASILKCNKFLSKTGISECLPRLTCMIRGIGDPLVSVYARAYLCRVGMEVAPHLKETLNKNFFDFLLTFKQIHGDTVQNQLVVQGVELPSYLPLYPPAMDWIFQCISYHAPEALLTEMMERCKKLGNNALLLNSVMSAFRAEFIATRSMDFIGMIKECDESGFPKHLLFRSLGLNLALADPPESDRLQILNEAWKVITKLKNPQDYINCAEVWVEYTCKHFTDLGRRCRL

SEQ ID NO: 3599 - protein, 548 aa, Artificial Sequence
  Synthetic polypeptide
MAPAGVVTRAVRSGELPLTSMASAENEACAVRSVACPSQAWRLQKVLCGRCGAASCPSQTWRPRGAGSGGVRMGSRADGPRTSGHVTGKMAVFPWHSRNRNYKAEFASCRLEAVPLEFGDYHPLKPITVTESKTKKVNRKGSTSSTSSSSSSSVVDPLSSVLDGTDPLSMFAATADPAALAAAMDSSRRKRDRDDNSVVGSDFEPWTNKRGEILARYTTTEKLSINLFMGSEKGKAGTATLAMSEKVRTRLEELDDFEEGSQKELLNLTQQDYVNRIEELNQSLKDAWASDQKVKALKIVIQCSKLLSDTSVIQFYPSKFVLITDILDTFGKLVYERIFSMCVDSRSVLPDHFSPENANDTAKETCLNWFFKIASIRELIPRFYVEASILKCNKFLSKTGISECLPRLTCMIRGIGDPLVSVYARAYLCRALLTEMMERCKKLGNNALLLNSVMSAFRAEFIATRSMDFIGMIKECDESGFPKHLLFRSLGLNLALADPPESDRLQILNEAWKVITKLKNPQDYINCAEVWVEYTCKHFTDLGRRCRL

SEQ ID NO: 3600 - protein, 459 aa, Artificial Sequence
  Synthetic polypeptide
MAVFPWHSRNRNYKAEFASCRLEAVPLEFGDYHPLKPITVTESKTKKVNRKGSTSSTSSSSSSSVVDPLSSVLDGTDPLSMFAATADPAALAAAMDSSRRKRDRDDNSVVGSDFEPWTNKRGEILARYTTTEKLSINLFMGSEKGKAGTATLAMSEKVRTRLEELDDFEEGSQKELLNLTQQDYVNRIEELNQSLKDAWASDQKVKALKIVIQCSKLLSDTSVIQFYPSKFVLITDILDTFGKLVYERIFSMCVDSRSVLPDHFSPENANDTAKETCLNWFFKIASIRELIPRFYVEASILKCNKFLSKTGISECLPRLTCMIRGIGDPLVSVYARAYLCRALLTEMMERCKKLGNNALLLNSVMSAFRAEFIATRSMDFIGMIKECDESGFPKHLLFRSLGLNLALADPPESDRLQILNEAWKVITKLKNPQDYINCAEVWVEYTCKHFTDLGRRCRL

SEQ ID NO: 3601 - protein, 526 aa, Artificial Sequence
  Synthetic polypeptide
MAVFPWHSRNRNYKAEFASCRLEAVPLEFGDYHPLKPITVTESKTKKVNRKGSTSSTSSSSSSSVVDPLSSVLDGTDPLSMFAATADPAALAAAMDSSRRKRDRDDNSVVGSDFEPWTNKRGEILARYTTTEKLSINLFMGSEKGKAGTATLAMSEKVRTRLEELDDFEEGSQKELLNLTQQDYVNRIEELNQSLKDAWASDQKVKALKIVIQCSKLLSDTSVIQFYPSKFVLITDILDTFGKLVYERIFSMCVDSRSVLPDHFSPENANDTAKETCLNWFFKIASIRELIPRFYVEASILKCNKFLSKTGISECLPRLTCMIRGIGDPLVSVYARAYLCRVGMEVAPHLKETLNKNFFDFLLTFKQIHGDTVQNQLVVQGVELPSYLPLYPPAMDWIFQCISYHAPEALLTEMMERCKKLGNNALLLNSVMSAFRAEFIATRSMDFIGMIKECDESGFPKHLLFRSLGLNLALADPPESDRLQILNEAWKVITKLKNPQDYINCAEVWVEYTCKHFTDLGRRCRL

SEQ ID NO: 3602 - protein, 275 aa, Artificial Sequence
  Synthetic polypeptide
MCVDSRSVLPDHFSPENANDTAKETCLNWFFKIASIRELIPRFYVEASILKCNKFLSKTGISECLPRLTCMIRGIGDPLVSVYARAYLCRVGMEVAPHLKETLNKNFFDFLLTFKQIHGDTVQNQLVVQGVELPSYLPLYPPAMDWIFQCISYHAPEALLTEMMERCKKLGNNALLLNSVMSAFRAEFIATRSMDFIGMIKECDESGFPKHLLFRSLGLNLALADPPESDRLQILNEAWKVITKLKNPQDYINCAEVWVEYTCKHFTDLGRRCRL

SEQ ID NO: 3603 - protein, 376 aa, Artificial Sequence
  Synthetic polypeptide
MPPLGVLVHEKSHLCDVNSFCLGKAGTATLAMSEKVRTRLEELDDFEEGSQKELLNLTQQDYVNRIEELNQSLKDAWASDQKVKALKIVIQAELVYERIFSMCVDSRSVLPDHFSPENANDTAKETCLNWFFKIASIRELIPRFYVEASILKCNKFLSKTGISECLPRLTCMIRGIGDPLVSVYARAYLCRVGMEVAPHLKETLNKNFFDFLLTFKQIHGDTVQNQLVVQGVELPSYLPLYPPAMDWIFQCISYHAPEALLTEMMERCKKLGNNALLLNSVMSAFRAEFIATRSMDFIGMIKECDESGFPKHLLFRSLGLNLALADPPESDRLQILNEAWKVITKLKNPQDYINCAEVWVEYTCKHFTDLGRRCRL

SEQ ID NO: 3604 - protein, 231 aa, Artificial Sequence
  Synthetic polypeptide
MAKPTSKDSGLKEKFKILLGLGTPRPNPRSAEGKQTEFIITAEILRELSMECGLNNRIRMIGQICEVAKTKKFEEHAVEALWKAVADLLQPERPLEARHAVLALLKAIVQGQGERLGVLRALFFKVIKDYPSNEDLHERLEVFKALTDNGRHITYLEEELADFVLQWMDVGLSSEFLLVLVNLVKFNSCYLDEYIARMVQMLHELCLTHAEHPAPRAVAGAQQAPECLLGG

SEQ ID NO: 3605 - protein, 182 aa, Artificial Sequence
  Synthetic polypeptide
MECGLNNRIRMIGQICEVAKTKKFEEHAVEALWKAVADLLQPERPLEARHAVLALLKAIVQGQGERLGVLRALFFKVIKDYPSNEDLHERLEVFKALTDNGRHITYLEEELADFVLQWMDVGLSSEFLLVLVNLVKFNSCYLDEYIARMVQMLHELCLTHAEHPAPRAVAGAQQAPECLLGG

SEQ ID NO: 3606 - protein, 194 aa, Artificial Sequence
  Synthetic polypeptide
MAKPTSKDSGLKEKFKILLGLGTPRPNPRSAEGKQTEFIITAEILRELSMECGLNNRIRMIGQICEVAKTKKFEEGERLGVLRALFFKVIKDYPSNEDLHERLEVFKALTDNGRHITYLEEELADFVLQWMDVGLSSEFLLVLVNLVKFNSCYLDEYIARMVQMLHELCLTHAEHPAPRAVAGAQQAPECLLGG

SEQ ID NO: 3607 - protein, 242 aa, Artificial Sequence
  Synthetic polypeptide
MEGFSGASWSTMAKPTSKDSGLKEKFKILLGLGTPRPNPRSAEGKQTEFIITAEILRELSMECGLNNRIRMIGQICEVAKTKKFEEHAVEALWKAVADLLQPERPLEARHAVLALLKAIVQGQGERLGVLRALFFKVIKDYPSNEDLHERLEVFKALTDNGRHITYLEEELADFVLQWMDVGLSSEFLLVLVNLVKFNSCYLDEYIARMVQMLHELCLTHAEHPAPRAVAGAQQAPECLLGG

SEQ ID NO: 3608 - protein, 7 aa, Artificial Sequence
  Synthetic polypeptide
RPSCRGR

SEQ ID NO: 3609 - protein, 26 aa, Artificial Sequence
  Synthetic polypeptide
MKLLTRAGSFSPGVAACTCNPSYLGG

SEQ ID NO: 3610 - protein, 39 aa, Artificial Sequence
  Synthetic polypeptide
MKLLTRAGSFSAWQHVPVIPATWEAETGESLESRRQTLQ

SEQ ID NO: 3611 - protein, 51 aa, Artificial Sequence
  Synthetic polypeptide
MKLLTRAGSFSLLGRLRQENRLNPGGRHCNDPRSHCCTPAWDTEHDSNSTK

SEQ ID NO: 3612 - protein, 228 aa, Artificial Sequence
  Synthetic polypeptide
MKLLTRAGSFSRFYSLKVAPKVKATAAPAGAPPQPQDLEFTKLPNGLVIASLENYSPVSRIGLFIKAGSRYEDFSNLGTTHLLRLTSSLTTKGASSFKITRGIEAVGGKLSVTATRENMAYTVECLRGDVDILMEFLLNVTTAPEFRRWEVADLQPQLKIDKAVAFQNPQTHVIENLHAAAYRNALANPLYCPDYRIGKVTSEEAKGNSKEIGARILGAMAASIEKHQ

SEQ ID NO: 3613 - protein, 200 aa, Artificial Sequence
  Synthetic polypeptide
MKLLTRAGSFSFTKLPNGLVIASLENYSPVSRIGLFIKAGSRYEDFSNLGTTHLLRLTSSLTTKGASSFKITRGIEAVGGKLSVTATRENMAYTVECLRGDVDILMEFLLNVTTAPEFRRWEVADLQPQLKIDKAVAFQNPQTHVIENLHAAAYRNALANPLYCPDYRIGKVTSEEAKGNSKEIGARILGAMAASIEKHQ

SEQ ID NO: 3614 - protein, 129 aa, Artificial Sequence
  Synthetic polypeptide
MADEDLIFRLEGVDGGQSPRAGHDGDSDGDSDDEEGYFICPITDDPSSNQNVNSKVNKYYSNLTKSERYSSSGSPANSFHFKSQLLRRLRQKNPLNPGGRGCGEPRSHHCTPAWATEETPSQKQKTKNK

SEQ ID NO: 3615 - protein, 11 aa, Artificial Sequence
  Synthetic polypeptide
TIAAAKGSRLR

SEQ ID NO: 3616 - protein, 182 aa, Artificial Sequence
  Synthetic polypeptide
MANEEDDPVVQEIDVYLAKSLAEKLYLFQYPVRPASMTYDDIPHLSAKIKPKQQKVELEMAIDTLNPNYCRSKGEQIALNVDGACADETSTYSSKLMDKQTFCSSQTTSNTSRYAAALYRQGSIYPKEMKTCVHTKPYTVVHSSIFMIAKKWKQPRCPSAGFMEKQNVVHSRNGMLFDHGKE

SEQ ID NO: 3617 - protein, 188 aa, Artificial Sequence
  Synthetic polypeptide
MELTFYCRRQTTPEQIDQIDVYLAKSLAEKLYLFQYPVRPASMTYDDIPHLSAKIKPKQQKVELEMAIDTLNPNYCRSKGEQIALNVDGACADETSTYSSKLMDKQTFCSSQTTSNTSRYAAALYRQGSIYPKEMKTCVHTKPYTVVHSSIFMIAKKWKQPRCPSAGFMEKQNVVHSRNGMLFDHGKE

SEQ ID NO: 3618 - protein, 146 aa, Artificial Sequence
  Synthetic polypeptide
MANEEDDPVVQEIKPKQQKVELEMAIDTLNPNYCRSKGEQIALNVDGACADETSTYSSKLMDKQTFCSSQTTSNTSRYAAALYRQGSIYPKEMKTCVHTKPYTVVHSSIFMIAKKWKQPRCPSAGFMEKQNVVHSRNGMLFDHGKE

SEQ ID NO: 3619 - protein, 146 aa, Artificial Sequence
  Synthetic polypeptide
MTYDDIPHLSAKIKPKQQKVELEMAIDTLNPNYCRSKGEQIALNVDGACADETSTYSSKLMDKQTFCSSQTTSNTSRYAAALYRQGSIYPKEMKTCVHTKPYTVVHSSIFMIAKKWKQPRCPSAGFMEKQNVVHSRNGMLFDHGKE

SEQ ID NO: 3620 - protein, 117 aa, Artificial Sequence
  Synthetic polypeptide
MAALLRRLLQRERPSAASGRPVGRREANLGTDAGVAVRVRFAPSPTGFLHLGGLRTALYNYIFAKKYQGSFILRLEDTDQTRVVPGAAENIEDMLEWAVMPLHSSLERQCETLSQKK

SEQ ID NO: 3621 - protein, 57 aa, Artificial Sequence
  Synthetic polypeptide
MELGELLYNKSEYIETASGNKVSRQSVLCGSQNIVLNGKSSQGNLEQKEQSCRYHAT

SEQ ID NO: 3622 - protein, 84 aa, Artificial Sequence
  Synthetic polypeptide
MELGELLYNKSEYIETASGNKVSRQSVLCGSQNIVLNGKTIVMNDCIIRGDLANVRVGRHCVVKSRSVIRPPFKKFSKGYRNYI

SEQ ID NO: 3623 - protein, 42 aa, Artificial Sequence
  Synthetic polypeptide
MNDCIIRGDLANVRVGRHCVVKSRSVIRPPFKKFSKGYRNYI

SEQ ID NO: 3624 - protein, 657 aa, Artificial Sequence
  Synthetic polypeptide
MASAVRGSRPWPRLGLQLQFAALLLGTLSPQVHTLRPENLLLVSTLDGSLHALSKQTGDLKWTLRDDPVIEGPMYVTEMAFLSDPADGSLYILGTQKQQGLMKLPFTIPELVHASPCRSSDGVFYTGRKQDAWFVVDPESGETQMTLTTEGPSTPRLYIGRTQYTVTMHDPRAPALRWNTTYRRYSAPPMDGSPGKYMSHLASCGMGLLLTVDPGSGTVLWTQDLGVPVMGVYTWHQDGLRQLPHLTLARDTLHFLALRWGHIRLPASGPRDTATLFSTLDTQLLMTLYVGKDETGFYVSKALVHTGVALVPRGLTLAPADGPTTDEVTLQVSGEREGSPSTAVRYPSGSVALPSQWLLIGHHELPPVLHTTMLRVHPTLGSGTAETRPPENTQAPAFFLEQQPQVVEKQQETPLAPADFAHISQDAQSLHSGASRRSQKRLQSPSKQAQPLDDPEAEQLTVVGKISFNPKDVLGRGAGGTFVFRGQFEGRAVAVKRLLRECFGLVRREVQLLQESDRHPNVLRYFCTERGPQFHYIALELCRASLQEYVENPDLDRGGLEPEVVLQQLMSGLAHLHSLHIVHRDLKPGNILITGPDSQGLGRVVLSDFGLCKKLPAGRCSFSLHSGIPGTEGWMAPELLQLLPPDSPDRTTPNTKN

SEQ ID NO: 3625 - protein, 757 aa, Artificial Sequence
  Synthetic polypeptide
MRRAGIGEDSRLGLQAQPGAEPSPGRAGTERSLGGTQGPGQPCSCPGAMASAVRGSRPWPRLGLQLQFAALLLGTLSPQVHTLRPENLLLVSTLDGSLHALSKQTGDLKWTLRDDPVIEGPMYVTEMAFLSDPADGSLYILGTQKQQGLMKLPFTIPELVHASPCRSSDGVFYTGRKQDAWFVVDPESGETQMTLTTEGPSTPRLYIGRTQYTVTMHDPRAPALRWNTTYRRYSAPPMDGSPGKYMSHLASCGMGLLLTVDPGSGTVLWTQDLGVPVMGVYTWHQDGLRQLPHLTLARDTLHFLALRWGHIRLPASGPRDTATLFSTLDTQLLMTLYVGKDETGFYVSKALVHTGVALVPRGLTLAPADGPTTDEVTLQVSGEREGSPSTAVRYPSGSVALPSQWLLIGHHELPPVLHTTMLRVHPTLGSGTAETRPPENTQAPAFFLELLSLSREKLWDSELHPEEKTPDSYLGLGPQDLLAASLTAVLLGGWILFVMRQQQPQVVEKQQETPLAPADFAHISQDAQSLHSGASRRSQKRLQSPSKQAQPLDDPEAEQLTVVGKISFNPKDVLGRGAGGTFVFRGQFEGRAVAVKRLLRECFGLVRREVQLLQESDRHPNVLRYFCTERGPQFHYIALELCRASLQEYVENPDLDRGGLEPEVVLQQLMSGLAHLHSLHIVHRDLKPGNILITGPDSQGLGRVVLSDFGLCKKLPAGRCSFSLHSGIPGTEGWMAPELLQLLPPDSPDRTTPNTKN

SEQ ID NO: 3626 - protein, 20 aa, Artificial Sequence
  Synthetic polypeptide
ELLQLLPPDSPDRTTPNTKN

SEQ ID NO: 3627 - protein, 34 aa, Artificial Sequence
  Synthetic polypeptide
MASAVRGSRPWPRLGLQLQFAALLLGTLSPQPGQ

SEQ ID NO: 3628 - protein, 82 aa, Artificial Sequence
  Synthetic polypeptide
MRRAGIGEDSRLGLQAQPGAEPSPGRAGTERSLGGTQGPGQPCSCPGAMASAVRGSRPWPRLGLQLQFAALLLGTLSPQPGQ

SEQ ID NO: 3629 - protein, 70 aa, Artificial Sequence
  Synthetic polypeptide
MADPAAGPPPSEGEESTVRFARKGALRQKNVHEVKNHKFTARFFKQPTFCSHCTDFIWGFGKQGFQCQAM

SEQ ID NO: 3630 - protein, 263 aa, Artificial Sequence
  Synthetic polypeptide
MARWPAPPPPPPPPPPLAAPPPPGASAKGPPARKLLFMCTLSLSVTYLCYSLLGGSGSLQFPLALQESPGAAAEPPPSPPPPSLLPTPVRLGAPSQPPAPPPLDNASHGEPPEPPEQPAAPGTDGWGLPSGGGGAQDAWLRTPLAPSEMITAQSALPEREAQESSTTDEDLAGRRAANGSSERGGAVSTPDYGEKKLPQALIIGVKKGGTRALLEAIRVHPDVRAVGVEPHFFDRNYEKGLEWYSLGNGSEIPYQKRRRRERR

SEQ ID NO: 3631 - protein, 156 aa, Artificial Sequence
  Synthetic polypeptide
MGWLCSGLLFPVSCLVLLQVASSGNMKVLQEPTCVSDYMSISTCEWKMNGPTNCSTELRLLYQLVFLLSEAHTCIPENNGGAGCVCHLLMDDVVSADNYTLDLWAGQQLLWKGSFKPSEHGDQVLKQMNQNKEKYSVNHHKVQRCGQRCEGCSCKS

SEQ ID NO: 3632 - protein, 141 aa, Artificial Sequence
  Synthetic polypeptide
MQKDARREGNMKVLQEPTCVSDYMSISTCEWKMNGPTNCSTELRLLYQLVFLLSEAHTCIPENNGGAGCVCHLLMDDVVSADNYTLDLWAGQQLLWKGSFKPSEHGDQVLKQMNQNKEKYSVNHHKVQRCGQRCEGCSCKS

SEQ ID NO: 3633 - protein, 8 aa, Artificial Sequence
  Synthetic polypeptide
VRVPPAHG

SEQ ID NO: 3634 - protein, 289 aa, Artificial Sequence
  Synthetic polypeptide
MPRGWAAPLLLLLLQGGWGCPDLVCYTDYLQTVICILEMWNLHPSTLTLTWQDQYEELKDEATSCSLHRSAHNATHATYTCHMDVFHFMADDIFSVNITDQSGNYSQECGSFLLAESIKPAPPFNVTVTFSGQYNISWRSDYEDPAFYMLKGKLQYELQYRNRGDPWAVSPRRKLISVDSRSVSLLPLEFRKDSSYELQVRAGPMPGSSYQGTWSEWSDPVIFQTQSEELKEGWNPHLLLLLLLVIVFIPAFWSLKTHPLWRLWKKIWAVPSPERFFMPLYKGCSGDFK

SEQ ID NO: 3635 - protein, 30 aa, Artificial Sequence
  Synthetic polypeptide
MDGQTLRKAERSWSCSREKKEPVTKSCAFT

SEQ ID NO: 3636 - protein, 26 aa, Artificial Sequence
  Synthetic polypeptide
LCERPREAGPAHERKRSLSPSPVPSP

SEQ ID NO: 3637 - protein, 21 aa, Artificial Sequence
  Synthetic polypeptide
REAGPAHERKRSLSPSPVPSP

SEQ ID NO: 3638 - protein, 319 aa, Artificial Sequence
  Synthetic polypeptide
MDGQTLRKAERSWSCSREKKEGYAKDMVTDFDEKHDEYLILLQQRNRILKHLKSKDPVQLRLEHLEQGFSVYVNGANSELKSSPRKAIHSDFSRSASHTEGTHDYGRRTLFREAEEALRRSSRTAPSKVQRRGWHQKSVQIRTEAGPRLHIEPPVDYSDDFELCGDVTLQANNTSEDRPQELRRSLELSVNLQRKQKDCSSDEYDSIEEDILSEPEPEDPALVGHPRHDRPPSSGDWTQKDVHGEQETEGRSSPGPDTLVVLEFNPASKSHKRERNLSAKRKDNAEVFVPTKPEPNLTPQAPAVFPDQERMCSRRRRET

SEQ ID NO: 3639 - protein, 2777 aa, Artificial Sequence
  Synthetic polypeptide
MYNGIGLPTPRGSGTNGYVQRNLSLVRGRRGERPDYKGEEELRRLEAALVKRPNPDILDHERKRRVELRCLELEEMMEEQGYEEQQIQEKVATFRLMLLEKDVNPGGKEETPGQRPAVTETHQLAELNEKKNERLRAAFGISDSYVDGSSFDPQRRAREAKQPAPEPPKPYSLVRESSSSRSPTPKQKKKKKKKDRGRRSESSSPRRERKKSSKKKKHRSESESKKRKHRSPTPKSKRKSKDKKRKRSRSTTPAPKSRRAHRSTSADSASSSDTSRSRSRSAAAKTHTTALAGRSPSPASGRRGEGDAPFSEPGTTSTQRPSSPETATKQPSSPYEDKDKDKKEKSATRPSPSPERSSTGPEPPAPTPLLAERHGGSPQPLATTPLSQEPVNPPSEASPTRDRSPPKSPEKLPQSSSSESSPPSPQPTKVSRHASSSPESPKPAPAPGSHREISSSPTSKNRSHGRAKRDKSHSHTPSRRMGRSRSPATAKRGRSRSRTPTKRGHSRSRSPQWRRSRSAQRWGRSRSPQRRGRSRSPQRPGWSRSRNTQRRGRSRSARRGRSHSRSPATRGRSRSRTPARRGRSRSRTPARRRSRSRTPTRRRSRSRTPARRGRSRSRTPARRRSRTRSPVRRRSRSRSPARRSGRSRSRTPARRGRSRSRTPARRGRSRSRTPARRSGRSRSRTPARRGRSRSRTPRRGRSRSRSLVRRGRSHSRTPQRRGRSGSSSERKNKSRTSQRRSRSNSSPEMKKSRISSRRSRSLSSPRSKAKSRLSLRRSLSGSSPCPKQKSQTPPRRSRSGSSQPKAKSRTPPRRSRSSSSPPPKQKSKTPSRQSHSSSSPHPKVKSGTPPRQGSITSPQANEQSVTPQRRSCFESSPDPELKSRTPSRHSCSGSSPPRVKSSTPPRQSPSRSSSPQPKVKAIISPRQRSHSGSSSPSPSRVTSRTTPRRSRSVSPCSNVESRLLPRYSHSGSSSPDTKVKPETPPRQSHSGSISPYPKVKAQTPPGPSLSGSKSPCPQEKSKDSLVQSCPGSLSLCAGVKSSTPPGESYFGVSSLQLKGQSQTSPDHRSDTSSPEVRQSHSESPSLQSKSQTSPKGGRSRSSSPVTELASRSPIRQDRGEFSASPMLKSGMSPEQSRFQSDSSSYPTVDSNSLLGQSRLETAESKEKMALPPQEDATASPPRQKDKFSPFPVQDRPESSLVFKDTLRTPPRERSGAGSSPETKEQNSALPTSSQDEELMEVVEKSEEPAGQILSHLSSELKEMSTSNFESSPEVEERPAVSLTLDQSQSQASLEAVEVPSMASSWGGPHFSPEHKELSNSPLRENSFGSPLEFRNSGPLGTEMNTGFSSEVKEDLNGPFLNQLETDPSLDMKEQSTRSSGHSSSELSPDAVEKAGMSSNQSISSPVLDAVPRTPSRERSSSASSPEMKDGLPRTPSRRSRSGSSPGLRDGSGTPSRHSLSGSSPGMKDIPRTPSRGRSECDSSPEPKALPQTPRPRSRSPSSPELNNKCLTPQRERSGSESSVDQKTVARTPLGQRSRSGSSQELDVKPSASPQERSESDSSPDSKAKTRTPLRQRSRSGSSPEVDSKSRLSPRRSRSGSSPEVKDKPRAAPRAQSGSDSSPEPKAPAPRALPRRSRSGSSSKGRGPSPEGSSSTESSPEHPPKSRTARRGSRSSPEPKTKSRTPPRRRSSRSSPELTRKARLSRRSRSASSSPETRSRTPPRHRRSPSVSSPEPAEKSRSSRRRRSASSPRTKTTSRRGRSPSPKPRGLQRSRSRSRREKTRTTRRRDRSGSSQSTSRRRQRSRSRSRVTRRRRGGSGYHSRSPARQESSRTSSRRRRGRSRTPPTSRKRSRSRTSPAPWKRSRSRASPATHRRSRSRTPLISRRRSRSRTSPVSRRRSRSRTSVTRRRSRSRASPVSRRRSRSRTPPVTRRRSRSRTPTTRRRSRSRTPPVTRRRSRSRTPPVTRRRSRSRTSPITRRRSRSRTSPVTRRRSRSRTSPVTRRRSRSRTSPVTRRRSRSRTPPAIRRRSRSRTPLLPRKRSRSRSPLAIRRRSRSRTPRTARGKRSLTRSPPAIRRRSASGSSSDRSRSATPPATRNHSGSRTPPVALNSSRMSCFSRPSMSPTPLDRCRSPGMLEPLGSSRTPMSVLQQAGGSMMDGPGPRIPDHQRTSVPENHAQSRIALALTAISLGTARPPPSMSAAGLAARMSQVPAPVPLMSLRTAPAANLASRIPAASAAAMNLASARTPAIPTAVNLADSRTPAAAAAMNLASPRTAVAPSAVNLADPRTPTAPAVNLAGARTPAALAALSLTGSGTPPTAANYPSSSRTPQAPASANLVGPRSAHATAPVNIAGSRTAAALAPASLTSARMAPALSGANLTSPRVPLSAYERVSGRTSPPLLDRARSRTPPSAPSQSRMTSERAPSPSSRMGQAPSQSLLPPAQDQPRSPVPSAFSDQSRCLIAQTTPVAGSQSLSSGAVATTTSSAGDHNGMLSVPAPGVPHSDVGEPPASTGAQQPSALAALQPAKERRSSSSSSSSSSSSSSSSSSSSSSSSSGSSSSDSEGSSLPVQPEVALKRVPSPTPAPKEAVREGRPPEPTPAKRKRRSSSSSSSSSSSSSSSSSSSSSSSSSSSSSSSSSSSSSSSSSSPSPAKPGPQALPKPASPKKPPPGERSLRRAHAFGHAVPSAWNFLVRLVNSSFCKTPLKTAPSRRLPCPFPALPHVPLPWVPRATHIQPCFPHTGPCVPFFTTELLQGQGLSLSLHPPLHPVPAHWALGG

SEQ ID NO: 3640 - protein, 25 aa, Artificial Sequence
  Synthetic polypeptide
MLLQRPNCLNPYLLQLLAHSKPLVS

SEQ ID NO: 3641 - protein, 35 aa, Artificial Sequence
  Synthetic polypeptide
MGARGALLLALLLARAGLRKPESQEAAPLSDKRTQ

SEQ ID NO: 3642 - protein, 28 aa, Artificial Sequence
  Synthetic polypeptide
ARGAAAGAAAGSGWTQEAGVAGGGAVIR

SEQ ID NO: 3643 - protein, 53 aa, Artificial Sequence
  Synthetic polypeptide
AGRCCWRCCWLGLDSGSRSRRRRRRYQIRGHSEKMGVCSPGRSPHQQPHRSAP

SEQ ID NO: 3644 - protein, 49 aa, Artificial Sequence
  Synthetic polypeptide
CWRCCWLGLDSGSRSRRRRRRYQIRGHSEKMGVCSPGRSPHQQPHRSAP

SEQ ID NO: 3645 - protein, 90 aa, Artificial Sequence
  Synthetic polypeptide
MGAQGAQESIKAMWRVPGTTRRPVTGESPGMHRPEAMLLLLTLALLGGPTWAGKMYGPGGGKYFSTTEDYDHEITGLRVSVGLLLVKRLQ

SEQ ID NO: 3646 - protein, 65 aa, Artificial Sequence
  Synthetic polypeptide
GPGGPGEYKGDVEGARHNQTPSHRREPWDAPARGHAAAAHACPPGGPHLGREDVWPWRRQVFQHH

SEQ ID NO: 3647 - protein, 61 aa, Artificial Sequence
  Synthetic polypeptide
PDAQSQARALGCTGQRPCCCCSRLPSWGAPPGQGRCMALEEASISAPLKTTTMKSQGCGCL

SEQ ID NO: 3648 - protein, 60 aa, Artificial Sequence
  Synthetic polypeptide
MHRPEAMLLLLTLALLGGPTWAGKMYGPGGGKYFSTTEDYDHEITGLRVSVGLLLVKRLQ

SEQ ID NO: 3649 - protein, 165 aa, Artificial Sequence
  Synthetic polypeptide
MAAAAPVAADDDERRRRPGAALEDSRSQEGANGEAESGELSRLRAELAGALAEMETMKAVAEVSESTKAEAVAAVQRQCQEEVASLQAILKDSISSYEAQITALKQERQQQQQDCEEKERELGRLKQLLSRAYPLDSLEKQMEKGGQHLLGRIRRADVLGEEALN

SEQ ID NO: 3650 - protein, 94 aa, Artificial Sequence
  Synthetic polypeptide
MAAAAPVAADDDERRRRPGADSISSYEAQITALKQERQQQQQDCEEKERELGRLKQLLSRAYPLDSLEKQMEKGGQHLLGRIRRADVLGEEALN

SEQ ID NO: 3651 - protein, 112 aa, Artificial Sequence
  Synthetic polypeptide
METMKAVAEVSESTKAEAVAAVQRQCQEEVASLQAILKDSISSYEAQITALKQERQQQQQDCEEKERELGRLKQLLSRAYPLDSLEKQMEKGGQHLLGRIRRADVLGEEALN

SEQ ID NO: 3652 - protein, 155 aa, Artificial Sequence
  Synthetic polypeptide
PAIEGVGPVTALEDSRSQEGANGEAESGELSRLRAELAGALAEMETMKAVAEVSESTKAEAVAAVQRQCQEEVASLQAILKDSISSYEAQITALKQERQQQQQDCEEKERELGRLKQLLSRAYPLDSLEKQMEKGGQHLLGRIRRADVLGEEALN

SEQ ID NO: 3653 - protein, 24 aa, Artificial Sequence
  Synthetic polypeptide
MEKGGQHLLGRIRRADVLGEEALN

SEQ ID NO: 3654 - protein, 340 aa, Artificial Sequence
  Synthetic polypeptide
MPPPRLLFFLLFLTPMEVRPEEPLVVKVEEGDNAVLQCLKGTSDGPTQQLTWSRESPLKPFLKLSLGLPGLGIHMRPLAIWLFIFNVSQQMGGFYLCQPGPPSEKAWQPGWTVNVEGSGELFRWNVSDLGGLGCGLKNRSSEGPSSPSGKLMSPKLYVWAKDRPEIWEGEPPCLPPRDSLNQSLSQDLTMAPGSTLWLSCGVPPDSVSRGPLSWTHVHPKGPKSLLSLELKDDRPARDMWVMETGLLLPRATAQDAGKYYCHRGNLTMSFHLEITARPVLWHWLLRTGGWKVSAVTLAYLIFCLCSLVGILHLQRGVLCSVSTVSNTAQPQSPAPKLPPL

SEQ ID NO: 3655 - protein, 199 aa, Artificial Sequence
  Synthetic polypeptide
MAEPVGKRGRWSGGSGAGRGGRGGWGGRGRRPRAQRSPSRGTLDVVSVDLVTDSDEEILEVATARGAADEVEVEPPEPPGPVASRDNSNSDSEGEDRRPAGPPREPVRRRRRLVLDPGEAPLVPVYSGKVKSSLRLIPDDLSLLKLYPPGDEEEAELADSSGLYHEGSPSPGSPWKTKLRTKDKEEKKKTEFLHNGSCL

SEQ ID NO: 3656 - protein, 216 aa, Artificial Sequence
  Synthetic polypeptide
MEATAASWQVAVPVLGGASRPLGPRGAASLLRAPLQMEEAILVPCVLGLLLLPILAMLMALCVHCHRLPGSYDSTSSDSLYPRGIQFKRPHTVAPWPPAYPPVTSYPPLSQPDLLPIPRSPQPLGGSHRTPSSRRDSDGANSVASYENEEPACEDADEDEDDYHNPGYLVVLPDSTPATSTAAPSAPALSTPGIRDSAFSRAEVGRSSEPRRSRLR

SEQ ID NO: 3657 - protein, 179 aa, Artificial Sequence
  Synthetic polypeptide
MEEAILVPCVLGLLLLPILAMLMALCVHCHRLPGSYDSTSSDSLYPRGIQFKRPHTVAPWPPAYPPVTSYPPLSQPDLLPIPSPQPLGGSHRTPSSRRDSDGANSVASYENEEPACEDADEDEDDYHNPGYLVVLPDSTPATSTAAPSAPALSTPGIRDSAFSRAEVGRSSEPRRSRLR

SEQ ID NO: 3658 - protein, 180 aa, Artificial Sequence
  Synthetic polypeptide
MEEAILVPCVLGLLLLPILAMLMALCVHCHRLPGSYDSTSSDSLYPRGIQFKRPHTVAPWPPAYPPVTSYPPLSQPDLLPIPRSPQPLGGSHRTPSSRRDSDGANSVASYENEEPACEDADEDEDDYHNPGYLVVLPDSTPATSTAAPSAPALSTPGIRDSAFSRAEVGRSSEPRRSRLR

SEQ ID NO: 3659 - protein, 209 aa, Artificial Sequence
  Synthetic polypeptide
MEEAILVPCVLGLLLLPILAMLMALCVHCHRLPGSYDSTSSDSLYPRGIQFKRPHTVAPWPPAYPPVTSYPPLSQPDLLPIPRSPQPLGGSHRTPSSRRDSDGANSVASYENEGASGIRGAQAGWGVWGPSWTRLTPVSLPPEPACEDADEDEDDYHNPGYLVVLPDSTPATSTAAPSAPALSTPGIRDSAFSRAEVGRSSEPRRSRLR

SEQ ID NO: 3660 - protein, 199 aa, Artificial Sequence
  Synthetic polypeptide
MEEAILVPCVLGLLLLPILAMLMALCVHCHRLPGSYDSTSSDSLYPRGIQFKRPHTVAPWPPAYPPVTSYPPLSQPDLLPIPRSPQPRRDSDGANSVASYENEGASGIRGAQAGWGVWGPSWTRLTPVSLPPEPACEDADEDEDDYHNPGYLVVLPDSTPATSTAAPSAPALSTPGIRDSAFSRAEVGRSSEPRRSRLR

SEQ ID NO: 3661 - protein, 208 aa, Artificial Sequence
  Synthetic polypeptide
MEEAILVPCVLGLLLLPILAMLMALCVHCHRLPGSYDSTSSDSLYPRGIQFKRPHTVAPWPPAYPPVTSYPPLSQPDLLPIPSPQPLGGSHRTPSSRRDSDGANSVASYENEGASGIRGAQAGWGVWGPSWTRLTPVSLPPEPACEDADEDEDDYHNPGYLVVLPDSTPATSTAAPSAPALSTPGIRDSAFSRAEVGRSSEPRRSRLR

SEQ ID NO: 3662 - protein, 100 aa, Artificial Sequence
  Synthetic polypeptide
IPRSPQPLGGSHRTPSSRRDSDGANSVASYENEEPACEDADEDEDDYHNPGYLVVLPDSTPATSTAAPSAPALSTPGIRDSAFSRAEVGRSSEPRRSRLR

SEQ ID NO: 3663 - protein, 9 aa, Artificial Sequence
  Synthetic polypeptide
GSGSCKAAR

SEQ ID NO: 3664 - protein, 757 aa, Artificial Sequence
  Synthetic polypeptide
MKVIVIHRKMFQRAQELRRRAEDYHKCKIPPSARKALCNWVRMAAAEHRHSSGLPYWPYLTAETLKNRMGHQPPPPTQQHSITDNSLSLKTPPECVLTPLPPSADDNLKTPPECVLTPLPPSADDNLKTPPECLLTPLPPSADDNLKTPPECLLTPLPPSADDNLKTPPECLLTPLPPSAPPSAPPSADDNLKTRAECLLHPLPPSADDNLKTPSERQLTPLPPSAPPSADDNIKTPAERLRGPLPPSADDNLKTPSERQLTPLPPSAPPSADDNIKTPAFHPQRMIISRHLPSVSSLPFHPQLHSQQMIISRYLLSVCGFRFHHQPMIISRHLPSVSSLPFHPQLHPQQMIISRHLPSVCGGRFHPQRMIISRHLPSVSSLPFHPQLHPQQMIISRHLPSVCGGRFHPQRMIISRHLPSVSSLPFHPQLHPQQMIISRHLPSVCGGRFHPQRMIISRHLPSVSSLPFHPQLHPQQMIISRHLPSVCGERLRGPLPPSADDNLKTPSERQLTPLPPSAPPSADDNIKTPAERLRGPLPPSADDNLKTPSERQLTPLPPSAPPSADDNIKTPAERLRGPLPPSADDNLKTPSERQLTPLPPSAPPSADDNIKTPAERLRGPLPPSADDNLKTPPLATQEAEAEKPRKPKRQRAAEMEPPPEPKRRRVGDVEPSRKPKRRRAADVEPSSPEPKRRRVGDVEPSRKPKRRRAADVEPSSPEPKRRRVGDVEPSRKPKRRRAADAEKPRKPKRQRAAEMEP

SEQ ID NO: 3665 - protein, 729 aa, Artificial Sequence
  Synthetic polypeptide
MKVIVIHRKMFQRAQELRRRAEDYHKCKIPPSARKALCNWVRMAAAEHRHSSGLPYWPYLTAETLKNRMGHQPPPPTQQHSITDNSLSLKTPPECVLTPLPPSADDNLKTPPECVLTPLPPSADDNLKTPPECLLTPLPPSADDNLKTPPECLLTPLPPSADDNLKTPPECLLTPLPPSAPPSAPPSADDNLKTRAECLLHPLPPSADDNLKTPSERQLTPLPPSAPPSADDNIKTPAERLRGPLPPSADDNLKTPSERQLTPLPPSAPPSADDNIKTPAFHPQRMIISRHLPSVSSLPFHPQLHSQQMIISRYLLSVCGFRFHHQPMIISRHLPSVSSLPFHPQLHPQQMIISRHLPSVCGGRFHPQRMIISRHLPSVSSLPFHPQLHPQQMIISRHLPSVCGGRFHPQRMIISRHLPSVSSLPFHPQLHPQQMIISRHLPSVCGGRFHPQRMIISRHLPSVSSLPFHPQLHPQQMIISRHLPSVCGERLRGPLPPSADDNLKTPSERQLTPLPPSAPPSADDNIKTPAERLRGPLPPSADDNLKTPSERQLTPLPPSAPPSADDNIKTPAERLRGPLPPSADDNLKTPSERQLTPLPPSAPPSADDNIKTPAERLRGPLPPSADDNLKTPPLATQEAEAEKPRKPKRQRAAEMEPPPEPKRRRVGDVEPSRKPKRRRAADVEPSSPEPKRRRVGDVEPSRKPKRRRAADVEPSSPEPKRRRVGDMEP

SEQ ID NO: 3666 - protein, 700 aa, Artificial Sequence
  Synthetic polypeptide
MKVIVIHRKMFQRAQELRRRAEDYHKCKIPPSARKALCNWVRMAAAEHRHSSGLPYWPYLTAETLKNRMGHQPPPPTQQHSITDNSLSLKTPPECVLTPLPPSADDNLKTPPECVLTPLPPSADDNLKTPPECLLTPLPPSADDNLKTPPECLLTPLPPSADDNLKTPPECLLTPLPPSAPPSAPPSADDNLKTRAECLLHPLPPSADDNLKTPSERQLTPLPPSAPPSADDNIKTPAERLRGPLPPSADDNLKTPSERQLTPLPPSAPPSADDNIKTPAFHPQRMIISRHLPSVSSLPFHPQLHSQQMIISRYLLSVCGFRFHHQPMIISRHLPSVSSLPFHPQLHPQQMIISRHLPSVCGGRFHPQRMIISRHLPSVSSLPFHPQLHPQQMIISRHLPSVCGGRFHPQRMIISRHLPSVSSLPFHPQLHPQQMIISRHLPSVCGGRFHPQRMIISRHLPSVSSLPFHPQLHPQQMIISRHLPSVCGERLRGPLPPSADDNLKTPSERQLTPLPPSAPPSADDNIKTPAERLRGPLPPSADDNLKTPSERQLTPLPPSAPPSADDNIKTPAERLRGPLPPSADDNLKTPSERQLTPLPPSAPPSADDNIKTPAERLRGPLPPSADDNLKTPPLATQEAEAEKPRKPKRQRAAEMEPPPEPKRRRVGDVEPSRKPKRRRAADVEPSSPEPKRRRVGDMEP

SEQ ID NO: 3667 - protein, 714 aa, Artificial Sequence
  Synthetic polypeptide
MKVIVIHRKMFQRAQELRRRAEDYHKCKIPPSARKALCNWVRMAAAEHRHSSGLPYWPYLTAETLKNRMGHQPPPPTQQHSITDNSLSLKTPPECVLTPLPPSADDNLKTPPECVLTPLPPSADDNLKTPPECLLTPLPPSADDNLKTPPECLLTPLPPSADDNLKTPPECLLTPLPPSAPPSAPPSADDNLKTRAECLLHPLPPSADDNLKTPSERQLTPLPPSAPPSADDNIKTPAERLRGPLPPSADDNLKTPSERQLTPLPPSAPPSADDNIKTPAFHPQRMIISRHLPSVSSLPFHPQLHSQQMIISRYLLSVCGFRFHHQPMIISRHLPSVSSLPFHPQLHPQQMIISRHLPSVCGGRFHPQRMIISRHLPSVSSLPFHPQLHPQQMIISRHLPSVCGGRFHPQRMIISRHLPSVSSLPFHPQLHPQQMIISRHLPSVCGGRFHPQRMIISRHLPSVSSLPFHPQLHPQQMIISRHLPSVCGERLRGPLPPSADDNLKTPSERQLTPLPPSAPPSADDNIKTPAERLRGPLPPSADDNLKTPSERQLTPLPPSAPPSADDNIKTPAERLRGPLPPSADDNLKTPSERQLTPLPPSAPPSADDNIKTPAERLRGPLPPSADDNLKTPPLATQEAEAEKPRKPKRQRAAEMEPPPEPKRRRVGDVEPSRKPKRRRAADVEPSSPEPKRRREAEAEKPRKPKRQRAAEMEP

SEQ ID NO: 3668 - protein, 685 aa, Artificial Sequence
  Synthetic polypeptide
MKVIVIHRKMFQRAQELRRRAEDYHKCKIPPSARKALCNWVRMAAAEHRHSSGLPYWPYLTAETLKNRMGHQPPPPTQQHSITDNSLSLKTPPECVLTPLPPSADDNLKTPPECVLTPLPPSADDNLKTPPECLLTPLPPSADDNLKTPPECLLTPLPPSADDNLKTPPECLLTPLPPSAPPSAPPSADDNLKTRAECLLHPLPPSADDNLKTPSERQLTPLPPSAPPSADDNIKTPAERLRGPLPPSADDNLKTPSERQLTPLPPSAPPSADDNIKTPAFHPQRMIISRHLPSVSSLPFHPQLHSQQMIISRYLLSVCGFRFHHQPMIISRHLPSVSSLPFHPQLHPQQMIISRHLPSVCGGRFHPQRMIISRHLPSVSSLPFHPQLHPQQMIISRHLPSVCGGRFHPQRMIISRHLPSVSSLPFHPQLHPQQMIISRHLPSVCGGRFHPQRMIISRHLPSVSSLPFHPQLHPQQMIISRHLPSVCGERLRGPLPPSADDNLKTPSERQLTPLPPSAPPSADDNIKTPAERLRGPLPPSADDNLKTPSERQLTPLPPSAPPSADDNIKTPAERLRGPLPPSADDNLKTPSERQLTPLPPSAPPSADDNIKTPAERLRGPLPPSADDNLKTPPLATQEAEAEKPRKPKRQRAAEMEPPPEPKRRRVGDVEPSRKPKRRRAADMEP

SEQ ID NO: 3669 - protein, 699 aa, Artificial Sequence
  Synthetic polypeptide
MKVIVIHRKMFQRAQELRRRAEDYHKCKIPPSARKALCNWVRMAAAEHRHSSGLPYWPYLTAETLKNRMGHQPPPPTQQHSITDNSLSLKTPPECVLTPLPPSADDNLKTPPECVLTPLPPSADDNLKTPPECLLTPLPPSADDNLKTPPECLLTPLPPSADDNLKTPPECLLTPLPPSAPPSAPPSADDNLKTRAECLLHPLPPSADDNLKTPSERQLTPLPPSAPPSADDNIKTPAERLRGPLPPSADDNLKTPSERQLTPLPPSAPPSADDNIKTPAFHPQRMIISRHLPSVSSLPFHPQLHSQQMIISRYLLSVCGFRFHHQPMIISRHLPSVSSLPFHPQLHPQQMIISRHLPSVCGGRFHPQRMIISRHLPSVSSLPFHPQLHPQQMIISRHLPSVCGGRFHPQRMIISRHLPSVSSLPFHPQLHPQQMIISRHLPSVCGGRFHPQRMIISRHLPSVSSLPFHPQLHPQQMIISRHLPSVCGERLRGPLPPSADDNLKTPSERQLTPLPPSAPPSADDNIKTPAERLRGPLPPSADDNLKTPSERQLTPLPPSAPPSADDNIKTPAERLRGPLPPSADDNLKTPSERQLTPLPPSAPPSADDNIKTPAERLRGPLPPSADDNLKTPPLATQEAEAEKPRKPKRQRAAEMEPPPEPKRRRVGDVEPSRKPKRRRAADAEKPRKPKRQRAAEMEP

SEQ ID NO: 3670 - protein, 374 aa, Artificial Sequence
  Synthetic polypeptide
MDSCSLEIANWRNHQETLKYQFDAFYGERSTQQDIYAGSVQPILRHLLEGQNASVLAYGPTGAGKTHTMLGSPEQPGVIPRALMDLLQLTREEGAEGRPWALSVTMSYLEIYQEKVLDLLDPASGDLVIREDCRGNILIPGLSQKPISSFADFERHFLPASRNRTVGATRLNQRSSRSHAVLLVKVDQRERLAPFRQREGKLYLIDLAGSEDNRRTGNKGLRLKESGAINTSLFVLGKVVDALNQGLPRVPYRDSKLTRLLQDSLGGSAHSILIANIAPERRFYLDTVSALNFAARSKEVINRPFTNESLQPHALGPVKLSQKELLGPPEAKRARGPEEEEIGSPEPMAAPASASQKLRPDAVAHSCNPSTLGD

SEQ ID NO: 3671 - protein, 442 aa, Artificial Sequence
  Synthetic polypeptide
MAAGGSTQQRRREMAAASAAAISGAGRCRLSKIGATRRPPPARVRVAVRLRPFVDGTAGASDPPCVRGMDSCSLEIANWRNHQETLKYQFDAFYGERSTQQDIYAGSVQPILRHLLEGQNASVLAYGPTGAGKTHTMLGSPEQPGVIPRALMDLLQLTREEGAEGRPWALSVTMSYLEIYQEKVLDLLDPASGDLVIREDCRGNILIPGLSQKPISSFADFERHFLPASRNRTVGATRLNQRSSRSHAVLLVKVDQRERLAPFRQREGKLYLIDLAGSEDNRRTGNKGLRLKESGAINTSLFVLGKVVDALNQGLPRVPYRDSKLTRLLQDSLGGSAHSILIANIAPERRFYLDTVSALNFAARSKEVINRPFTNESLQPHALGPVKLSQKELLGPPEAKRARGPEEEEIGSPEPMAAPASASQKLRPDAVAHSCNPSTLGD

SEQ ID NO: 3672 - protein, 733 aa, Artificial Sequence
  Synthetic polypeptide
MPLPEPSEQEGESVKAGQEPSPKPGTDVIPAAPRKPREFSKLVLLTASDQDEDGVGSKPQEVHCVLSLEMAGPATLASTLQILPVEEQGGVVQPALEMPEQKCSKLDAAAPQSLEFLRTPFGGRLLVLESFLYKQEKAVGDKVYWKCRQHAELGCRGRAITRGLRATVMRGHCHAPDEQGLEARRQREKLPSLALPEGLGEPQGPEGPGGRVEEPLEGVGPWQCPEEPEPTPGLVLSKPALEEEEAPRALSLLSLPPKKRSILGLGQARPLEFLRTCYGGSFLVHESFLYKREKAVGDKVYWTCRDHALHGCRSRAITQGQRVTVMRGHCHQPDMEGLEARRQQEKAVETLQAGQDGPGSQVDTLLRGVDSLLYRRGPGPLTLTRPRPRKRAKVEDQELPTQPEAPDEHQDMDADPGGPEFLKTPLGGSFLVYESFLYRREKAAGEKVYWTCRDQARMGCRSRAITQGRRVTVMRGHCHPPDLGGLEALRQREKRPNTAQRGSPGGPEFLKTPLGGSFLVYESFLYRREKAAGEKVYWTCRDQARMGCRSRAITQGRRVMVMRRHCHPPDLGGLEALRQREHFPNLAQWDSPDPLRPLEFLRTSLGGRFLVHESFLYRKEKAAGEKVYWMCRDQARLGCRSRAITQGHRIMVMRSHCHQPDLAGLEALRQRERLPTTAQQEDPEKIQVQLCFKTCSPESQQIYGNEVLTHATMRMHLENTILKKPVTKHTECM

SEQ ID NO: 3673 - protein, 782 aa, Artificial Sequence
  Synthetic polypeptide
MPLPEPSEQEGESVKAGQEPSPKPGTDVIPAAPRKPREFSKLVLLTASDQDEDGVGSKPQEVHCVLSLEMAGPATLASTLQILPVEEQGGVVQPALEMPEQKCSKLDAAAPQSLEFLRTPFGGRLLVLESFLYKQEKAVGDKVYWKCRQHAELGCRGRAITRGLRATVMRGHCHAPDEQGLEARRQREKLPSLALPEGLGEPQGPEGPGGRVEEPLEGVGPWQCPEEPEPTPGLVLSKPALEEEEAPRALSLLSLPPKKRSILGLGQARPLEFLRTCYGGSFLVHESFLYKREKAVGDKVYWTCRDHALHGCRSRAITQGQRVTVMRGHCHQPDMEGLEARRQQEKAVETLQAGQDGPGSQVDTLLRGVDSLLYRRGPGPLTLTRPRPRKRAKVEDQELPTQPEAPDEHQDMDADPGGPEFLKTPLGGSFLVYESFLYRREKAAGEKVYWTCRDQARMGCRSRAITQGRRVTVMRGHCHPPDLGGLEALRQREKRPNTAQRGSPGAGLSFQWLFRILQLLGHAPVLLCPSGSSCLPSLPAPHGPCPALSIPLEGGPEFLKTPLGGSFLVYESFLYRREKAAGEKVYWTCRDQARMGCRSRAITQGRRVMVMRRHCHPPDLGGLEALRQREHFPNLAQWDSPDPLRPLEFLRTSLGGRFLVHESFLYRKEKAAGEKVYWMCRDQARLGCRSRAITQGHRIMVMRSHCHQPDLAGLEALRQRERLPTTAQQEDPEKIQVQLCFKTCSPESQQIYGNEVLTHATMRMHLENTILKKPVTKHTECM

SEQ ID NO: 3674 - protein, 732 aa, Artificial Sequence
  Synthetic polypeptide
MPLPEPSEQEGESVKAGQEPSPKPGTDVIPAAPRKPREFSKLVLLTASDQDEDGVGSKPQEVHCVLSLEMAGPATLASTLQILPVEEQGGVVQPALEMPEQKCSKLDAAPQSLEFLRTPFGGRLLVLESFLYKQEKAVGDKVYWKCRQHAELGCRGRAITRGLRATVMRGHCHAPDEQGLEARRQREKLPSLALPEGLGEPQGPEGPGGRVEEPLEGVGPWQCPEEPEPTPGLVLSKPALEEEEAPRALSLLSLPPKKRSILGLGQARPLEFLRTCYGGSFLVHESFLYKREKAVGDKVYWTCRDHALHGCRSRAITQGQRVTVMRGHCHQPDMEGLEARRQQEKAVETLQAGQDGPGSQVDTLLRGVDSLLYRRGPGPLTLTRPRPRKRAKVEDQELPTQPEAPDEHQDMDADPGGPEFLKTPLGGSFLVYESFLYRREKAAGEKVYWTCRDQARMGCRSRAITQGRRVTVMRGHCHPPDLGGLEALRQREKRPNTAQRGSPGGPEFLKTPLGGSFLVYESFLYRREKAAGEKVYWTCRDQARMGCRSRAITQGRRVMVMRRHCHPPDLGGLEALRQREHFPNLAQWDSPDPLRPLEFLRTSLGGRFLVHESFLYRKEKAAGEKVYWMCRDQARLGCRSRAITQGHRIMVMRSHCHQPDLAGLEALRQRERLPTTAQQEDPEKIQVQLCFKTCSPESQQIYGNEVLTHATMRMHLENTILKKPVTKHTECM

SEQ ID NO: 3675 - protein, 15 aa, Artificial Sequence
  Synthetic polypeptide
SRPWRRRRHPEPCHC

SEQ ID NO: 3676 - protein, 98 aa, Artificial Sequence
  Synthetic polypeptide
VPEDVLRGQLPGTRVVPLQAGEGCRGQGVLDLPGPRAARLPEPGHHPGTAGDCDAWALPPARYGGPGSPAAAGEGRGDAAGWAGRPWEPSGHAAPRRG

SEQ ID NO: 3677 - protein, 27 aa, Artificial Sequence
  Synthetic polypeptide
PGSAGLPQPRHNPGPPHHGHAQPLPSA

SEQ ID NO: 3678 - protein, 31 aa, Artificial Sequence
  Synthetic polypeptide
GLEATGAAPHHGPAGGPRKDSSSAVLQDVFS

SEQ ID NO: 3679 - protein, 47 aa, Artificial Sequence
  Synthetic polypeptide
MSANTFGNAGFSVLLPGARLEGRCGPTNARVRCHLAHACNPSSYSGG

SEQ ID NO: 3680 - protein, 328 aa, Artificial Sequence
  Synthetic polypeptide
MKEGRGSFSVERGPRKERETAQSGMWKGNSPAGSQGAAMEGTGGELGGQGNWGPEDAPGLLARASLIMLPWPLPLASSALTLLFGALTSLFLWYCYRLGSQDMQALGAGSRAGGVRGGPVGCSEAGGPSPGGPGDPGEGPRTEGLVSRRLRAYARRYSWAGMGRVRRAAQGGPGPGRGPGVLGIQRPGLLFLPDLPSAPFVPRDAQRHDVELLESSFPAILRDFGAVSWDFSGTTPPPRGWSPPLAPGCYQLLLYQAGRCQPSNCRRCPGAYRALRGLRSFMSANTFGNAGFSVLLPGARLEGRCGPTNARVRCHLAHACNPSSYSGG

SEQ ID NO: 3681 - protein, 66 aa, Artificial Sequence
  Synthetic polypeptide
MSANTFGNAGFSVLLPGARLEGRCGPTNARVRCHLATQEAETRESLEPGKQSELRSHHSTPAWVRE

SEQ ID NO: 3682 - protein, 347 aa, Artificial Sequence
  Synthetic polypeptide
MKEGRGSFSVERGPRKERETAQSGMWKGNSPAGSQGAAMEGTGGELGGQGNWGPEDAPGLLARASLIMLPWPLPLASSALTLLFGALTSLFLWYCYRLGSQDMQALGAGSRAGGVRGGPVGCSEAGGPSPGGPGDPGEGPRTEGLVSRRLRAYARRYSWAGMGRVRRAAQGGPGPGRGPGVLGIQRPGLLFLPDLPSAPFVPRDAQRHDVELLESSFPAILRDFGAVSWDFSGTTPPPRGWSPPLAPGCYQLLLYQAGRCQPSNCRRCPGAYRALRGLRSFMSANTFGNAGFSVLLPGARLEGRCGPTNARVRCHLATQEAETRESLEPGKQSELRSHHSTPAWVRE

SEQ ID NO: 3683 - protein, 257 aa, Artificial Sequence
  Synthetic polypeptide
MSAEASGPAAAAAPSLEAPKPSGLEPGPAAYGLKPLTPNSKYVKLNVGGSLHYTTLRTLTGQDTMLKAMFSGRVEVLTDAGGWVLIDRSGRHFGTILNYLRDGSVPLPESTRELGELLGEARYYLVQGLIEDCQLALQQKRETLSPLCLIPMVTSPREEQQLLASTSKPVVKLLHNRSNNKYSYTSTSDDNLLKNIELFDKLALRFHGRLLFLKDVLGDEICCWSFYGQGRKIAEVCCTSIVYATEKKQTKGVHSCH

SEQ ID NO: 3684 - protein, 135 aa, Artificial Sequence
  Synthetic polypeptide
YYLVQGLIEDCQLALQQKRETLSPLCLIPMVTSPREEQQLLASTSKPVVKLLHNRSNNKYSYTSTSDDNLLKNIELFDKLALRFHGRLLFLKDVLGDEICCWSFYGQGRKIAEVCCTSIVYATEKKQTKGVHSCH

SEQ ID NO: 3685 - protein, 192 aa, Artificial Sequence
  Synthetic polypeptide
MNGPADGEVDYKKKYRNLKRKLKFLIYEHECFQEELRKAQRKLLKVSRDKSFLLDRLLQYENVDEDSSDSDATASSDNSETEGTPKLSDTPAPKRKRSPPLGGAPSPSSLSLPPSTGFPLQASGVPSPYLSSLASSRYPPFPSDYLALQLPEPSPLRPKREKRPRLPRKLKWRHCAENVSEGMKIARPVPGP

SEQ ID NO: 3686 - protein, 175 aa, Artificial Sequence
  Synthetic polypeptide
MNGPADGEVDYKKKYRNLKRKLKFLIYEHECFQEELRKAQRKLLKVSRDKSFLLDRLLQYENVDEDSSDSDATASSDNSETEGTPKLSDTPAPKRKRSPPLGGAPSPSSLSLPPSTGFPLQASGVPSPYLSSLPEPSPLRPKREKRPRLPRKLKWRHCAENVSEGMKIARPVPGP

SEQ ID NO: 3687 - protein, 34 aa, Artificial Sequence
  Synthetic polypeptide
PLPASFNRVSPSGLRGPLPIPELAGLLPLPPIPF

SEQ ID NO: 3688 - protein, 8 aa, Artificial Sequence
  Synthetic polypeptide
GQPRSGCC

SEQ ID NO: 3689 - protein, 157 aa, Artificial Sequence
  Synthetic polypeptide
MCVAQVLTAHLLPPRQALGSLCSPWAAPRVGPLPPAPAMVRISKPKTFQAYLDDCHRRYSCAHCRAHLANHDDLISKSFQGSQGRAYLFNSVVNVGCGPAEERVLLTGLHAVADIHCENCKTTLGWKYWKIKPLPSTQDCYRDQIRCSGRCSWDTAR

SEQ ID NO: 3690 - protein, 119 aa, Artificial Sequence
  Synthetic polypeptide
MVRISKPKTFQAYLDDCHRRYSCAHCRAHLANHDDLISKSFQGSQGRAYLFNSVVNVGCGPAEERVLLTGLHAVADIHCENCKTTLGWKYWKIKPLPSTQDCYRDQIRCSGRCSWDTAR

SEQ ID NO: 3691 - protein, 536 aa, Artificial Sequence
  Synthetic polypeptide
MKDSCITVMAMALLSGFFFFAPASSYNLDVRGARSFSPPRAGRHFGYRVLQVGNGVIVGAPGEGNSTGSLYQCQSGTGHCLPVTLRGSNYTSKYLGMTLATDPTDGSILACDPGLSRTCDQNTYLSGLCYLFRQNLQGPMLQGRPGFQECIKGNVDLVFLFDGSMSLQPDEFQKILDFMKDVMKKLSNTSYQFAAVQFSTSYKTEFDFSDYVKRKDPDALLKHVKHMLLLTNTFGAINYVATEVFREELGARPDATKVLIIITDGEATDSGNIDAAKDIIRYIIGIGKHFQTKESQETLHKFASKPASEFVKILDTFEKLKDLFTELQKKIYVIEGTSKQDLTSFNMELSSSGISADLSRGHAVVGAVGAKDWAGGFLDLKADLQDDTFIGNEPLTPEVRAGYLGYTVTWLPSRQKTSLLASGAPRYQHMGRVLLFQEPQGGGHWSQVQTIHGTQIGSYFGGELCGVDVDQDGETELLLIGAPLFYGEQRGGRVFIYQRRQLGFEEVSELQGDPGYPLGRFGEAITALTDINGDGL

SEQ ID NO: 3692 - protein, 453 aa, Artificial Sequence
  Synthetic polypeptide
MKDSCITVMAMALLSGFFFFAPASSYNLDVRGARSFSPPRAGRHFGYRVLQVGNGVIVGAPGEGNSTGSLYQCQSGTGHCLPVTLRGSNYTSKYLGMTLATDPTDGSILFAAVQFSTSYKTEFDFSDYVKRKDPDALLKHVKHMLLLTNTFGAINYVATEVFREELGARPDATKVLIIITDGEATDSGNIDAAKDIIRYIIGIGKHFQTKESQETLHKFASKPASEFVKILDTFEKLKDLFTELQKKIYVIEGTSKQDLTSFNMELSSSGISADLSRGHAVVGAVGAKDWAGGFLDLKADLQDDTFIGNEPLTPEVRAGYLGYTVTWLPSRQKTSLLASGAPRYQHMGRVLLFQEPQGGGHWSQVQTIHGTQIGSYFGGELCGVDVDQDGETELLLIGAPLFYGEQRGGRVFIYQRRQLGFEEVSELQGDPGYPLGRFGEAITALTDINGDGL

SEQ ID NO: 3693 - protein, 615 aa, Artificial Sequence
  Synthetic polypeptide
MKDSCITVMAMALLSGFFFFAPASSYNLDVRGARSFSPPRAGRHFGYRVLQVGNGVIVGAPGEGNSTGSLYQCQSGTGHCLPVTLRGSNYTSKYLGMTLATDPTDGSILACDPGLSRTCDQNTYLSGLCYLFRQNLQGPMLQGRPGFQECIKGNVDLVFLFDGSMSLQPDEFQKILDFMKDVMKKLSNTSYQFAAVQFSTSYKTEFDFSDYVKRKDPDALLKHVKHMLLLTNTFGAINYVATEVFREELGARPDATKVLIIITDGEATDSGNIDAAKDIIRYIIGIGKHFQTKESQETLHKFASKPASEFVKILDTFEKLKDLFTELQKKIYVIEGTSKQDLTSFNMELSSSGISADLSRGHAVVGAVGAKDWAGGFLDLKADLQDDTFIGNEPLTPEVRAGYLGYTVTWLPSRQKTSLLASGAPRYQHMGRVLLFQEPQGGGHWSQVQTIHGTQIGSYFGGELCGVDVDQDGETELLLIGAPLFYGEQRGGRVFIYQRRQLGFEEVSELQGDPGYPLGRFGEAITALTDINGDGLVDVAVGAPLEEQGAVYIFNGRHGGLSPQPSQRIEGTQVLSGIQWFGRSIHGVKDLEGDGLADVAVGAESQMIVLRYGGA

SEQ ID NO: 3694 - protein, 532 aa, Artificial Sequence
  Synthetic polypeptide
MKDSCITVMAMALLSGFFFFAPASSYNLDVRGARSFSPPRAGRHFGYRVLQVGNGVIVGAPGEGNSTGSLYQCQSGTGHCLPVTLRGSNYTSKYLGMTLATDPTDGSILFAAVQFSTSYKTEFDFSDYVKRKDPDALLKHVKHMLLLTNTFGAINYVATEVFREELGARPDATKVLIIITDGEATDSGNIDAAKDIIRYIIGIGKHFQTKESQETLHKFASKPASEFVKILDTFEKLKDLFTELQKKIYVIEGTSKQDLTSFNMELSSSGISADLSRGHAVVGAVGAKDWAGGFLDLKADLQDDTFIGNEPLTPEVRAGYLGYTVTWLPSRQKTSLLASGAPRYQHMGRVLLFQEPQGGGHWSQVQTIHGTQIGSYFGGELCGVDVDQDGETELLLIGAPLFYGEQRGGRVFIYQRRQLGFEEVSELQGDPGYPLGRFGEAITALTDINGDGLVDVAVGAPLEEQGAVYIFNGRHGGLSPQPSQRIEGTQVLSGIQWFGRSIHGVKDLEGDGLADVAVGAESQMIVLRYGGA

SEQ ID NO: 3695 - protein, 589 aa, Artificial Sequence
  Synthetic polypeptide
MTRTRAALLLFTALATSLGFNLDTEELTAFRVDSAGFGDSVVQYANSWVVVGAPQKITAANQTGGLYQCGYSTGACEPIGLQVPPEAVNMSLGLSLASTTSPSQLLACGPTVHHECGRNMYLTGLCFLLGPTQLTQRLPVSRQECPRQEQDIVFLIDGSGSISSRNFATMMNFVRAVISQFQRPSTQFSLMQFSNKFQTHFTFEEFRRSSNPLSLLASVHQLQGFTYTATAIQNVVHRLFHASYGARRDAAKILIVITDGKKEGDSLDYKDVIPMADAAGIIRYAIGVGLAFQNRNSWKELNDIASKPSQEHIFKVEDFDALKDIQNQLKEKIFAIEGTETTSSSSFELEMAQEGFSAVFTPDGPVLGAVGSFTWSGGAFLYPPNMSPTFINMSQENVDMRDSYLGYSTELALWKGVQSLVLGAPRYQHTGKAVIFTQVSRQWRMKAEVTGTQIGSYFGASLCSVDVDSDGSTDLVLIGAPHYYEQTRGGQVSVCPLPRGWRRWWCDAVLYGEQGHPWGRFGAALTVLGDVNGDKLTDVVIGAPGEEENRGAVYLFHGVLGPSISPSHSQMESIPGEDDINIVEMTTQD

SEQ ID NO: 3696 - protein, 1 aa, Artificial Sequence
  Synthetic polypeptide
P

SEQ ID NO: 3697 - protein, 171 aa, Artificial Sequence
  Synthetic polypeptide
MSADGGGIQDTQDKETPPEVPDRGHPHQEMPSKLGEAVPSGDTQESLHIKMEPEEPHSEGASQEDGAQGAWGWAPLSHGSKEKALFLPGGALPSPRIPVLSREGRTRDRQMAAALLTAWSQMPVTFEDVALYLSREEWGRLDHTQQNFYRDVLQKKNGLSLGREPQAMCGY

SEQ ID NO: 3698 - protein, 165 aa, Artificial Sequence
  Synthetic polypeptide
MMAAKVVPMPPKPKQSFILRVPPDSKLGQDLLRDATNGPKTIHQLVLEHFLTFLPKPSLVQPSQKVKETLVIMKDVSSSLQNRVHPRPLVKLLPKGVQKEQETVSLYLKANPELVVFEDLNVFHCQEECVSLDPTQQLTSEKEDDSSVGEMMLLGVQFWKSDLQI

SEQ ID NO: 3699 - protein, 166 aa, Artificial Sequence
  Synthetic polypeptide
MMAAKVVPMPPKPKQSFILRVPPDSKLGQDLLRDATNGPKTIHQLVLEHFLTFLPKPSLVQPSQKVKETLVIMKDVSSSLQNRVHPRPLVKLLPKGVQKEQETVSLYLKANPEELVVFEDLNVFHCQEECVSLDPTQQLTSEKEDDSSVGEMMLLGVQFWKSDLQI

SEQ ID NO: 3700 - protein, 749 aa, Artificial Sequence
  Synthetic polypeptide
MRKQEVRTGREAGQGHGTGSPAEQVKALMDLLAGKGSQGSQAPQALDRTPDAPLGPCSNDSRIQRHRKALLSKVGGGPELGGPWHRLASLLLVEGLTDLQLREHDFTQVEATRGGGHPARTVALDRLFLPLSRVSVPPRVSITIGVAGMGKTTLVRHFVRLWAHGQVGKDFSLVLPLTFRDLNTHEKLCADRLICSVFPHVGEPSLAVAVPARALLILDGLDECRTPLDFSNTVACTDPKKEIPVDHLITNIIRGNLFPEVSIWITSRPSASGQIPGGLVDRMTEIRGFNEEEIKVCLEQMFPEDQALLGWMLSQVQADRALYLMCTVPAFCRLTGMALGHLWRSRTGPQDAELWPPRTLCELYSWYFRMALSGEGQEKGKASPRIEQVAHGGRKMVGTLGRLAFHGLLKKKYVFYEQDMKAFGVDLALLQGAPCSCFLQREETLASSVAYCFTHLSLQEFVAAAYYYGASRRAIFDLFTESGVSWPRLGFLTHFRSAAQRAMQAEDGRLDVFLRFLSGLLSPRVNALLAGSLLAQGEHQAYRTQVAELLQGCLRPDAAVCARAINVLHCLHELQHTELARSVEEAMESGALARLTGPAHRAALAYLLQVSDACAQEANLSLSLSQGVLQSLLPQLLYCRKLRLDTNQFQDPVMELLGSVLSGKDCRIQKISLAENQISNKGAKALARSLLVNRSLTSLDLRGNSIGPQGAKALADALKINRTLTSLRRVPEADACNPSTLGGQGRWIT

SEQ ID NO: 3701 - protein, 796 aa, Artificial Sequence
  Synthetic polypeptide
MEMDAPRPPSLAVPGAASRPGRLLDGGHGRQQVQALSSQLLEVIPDSMRKQEVRTGREAGQGHGTGSPAEQVKALMDLLAGKGSQGSQAPQALDRTPDAPLGPCSNDSRIQRHRKALLSKVGGGPELGGPWHRLASLLLVEGLTDLQLREHDFTQVEATRGGGHPARTVALDRLFLPLSRVSVPPRVSITIGVAGMGKTTLVRHFVRLWAHGQVGKDFSLVLPLTFRDLNTHEKLCADRLICSVFPHVGEPSLAVAVPARALLILDGLDECRTPLDFSNTVACTDPKKEIPVDHLITNIIRGNLFPEVSIWITSRPSASGQIPGGLVDRMTEIRGFNEEEIKVCLEQMFPEDQALLGWMLSQVQADRALYLMCTVPAFCRLTGMALGHLWRSRTGPQDAELWPPRTLCELYSWYFRMALSGEGQEKGKASPRIEQVAHGGRKMVGTLGRLAFHGLLKKKYVFYEQDMKAFGVDLALLQGAPCSCFLQREETLASSVAYCFTHLSLQEFVAAAYYYGASRRAIFDLFTESGVSWPRLGFLTHFRSAAQRAMQAEDGRLDVFLRFLSGLLSPRVNALLAGSLLAQGEHQAYRTQVAELLQGCLRPDAAVCARAINVLHCLHELQHTELARSVEEAMESGALARLTGPAHRAALAYLLQVSDACAQEANLSLSLSQGVLQSLLPQLLYCRKLRLDTNQFQDPVMELLGSVLSGKDCRIQKISLAENQISNKGAKALARSLLVNRSLTSLDLRGNSIGPQGAKALADALKINRTLTSLRRVPEADACNPSTLGGQGRWIT

SEQ ID NO: 3702 - protein, 653 aa, Artificial Sequence
  Synthetic polypeptide
MASPPHQQLLHHHSTEVSCDSSGDSNSVRVKINPKQLSSNSHPKHCKYSISSSCSSSGDSGGVPRRVGGGGRLRRQKKLPQLFERASSRWWDPKFDSVNLEEACLERCFPQTQRRFRYALFYIGFACLLWSIYFAVHMRSRLIVMVAPALCFLLVCVGFFLFTFTKLYARHYAWTSLALTLLVFALTLAAQFQVLTPVSGRGDSSNLTATARPTDTCLSQVGSFSMCIEVLFLLYTVMHLPLYLSLCLGVAYSVLFETFGYHFRDEACFPSPGAGALHWELLSRGLLHGCIHAIGVHLFVMSQVRSRSTFLKVGQSIMHGKDLEVEKALKERMIHSVMPRIIADDLMKQGDEESENSVKRHATSSPKNRKKKSSIQKAPIAFRPFKMQQIEEVSILFADIVGFTKMSANKSAHALVGLLNDLFGRFDRLCEETKCEKISTLGDCYYCVAGCPEPRADHAYCCIEMGLGMIKAIEQFCQEKKEMVNMRVGVHTGTVLCGILGMRRFKFDVWSNDVNLANLMEQLGVAGKVHISEATAKYLDDRYEMEDGKVIERLGQSVVADQLKGLKTYLISGQRAKESRCSCAEALLSGFEVIDGSQVSSGPRGQGTASSGNVSDLAQTVKTFDNLKCGGDKEETSRDCWEMSRNGACGRQG

SEQ ID NO: 3703 - protein, 181 aa, Artificial Sequence
  Synthetic polypeptide
IEQFCQEKKEMVNMRVGVHTGTVLCGILGMRRFKFDVWSNDVNLANLMEQLGVAGKVHISEATAKYLDDRYEMEDGKVIERLGQSVVADQLKGLKTYLISGQRAKESRCSCAEALLSGFEVIDGSQVSSGPRGQGTASSGNVSDLAQTVKTFDNLKCGGDKEETSRDCWEMSRNGACGRQG

SEQ ID NO: 3704 - protein, 1 aa, Artificial Sequence
  Synthetic polypeptide
I

SEQ ID NO: 3705 - protein, 595 aa, Artificial Sequence
  Synthetic polypeptide
MASPPHQQLLHHHSTEVSCDSSGDSNSVRVKINPKQLSSNSHPKHCKYSISSSCSSSGDSGGVPRRVGGGGRLRRQKKLPQLFERASSRWWDPKFDSVNLEEACLERCFPQTQRRFRYALFYIGFACLLWSIYFAVHMRSRLIVMVAPALCFLLVCVGFFLFTFTKLYARHYAWTSLALTLLVFALTLAAQFQVLTPVSGRGDSSNLTATARPTDTCLSQVGSFSMCIEVLFLLYTVMHLPLYLSLCLGVAYSVLFETFGYHFRDEACFPSPGAGALHWELLSRGLLHGCIHAIGVHLFVMSQVRSRSTFLKVGQSIMHGKDLEVEKALKERMIHSVMPRIIADDLMKQGDEESENSVKRHATSSPKNRKKKSSIQKAPIAFRPFKMQQIEEVSILFADIVGFTKMSANKSAHALVGLLNDLFGRFDRLCEETKCEKISTLGDCYYCVAGCPEPRADHAYCCIEMGLGMIKAIEQFCQEKKEMVNMRVGVHTGTVLCGILGMRRFKFDVWSNDVNLANLMEQLGVAGKVHISEATAKYLDDRYEMEDGKVIERLGQSVVADQLKDTIWERASSLDPHFPEATGGEGSGMTAPAEG

SEQ ID NO: 3706 - protein, 123 aa, Artificial Sequence
  Synthetic polypeptide
IEQFCQEKKEMVNMRVGVHTGTVLCGILGMRRFKFDVWSNDVNLANLMEQLGVAGKVHISEATAKYLDDRYEMEDGKVIERLGQSVVADQLKDTIWERASSLDPHFPEATGGEGSGMTAPAEG

SEQ ID NO: 3707 - protein, 11 aa, Artificial Sequence
  Synthetic polypeptide
DPRPRGQEVGV

SEQ ID NO: 3708 - protein, 17 aa, Artificial Sequence
  Synthetic polypeptide
MEAEAEEFLEPGRQRLQ

SEQ ID NO: 3709 - protein, 11 aa, Artificial Sequence
  Synthetic polypeptide
DPRPRGQEVGV

SEQ ID NO: 3710 - protein, 43 aa, Artificial Sequence
  Synthetic polypeptide
MLLRRLRQKNFLNPGGRGCSEPRSHYCTPAWATEQDSISKKKR

SEQ ID NO: 3711 - protein, 896 aa, Artificial Sequence
  Synthetic polypeptide
MNRFRVSKFRHTEARPPRRESWISDIRAGTAPSCRNHIKSSCSLIAFNSDRPGVLGIVPLQGQGEDKRRVAHLGCHSDLVTDLDFSPFDDFLLATGSADRTVKLWRLPGPGQALPSAPGVVLGPEDLPVEVLQFHPTSDGILVSAAGTTVKVWDAAKQQPLTELAAHGDLVQSAVWSRDGALVGTACKDKQLRIFDPRTKPRASQSTQAHENSRDSRLAWMGTWEHLVSTGFNQMREREVKLWDTRFFSSALASLTLDTSLGCLVPLLDPDSGLLVLAGKGERQLYCYEVVPQQPALSPVTQCVLESVLRGAALVPRQALAVMSCEVLRVLQLSDTAIVPIGYHVPRKAVEFHEDLFPDTAGCVPATDPHSWWAGDNQQVQKVSLNPACRPHPSFTSCLVPPAEPLPDTAQPAVMETPVGDADASEGFSSPPSSLTSPSTPSSLGPSLSSTSGIGTSPSLRSLQSLLGPSSKFRHAQGTVLHRDSHITNLKGLNLTTPGESDGFCANKLRVAVPLLSSGGQVAVLELRKPGRLPDTALPTLQNGAAVTDLAWDPFDPHRLAVAGEDARIRLWRVPAEGLEEVLTTPETVLTGHTEKICSLRFHPLAANVLASSSYDLTVRIWDLQAGADRLKLQGHQDQIFSLAWSPDGQQLATVCKDGRVRVYRPRSGPEPLQEGPGPKGGRGARIVWVCDGRCLLVSGFDSQSERQLLLYEAEALAGGPLAVLGLDVAPSTLLPSYDPDTGLVLLTGKGDTRVFLYELLPESPFFLECNSFTSPDPHKGLVLLPKTECDVREVELMRCLRLRQSSLEPVAFRLPRVRKEFFQDDVFPDTAVIWEPVLSAEAWLQGANGQPWLLSLQPPDMSPVSQAPREAPARRAPSSAQYLEEKSDQQKKEEV

SEQ ID NO: 3712 - protein, 676 aa, Artificial Sequence
  Synthetic polypeptide
MGTWEHLVSTGFNQMREREVKLWDTRFFSSALASLTLDTSLGCLVPLLDPDSGLLVLAGKGERQLYCYEVVPQQPALSPVTQCVLESVLRGAALVPRQALAVMSCEVLRVLQLSDTAIVPIGYHVPRKAVEFHEDLFPDTAGCVPATDPHSWWAGDNQQVQKVSLNPACRPHPSFTSCLVPPAEPLPDTAQPAVMETPVGDADASEGFSSPPSSLTSPSTPSSLGPSLSSTSGIGTSPSLRSLQSLLGPSSKFRHAQGTVLHRDSHITNLKGLNLTTPGESDGFCANKLRVAVPLLSSGGQVAVLELRKPGRLPDTALPTLQNGAAVTDLAWDPFDPHRLAVAGEDARIRLWRVPAEGLEEVLTTPETVLTGHTEKICSLRFHPLAANVLASSSYDLTVRIWDLQAGADRLKLQGHQDQIFSLAWSPDGQQLATVCKDGRVRVYRPRSGPEPLQEGPGPKGGRGARIVWVCDGRCLLVSGFDSQSERQLLLYEAEALAGGPLAVLGLDVAPSTLLPSYDPDTGLVLLTGKGDTRVFLYELLPESPFFLECNSFTSPDPHKGLVLLPKTECDVREVELMRCLRLRQSSLEPVAFRLPRVRKEFFQDDVFPDTAVIWEPVLSAEAWLQGANGQPWLLSLQPPDMSPVSQAPREAPARRAPSSAQYLEEKSDQQKKEEV

SEQ ID NO: 3713 - protein, 878 aa, Artificial Sequence
  Synthetic polypeptide
MNRFRVSKFRHTEARPPRRESWISDIRAGTAPSCRNHIKSSCSLIAFNSDRPGVLGIVPLQGQGEDKRRVAHLGCHSGSADRTVKLWRLPGPGQALPSAPGVVLGPEDLPVEVLQFHPTSDGILVSAAGTTVKVWDAAKQQPLTELAAHGDLVQSAVWSRDGALVGTACKDKQLRIFDPRTKPRASQSTQAHENSRDSRLAWMGTWEHLVSTGFNQMREREVKLWDTRFFSSALASLTLDTSLGCLVPLLDPDSGLLVLAGKGERQLYCYEVVPQQPALSPVTQCVLESVLRGAALVPRQALAVMSCEVLRVLQLSDTAIVPIGYHVPRKAVEFHEDLFPDTAGCVPATDPHSWWAGDNQQVQKVSLNPACRPHPSFTSCLVPPAEPLPDTAQPAVMETPVGDADASEGFSSPPSSLTSPSTPSSLGPSLSSTSGIGTSPSLRSLQSLLGPSSKFRHAQGTVLHRDSHITNLKGLNLTTPGESDGFCANKLRVAVPLLSSGGQVAVLELRKPGRLPDTALPTLQNGAAVTDLAWDPFDPHRLAVAGEDARIRLWRVPAEGLEEVLTTPETVLTGHTEKICSLRFHPLAANVLASSSYDLTVRIWDLQAGADRLKLQGHQDQIFSLAWSPDGQQLATVCKDGRVRVYRPRSGPEPLQEGPGPKGGRGARIVWVCDGRCLLVSGFDSQSERQLLLYEAEALAGGPLAVLGLDVAPSTLLPSYDPDTGLVLLTGKGDTRVFLYELLPESPFFLECNSFTSPDPHKGLVLLPKTECDVREVELMRCLRLRQSSLEPVAFRLPRVRKEFFQDDVFPDTAVIWEPVLSAEAWLQGANGQPWLLSLQPPDMSPVSQAPREAPARRAPSSAQYLEEKSDQQKKEEV

SEQ ID NO: 3714 - protein, 811 aa, Artificial Sequence
  Synthetic polypeptide
MNRFRVSKFRHTEARPPRRESWISDIRAGTAPSCRNHIKSSCSLIAFNSDRPGVLGIVPLQGQGEDKRRVAHLGCHSELAAHGDLVQSAVWSRDGALVGTACKDKQLRIFDPRTKPRASQSTQAHENSRDSRLAWMGTWEHLVSTGFNQMREREVKLWDTRFFSSALASLTLDTSLGCLVPLLDPDSGLLVLAGKGERQLYCYEVVPQQPALSPVTQCVLESVLRGAALVPRQALAVMSCEVLRVLQLSDTAIVPIGYHVPRKAVEFHEDLFPDTAGCVPATDPHSWWAGDNQQVQKVSLNPACRPHPSFTSCLVPPAEPLPDTAQPAVMETPVGDADASEGFSSPPSSLTSPSTPSSLGPSLSSTSGIGTSPSLRSLQSLLGPSSKFRHAQGTVLHRDSHITNLKGLNLTTPGESDGFCANKLRVAVPLLSSGGQVAVLELRKPGRLPDTALPTLQNGAAVTDLAWDPFDPHRLAVAGEDARIRLWRVPAEGLEEVLTTPETVLTGHTEKICSLRFHPLAANVLASSSYDLTVRIWDLQAGADRLKLQGHQDQIFSLAWSPDGQQLATVCKDGRVRVYRPRSGPEPLQEGPGPKGGRGARIVWVCDGRCLLVSGFDSQSERQLLLYEAEALAGGPLAVLGLDVAPSTLLPSYDPDTGLVLLTGKGDTRVFLYELLPESPFFLECNSFTSPDPHKGLVLLPKTECDVREVELMRCLRLRQSSLEPVAFRLPRVRKEFFQDDVFPDTAVIWEPVLSAEAWLQGANGQPWLLSLQPPDMSPVSQAPREAPARRAPSSAQYLEEKSDQQKKEEV

SEQ ID NO: 3715 - protein, 105 aa, Artificial Sequence
  Synthetic polypeptide
VREVELMRCLRLRQSSLEPVAFRLPRVRKEFFQDDVFPDTAVIWEPVLSAEAWLQGANGQPWLLSLQPPDMSPVSQAPREAPARRAPSSAQYLEEKSDQQKKEEV

SEQ ID NO: 3716 - protein, 283 aa, Artificial Sequence
  Synthetic polypeptide
MNRFRVSKFRHTEARPPRRESWISDIRAGTAPSCRNHIKSSCSLIAFNSDRPGVLGIVPLQGQGEDKRRVAHLGCHSDLVTDLDFSPFDDFLLATGSADRTVKLWRLPGPGQALPSAPGVVLGPEDLPVEVLQFHPTSDGILVSAAGTTVKVWDAAKQQPLTELAAHGDLVQSAVWSRDGALVGTACKDKQLRIFDPRTKPRASQSTQAHENSRDSRLAWMGTWEHLVSTGFNQMREREVKLWDTRFFSSALASLTLDTSLGSSRGPGTDQLIKGVNDCERMN

SEQ ID NO: 3717 - protein, 63 aa, Artificial Sequence
  Synthetic polypeptide
MGTWEHLVSTGFNQMREREVKLWDTRFFSSALASLTLDTSLGSSRGPGTDQLIKGVNDCERMN

SEQ ID NO: 3718 - protein, 265 aa, Artificial Sequence
  Synthetic polypeptide
MNRFRVSKFRHTEARPPRRESWISDIRAGTAPSCRNHIKSSCSLIAFNSDRPGVLGIVPLQGQGEDKRRVAHLGCHSGSADRTVKLWRLPGPGQALPSAPGVVLGPEDLPVEVLQFHPTSDGILVSAAGTTVKVWDAAKQQPLTELAAHGDLVQSAVWSRDGALVGTACKDKQLRIFDPRTKPRASQSTQAHENSRDSRLAWMGTWEHLVSTGFNQMREREVKLWDTRFFSSALASLTLDTSLGSSRGPGTDQLIKGVNDCERMN

SEQ ID NO: 3719 - protein, 198 aa, Artificial Sequence
  Synthetic polypeptide
MNRFRVSKFRHTEARPPRRESWISDIRAGTAPSCRNHIKSSCSLIAFNSDRPGVLGIVPLQGQGEDKRRVAHLGCHSELAAHGDLVQSAVWSRDGALVGTACKDKQLRIFDPRTKPRASQSTQAHENSRDSRLAWMGTWEHLVSTGFNQMREREVKLWDTRFFSSALASLTLDTSLGSSRGPGTDQLIKGVNDCERMN

SEQ ID NO: 3720 - protein, 115 aa, Artificial Sequence
  Synthetic polypeptide
MNRFRVSKFRHTEARPPRREDKQLRIFDPRTKPRASQSTQAHENSRDSRLAWMGTWEHLVSTGFNQMREREVKLWDTRFFSSALASLTLDTSLGSSRGPGTDQLIKGVNDCERMN

SEQ ID NO: 3721 - protein, 128 aa, Artificial Sequence
  Synthetic polypeptide
MLQPRPHASKHRRRRGLTAAPHVTSHPRQSVPSDKQLRIFDPRTKPRASQSTQAHENSRDSRLAWMGTWEHLVSTGFNQMREREVKLWDTRFFSSALASLTLDTSLGSSRGPGTDQLIKGVNDCERMN

SEQ ID NO: 3722 - protein, 221 aa, Artificial Sequence
  Synthetic polypeptide
MGGLFWRSALRGLRCGPRAPGPSLLVRHGSGGPSWTRERTLVAVKPDGVQRRLVGDVIQRFERRGFTLVGMKMLQAPESVLAEHYQDLRRKPFYPALIRYMSSGPVVAMVWEGYNVVRASRAMIGHTDSAEAAPGTIRGDFSVHISRNVIHASDSVEGAQREIQLWFQSSELSPTGAPWPSRRPTWRGTTVSPRTATSSARTCCGAVAHACNPSSLGGRSG

SEQ ID NO: 3723 - protein, 33 aa, Artificial Sequence
  Synthetic polypeptide
MAQPPPDVEGDDCLPAYRHLFCPDLLRSSGSRL

SEQ ID NO: 3724 - protein, 468 aa, Artificial Sequence
  Synthetic polypeptide
MADGSLTGGGLEAAAMAPERMGWAVEQELASLEKGLFQDEDSCSDCSYRDKPGSSLQSFMPEGKTFFPEIFQTNQLLFYERFRAYQDYILADCKASEVQEFTAEFLEKVLEPSGWRAVWHTNVFKVLVEITDVDFAALKAVVRLAEPYLCDSQVSTFTMECMKELLDLKEHRLPLQELWVVFDDSGVFDQTALAIEHVRFFYQNIWRSWDEEEEDEYDYFVRCVEPRLRLHYDILEDRVPSGLIVDYHNLLSQCEESYRKFLNLRSSLSNCNSDSEQENISMVEGLKLYSEMEQLKQKLKLIENPLLRYVFGYQKNSNIQAKGVRSSGQKITHVVSSTMMAGLLRSLLTDRLCQEPGEEEREIQFHSDPLSAINACFEGDTVIVCPGHYVVHGTFSIADSIELEGYGLPDDIVIEKRGKGDTFVDCTGADIKISGIKFVQHDAVEGILTHGSRSNFDFQILLFEKYTS

SEQ ID NO: 3725 - protein, 639 aa, Artificial Sequence
  Synthetic polypeptide
MSGTSKESLGHGGLPGLGKTCLTTMDTKLNMLNEKVDQLLHFQEDVTEKLQSMCRDMGHLERGLHRLEASRAPGPGGADGVPHIDTQAGWPEVLELVRAMQQDAAQHGARLEALFRMVAAVDRAIALVGATFQKSKVADFLMQGRVPWRRGSPGDSPEENKERVEEEGGKPKHVLSTSGVQSDAREPGEESQKADVLEGTAERLPPIRASGLGADPAQAVVSPGQGDGVPGPAQAFPGHLPLPTKVEAKAPETPSENLRTGLELAPAPGRVNVVSPSLEVAPGAGQGASSSRPDPEPLEEGTRLTPGPGPQCPGPPGLPAQARATHSGGETPPRISIHIQEMDTPGEMLMTGRGSLGPTLTTEAPAAAQPGKQGPPGTGRCLQAPGTEPGEQTPEGARELSPLQESSSPGGVKAEEEQRAGAEPGTRPSLARSDDNDHEVGALGLQQGKSPGAGNPEPEQDCAARAPVRAEAVRRMPPGAEAGSVVLDDSPAPPAPFEHRVVSVKETSISAGYEVCQHEVLGGGRFGQVHRCTEKSTGLPLAAKIIKVKSAKDREDVKNEINIMNQLSHVNLIQLYDAFESKHSCTLVMEYVDGGELFDRITDEKYHLTELDVVLFTRQICEGVHYLHQHYILHLDLKP

SEQ ID NO: 3726 - protein, 298 aa, Artificial Sequence
  Synthetic polypeptide
MDTPGEMLMTGRGSLGPTLTTEAPAAAQPGKQGPPGTGRCLQAPGTEPGEQTPEGARELSPLQESSSPGGVKAEEEQRAGAEPGTRPSLARSDDNDHEVGALGLQQGKSPGAGNPEPEQDCAARAPVRAEAVRRMPPGAEAGSVVLDDSPAPPAPFEHRVVSVKETSISAGYEVCQHEVLGGGRFGQVHRCTEKSTGLPLAAKIIKVKSAKDREDVKNEINIMNQLSHVNLIQLYDAFESKHSCTLVMEYVDGGELFDRITDEKYHLTELDVVLFTRQICEGVHYLHQHYILHLDLKP

SEQ ID NO: 3727 - protein, 46 aa, Artificial Sequence
  Synthetic polypeptide
RARGRAAVAWRPLSVEGGLAGLPEAERFLLHVNHVLVVTYLLAENF

SEQ ID NO: 3728 - protein, 138 aa, Artificial Sequence
  Synthetic polypeptide
MSATRAKKVKMATKSCPECDQQVPVACKSCPCGYIFISRKLLNAKHSEKSPPSTENKHEAKRRRTERVRREKINSTVNKDLENRKRSRSNSHSDHIRRGRGRPKSASAKKHEEERGSQKICYQYCLSQEAPTSYLLPK

SEQ ID NO: 3729 - protein, 46 aa, Artificial Sequence; identical to SEQ ID NO: 3727
  Synthetic polypeptide

SEQ ID NO: 3730 - protein, 77 aa, Artificial Sequence
  Synthetic polypeptide
MSATRAKKVKMATKSCPECDQQVPVACKSCPCGYIFISRKLLNAKHSEKSPPSTGSQKICYQYCLSQEAPTSYLLPK

SEQ ID NO: 3731 - protein, 68 aa, Artificial Sequence
  Synthetic polypeptide
MSATRAKKVKMATKSCPECDQQVPVACKSCPCGYIFISRKLLNAKHSEKSPPSTGAVTHAYNPSTLRG

SEQ ID NO: 3732 - protein, 46 aa, Artificial Sequence; identical to SEQ ID NO: 3727
  Synthetic polypeptide

SEQ ID NO: 3733 - protein, 488 aa, Artificial Sequence
  Synthetic polypeptide
MAAAGRLPSSWALFSPLLAGLALLGVGPVPARALHNVTAELFGAEAWGTLAAFGDLNSDKQTDLFVLRERNDLIVFLADQNAPYFKPKVKVSFKNHSALITSVVPGDYDGDSQMDVLLTYLPKNYAKSELGAVIFWGQNQTLDPNNMTILNRTFQDEPLIMDFNGDLIPDIFGITNESNQPQILLGGNLSWHPALTTTSKMRIPHSHAFIDLTEDFTADLFLTTLNATTSTFQFEIWENLDGNFSVSTILEKPQNMMVVGQSAFADFDGDGHMDHLLPGCEDKNCQKSTIYLVRSGMKQWVPVLQDFSNKGTLWGFVPFVDEQQPTEIPIPITLHIGDYNMDGYPDALVILKNTSGSNQQAFLLENVPCNNASCEEARRMFKVYWELTDLNQIKDAMVATFFDIYEDGILDIVVLSKGYTKNDFAIHTLKNNFEADAYFVKVIVLSGLCSNDCPRKITPFGVNQPGPYIMYTTVDANGYLKNGSDGTV

SEQ ID NO: 3734 - protein, 375 aa, Artificial Sequence
  Synthetic polypeptide
MDVLLTYLPKNYAKSELGAVIFWGQNQTLDPNNMTILNRTFQDEPLIMDFNGDLIPDIFGITNESNQPQILLGGNLSWHPALTTTSKMRIPHSHAFIDLTEDFTADLFLTTLNATTSTFQFEIWENLDGNFSVSTILEKPQNMMVVGQSAFADFDGDGHMDHLLPGCEDKNCQKSTIYLVRSGMKQWVPVLQDFSNKGTLWGFVPFVDEQQPTEIPIPITLHIGDYNMDGYPDALVILKNTSGSNQQAFLLENVPCNNASCEEARRMFKVYWELTDLNQIKDAMVATFFDIYEDGILDIVVLSKGYTKNDFAIHTLKNNFEADAYFVKVIVLSGLCSNDCPRKITPFGVNQPGPYIMYTTVDANGYLKNGSDGTV

SEQ ID NO: 3735 - protein, 75 aa, Artificial Sequence
  Synthetic polypeptide
VLSKGYTKNDFAIHTLKNNFEADAYFVKVIVLSGLCSNDCPRKITPFGVNQPGPYIMYTTVDANGYLKNGSDGTV

SEQ ID NO: 3736 - protein, 338 aa, Artificial Sequence [sequence omitted]

SEQ ID NO: 3737 - protein, 467 aa, Artificial Sequence
  Synthetic polypeptide
MSELSDEASEPELLNRSLSMWHGLGTQVSGEELDVPLDLHTAASIGQYEVVKECVQRRELDLNKKNGGGWTPLMYASYIGHDTIVHLLLEAGVSVNVPTPEGQTPLMLASSCGNESIAYFLLQQGAELEMKDIQGWTALFHCTSAGHQHMVRFLLDSGANANVREPICGFTPLMEAAAAGHEIIVQYFLNHGVKVDARDHSGATARMLAKQYGHMKIVALMDTYSPSLPKSLYRSPEKYEDLSSSDESCPAPQRQRPCRKKGVSIHEGPRALARITGIGLGGRAPRPRYEQAPPRGYVTFNSSGENPLEEEGLCCRDVTSPINERDVESSSSSSSREEHAFCANLGPVQSSSSSEGLARAQGLSSEASVESNEDSDHACKSSARKQAKSYMKTKNPDSQWPPRAATDREGFLAESSPQTQRAPYSGPQHTDTTPYSGIPEGEQKRWVRNSLTISVDQKHGSYIQGAR

SEQ ID NO: 3738 - protein, 394 aa, Artificial Sequence
  Synthetic polypeptide
MYASYIGHDTIVHLLLEAGVSVNVPTPEGQTPLMLASSCGNESIAYFLLQQGAELEMKDIQGWTALFHCTSAGHQHMVRFLLDSGANANVREPICGFTPLMEAAAAGHEIIVQYFLNHGVKVDARDHSGATARMLAKQYGHMKIVALMDTYSPSLPKSLYRSPEKYEDLSSSDESCPAPQRQRPCRKKGVSIHEGPRALARITGIGLGGRAPRPRYEQAPPRGYVTFNSSGENPLEEEGLCCRDVTSPINERDVESSSSSSSREEHAFCANLGPVQSSSSSEGLARAQGLSSEASVESNEDSDHACKSSARKQAKSYMKTKNPDSQWPPRAATDREGFLAESSPQTQRAPYSGPQHTDTTPYSGIPEGEQKRWVRNSLTISVDQKHGSYIQGAR

SEQ ID NO: 3739 - protein, 261 aa, Artificial Sequence
  Synthetic polypeptide
MLAKQYGHMKIVALMDTYSPSLPKSLYRSPEKYEDLSSSDESCPAPQRQRPCRKKGVSIHEGPRALARITGIGLGGRAPRPRYEQAPPRGYVTFNSSGENPLEEEGLCCRDVTSPINERDVESSSSSSSREEHAFCANLGPVQSSSSSEGLARAQGLSSEASVESNEDSDHACKSSARKQAKSYMKTKNPDSQWPPRAATDREGFLAESSPQTQRAPYSGPQHTDTTPYSGIPEGEQKRWVRNSLTISVDQKHGSYIQGAR

SEQ ID NO: 3740 - protein, 294 aa, Artificial Sequence
  Synthetic polypeptide
MEAAAAGHEIIVQYFLNHGVKVDARDHSGATARMLAKQYGHMKIVALMDTYSPSLPKSLYRSPEKYEDLSSSDESCPAPQRQRPCRKKGVSIHEGPRALARITGIGLGGRAPRPRYEQAPPRGYVTFNSSGENPLEEEGLCCRDVTSPINERDVESSSSSSSREEHAFCANLGPVQSSSSSEGLARAQGLSSEASVESNEDSDHACKSSARKQAKSYMKTKNPDSQWPPRAATDREGFLAESSPQTQRAPYSGPQHTDTTPYSGIPEGEQKRWVRNSLTISVDQKHGSYIQGAR

SEQ ID NO: 3741 - protein, 517 aa, Artificial Sequence
  Synthetic polypeptide
MACSPDAVVSPSSAFLRSGSVYEPLKSINLPRPDNETLWDKLDHYYRIVKSTLLLYQSPTTGLFPTKTCGGDQKAKIQDSLYCAAGAWALALAYRRIDDDKGRTHELEHSAIKCMRGILYCYMRQADKVQQFKQDPRPTTCLHSVFNVHTGDELLSYEEYGHLQINAVSLYLLYLVEMISSGLQIIYNTDEVSFIQNLVFCVERVYRVPDFGVWERGSKYNNGSTELHSSSVGLAKAALEAINGFNLFGNQGCSWSVIFVDLDAHNRNRQTLCSLLPRESRSHNTDAALLPCISYPAFALDDEVLFSQTLDKVVRKLKGKYGFKRFLRDGYRTSLEDPNRCYYKPAEIKLFDGIECEFPIFFLYMMIDGVFRGNPKQVQEYQDLLTPVLHHTTEGYPVVPKYYYVPADFVEYEKNNPGSQKRFPSNCGRDGKLFLWGQALYIIAKLLADELISPKDIDPVQRYVPLKDQRNVSMRFSNQAFGLRLKLNCQLSWVSSLPAHLHILRLACLRNCVSQSI

SEQ ID NO: 3742 - protein, 524 aa, Artificial Sequence
  Synthetic polypeptide
MAGAAGLTAEVSWKVLERRARTKRSGSVYEPLKSINLPRPDNETLWDKLDHYYRIVKSTLLLYQSPTTGLFPTKTCGGDQKAKIQDSLYCAAGAWALALAYRRIDDDKGRTHELEHSAIKCMRGILYCYMRQADKVQQFKQDPRPTTCLHSVFNVHTGDELLSYEEYGHLQINAVSLYLLYLVEMISSGLQIIYNTDEVSFIQNLVFCVERVYRVPDFGVWERGSKYNNGSTELHSSSVGLAKAALEAINGFNLFGNQGCSWSVIFVDLDAHNRNRQTLCSLLPRESRSHNTDAALLPCISYPAFALDDEVLFSQTLDKVVRKLKGKYGFKRFLRDGYRTSLEDPNRCYYKPAEIKLFDGIECEFPIFFLYMMIDGVFRGNPKQVQEYQDLLTPVLHHTTEGYPVVPKYYYVPADFVEYEKNNPGSQKRFPSNCGRDGKLFLWGQALYIIAKLLADELISPKDIDPVQRYVPLKDQRNVSMRFSNQAFGLRLKLNCQLSWVSSLPAHLHILRLACLRNCVSQSI

SEQ ID NO: 3743 - protein, 2 aa, Artificial Sequence
  Synthetic polypeptide
KK

SEQ ID NO: 3744 - protein, 662 aa, Artificial Sequence
  Synthetic polypeptide
MACSPDAVVSPSSAFLRSGSVYEPLKSINLPRPDNETLWDKLDHYYRIVKSTLLLYQSPTTGLFPTKTCGGDQKAKIQDSLYCAAGAWALALAYRRIDDDKGRTHELEHSAIKCMRGILYCYMRQADKVQQFKQDPRPTTCLHSVFNVHTGDELLSYEEYGHLQINAVSLYLLYLVEMISSGLQIIYNTDEVSFIQNLVFCVERVYRVPDFGVWERGSKYNNGSTELHSSSVGLAKAALEAINGFNLFGNQGCSWSVIFVDLDAHNRNRQTLCSLLPRESRSHNTDAALLPCISYPAFALDDEVLFSQTLDKVVRKLKGKYGFKRFLRDGYRTSLEDPNRCYYKPAEIKLFDGIECEFPIFFLYMMIDGVFRGNPKQVQEYQDLLTPVLHHTTEGYPVVPKYYYVPADFVEYEKNNPGSQKRFPSNCGRDGKLFLWGQALYIIAKLLADELISPKDIDPVQRYVPLKDQRNVSMRFSNQGPLENDLVVHVALIAESQRLQVFLNTYGIQTQTPQQVEPIQIWPQQELVKAYLQLGINEKLGLSGRPDRPIGCLGTSKIYRILGKTVVCYPIIFDLSDFYMSQDVFLLIDDIKNALQFIKQYWKMHGRPLFLVLIREDNIRGSRFNPILDMLAALKKGIIGGVKVHVDRLQKYVGLYGKKRPR

SEQ ID NO: 3745 - protein, 669 aa, Artificial Sequence
  Synthetic polypeptide
MAGAAGLTAEVSWKVLERRARTKRSGSVYEPLKSINLPRPDNETLWDKLDHYYRIVKSTLLLYQSPTTGLFPTKTCGGDQKAKIQDSLYCAAGAWALALAYRRIDDDKGRTHELEHSAIKCMRGILYCYMRQADKVQQFKQDPRPTTCLHSVFNVHTGDELLSYEEYGHLQINAVSLYLLYLVEMISSGLQIIYNTDEVSFIQNLVFCVERVYRVPDFGVWERGSKYNNGSTELHSSSVGLAKAALEAINGFNLFGNQGCSWSVIFVDLDAHNRNRQTLCSLLPRESRSHNTDAALLPCISYPAFALDDEVLFSQTLDKVVRKLKGKYGFKRFLRDGYRTSLEDPNRCYYKPAEIKLFDGIECEFPIFFLYMMIDGVFRGNPKQVQEYQDLLTPVLHHTTEGYPVVPKYYYVPADFVEYEKNNPGSQKRFPSNCGRDGKLFLWGQALYIIAKLLADELISPKDIDPVQRYVPLKDQRNVSMRFSNQGPLENDLVVHVALIAESQRLQVFLNTYGIQTQTPQQVEPIQIWPQQELVKAYLQLGINEKLGLSGRPDRPIGCLGTSKIYRILGKTVVCYPIIFDLSDFYMSQDVFLLIDDIKNALQFIKQYWKMHGRPLFLVLIREDNIRGSRFNPILDMLAALKKGIIGGVKVHVDRLQKYVGLYGKKRPR

SEQ ID NO: 3746 - protein, 76 aa, Artificial Sequence
  Synthetic polypeptide
MKDIQGWTALFHCTSAGHQHMVRFLLDSGANANVREPICGFTPLMEAAAAGHEIIVQYFLNHAPLHFSLGNRARSY

SEQ ID NO: 3747 - protein, 205 aa, Artificial Sequence
  Synthetic polypeptide
MSELSDEASEPELLNRSLSMWHGLGTQVSGEELDVPLDLHTAASIGQYEVVKECVQRRELDLNKKNGGGWTPLMYASYIGHDTIVHLLLEAGVSVNVPTPEGQTPLMLASSCGNESIAYFLLQQGAELEMKDIQGWTALFHCTSAGHQHMVRFLLDSGANANVREPICGFTPLMEAAAAGHEIIVQYFLNHAPLHFSLGNRARSY

SEQ ID NO: 3748 - protein, 132 aa, Artificial Sequence
  Synthetic polypeptide
MYASYIGHDTIVHLLLEAGVSVNVPTPEGQTPLMLASSCGNESIAYFLLQQGAELEMKDIQGWTALFHCTSAGHQHMVRFLLDSGANANVREPICGFTPLMEAAAAGHEIIVQYFLNHAPLHFSLGNRARSY

SEQ ID NO: 3749 - protein, 32 aa, Artificial Sequence
  Synthetic polypeptide
MEAAAAGHEIIVQYFLNHAPLHFSLGNRARSY

SEQ ID NO: 3750 - protein, 98 aa, Artificial Sequence
  Synthetic polypeptide
MSELSDEASEPELLNRSLSMWHGLGTQVSGEELDVPLDLHTAASIGQYEVVKECVQREPICGFTPLMEAAAAGHEIIVQYFLNHAPLHFSLGNRARSY

SEQ ID NO: 3751 - protein, 138 aa, Artificial Sequence
  Synthetic polypeptide
MAARAVLDEFTAPAEKAELLEQSRGRIEGLFGVSLAVLGALGAEEPLPARIWLQLCGAQEAVHSAKHEHNTAPPGSGNGHQDTPGKAFWFQPKGQKRKHLKPRVSPPPPLFFLLYSHVTQPQVIMWWQSKLAGTKIPT

SEQ ID NO: 3752 - protein, 159 aa, Artificial Sequence
  Synthetic polypeptide
MSEPHRVQFTSLPGSLNPAFLKKSRKEEAGAGEQHQDCEPAAAAVRITLTLFEPDHKRCPEFFYPELVKNIRGKVKGLQPGDKKKDLSDPFNDEEKERHKVEALARKFEEKYGGKKRRKDRIQDLIDMGYGYDESDSFIDNSEAFPLQKVMTRSVQNTL

SEQ ID NO: 3753 - protein, 45 aa, Artificial Sequence
  Synthetic polypeptide
KKRRKDRIQDLIDMGYGYDESDSFIDNSEAFPLQKVMTRSVQNTL

SEQ ID NO: 3754 - protein, 69 aa, Artificial Sequence
  Synthetic polypeptide
MNSLEQAEAPRVVSLIPAVVSGNCQDLKAFERRLTEYIHCLQPATGRWRSAVAHACNPSTLGSPGRRIT

SEQ ID NO: 3755 - protein, 52 aa, Artificial Sequence
  Synthetic polypeptide
MNSLEQAEDLKAFERRLTEYIHCLQPATGRWRSAVAHACNPSTLGSPGRRIT

SEQ ID NO: 3756 - protein, 20 aa, Artificial Sequence
  Synthetic polypeptide
SAVAHACNPSTLGSPGRRIT

SEQ ID NO: 3757 - protein, 646 aa, Artificial Sequence
  Synthetic polypeptide
MGKSRTKRFKRPQFSPTGDCQAEAAAAANGTGGEEDDGPAAELLEKLQHPSAEVRECACAGLARLVQQRPALPGLARRDAVRRLGPLLLDPSLAVRETAAGALRNLSACGGFEVCDDMVTKDIMTPLVALLKECSAGLDSNEMSLQEKKDQNRNSIENIANETVNVLWNICECSSRAVSIFNKEGCLEIVLKYLSRFPTNVDLAISVAYCLQTVTEDNPELLKSFSATALNMLESALLSPVSSMESLLLKTLVAGTIWNLKDIIPCKSQAEIINALLKILSEVLGMDAGEMVIQMKEAETQRLKTAAEAEEILENTNGDDLIEDDEMEGISHKRRVRRKTFVSDLLPPTDKELRETIALLTAQQTALEIIVNMCCNEDPSDDEWEELSSSDESDAFMENSFSECGGQLFSPLCLSHEVHTALTNYLIPKKIFEKTAFPNSIAVDLCSRNPTWKPLIRKMNTIQCRALFCLQSLVSLLDVEHLGGAAALQTLAQHLSQLLFSQPDFAKHVDFLEAISSALRALLQTMASKNISQCMTPDQLMTLCKAGIHSSNVGVRVNVVSILGITGSVLAKEDGTLETLKNIGCFLLEVTTKDPSLVVAGEALDALFDVFADGKEAERASIQIKLLSALKEFQPVFKMKVLGPNS

SEQ ID NO: 3758 - protein, 560 aa, Artificial Sequence
  Synthetic polypeptide
MGPEARRTTGRRRSCWKRNLSACGGFEVCDDMVTKDIMTPLVALLKECSAGLDSNEMSLQEKKDQNRNSIENIANETVNVLWNICECSSRAVSIFNKEGCLEIVLKYLSRFPTNVDLAISVAYCLQTVTEDNPELLKSFSATALNMLESALLSPVSSMESLLLKTLVAGTIWNLKDIIPCKSQAEIINALLKILSEVLGMDAGEMVIQMKEAETQRLKTAAEAEEILENTNGDDLIEDDEMEGISHKRRVRRKTFVSDLLPPTDKELRETIALLTAQQTALEIIVNMCCNEDPSDDEWEELSSSDESDAFMENSFSECGGQLFSPLCLSHEVHTALTNYLIPKKIFEKTAFPNSIAVDLCSRNPTWKPLIRKMNTIQCRALFCLQSLVSLLDVEHLGGAAALQTLAQHLSQLLFSQPDFAKHVDFLEAISSALRALLQTMASKNISQCMTPDQLMTLCKAGIHSSNVGVRVNVVSILGITGSVLAKEDGTLETLKNIGCFLLEVTTKDPSLVVAGEALDALFDVFADGKEAERASIQIKLLSALKEFQPVFKMKVLGPNS

SEQ ID NO: 3759 - protein, 54 aa, Artificial Sequence
  Synthetic polypeptide
MRPRPRSAPGKPRRRSRARLRSSRTPSSGGASGGGGSSSSSSTATGGSGSSTGS

SEQ ID NO: 3760 - protein, 926 aa, Artificial Sequence
  Synthetic polypeptide
MPAKGRYFLNEGEEGPDQDALYEKYQLTSQHGPLLLTLLLVAATACVALIIIAFSQGDPSRHQAILGMAFLVLAVFAALSVLMYVECLLRRWLRALALLTWACLVALGYVLVFDAWTKAACAWEQVPFFLFIVFVVYTLLPFSMRGAVAVGAVSTASHLLVLGSLMGGFTTPSVRVGLQLLANAVIFLCGNLTGAFHKHQMQDASRDLFTYTVKCIQIRRKLRIEKRQQENLLLSVLPAHISMGMKLAIIERLKEHGDRRCMPDNNFHSLYVKRHQNVSILYADIVGFTQLASDCSPKELVVVLNELFGKFDQIAKANECMRIKILGDCYYCVSGLPVSLPTHARNCVKMGLDMCQAIKQVREATGVDINMRVGIHSGNVLCGVIGLRKWQYDVWSHDVSLANRMEAAGVPGRVHITEATLKHLDKAYEVEDGHGQQRDPYLKEMNIRTYLVIDPRSQQPPPPSQHLPRPKGDAALKMRASVRMTRYLESWGAARPFAHLNHRESVSSGETHVPNGRRPKSVPQRHRRTPDRSMSPKGRSEDDSYDDEMLSAIEGLSSTRPCCSKSDDFYTFGSIFLEKGFEREYRLAPIPRARHDFACASLIFVCILLVHVLLMPRTAALGVSFGLVACVLGLVLGLCFATKFSRCCPARGTLCTISERVETQPLLRLTLAVLTIGSLLTVAIINLPLMPFQVPELPVGNETGLLAASSKTRALCEPLPYYTCSCVLGFIACSVFLRMSLEPKVVLLTVALVAYLVLFNLSPCWQWDCCGQGLGNLTKPNGTTSGTPSCSWKDLKTMTNFYLVLFYITLLTLSRQIDYYCRLDCLWKKKFKKEHEEFETMENVNRLLLENVLPAHVAAHFIGDKLNEDWYHQSYDCVCVMFASVPDFKVFYTECDVNKEGLECLRLLNEIIADFDEPGQQYTTLS

SEQ ID NO: 3761 - protein, 364 aa, Artificial Sequence
  Synthetic polypeptide
MGKKHKKHKSDKHLYEEYVEKPLKLVLKVGGNEVTELSTGSSGHDSSLFEDKNDHDKHKDRKRKKRKKGEKQIPGEEKGRKRRRVKEDKKKRDRDRVENEAEKDLQCHAPVRLDLPPEKPLTSSLAKQEEVEQTPLQEALNQLMRQLQRKDPSAFFSFPVTDFIAPGYSMIIKHPMDFSTMKEKIKNNDYQSIEELKDNFKLMCTNAMIYNKPETIYYKAAKKLLHSGMKILSQERIQSLKQSIDFMADLQKTRKQKDGTDTSQSGEDGGCWQREREDSGDAEAHAFKSPSKENKKKDKDMLEDKFKSNNLEREQEQLDRIVKESGGKLTRRLVNSQISHYVYVNIPKSGKICNPQHSGIKHFG

SEQ ID NO: 3762 - protein, 101 aa, Artificial Sequence
  Synthetic polypeptide
MGKLHSKPAAVCKRRESPEGDSFAVSAAWARKGIEEWIGRQRCPGGVSGPRQLRLAGTIGRSTRELVGDVLRDTLSEEEEDDFRLEAPQVACMNTALREAL

SEQ ID NO: 3763 - protein, 179 aa, Artificial Sequence
  Synthetic polypeptide
MGKLHSKPAAVCKRRESPEGDSFAVSAAWARKGIEEWIGRQRCPGGVSGPRQLRLAGTIGRSTRELVGDVLRDTLSEEEEDDFRLEVALPPEKTDGLGSGDEKKMERVSEPCPGSKKQLKFEELQCDVSMEEDSRQEWTFTLYDFDNNGKVTREQMLLMPPLHFPWVHLKVHLLPWWMV

SEQ ID NO: 3764 - protein, 178 aa, Artificial Sequence
  Synthetic polypeptide
MGKLHSKPAAVCKRRESPEGDSFAVSAAWARKGIEEWIGRQRCPGGVSGPRQLRLAGTIGRSTRELVGDVLRDTLSEEEEDDFRLEVALPPEKTDGLGSGDEKKMERVSEPCPGSKKQLKFEELQCDVSMEEDSRQEWTFTLYDFDNNGKVTREMLLMPPLHFPWVHLKVHLLPWWMV

SEQ ID NO: 3765 - protein, 503 aa, Artificial Sequence
  Synthetic polypeptide
MTDPMMDFFDDANLFGETLEGLSDDAFVQPGPVSLVDELNLGAEFEPLHIDSLNHVQGTPTHQKMTDFEQLNQFDSIKFHHVNQSFGSPAEHVLSPHSQFNCSPIHPQNQPNGLFPDVSDGSPMWGHQTATTISNQNGSPFHQQGHSHSMHQNKSFVAHHDFALFQANEQQTQCTSLRSQQNRNNLNPGQNSLSQSKNFMNVSGPHRVNVNHPPQMTNASNSQQSISMQQFSQTSNPSAHFHKCSSHQEGNFNGPSPNMTSCSVSNSQQFSSHYSFSSNHISPNSLLQSSAVLASNHTNQTLSDFTGSNSFSPHRGIKQESTQHILNPNTSLNSNNFQILHSSHPQGNYSNSKLSPVHMNFPDPVDSGTQMGHFNDHVETNGFSSLEENLLHQVESQTEPFTGLDPEDLLQEGLLPHFDESTFGQDNSSHILDHDLDRQFTSHLVTRPSDMAQTQLQSQARSWHSSFSNHQHLHDRNHLCLQRQAHRWKGLALCQMRLWTVDF

SEQ ID NO: 3766 - protein, 966 aa, Artificial Sequence
  Synthetic polypeptide
MTDPMMDFFDDANLFGETLEGLSDDAFVQPGPVSLVDELNLGAEFEPLHIDSLNHVQGTPTHQKMTDFEQLNQFDSIKFHHVNQSFGSPAEHVLSPHSQFNCSPIHPQNQPNGLFPDVSDGSPMWGHQTATTISNQNGSPFHQQGHSHSMHQNKSFVAHHDFALFQANEQQTQCTSLRSQQNRNNLNPGQNSLSQSKNFMNVSGPHRVNVNHPPQMTNASNSQQSISMQQFSQTSNPSAHFHKCSSHQEGNFNGPSPNMTSCSVSNSQQFSSHYSFSSNHISPNSLLQSSAVLASNHTNQTLSDFTGSNSFSPHRGIKQESTQHILNPNTSLNSNNFQILHSSHPQGNYSNSKLSPVHMNFPDPVDSGTQMGHFNDHVETNGFSSLEENLLHQVESQTEPFTGLDPEDLLQEGLLPHFDESTFGQDNSSHILDHDLDRQFTSHLVTRPSDMAQTQLQSQARSWHSSFSNHQHLHDRNHLCLQRQPPSSKKSDGSGTYTKLQNTQVRVMSEKKQRKKVESESKQEKANRIISEAIAKAKERGERNIPRVMSPENFPTASVEGKEEKKGRRMKSKPKDKDSKKTKTCSKLKEKTKIGKLIITLGKKQKRKNESSDEISDAEQMPQHTLKDQDSQKRRSNRQIKRKKYAEDIEGKQSEEEVKGSMKIKKNSAPLPGEQPLQLFVENPSEEDAAIVDKILSSRTVKKEISPGVMIDTEEFFVKYKNYSYLHCEWATEEQLLKDKRIQQKIKRFKLRQAQRAHFFADMEEEPFNPDYVEVDRVLEVSFCEDKDTGEPVIYYLVKWCSLPYEDSTWELKEDVDLAKIEEFEQLQASRPDTRRLDRPPSNIWKKIDQSRDYKNGNQLREYQLEGLNWLLFNWYNRRNCILADEMGLGKTIQSITFLYEILLTGIRGPFLIIAPLSTIANWEREFRTWTDINVVVYHGSLISRQMIQQYEMYFRDSQPKSLRPQ

SEQ ID NO: 3767 - protein, 492 aa, Artificial Sequence
  Synthetic polypeptide
MSSVKRPRGRPPSSKKSDGSGTYTKLQNTQVRVMSEKKQRKKVESESKQEKANRIISEAIAKAKERGERNIPRVMSPENFPTASVEGKEEKKGRRMKSKPKDKDSKKTKTCSKLKEKTKIGKLIITLGKKQKRKNESSDEISDAEQMPQHTLKDQDSQKRRSNRQIKRKKYAEDIEGKQSEEEVKGSMKIKKNSAPLPGEQPLQLFVENPSEEDAAIVDKILSSRTVKKEISPGVMIDTEEFFVKYKNYSYLHCEWATEEQLLKDKRIQQKIKRFKLRQAQRAHFFADMEEEPFNPDYVEVDRVLEVSFCEDKDTGEPVIYYLVKWCSLPYEDSTWELKEDVDLAKIEEFEQLQASRPDTRRLDRPPSNIWKKIDQSRDYKNGNQLREYQLEGLNWLLFNWYNRRNCILADEMGLGKTIQSITFLYEILLTGIRGPFLIIAPLSTIANWEREFRTWTDINVVVYHGSLISRQMIQQYEMYFRDSQPKSLRPQ

SEQ ID NO: 3768 - protein, 2558 aa, Artificial Sequence
  Synthetic polypeptide
MTDPMMDFFDDANLFGETLEGLSDDAFVQPGPVSLVDELNLGAEFEPLHIDSLNHVQGTPTHQKMTDFEQLNQFDSIKFHHVNQSFGSPAEHVLSPHSQFNCSPIHPQNQPNGLFPDVSDGSPMWGHQTATTISNQNGSPFHQQGHSHSMHQNKSFVAHHDFALFQANEQQTQCTSLRSQQNRNNLNPGQNSLSQSKNFMNVSGPHRVNVNHPPQMTNASNSQQSISMQQFSQTSNPSAHFHKCSSHQEGNFNGPSPNMTSCSVSNSQQFSSHYSFSSNHISPNSLLQSSAVLASNHTNQTLSDFTGSNSFSPHRGIKQESTQHILNPNTSLNSNNFQILHSSHPQGNYSNSKLSPVHMNFPDPVDSGTQMGHFNDHVETNGFSSLEENLLHQVESQTEPFTGLDPEDLLQEGLLPHFDESTFGQDNSSHILDHDLDRQFTSHLVTRPSDMAQTQLQSQARSWHSSFSNHQHLHDRNHLCLQRQPPSSKKSDGSGTYTKLQNTQVRVMSEKKQRKKVESESKQEKANRIISEAIAKAKERGERNIPRVMSPENFPTASVEGKEEKKGRRMKSKPKDKDSKKTKTCSKLKEKTKIGKLIITLGKKQKRKNESSDEISDAEQMPQHTLKDQDSQKRRSNRQIKRKKYAEDIEGKQSEEEVKGSMKIKKNSAPLPGEQPLQLFVENPSEEDAAIVDKILSSRTVKKEISPGVMIDTEEFFVKYKNYSYLHCEWATEEQLLKDKRIQQKIKRFKLRQAQRAHFFADMEEEPFNPDYVEVDRVLEVSFCEDKDTGEPVIYYLVKWCSLPYEDSTWELKEDVDLAKIEEFEQLQASRPDTRRLDRPPSNIWKKIDQSRDYKNGNQLREYQLEGLNWLLFNWYNRRNCILADEMGLGKTIQSITFLYEILLTGIRGPFLIIAPLSTIANWEREFRTWTDINVVVYHGSLISRQMIQQYEMYFRDSQGRIIRGAYRFQAIITTFEMILGGCGELNAIEWRCVIIDEAHRLKNKNCKLLEGLKLMNLEHKVLLTGTPLQNTVEELFSLLHFLEPLRFPSESTFMQEFGDLKTEEQVQKLQAILKPMMLRRLKEDVEKKLAPKEETIIEVELTNIQKKYYRAILEKNFSFLSKGAGQTNVPNLVNTMMELRKCCNHPYLIKGAEEKILGEFRDTYNPAASDFHLQAMIQSAGKLVLIDKLLPKMKAGGHKVLIFSQMVRCLDILEDYLIHKRYLYERIDGRVRGNLRQAAIDRFSKPDSDRFVFLLCTRAGGLGINLTAADTCIIFDSDWNPQNDLQAQARCHRIGQNKAVKVYRLVTRNSYEREMFDRASLKLGLDKAVLQSMSGRESNVGGIQQLSKKEIEDLLRRGAYGAIMEEEDEGSKFCEEDIDQILLRRTKTITIESEGRGSTFAKASFVASGNRTDISLDDPNFWQKWAKKAEIDIEAISGRNSLVIDTPRIRKQTRPFSATKDELAELSEAESEGDEKPKLRRPCDRSNGYGRTECFRVEKNLLVYGWGRWREILSHGRFKRQLNEHDVEIICRALLAYCLVHYRGDEKIKGFIWDLITPTEDGQTRELQNHLGLSAPVPRGRKGKKVKTQTSSFDIQKAEWLRKYNPEQLLQDEGYKKHIKHHCNKVLLRVRMLYYLKQEVIGNECQKVFDGVDASDIDVWVPEPDHSEVPAEWWDFDADKSLLIGVFKHGYEKYNTIRADPALCFLERVGKPDEKAVAAEQRANDYMDGDVEDPEYKPAPAIFKDDIEDDVSSPGDLVIADGDGQLMEGDKVYWPTQSALTTRLRRLITAYQRTNKNRQIQQIQPTFSVPTSVMQPIYEEATLNPKMAAKIERQQRWTRREEADFYRVVSTFGVVFDPDRGQFDWTKFRAMARLHKKTDDSLEKYLYAFMSMCRRVCRLPSKEELVDPNIFIQPITEERASRTLYRIELLRKVREQALRHPQLFERLKLCHPNPDLPVWWECGPHDRDLLIGAAKHGVSRTDYHILRDPELSFMAAQRNYSQSKMAHSRTSTPLLQQYQVALSASPLTSLPRLLDAKGIILEEMKVKSENLKEEPQSSEEESMSSVETRTLIKSEPVSPKNGVLPQATGDQKSGGKCETDRRMVAARTEPLTPNPASKKPRVHKRGSESSSDSDSDSERSSCSSRSSSSSSSSSCSHSRSGSSSSSSSSCSSASSSSSSSTSSSSSSSSSSSEESDSDEEEAQKRAESTTHMKAYDEESVASLSTTQDETQDSFQMNNGTPESAYILQGGYMLAASYWPKDRVMINRLDSICQTVLKGKWPSARRSYDANTVASFYTTKLLDSPGAATEYSDPSVPTPPGAGVKEEHDQSTQMSKEGGLKLTFQKQGLAQKRPFDGEDGALGQQQYLTRLRELQSASETSLVNFPKSIPVSGTSIQPTLGANGVILDNQPIVKKRRGRRKNVEGVDIFFFNRNKPPNHVSLGLTSSQISTGINPALSYTQPQGIPDTESPVPVINLKDGTRLAGDDAPKRKDLEKWLKEHPGYVEDLGAFIPRMQLHEGRPKQKRHRCRNPNKLDVNSLTGEERVQLINRRNARKKN

SEQ ID NO: 3769 - protein, 2557 aa, Artificial Sequence
  Synthetic polypeptide
MTDPMMDFFDDANLFGETLEGLSDDAFVQPGPVSLVDELNLGAEFEPLHIDSLNHVQGTPTHQKMTDFEQLNQFDSIKFHHVNQSFGSPAEHVLSPHSQFNCSPIHPQNQPNGLFPDVSDGSPMWGHQTATTISNQNGSPFHQQGHSHSMHQNKSFVAHHDFALFQANEQQTQCTSLRSQQNRNNLNPGQNSLSQSKNFMNVSGPHRVNVNHPPQMTNASNSQQSISMQQFSQTSNPSAHFHKCSSHQEGNFNGPSPNMTSCSVSNSQQFSSHYSFSSNHISPNSLLQSSAVLASNHTNQTLSDFTGSNSFSPHRGIKQESTQHILNPNTSLNSNNFQILHSSHPQGNYSNSKLSPVHMNFPDPVDSGTQMGHFNDHVETNGFSSLEENLLHQVESQTEPFTGLDPEDLLQEGLLPHFDESTFGQDNSSHILDHDLDRQFTSHLVTRPSDMAQTQLQSQARSWHSSFSNHQHLHDRNHLCLQRQPPSSKKSDGSGTYTKLQNTQVRVMSEKKQRKKVESESKQEKANRIISEAIAKAKERGERNIPRVMSPENFPTASVEGKEEKKGRRMKSKPKDKDSKKTKTCSKLKEKTKIGKLIITLGKKQKRKNESSDEISDAEQMPQHTLKDQDSQKRRSNRQIKRKKYAEDIEGKQSEEEVKGSMKIKKNSAPLPGEQPLQLFVENPSEEDAAIVDKILSSRTVKKEISPGVMIDTEEFFVKYKNYSYLHCEWATEEQLLKDKRIQQKIKRFKLRQAQRAHFFADMEEEPFNPDYVEVDRVLEVSFCEDKDTGEPVIYYLVKWCSLPYEDSTWELKEDVDLAKIEEFEQLQASRPDTRRLDRPPSNIWKKIDQSRDYKNGNQLREYQLEGLNWLLFNWYNRRNCILADEMGLGKTIQSITFLYEILLTGIRGPFLIIAPLSTIANWEREFRTWTDINVVVYHGSLISRQMIQQYEMYFRDSQGRIIRGAYRFQAIITTFEMILGGCGELNAIEWRCVIIDEAHRLKNKNCKLLEGLKLMNLEHKVLLTGTPLQNTVEELFSLLHFLEPLRFPSESTFMQEFGDLKTEEQVQKLQAILKPMMLRRLKEDVEKKLAPKEETIIEVELTNIQKKYYRAILEKNFSFLSKGAGQTNVPNLVNTMMELRKCCNHPYLIKGAEEKILGEFRDTYNPAASDFHLQAMIQSAGKLVLIDKLLPKMKAGGHKVLIFSQMVRCLDILEDYLIHKRYLYERIDGRVRGNLRQAAIDRFSKPDSDRFVFLLCTRAGGLGINLTAADTCIIFDSDWNPQNDLQAQARCHRIGQNKAVKVYRLVTRNSYEREMFDRASLKLGLDKAVLQSMSGRESNVGGIQQLSKKEIEDLLRRGAYGAIMEEEDEGSKFCEEDIDQILLRRTKTITIESEGRGSTFAKASFVASGNRTDISLDDPNFWQKWAKKAEIDIEAISGRNSLVIDTPRIRKQTRPFSATKDELAELSEAESEGDEKPKLRRPCDRSNGYGRTECFRVEKNLLVYGWGRWREILSHGRFKRQLNEHDVEIICRALLAYCLVHYRGDEKIKGFIWDLITPTEDGQTRELQNHLGLSAPVPRGRKGKKVKTQTSSFDIQKAEWLRKYNPEQLLQDEGYKKHIKHHCNKVLLRVRMLYYLKQEVIGNECQKVFDGVDASDIDVWVPEPDHSEVPAEWWDFDADKSLLIGVFKHGYEKYNTIRADPALCFLERVGKPDEKAVAAEQRANDYMDGDVEDPEYKPAPAIFKDDIEDDVSSPGDLVIADGDGQLMEGDKVYWPTQSALTTRLRRLITAYQRTNKNRQIQQIQPTFSVPTSVMQPIYEEATLNPKMAAKIERQQRWTRREEADFYRVVSTFGVVFDPDRGQFDWTKFRAMARLHKKTDDSLEKYLYAFMSMCRRVCRLPSKEELVDPNIFIQPITEERASRTLYRIELLRKVREQALRHPQLFERLKLCHPNPDLPVWWECGPHDRDLLIGAAKHGVSRTDYHILRDPELSFMAAQRNYSQSKMAHSRTSTPLLQQYQVALSASPLTSLPRLLDAKGIILEEMKVKSENLKEEPQSSEEESMSSVETRTLIKSEPVSPKNGVLPQATGDQKSGGKCETDRRMVAARTEPLTPNPASKKPRVHKRGSESSSDSDSDSERSSCSSRSSSSSSSSSCSHSRSGSSSSSSSSCSSASSSSSSSTSSSSSSSSSSSEESDSDEEEAQKRESTTHMKAYDEESVASLSTTQDETQDSFQMNNGTPESAYILQGGYMLAASYWPKDRVMINRLDSICQTVLKGKWPSARRSYDANTVASFYTTKLLDSPGAATEYSDPSVPTPPGAGVKEEHDQSTQMSKEGGLKLTFQKQGLAQKRPFDGEDGALGQQQYLTRLRELQSASETSLVNFPKSIPVSGTSIQPTLGANGVILDNQPIVKKRRGRRKNVEGVDIFFFNRNKPPNHVSLGLTSSQISTGINPALSYTQPQGIPDTESPVPVINLKDGTRLAGDDAPKRKDLEKWLKEHPGYVEDLGAFIPRMQLHEGRPKQKRHRCRNPNKLDVNSLTGEERVQLINRRNARKKN

SEQ ID NO: 3770 - protein, 2573 aa, Artificial Sequence
  Synthetic polypeptide
MTDPMMDFFDDANLFGETLEGLSDDAFVQPGPVSLVDELNLGAEFEPLHIDSLNHVQGTPTHQKMTDFEQLNQFDSIKFHHVNQSFGSPAEHVLSPHSQFNCSPIHPQNQPNGLFPDVSDGSPMWGHQTATTISNQNGSPFHQQGHSHSMHQNKSFVAHHDFALFQANEQQTQCTSLRSQQNRNNLNPGQNSLSQSKNFMNVSGPHRVNVNHPPQMTNASNSQQSISMQQFSQTSNPSAHFHKCSSHQEGNFNGPSPNMTSCSVSNSQQFSSHYSFSSNHISPNSLLQSSAVLASNHTNQTLSDFTGSNSFSPHRGIKQESTQHILNPNTSLNSNNFQILHSSHPQGNYSNSKLSPVHMNFPDPVDSGTQMGHFNDHVETNGFSSLEENLLHQVESQTEPFTGLDPEDLLQEGLLPHFDESTFGQDNSSHILDHDLDRQFTSHLVTRPSDMAQTQLQSQARSWHSSFSNHQHLHDRNHLCLQRQPPSSKKSDGSGTYTKLQNTQVRVMSEKKQRKKVESESKQEKANRIISEAIAKAKERGERNIPRVMSPENFPTASVEGKEEKKGRRMKSKPKDKDSKKTKTCSKLKEKTKIGKLIITLGKKQKRKNESSDEISDAEQMPQHTLKDQDSQKRRSNRQIKRKKYAEDIEGKQSEEEVKGSMKIKKNSAPLPGEQPLQLFVENPSEEDAAIVDKILSSRTVKKEISPGVMIDTEEFFVKYKNYSYLHCEWATEEQLLKDKRIQQKIKRFKLRQAQRAHFFADMEEEPFNPDYVEVDRVLEVSFCEDKDTGEPVIYYLVKWCSLPYEDSTWELKEDVDLAKIEEFEQLQASRPDTRRLDRPPSNIWKKIDQSRDYKNGNQLREYQLEGLNWLLFNWYNRRNCILADEMGLGKTIQSITFLYEILLTGIRGPFLIIAPLSTIANWEREFRTWTDINVVVYHGSLISRQMIQQYEMYFRDSQGRIIRGAYRFQAIITTFEMILGGCGELNAIEWRCVIIDEAHRLKNKNCKLLEGLKLMNLEHKVLLTGTPLQNTVEELFSLLHFLEPLRFPSESTFMQEFGDLKTEEQVQKLQAILKPMMLRRLKEDVEKKLAPKEETIIEVELTNIQKKYYRAILEKNFSFLSKGAGQTNVPNLVNTMMELRKCCNHPYLIKGAEEKILGEFRDTYNPAASDFHLQAMIQSAGKLVLIDKLLPKMKAGGHKVLIFSQMVRCLDILEDYLIHKRYLYERIDGRVRGNLRQAAIDRFSKPDSDRFVFLLCTRAGGLGINLTAADTCIIFDSDWNPQNDLQAQARCHRIGQNKAVKVYRLVTRNSYEREMFDRASLKLGLDKAVLQSMSGRESNVGGIQQLSKKEIEDLLRRGAYGAIMEEEDEGSKFCEEDIDQILLRRTKTITIESEGRGSTFAKASFVASGNRTDISLDDPNFWQKWAKKAEIDIEAISGRNSLVIDTPRIRKQTRPFSATKDELAELSEAESEGDEKPKLRRPCDRSNGYGRTECFRVEKNLLVYGWGRWREILSHGRFKRQLNEHDVEIICRALLAYCLVHYRGDEKIKGFIWDLITPTEDGQTRELQNHLGLSAPVPRGRKGKKVKTQTSSFDIQKAEWLRKYNPEQLLQDEGYKKHIKHHCNKVLLRVRMLYYLKQEVIGNECQKVFDGVDASDIDVWVPEPDHSEVPAEWWDFDADKSLLIGVFKHGYEKYNTIRADPALCFLERVGKPDEKAVAAEQRANDYMDGDVEDPEYKPAPAIFKDDIEDDVSSPGDLVIADGDGQLMEGDKVYWPTQSALTTRLRRLITAYQRTNKNRQIQQIQPTFSVPTSVMQPIYEEATLNPKMAAKIERQQRWTRREEADFYRVVSTFGVVFDPDRGQFDWTKFRAMARLHKKTDDSLEKYLYAFMSMCRRVCRLPSKEELVDPNIFIQPITEERASRTLYRIELLRKVREQALRHPQLFERLKLCHPNPDLPVWWECGPHDRDLLIGAAKHGVSRTDYHILRDPELSFMAAQRNYSQSKMAHSRTSTPLLQQYQVALSASPLTSLPRLLDAKGIILEEMKVKSENLKEEPQSSEEESMSSVETRTLIKSEPVSPKNGVLPQATGDQKSGGKCETDRRMVAARTEPLTPNPASKKPRVHKRGSESSSDSDSDSERSSCSSRSSSSSSSSSCSHSRSGSSSSSSSSCSSASSSSSSSTSSSSSSSSSSSEESDSDEEEAQKRESTTHMKAYDEESVASLSTTQDETQDSFQMNNGTPESAYILQGGYMLAASYWPKDRVMINRLDSICQTVLKGKWPSARRSYDANTVASFYTTKLLDSPGAATEYSDPSVPTPPGAGVKEEHDQSTQMSKVKKHVREKEFTVKIKDEGGLKLTFQKQGLAQKRPFDGEDGALGQQQYLTRLRELQSASETSLVNFPKSIPVSGTSIQPTLGANGVILDNQPIVKKRRGRRKNVEGVDIFFFNRNKPPNHVSLGLTSSQISTGINPALSYTQPQGIPDTESPVPVINLKDGTRLAGDDAPKRKDLEKWLKEHPGYVEDLGAFIPRMQLHEGRPKQKRHRCRNPNKLDVNSLTGEERVQLINRRNARKKN

SEQ ID NO: 3771 - protein, 6 aa, Artificial Sequence
  Synthetic polypeptide
HLIMFL

SEQ ID NO: 3772 - protein, 12 aa, Artificial Sequence
  Synthetic polypeptide
SSTILYSTSRNS

SEQ ID NO: 3773 - protein, 436 aa, Artificial Sequence
  Synthetic polypeptide
MASAPPASPPGSEPPGPDPEPGGPDGPGAAQLAPGPAELRLGAPVGGPDPQSPGLDEPAPGAAADGGARWSAGPAPGLEGGPRDPGPSAPPPRSGPRGQLASPDAPGPGPRSEAPLPELDPLFSWTEEPEECGPASCPESAPFRLQGSSSSHRARGEVDVFSPFPAPTAGELALEQGPGSPPQPSDLSQTHPLPSEPVGSQEDGPRLRAVFDALDGDGDGFVRIEDFIQFATVYGAEQVKDLTKYLDPSGLGVISFEDFYQGITAIRNGDPDGQCYGGVASAQDEEPLACPDEFDDFVTYEANEVTDSAYMGSESTYSECETFTDEDTSTLVHPELQPEGDADSAGGSAVPSECLDAMEEPDHGALLLLPGRPHPHGQSVITVIGGEEHFEDYGEGSEAELSPETLCNGQLGCSDPAFLTPSPTKRLSSKKVARCL

SEQ ID NO: 3774 - protein, 481 aa, Artificial Sequence
  Synthetic polypeptide
MASAPPASPPGSEPPGPDPEPGGPDGPGAAQLAPGPAELRLGAPVGGPDPQSPGLDEPAPGAAADGGARWSAGPAPGLEGGPRDPGPSAPPPRSGPRGQLASPDAPGPGPRSEAPLPELDPLFSWTEEPEECGPASCPESAPFRLQGSSSSHRARGEVDVFSPFPAPTAGELALEQGPGSPPQPSDLSQTHPLPSEPVGSQEDGPRLRAVFDALDGDGDGFVRIEDFIQFATVYGAEQVKDLTKYLDPSGLGVISFEDFYQGITAIRNGDPDGQCYGGVASAQDEEPLACPDEFDDFVTYEANEVTDSAYMGSESTYSECETFTDEDTSTLVHPELQPEGDADSAGGSAVPSECLDAMEEPDHGALLLLPGRPHPHGQSVITVIGGEEHFEDYGEGSEAELSPETLCNGQLGCSDPAFLTPSTDPLAAKLHSILTDEAFEFYCSQCHKQINRLEDLSARLSDLEMNSPTKRLSSKKVARCL

SEQ ID NO: 3775 - protein, 357 aa, Artificial Sequence
  Synthetic polypeptide
WTEEPEECGPASCPESAPFRLQGSSSSHRARGEVDVFSPFPAPTAGELALEQGPGSPPQPSDLSQTHPLPSEPVGSQEDGPRLRAVFDALDGDGDGFVRIEDFIQFATVYGAEQVKDLTKYLDPSGLGVISFEDFYQGITAIRNGDPDGQCYGGVASAQDEEPLACPDEFDDFVTYEANEVTDSAYMGSESTYSECETFTDEDTSTLVHPELQPEGDADSAGGSAVPSECLDAMEEPDHGALLLLPGRPHPHGQSVITVIGGEEHFEDYGEGSEAELSPETLCNGQLGCSDPAFLTPSTDPLAAKLHSILTDEAFEFYCSQCHKQINRLEDLSARLSDLEMNSPTKRLSSKKVARCL

SEQ ID NO: 3776 - protein, 140 aa, Artificial Sequence
  Synthetic polypeptide
MPFLKANEVTDSAYMGSESTYSECETFTDEDTSTLVHPELQPEGDADSAGGSAVPSECLDAMEEPDHGALLLLPGRPHPHGQSVITVIGGEEHFEDYGEGSEAELSPETLCNGQLGCSDPAFLTPSPTKRLSSKKVARCL

SEQ ID NO: 3777 - protein, 126 aa, Artificial Sequence
  Synthetic polypeptide
MGSESTYSECETFTDEDTSTLVHPELQPEGDADSAGGSAVPSECLDAMEEPDHGALLLLPGRPHPHGQSVITVIGGEEHFEDYGEGSEAELSPETLCNGQLGCSDPAFLTPSPTKRLSSKKVARCL

SEQ ID NO: 3778 - protein, 136 aa, Artificial Sequence
  Synthetic polypeptide
GGSAVPSECLDAMEEPDHGALLLLPGRPHPHGQSVITVIGGEEHFEDYGEGSEAELSPETLCNGQLGCSDPAFLTPSTDPLAAKLHSILTDEAFEFYCSQCHKQINRLEDLSARLSDLEMNSPTKRLSSKKVARCL

SEQ ID NO: 3779 - protein, 77 aa, Artificial Sequence
  Synthetic polypeptide
MSRCAQAAEVAATVPGAGVGNVGLRPPMVPRQASFFPPPVPNPFVQQTQIGSARRVQENNTRLRLGYTGRNEEHWKW

SEQ ID NO: 3780 - protein, 272 aa, Artificial Sequence
  Synthetic polypeptide
MDTEGFGELLQQAEQLAAETEGISELPHVERNLQEIQQAGERLRSRTLTRTSQETADVKASVLLGSRGLDISHISQRLESLSAATTFEPLEPVKDTDIQGFLKNEKDNALLSAIEESRKRTFGMAEEYHRESMLVEWEQVKQRILHTLLASGEDALDFTQESEPSYISDVGPPGRSSLDNIEMAYARQIYIYNEKIVNGHLQPNLVDLCASVAELDDKSISDMWTMVKQMTDVLLTPATDALKNRSSVEVRMEFVRQALAYLEQRFESVQNK

SEQ ID NO: 3781 - protein, 65 aa, Artificial Sequence
  Synthetic polypeptide
MDTEGFELDDKSISDMWTMVKQMTDVLLTPATDALKNRSSVEVRMEFVRQALAYLEQRFESVQNK

SEQ ID NO: 3782 - protein, 149 aa, Artificial Sequence
  Synthetic polypeptide
MAEEYHRESMLVEWEQVKQRILHTLLASGEDALDFTQESEPSYISDVGPPGRSSLDNIEMAYARQIYIYNEKIVNGHLQPNLVDLCASVAELDDKSISDMWTMVKQMTDVLLTPATDALKNRSSVEVRMEFVRQALAYLEQRFESVQNK

SEQ ID NO: 3783 - protein, 755 aa, Artificial Sequence
  Synthetic polypeptide
MDTEGFGELLQQAEQLAAETEGISELPHVERNLQEIQQAGERLRSRTLTRTSQETADVKASVLLGSRGLDISHISQRLESLSAATTFEPLEPVKDTDIQGFLKNEKDNALLSAIEESRKRTFGMAEEYHRESMLVEWEQVKQRILHTLLASGEDALDFTQESEPSYISDVGPPGRSSLDNIEMAYARQIYIYNEKIVNGHLQPNLVDLCASVAELDDKSISDMWTMVKQMTDVLLTPATDALKNRSSVEVRMEFVRQALAYLEQSYKNYTLVTVFGNLHQAQLGGVPGTYQLVRSFLNIKLPAPLPGLQDGEVEGHPVWALIYYCMRCGDLLAASQVVNRAQHQLGEFKTWFQEYMNSKDRRLSPATENKLRLHYRRALRNNTDPYKRAVYCIIGRCDVTDNQSEVADKTEDYLWLKLNQVCFDDDGTSSPQDRLTLSQFQKQLLEDYGESHFTVNQQPFLYFQVLFLTAQFEAAVAFLFRMERLRCHAVHVALVLFELKLLLKSSGQSAQLLSHEPGDPPCLRRLNFVRLLMLYTRKFESTDPREALQYFYFLRDEKDSQGENMFLRCVSELVIESREFDMILGKLENDGSRKPGVIDKFTSDTKPIINKVASVAENKGLFEEAAKLYDLAKNADKVLELMNKLLSPVVPQISAPQSNKERLKNMALSIAERYRAQGISANKFVDSTFYLLLDLITFFDEYHSGHIDRAFDIIERLKLVPLNQESVEERVAAFRNFSDEPGAVAHTYNPNILGG

SEQ ID NO: 3784 - protein, 632 aa, Artificial Sequence
  Synthetic polypeptide
MAEEYHRESMLVEWEQVKQRILHTLLASGEDALDFTQESEPSYISDVGPPGRSSLDNIEMAYARQIYIYNEKIVNGHLQPNLVDLCASVAELDDKSISDMWTMVKQMTDVLLTPATDALKNRSSVEVRMEFVRQALAYLEQSYKNYTLVTVFGNLHQAQLGGVPGTYQLVRSFLNIKLPAPLPGLQDGEVEGHPVWALIYYCMRCGDLLAASQVVNRAQHQLGEFKTWFQEYMNSKDRRLSPATENKLRLHYRRALRNNTDPYKRAVYCIIGRCDVTDNQSEVADKTEDYLWLKLNQVCFDDDGTSSPQDRLTLSQFQKQLLEDYGESHFTVNQQPFLYFQVLFLTAQFEAAVAFLFRMERLRCHAVHVALVLFELKLLLKSSGQSAQLLSHEPGDPPCLRRLNFVRLLMLYTRKFESTDPREALQYFYFLRDEKDSQGENMFLRCVSELVIESREFDMILGKLENDGSRKPGVIDKFTSDTKPIINKVASVAENKGLFEEAAKLYDLAKNADKVLELMNKLLSPVVPQISAPQSNKERLKNMALSIAERYRAQGISANKFVDSTFYLLLDLITFFDEYHSGHIDRAFDIIERLKLVPLNQESVEERVAAFRNFSDEPGAVAHTYNPNILGG

SEQ ID NO: 3785 - protein, 35 aa, Artificial Sequence
  Synthetic polypeptide
GADEQTAEPCRPPDQCPAIQQGEAEEHGTLHCRTV

SEQ ID NO: 3786 - protein, 63 aa, Artificial Sequence
  Synthetic polypeptide
MDLITFFDEYHSGHIDRAFDIIERLKLVPLNQESVEERVAAFRNFSDEPGAVAHTYNPNILGG

SEQ ID NO: 3787 - protein, 834 aa, Artificial Sequence
  Synthetic polypeptide
MDPVGLQLGNKNLWSCLVRLLTKDPEWLNAKMKFFLPNTDLDSRNETLDPEQRVILQLNKLHVQGSDTWQSFIHCVCMQLEVPLDLEVLLLSTFGYDDGFTSQLGAEGKSQPESQLHHGLKRPHQSCGSSPRRKQCKKQQLELAKKYLQLLRTSAQQRYRSQIPGSGQPHAFHQVYVPPILRRATASLDTPEGAIMGDVKVEDGADVSISDLFNTRVNKGPRVTVLLGKAGMGKTTLAHRLCQKWAEGHLNCFQALFLFEFRQLNLITRFLTPSELLFDLYLSPESDHDTVFQYLEKNADQVLLIFDGLDEALQPMGPDGPGPVLTLFSHLCNGTLLPGCRVMATSRPGKLPACLPAEAAMVHMLGFDGPRVEEYVNHFFSAQPSREGALVELQTNGRLRSLCAVPALCQVACLCLHHLLPDHAPGQSVALLPNMTQLYMQMVLALSPPGHLPTSSLLDLGEVALRGLETGKVIFYAKDIAPPLIAFGATHSLLTSFCVCTGPGHQQTGYAFTHLSLQEFLAALHLMASPKVNKDTLTQYVTLHSRWVQRTKARLGLSDHLPTFLAGLASCTCRPFLSHLAQGNEDCVGAKQAAVVQVLKKLATRKLTGPKVVELCHCVDETQEPELASLTAQSLPYQLPFHNFPLTCTDLATLTNILEHREAPIHLDFDGCPLEPHCPEALVGCGQIENLSFKSRKCGDAFAEALSRSLPTMGRLQMLGLAGSKITARGISHLVKALPLCPQLKEVSFRDNQLSDQVVLNIVEVLPHLPRLRKLDLSSNSICVSTLLCLARVAVTCPTVRMLQAREADLIFLLSPPTETTAELQRCSRPAWAT

SEQ ID NO: 3788 - protein, 11 aa, Artificial Sequence
  Synthetic polypeptide
PSELFPGPVPF

SEQ ID NO: 3789 - protein, 5 aa, Artificial Sequence
  Synthetic polypeptide
VRAPF

SEQ ID NO: 3790 - protein, 341 aa, Artificial Sequence
  Synthetic polypeptide
MTSFCVCTGPGHQQTGYAFTHLSLQEFLAALHLMASPKVNKDTLTQYVTLHSRWVQRTKARLGLSDHLPTFLAGLASCTCRPFLSHLAQGNEDCVGAKQAAVVQVLKKLATRKLTGPKVVELCHCVDETQEPELASLTAQSLPYQLPFHNFPLTCTDLATLTNILEHREAPIHLDFDGCPLEPHCPEALVGCGQIENLSFKSRKCGDAFAEALSRSLPTMGRLQMLGLAGSKITARGISHLVKALPLCPQLKEVSFRDNQLSDQVVLNIVEVLPHLPRLRKLDLSSNSICVSTLLCLARVAVTCPTVRMLQAREADLIFLLSPPTETTAELQRCSRPAWAT

SEQ ID NO: 3791 - protein, 133 aa, Artificial Sequence
  Synthetic polypeptide
MTCTDLATLTNILEHREAPIHLDFDGCPLEPHCPEALVGCGQIENLSFKSRKCGDAFAEALSRSLPTMGRLQMLGLSSNSICVSTLLCLARVAVTCPTVRMLQAREADLIFLLSPPTETTAELQRCSRPAWAT

SEQ ID NO: 3792 - protein, 147 aa, Artificial Sequence
  Synthetic polypeptide
MAHIPSGGAPAAGAAPMGPQYCVCKVELSVSGQNLLDRDVTSKSDPFCVLFTENNGRWIEYDRTETAINNLNPAFSKKFVLDYHFEEVQKLKFALFDQDKSSMRLDEHDFLGQFSCSLGTIVSSKKITRPLLLLNDKPAGKGLITFP

SEQ ID NO: 3793 - protein, 45 aa, Artificial Sequence
  Synthetic polypeptide
MRLDEHDFLGQFSCSLGTIVSSKKITRPLLLLNDKPAGKGLITFP

SEQ ID NO: 3794 - protein, 66 aa, Artificial Sequence
  Synthetic polypeptide
MVLRMVEAMSQLQDEKTQLQEELVVLQERLALRDSDQQATSTQLQNQDCKFPEASPAMWNCESIKP

SEQ ID NO: 3795 - protein, 78 aa, Artificial Sequence
  Synthetic polypeptide
MVLRMVEAMSQLQDEKTQLQEELVVLQERLALRDSDQQATSTQLQNQKTCFVSPPPSARIVSFLRPPQPCGTVSQLNL

SEQ ID NO: 3796 - protein, 124 aa, Artificial Sequence
  Synthetic polypeptide
MVPSRRTWNLGATPSLRGLWRVGRAPEPEPGMARPAPAPASPAARPFPHTGPGRLRTGRGKDTPVCGDEDSSARSAARPALAQCRALSVDWAGPGSPHGLYLTLQDCKFPEASPAMWNCESIKP

SEQ ID NO: 3797 - protein, 146 aa, Artificial Sequence
  Synthetic polypeptide
MCASACKDTAAWCPEEAAEPQAMVPSRRTWNLGATPSLRGLWRVGRAPEPEPGMARPAPAPASPAARPFPHTGPGRLRTGRGKDTPVCGDEDSSARSAARPALAQCRALSVDWAGPGSPHGLYLTLQDCKFPEASPAMWNCESIKP

SEQ ID NO: 3798 - protein, 152 aa, Artificial Sequence
  Synthetic polypeptide
MLPLFGRQRTEWLLQAAWCPEEAAEPQAMVPSRRTWNLGATPSLRGLWRVGRAPEPEPGMARPAPAPASPAARPFPHTGPGRLRTGRGKDTPVCGDEDSSARSAARPALAQCRALSVDWAGPGSPHGLYLTLQDCKFPEASPAMWNCESIKP

SEQ ID NO: 3799 - protein, 173 aa, Artificial Sequence
  Synthetic polypeptide
MAQMEFLFRKNTLTAAWKPRHQETLRLEAGVPEQCKAAWCPEEAAEPQAMVPSRRTWNLGATPSLRGLWRVGRAPEPEPGMARPAPAPASPAARPFPHTGPGRLRTGRGKDTPVCGDEDSSARSAARPALAQCRALSVDWAGPGSPHGLYLTLQDCKFPEASPAMWNCESIKP

SEQ ID NO: 3800 - protein, 136 aa, Artificial Sequence
  Synthetic polypeptide
MVPSRRTWNLGATPSLRGLWRVGRAPEPEPGMARPAPAPASPAARPFPHTGPGRLRTGRGKDTPVCGDEDSSARSAARPALAQCRALSVDWAGPGSPHGLYLTLQKTCFVSPPPSARIVSFLRPPQPCGTVSQLNL

SEQ ID NO: 3801 - protein, 158 aa, Artificial Sequence
  Synthetic polypeptide
MCASACKDTAAWCPEEAAEPQAMVPSRRTWNLGATPSLRGLWRVGRAPEPEPGMARPAPAPASPAARPFPHTGPGRLRTGRGKDTPVCGDEDSSARSAARPALAQCRALSVDWAGPGSPHGLYLTLQKTCFVSPPPSARIVSFLRPPQPCGTVSQLNL

SEQ ID NO: 3802 - protein, 164 aa, Artificial Sequence
  Synthetic polypeptide
MLPLFGRQRTEWLLQAAWCPEEAAEPQAMVPSRRTWNLGATPSLRGLWRVGRAPEPEPGMARPAPAPASPAARPFPHTGPGRLRTGRGKDTPVCGDEDSSARSAARPALAQCRALSVDWAGPGSPHGLYLTLQKTCFVSPPPSARIVSFLRPPQPCGTVSQLNL

SEQ ID NO: 3803 - protein, 185 aa, Artificial Sequence
  Synthetic polypeptide
MAQMEFLFRKNTLTAAWKPRHQETLRLEAGVPEQCKAAWCPEEAAEPQAMVPSRRTWNLGATPSLRGLWRVGRAPEPEPGMARPAPAPASPAARPFPHTGPGRLRTGRGKDTPVCGDEDSSARSAARPALAQCRALSVDWAGPGSPHGLYLTLQKTCFVSPPPSARIVSFLRPPQPCGTVSQLNL

SEQ ID NO: 3804 - protein, 181 aa, Artificial Sequence
  Synthetic polypeptide
MFPGTEEGPEDDSTKHGGRVRTFPHERGNWATHVYVPYEAKEEFLDLLDVLLPHAQTYVPRLVRMKVFHLSLSQSVVLRHHWILPFVQALKARMTSFHRFFFTANQVKIYTNQEKTRTFIGLEVTSGHAQFLDLVSEVDRVMEEFNLTTFYQDPSFHLSLAWCVGDARLQLEGQCLQELQF

SEQ ID NO: 3805 - protein, 232 aa, Artificial Sequence
  Synthetic polypeptide
MSAAPLVGYSSSGSEDESEDGMRTRPGDGSHRRGQSPLPRQRFPVPDSVLNMFPGTEEGPEDDSTKHGGRVRTFPHERGNWATHVYVPYEAKEEFLDLLDVLLPHAQTYVPRLVRMKVFHLSLSQSVVLRHHWILPFVQALKARMTSFHRFFFTANQVKIYTNQEKTRTFIGLEVTSGHAQFLDLVSEVDRVMEEFNLTTFYQDPSFHLSLAWCVGDARLQLEGQCLQELQF

SEQ ID NO: 3806 - protein, 214 aa, Artificial Sequence
  Synthetic polypeptide
MSAAPLVGYSSSGSEDESEDGMRTRPGDGSHRRGQSPLPRQRFPVPDSVLNMFPGTEEGPEDDSTKHGGRVRTFPHERGNWATHVYVPYEAKEEFLDLLDVLLPHAQTYVPRLVRMKVFHLSLSQSVVLRHHWILPFVQALKARMTSFHRTFIGLEVTSGHAQFLDLVSEVDRVMEEFNLTTFYQDPSFHLSLAWCVGDARLQLEGQCLQELQF

SEQ ID NO: 3807 - protein, 226 aa, Artificial Sequence
  Synthetic polypeptide
MTDDESESVLSDSHEGSELELPVIQLCGLVEELSYVNSALKTETEMFEKYYAKLEPRDQRPPRLSEIKISAADYAQFRGRRRSKSRTGMDRGVGLTADQKLELVQKEVADMKDDLRHTRANAERDLQHHEAIIEEAEIRWSEVSREVHEFEKDILKAISKKKGSILATQKVMKYIEDMNRRRDNMKEKLRLKNVSLKVQRKKMLLQLRQGEGVRSQGLQTASRSWK

SEQ ID NO: 3808 - protein, 172 aa, Artificial Sequence
  Synthetic polypeptide
MTDDESESVLSDSHEGSELELPVIQLCGLVEELSYVNSALKTETEMFEKYYAKLEPRDQRPPRLSEIKISAADYAQAIIEEAEIRWSEVSREVHEFEKDILKAISKKKGSILATQKVMKYIEDMNRRRDNMKEKLRLKNVSLKVQRKKMLLQLRQGEGVRSQGLQTASRSWK

SEQ ID NO: 3809 - protein, 70 aa, Artificial Sequence
  Synthetic polypeptide
MSEAYFRVESGALGPEENFLSLDDILMSHEKLPVRTETAMPRLGAFFLERSAGAETDNAVPQARHGGSHL

SEQ ID NO: 3810 - protein, 65 aa, Artificial Sequence
  Synthetic polypeptide
MSEAYFRVESGALGPEENFLSLDDILMSHEKLPVRTETAMPRLGAFFLERSAGAETDNAVPQAKT

SEQ ID NO: 3811 - protein, 377 aa, Artificial Sequence
  Synthetic polypeptide
MNLDSLSLALSQISYLVDNLTKKNYRASQQEIQHIVNRHGPEADRHLLRCLFSHVDFSGDGKSSGKDFHQTQFLIQECALLITKPNFISTLSYAIDNPLHYQKSLKPAPHLFAQLSKVLKLSKVQEVIFGLALLNSSSSDLRGFAAQFIKQKLPDLLRSYIDADVSGNQEGGFQDIAIEVLHLLLSHLLFGQKGAFGVGQEQIDAFLKTLRRDFPQERCPVVLAPLLYPEKRDILMDRILPDSGGVAKTMMESSLADFMQEVGYGFCASIEECRNIIVQFGVREVTAAQVARVLGMMARTHSGLTDGIPLQSISAPGSGIWSDGKDKSDGAQAHTWNVEVLIDVLKELILGRLRHENLLNQRGRGFSELRSCHCTAA

SEQ ID NO: 3812 - protein, 125 aa, Artificial Sequence
  Synthetic polypeptide
MPERLAEMLLDLWTPLIILWITLPPCIYMAPMNQSQVLMSGSPLELNSLGEEQRILNRSKRGWVWNQMFVLEEFSGPEPILVGRDASSAKKRIFESFGLCSVFPEPRTLPAYRNCSVNTLHEKIN

SEQ ID NO: 3813 - protein, 660 aa, Artificial Sequence
  Synthetic polypeptide
MKENYCLQAALVCLGMLCHSHAFAPERRGHLRPSFHGHHEKGKEGQVLQRSKRGWVWNQFFVIEEYTGPDPVLVGRLHSDIDSGDGNIKYILSGEGAGTIFVIDDKSGNIHATKTLDREERAQYTLMAQAVDRDTNRPLEPPSEFIVKVQDINDNPPEFLHETYHANVPERSNVGTSVIQVTASDADDPTYGNSAKLVYSILEGQPYFSVEAQTGIIRTALPNMDREAKEEYHVVIQAKDMGGHMGGLSGTTKVTITLTDVNDNPPKFPQSVYQMSVSEAAVPGEEVGRVKAKDPDIGENGLVTYNIVDGDGMESFEITTDYETQEGVIKLKKPVDFETKRAYSLKVEAANVHIDPKFISNGPFKDTVTVKISVEDADEPPMFLAPSYIHEVQENAAAGTVVGRVHAKDPDAANSPIRYSIDRHTDLDRFFTINPEDGFIKTTKPLDREETAWLNITVFAAEIHNRHQEAKVPVAIRVLDVNDNAPKFAAPYEGFICESDQTKPLSNQPIVTISADDKDDTANGPRFIFSLPPEIIHNPNFTVRDNRDNTAGVYARRGGFSRQKQDLYLLPIVISDGGIPPMSSTNTLTIKVCGCDVNGALLSCNAEAYILNAGLSTGALIAILACIVILLGPCEPLQCHSTPSSFQCTMLQPHWPSFGS

SEQ ID NO: 3814 - protein, 534 aa, Artificial Sequence
  Synthetic polypeptide
MAQAVDRDTNRPLEPPSEFIVKVQDINDNPPEFLHETYHANVPERSNVGTSVIQVTASDADDPTYGNSAKLVYSILEGQPYFSVEAQTGIIRTALPNMDREAKEEYHVVIQAKDMGGHMGGLSGTTKVTITLTDVNDNPPKFPQSVYQMSVSEAAVPGEEVGRVKAKDPDIGENGLVTYNIVDGDGMESFEITTDYETQEGVIKLKKPVDFETKRAYSLKVEAANVHIDPKFISNGPFKDTVTVKISVEDADEPPMFLAPSYIHEVQENAAAGTVVGRVHAKDPDAANSPIRYSIDRHTDLDRFFTINPEDGFIKTTKPLDREETAWLNITVFAAEIHNRHQEAKVPVAIRVLDVNDNAPKFAAPYEGFICESDQTKPLSNQPIVTISADDKDDTANGPRFIFSLPPEIIHNPNFTVRDNRDNTAGVYARRGGFSRQKQDLYLLPIVISDGGIPPMSSTNTLTIKVCGCDVNGALLSCNAEAYILNAGLSTGALIAILACIVILLGPCEPLQCHSTPSSFQCTMLQPHWPSFGS

SEQ ID NO: 3815 - protein, 38 aa, Artificial Sequence
  Synthetic polypeptide
MSFKRPCPSLPEVWIGVPLRDVNGMTHTHTQIKDYMAK

SEQ ID NO: 3816 - protein, 47 aa, Artificial Sequence
  Synthetic polypeptide
MDNVQPKIKHRPFCFSVKGHVKMLRLARPGGSPCNPSTLGGQGRQII

SEQ ID NO: 3817 - protein, 221 aa, Artificial Sequence
  Synthetic polypeptide
MRSGEELDGFEGEASSTSMISGASSPYQPTTEPVSQRRGLAGLRCDPDYLRGALGRLKVAQVILALIAFICIETIMACSPCEGLYFFEFVSCSAFVVTGVLLIMFSLNLHMRIPQINWNLTDLVNTGLSAFLFFIASIVLAALNHRAGAEIAAVIFGFLATAAYAVNTFLAVQKWRVSVRQQSTNDYIRARTESRDVDSRPEIQRLDTLNWKPNGHQQVKG

SEQ ID NO: 3818 - protein, 127 aa, Artificial Sequence
  Synthetic polypeptide
FVVTGVLLIMFSLNLHMRIPQINWNLTDLVNTGLSAFLFFIASIVLAALNHRAGAEIAAVIFGFLATAAYAVNTFLAVQKWRVSVRQQSTNDYIRARTESRDVDSRPEIQRLDTLNWKPNGHQQVKG

SEQ ID NO: 3819 - protein, 192 aa, Artificial Sequence
  Synthetic polypeptide
MRSGEELDGFEGEASSTSMISGASSPYQPTTEPILALIAFICIETIMACSPCEGLYFFEFVSCSAFVVTGVLLIMFSLNLHMRIPQINWNLTDLVNTGLSAFLFFIASIVLAALNHRAGAEIAAVIFGFLATAAYAVNTFLAVQKWRVSVRQQSTNDYIRARTESRDVDSRPEIQRLDTLNWKPNGHQQVKG

SEQ ID NO: 3820 - protein, 296 aa, Artificial Sequence
  Synthetic polypeptide
MLDLEVVPERSLGNEQWEFTLGMPLAQAVAILQKHCRIIKNVQVLYSEQSPLSHDLILNLTQDGIKLMFDAFNQRLKVIEVCDLTKVKLKYCGVHFNSQAIAPTIEQIDQSFGATHPGVYNSAEQLFHLNFRGLSFSFQLDSWTEAPKYEPNFAHGLASLQIPHGATVKRMYIYSGNSLQDTKAPMMPLSCFLGNVYAESVDVLRDGTGPAGLRLRLLAAGCGPGLLADAKMRVFERSVYFGDSCQDVLSMLGSPHKVFYKSEDKMKIHSPSPHKQVPSKCNDYFFNYFTLGVALL

SEQ ID NO: 3821 - protein, 71 aa, Artificial Sequence
  Synthetic polypeptide
MAGGEDRGDGEPVSVVTVRVQYLEDTDPFACANFPEPRRAPTCSLDGALPLGAQIPAVHRLLGAPLKVLCI

SEQ ID NO: 3822 - protein, 2 aa, Artificial Sequence
  Synthetic polypeptide
MG

SEQ ID NO: 3823 - protein, 271 aa, Artificial Sequence
  Synthetic polypeptide
MILNSLSLCYHNKLILAPMVRVGTLPMRLLALDYGADIVYCEELIDLKMIQCKRVVNEVLSTVDFVAPDDRVVFRTCEREQNRVVFQMGTSDAERALAVARLVENDVAGIDVNMGCPKQYSTKGGMGAALLSDPDKIEKILSTLVKGTRRPVTCKIRILPSLEDTLSLVKRIERTGIAAIAVHGRKREERPQHPVSCEVIKAIADTLSIPVIANGGSHDHIQQYSDIEDFRQATAASSVMVARAAMWNPSIFLKEGLRPLEEVMQKYIRYG

SEQ ID NO: 3824 - protein, 236 aa, Artificial Sequence
  Synthetic polypeptide
MILNSLSLCYHNKLILAPMVRVGTLPMRLLALDYGADIVYCEELIDLKMIQCKRVVNEVLSTVDFVAPDDRVVFRTCEREQNRVVFQMGGMGAALLSDPDKIEKILSTLVKGTRRPVTCKIRILPSLEDTLSLVKRIERTGIAAIAVHGRKREERPQHPVSCEVIKAIADTLSIPVIANGGSHDHIQQYSDIEDFRQATAASSVMVARAAMWNPSIFLKEGLRPLEEVMQKYIRYG

SEQ ID NO: 3825 - protein, 96 aa, Artificial Sequence
  Synthetic polypeptide
MKIFCSRANPTTGSVEWLEEDEHYDYHQEIARSSYADMLHDKDRNVKYYQGIRAAVSRVKDRGQKALVLDIGTGTGLLSMMAVTAGADFCYAIEVS

SEQ ID NO: 3826 - protein, 502 aa, Artificial Sequence
  Synthetic polypeptide
MKIFCSRANPTTGSVEWLEEDEHYDYHQEIARSSYADMLHDKDRVFKPMADAAVKIVEKNGFSDKIKVINKHSTEVTVGPEGDMPCRANILVTELFDTELIGEGALPSYEHAHRHLVEENCEAVPHRATVYAQLVESGRMWSWNKLFPIHVQTSLGEQVIVPPVDVESCPGAPSVCDIQLNQVSPADFTVLSDVLPMFSIDFSKQVSSSAACHSRRFEPLTSGRAQVVLSWWDIEMDPEGKIKCTMAPFWAHSDPEEMQWRDHWMQCVYFLPQEEPVVQGSALYLVAHHDDYCVWYSLQRTSPEKNERVRQMRPVCDCQAHLLWNRPRFGEINDQDRTDRYVQALRTVLKPDSVCLCVSDGSLLSVLAHHLGVEQVFTVESSAASHKLLRKIFKANHLEDKINIIEKRPELLTNEDLQGRKVSLLLGEPFFTTSLLPWHNLYFWYVRTAVDQHLGPGAMVMPQAASLHAVVVEFRDLWRIRSPCGDCEGFDVHIMDDMIKAG

SEQ ID NO: 3827 - protein, 404 aa, Artificial Sequence
  Synthetic polypeptide
MKIFCSRANPTTGSVEWLEEDEHYDYHQEIARSSYADMLHDKDRNVKYYQGIRAAVSRVKDRGQKALVLDIGTGTGLLSMMAVTAGADFCYAIEENCEAVPHRATVYAQLVESGRMWSWNKLFPIHVQTSLGEQVIVPPVDVESCPGAPSVCDIQLNQVSPADFTVLSDVLPMFSIDFSKQVSSSAACHSRRFEPLTSGRAQVVLSWWDIEMDPEGKIKCTMAPFWAHSDPEEMQWRDHWMQCVYFLPQEEPVVQGSALYLVAHHDDYCVWYSLQRTSPEKNERVRQMRPVCDCQAHLLWNRPRFGEINDQDRTDRYVQALRTVSLLLGEPFFTTSLLPWHNLYFWYVRTAVDQHLGPGAMVMPQAASLHAVVVEFRDLWRIRSPCGDCEGFDVHIMDDMIKAG

SEQ ID NO: 3828 - protein, 552 aa, Artificial Sequence
  Synthetic polypeptide
MKIFCSRANPTTGSVEWLEEDEHYDYHQEIARSSYADMLHDKDRNVKYYQGIRAAVSRVKDRGQKALVLDIGTGTGLLSMMAVTAGADFCYAIEVFKPMADAAVKIVEKNGFSDKIKVINKHSTEVTVGPEGDMPCRANILVTELFDTELIGEGALPSYEHAHRHLVEENCEAVPHRATVYAQLVESGRMWSWNKLFPIHVQTSLGEQVIVPPVDVESCPGAPSVCDIQLNQVSPADFTVLSDVLPMFSIDFSKQVSSSAACHSRRFEPLTSGRAQVVLSWWDIEMDPEGKIKCTMAPFWAHSDPEEMQWRDHWMQCVYFLPQEEPVVQGSALYLVAHHDDYCVWYSLQRTSPEKNERVRQMRPVCDCQAHLLWNRPRFGEINDQDRTDRYVQALRTVLKPDSVCLCVSDGSLLSVLAHHLGVEQVFTVESSAASHKLLRKIFKANHLEDKINIIEKRPELLTNEDLQGRKVSLLLGEPFFTTSLLPWHNLYFWYVRTAVDQHLGPGAMVMPQAASLHAVVVEFRDLWRIRSPCGDCEGFDVHIMDDMIKAG

SEQ ID NO: 3829 - protein, 156 aa, Artificial Sequence
  Synthetic polypeptide
MAPVEHVVADAGAFLRHAALQDIGKNIYTIREVVTEIRDKATRRRLAVLPYELRFKEPLPEYVRLVTEFSKKTGDYPSLSATDIQVLALTYQLEAEFVGVSHLKQEPQKVPWLMPIIPGLWEAKAGALLEPRHLRPAWATPSEAGGSLGPRRLRLQ

SEQ ID NO: 3830 - protein, 687 aa, Artificial Sequence
  Synthetic polypeptide
MMFYRLLSIVGRQRASPGWQNWSSARNSTSAAEARSMALPTQAQVVICGGGITGTSVAYHLSKMGWKDIVLLEQGRLAAGSTRFCAGILSTARHLTIEQKMADYSNKLYYQLEQETGIQTGYTRTGSIFLAQTQDRLISLKRINAGLNVIGIPSEIISPKKVAELHHLLNVHDLVGAMHVPEDAVVSSADVALALASAASQNGVQIYDRTSVLHVMVKKGQVTGVETDKGQIECQYFVNCAGQWAYELGLSNEEPVSIPLHACEHFYLLTRPLETPLQSSTPTIVDADGRIYIRNWQGGILSGGFEKNPKPIFTEGKNQLEIQNLQEDWDHFEPLLSSLLRRMPELETLEIMKLVNCPETFTPDMRCIMGESPAVQGYFVLAGMNSAGLSFGGGAGKYLAEWMVHGYPSENVWELDLKRFGALQSSRTFLRHRVMEVMPLMYDLKVPRWDFQTGRQLRTSPLYDRLDAQGARWMEKHGFERPKYFVPPDKDLLALEQSKTFYKPDWFDIVESEVKCCKEAVCVIDMSSFTKFEITSTGDQALEVLQYLFSNDLDVPVGHIVHTGMLNEGGGYENDCSIARLNKRSFFMISPTDQQVHCWAWLKKHMPKDSNLLLEDVTWKYTALNLIGPRAVDVLSELSYAPMTPDHFPSLFCKEMSVGYANGIRVMSMTHTGEPGFMLYIPIEFQE

SEQ ID NO: 3831 - protein, 587 aa, Artificial Sequence
  Synthetic polypeptide
MADYSNKLYYQLEQETGIQTGYTRTGSIFLAQTQDRLISLKRINAGLNVIGIPSEIISPKKVAELHHLLNVHDLVGAMHVPEDAVVSSADVALALASAASQNGVQIYDRTSVLHVMVKKGQVTGVETDKGQIECQYFVNCAGQWAYELGLSNEEPVSIPLHACEHFYLLTRPLETPLQSSTPTIVDADGRIYIRNWQGGILSGGFEKNPKPIFTEGKNQLEIQNLQEDWDHFEPLLSSLLRRMPELETLEIMKLVNCPETFTPDMRCIMGESPAVQGYFVLAGMNSAGLSFGGGAGKYLAEWMVHGYPSENVWELDLKRFGALQSSRTFLRHRVMEVMPLMYDLKVPRWDFQTGRQLRTSPLYDRLDAQGARWMEKHGFERPKYFVPPDKDLLALEQSKTFYKPDWFDIVESEVKCCKEAVCVIDMSSFTKFEITSTGDQALEVLQYLFSNDLDVPVGHIVHTGMLNEGGGYENDCSIARLNKRSFFMISPTDQQVHCWAWLKKHMPKDSNLLLEDVTWKYTALNLIGPRAVDVLSELSYAPMTPDHFPSLFCKEMSVGYANGIRVMSMTHTGEPGFMLYIPIEFQE

SEQ ID NO: 3832 - protein, 70 aa, Artificial Sequence
  Synthetic polypeptide
MLSLSTLNLIGPRAVDVLSELSYAPMTPDHFPSLFCKEMSVGYANGIRVMSMTHTGEPGFMLYIPIEFQE

SEQ ID NO: 3833 - protein, 45 aa, Artificial Sequence
  Synthetic polypeptide
MTPDHFPSLFCKEMSVGYANGIRVMSMTHTGEPGFMLYIPIEFQE

SEQ ID NO: 3834 - protein, 32 aa, Artificial Sequence
  Synthetic polypeptide
MSVGYANGIRVMSMTHTGEPGFMLYIPIEFQE

SEQ ID NO: 3835 - protein, 19 aa, Artificial Sequence
  Synthetic polypeptide
MATDSWALAVDEQEAAAES

SEQ ID NO: 3836 - protein, 47 aa, Artificial Sequence
  Synthetic polypeptide
MATDSWALAVDEQEAAAESVWWCTPVIPATQDTETVESLEPGRQRLQ

SEQ ID NO: 3837 - protein, 162 aa, Artificial Sequence
  Synthetic polypeptide
MEQPKGVDWTVIILTCQYKDSVQVFQRELEVRQKREQIPAGTLLLAVEDPEKRVGSGGATLNALLVAAEHLSARAGFTVVTSDVLHSAWILILHMGRDFPFDDCGRAFTCLPVENPEAPVEALVCNLDCLLDIMTYRLGPGSPPGVWVCSTDMLLSVPANPG

SEQ ID NO: 3838 - protein, 145 aa, Artificial Sequence
  Synthetic polypeptide
MEQPKGVDWTVIILTCQYKDSVQVFQRELEVRQKREQIPAGTLLLAVEDPEKRVGSGGATLNALLVAAEHLSARAGFTGRDFPFDDCGRAFTCLPVENPEAPVEALVCNLDCLLDIMTYRLGPGSPPGVWVCSTDMLLSVPANPG

SEQ ID NO: 3839 - protein, 194 aa, Artificial Sequence
  Synthetic polypeptide
MEQPKGVDWTVIILTCQYKDSVQVFQRELEVRQKREQIPAGTLLLAVEDPEKRVGSGGATLNALLVAAEHLSARAGFTWICVGVSLWIRGCHPPGRLPEASVHRAFPLLQVVTSDVLHSAWILILHMGRDFPFDDCGRAFTCLPVENPEAPVEALVCNLDCLLDIMTYRLGPGSPPGVWVCSTDMLLSVPANPG

SEQ ID NO: 3840 - protein, 437 aa, Artificial Sequence
  Synthetic polypeptide
MGTKMADLDSPPKLSGVQQPSEGVGGGRCSEISAELIRSLTELQELEAVYERLCGEEKVVERELDALLEQQNTIESKMVTLHRMGPNLQLIEGDAKQLAGMITFTCNLAENVSSKVRQLDLAKNRLYQAIQRADDILDLKFCMDGVQTALRSEDYEQAAAHTHRYLCLDKSVIELSRQGKEGSMIDANLKLLQEAEQRLKAIVAEKFAIATKEGDLPQVERFFKIFPLLGLHEEGLRKFSEYLCKQVASKAEENLLMVLGTDMSDRRAAVIFADTLTLLFEGIARIVETHQPIVETYYGPGRLYTLIKYLQVECDRQVEKVVDKFIKQRDYHQQFRHVQNNLMRNSTTEKIEPRELDPILTEVTLMNARSELYLRFLKKRISSDFEVGDSMASEEVKQGRARWLTPVIPALWEAEAGGSQGQEIKTVLANVVKLRLY

SEQ ID NO: 3841 - protein, 410 aa, Artificial Sequence
  Synthetic polypeptide
MNPEKDFAPLTPNIVRALNDKLYEKRKVAALEIEKLVREFVAQNNTVQIKHVIQTLSQEFALSQHPHSRKGGLIGLAACSIALGKDSGLYLKELIEPVLTCFNDADSRLRYYACEALYNIVKVARGAVLPHFNVLFDGLSKLAADPDPNVKSGSELLDRLLKDIVTESNKFDLVSFIPLLRERIYSNNQYARQFIISWILVLESVPDINLLDYLPEILDGLFQILGDNGKEIRKMCEVVLGEFLKEIKKNPSSVKFAEMANILVIHCQTTDDLIQLTAMCWMREFIQLAGRVMLPYSSGILTAVLPCLAYDDRKKSIKEVANVCNQSLMKLVTPEDDELDELRPGQRQAEPTPDDALPKQEGTASGCTEAQHFRDIPPMMRNSLLVRKRETNPNGETFCRVTSASKVSSL

SEQ ID NO: 3842 - protein, 1481 aa, Artificial Sequence
  Synthetic polypeptide
MARAWQHPFLNVFRHFRVDEWKRSAKQGDVAVVTDKTLKGAVYRIRGSVSAANYIQLPKSSTQSLGLTGRYLYVLFRPLPSKHFVIHLDVSSKDNQVIRVSFSNLFKEFKSTATWLQFPLVLEARTPQRDLVGLAPSGARWTCLQLDLQDVLLVYLNRCYGHLKSIRLCASLLVRNLYTSDLCFEPAISGAQWAKLPVTPMPREMAFPVPKGESWHDRYIHVRFPSESLKVPSKPIEKSCSPPEAVLLGPGPQPLPCPVASSKPVRFSVSPVVQTPSPTASGRAALAPRPFPEVSLSQERSDASNADGPGFHSLEPWAQLEASDIHTAAAGTHVLTHESAEVPVARTGSCEGFLPDPVLRLKGVIGFGGHGTRQALWTPDGAAVVYPCHAVIVVLLVDTGEQRFFLGHTDKVSALALDGSSSLLASAQARAPSVMRLWDFQTGRCLCLFRSPMHVVCSLSFSDSGALLCGVGKDHHGRTMVVAWGTGQVGLGGEVVVLAKAHTDFDVQAFRVTFFDETRMASCGQGSVRLWRLRGGVLRSCPVDLGEHHALQFTDLAFKQARDGCPEPSAAMLFVCSRSGHILEIDCQRMVVRHARRLLPTRTPGGPHPQKQTFSSGPGIAISSLSVSPAMCAVGSEDGFLRLWPLDFSSVLLEAEHEGPVSSVCVSPDGLRVLSATSSGHLGFLDTLSRVYHMLARSHTAPVLALAMEQRRGQLATVSQDRTVRIWDLATLQQLYDFTSSEDAPCAVTFHPTRPTFFCGFSSGAVRSFSLEAAEVLVEHTCHRGAVTGLTATPDGRLLFSSCSQGSLAQYSCADPQWHVLRVAADMVCPDAPASPSALAVSRDGRLLAFVGPSRCTVTVMGSASLDELLRVDIGTLDLASSRLDSAMAVCFGPAALGHLLVSTSSNRVVVLDAVSGRIIRELPGVHPEPCPSLTLSEDARFLLIAAGRTIKVWDYATQASPGPQVYIGHSEPVQAVAFSPDQQQVLSAGDAVFLWDVLAPTESDQSFPGAPPACKTGPGAGPLEDAASRASELPRQQVPKPCQASPPRLGVCARPPEGGDGARDTRNSGAPRTTYLASCKAFTPARVSCSPHSAKGTCPPPASGGWLRLKAVVGYSGNGRANMVWRPDTGFFAYTCGRLVVVEDLHSGAQQHWSGHSAEISTLALSHSAQVLASASGRSSTTAHCQIRVWDVSGGLCQHLIFPHSTTVLALAFSPDDRLLVTLGDHDGRTLALWGTATYDLVSSTRLPEPVHGVAFNPWDAGELTCVGQGTVTFWLLQQRGADISLQVRREPVPEAVGAGELTSLCYGAPPLLYCGTSSGQVCVWDTRAGRCFLSWEADDGGIGLLLFSGSRLVSGSSTGRLRLWAVGAVSELRCKGSGARSSSVFMEHELVLDGAVVSASFDDSVDMGVVGTTAGTLWFVSWAEGTSTRLISGHRSKLLWRLRQENRLNPGGRGCSEPRLHHCTPAWATETPSQRKKKR

SEQ ID NO: 3843 - protein, 1479 aa, Artificial Sequence
  Synthetic polypeptide
MARAWQHPFLNVFRHFRVDEWKRSAKQGDVAVVTDKTLKGAVYRIRGSVSAANYIQLPKSSTQSLGLTGRYLYVLFRPLPSKHFVIHLDVSSKDNQVIRVSFSNLFKEFKSTATWLQFPLVLEARTPQRDLVGLAPSGARWTCLQLDLQDVLLVYLNRCYGHLKSIRLCASLLVRNLYTSDLCFEPAISGAQWAKLPVTPMPREMAFPVPKGESWHDRYIHVRFPSESLKVPSKPIEKSCSPPEAVLLGPGPQPLPCPVASSKPVRFSVSPVVQTPSPTASGRAALAPRPFPEVSLSQERSDASNADGPGFHSLEPWAQLEASDIHTAAAGTHVLTHESAEVPVARTGSCEGFLPDPVLRLKGVIGFGGHGTRQALWTPDGAAVVYPCHAVIVVLLVDTGEQRFFLGHTDKVSALALDGSSSLLASAQARAPSVMRLWDFQTGRCLCLFRSPMHVVCSLSFSDSGALLCGVGKDHHGRTMVVAWGTGQVGLGGEVVVLAKAHTDFDVQAFRVTFFDETRMASCGQGSVRLWRLRGGVLRSCPVDLGEHHALQFTDLAFKQARDGCPEPSAAMLFVCSRSGHILEIDCQRMVVRHARRLLPTRTPGGPHPQKQTFSSGPGIAISSLSVSPAMCAVGSEDGFLRLWPLDFSSVLLEAEHEGPVSSVCVSPDGLRVLSATSSGHLGFLDTLSRVYHMLARSHTAPVLALAMEQRRGQLATVSQDRTVRIWDLATLQQLYDFTSSEDAPCAVTFHPTRPTFFCGFSSGAVRSFSLEAAEVLVEHTCHRGAVTGLTATPDGRLLFSSCSQGSLAQYSCADPQWHVLRVAADMVCPDAPASPSALAVSRDGRLLAFVGPSRCTVTVMGSASLDELLRVDIGTLDLASSRLDSAMAVCFGPAALGHLLVSTSSNRVVVLDAVSGRIIRELPGVHPEPCPSLTLSEDARFLLIAAGRTIKVWDYATQASPGPQVYIGHSEPVQAVAFSPDQQQVLSAGDAVFLWDVLAPTESDQSFPGAPPACKTGPGAGPLEDAASRASELPRQQVPKPCQASPPRLGVCARPPEGGDGARDTRNSGAPRTTYLASCKAFTPARVSCSPHSAKGTCPPPASGGWLRLKAVVGYSGNGRANMVWRPDTGFFAYTCGRLVVVEDLHSGAQQHWSGHSAEISTLALSHSAQVLASASGRSSTTAHCQIRVWDVSGGLCQHLIFPHSTTVLALAFSPDDRLLVTLGDHDGRTLALWGTATYDLVSSTRLPEPVHGVAFNPWDAGELTCVGQGTVTFWLLQQRGADISLQVRREPVPEAVGAGELTSLCYGAPPLLYCGTSSGQVCVWDTRAGRCFLSWEADDGGIGLLLFSGSRLVSGSSTGRLRLWAVGAVSELRCKGSGASSVFMEHELVLDGAVVSASFDDSVDMGVVGTTAGTLWFVSWAEGTSTRLISGHRSKLLWRLRQENRLNPGGRGCSEPRLHHCTPAWATETPSQRKKKR

SEQ ID NO: 3844 - protein, 192 aa, Artificial Sequence
  Synthetic polypeptide
MLGSGFKAERLRVNLRLVINRLKLLEKKKTELAQKARKEIADYLAAGKDERARIRVEHIIREDYLVEAMEILELYCDLLLARFGLIQSMKELDSGLAESVSTLIWAAPRLQSEVAELKIVADQLCAKYSKEYGKLCRTNQIGTVNDRLMHKLSVEAPPKILVERYLIEIAKNYNVPYEPDSVVMVLIPEALQ

SEQ ID NO: 3845 - protein, 205 aa, Artificial Sequence
  Synthetic polypeptide
MVFKLKTKEEQHSMLGSGFKAERLRVNLRLVINRLKLLEKKKTELAQKARKEIADYLAAGKDERARIRVEHIIREDYLVEAMEILELYCDLLLARFGLIQSMKELDSGLAESVSTLIWAAPRLQSEVAELKIVADQLCAKYSKEYGKLCRTNQIGTVNDRLMHKLSVEAPPKILVERYLIEIAKNYNVPYEPDSVVMVLIPEALQ

SEQ ID NO: 3846 - protein, 44 aa, Artificial Sequence
  Synthetic polypeptide
MHKLSVEAPPKILVERYLIEIAKNYNVPYEPDSVVMVLIPEALQ

SEQ ID NO: 3847 - protein, 130 aa, Artificial Sequence
  Synthetic polypeptide
DYLVEAMEILELYCDLLLARFGLIQSMKELDSGLAESVSTLIWAAPRLQSEVAELKIVADQLCAKYSKEYGKLCRTNQIGTVNDRLMHKLSVEAPPKILVERYLIEIAKNYNVPYEPDSVVMVLIPEALQ

SEQ ID NO: 3848 - protein, 122 aa, Artificial Sequence
  Synthetic polypeptide
MSFLLPKLTSKKEVDQAIKSTAEKVLVLRFGRDEDPVCLQLDDILSKTSSDLSKMAAIYLVDVDQTAVYTQYFDISYIPSTVFFFNGQHMKVDYGRLRQEIRLSPGGGGCSEQRTHHYTPVW

SEQ ID NO: 3849 - protein, 6 aa, Artificial Sequence
  Synthetic polypeptide
MKDEAQ

SEQ ID NO: 3850 - protein, 50 aa, Artificial Sequence
  Synthetic polypeptide
MPELAVQKVVVHPLVLLSVVDHFNRQVWWCVPGVSATREAEVRRSLESER

SEQ ID NO: 3851 - protein, 890 aa, Artificial Sequence
  Synthetic polypeptide
MAACGRVRRMFRLSAALHLLLLFAAGAEKLPGQGVHSQGQGPGANFVSFVGQAGGGGPAGQQLPQLPQSSQLQQQQQQQQQQQQPQPPQPPFPAGGPPARRGGAGAGGGWKLAEEESCREDVTRVCPKHTWSNNLAVLECLQDVREPENEISSDCNHLLWNYKLNLTTDPKFESVAREVCKSTITEIKECADEPVGKGYMVSCLVDHRGNITEYQCHQYITKMTAIIFSDYRLICGFMDDCKNDINILKCGSIRLGEKDAHSQGEVVSCLEKGLVKEAEEREPKIQVSELCKKAILRVAELSSDDFHLDRHLYFACRDDRERFCENTQAGEGRVYKCLFNHKFEESMSEKCREALTTRQKLIAQDYKVSYSLAKSCKSDLKKYRCNVENLPRSREARLSYLLMCLESAVHRGRQVSSECQGEMLDYRRMLMEDFSLSPEIILSCRGEIEHHCSGLHRKGRTLHCLMKVVRGEKGNLGMNCQQALQTLIQETDPGADYRIDRALNEACESVIQTACKHIRSGDPMILSCLMEHLYTEKMVEDCEHRLLELQYFISRDWKLDPVLYRKCQGDASRLCHTHGWNETSEFMPQGAVFSCLYRHAYRTEEQGRRLSRECRAEVQRILHQRAMDVKLDPALQDKCLIDLGKWCSEKTETGQELECLQDHLDDLVVECRDIVGNLTELESEDIQIEALLMRACEPIIQNFCHDVADNQIDSGDLMECLIQNKHQKDMNEKCAIGVTHFQLVQMKDFRFSYKFKMACKEDVLKLCPNIKKKVDVVICLSTTVRNDTLQEAKEHRVSLKCRRQLRVEELEMTEDIRLEPDLYEACKSDIKNFCSAVQYGNAQIIECLKENKKQLSTRCHQKVFKLQETEMMDPELDYTLMRVCKQMIKP

SEQ ID NO: 3852 - protein, 879 aa, Artificial Sequence
  Synthetic polypeptide
MAACGRVRRMFRLSAALHLLLLFAAGAEKLPGQGVHSQGQGPGANFVSFVGQAGGGGPAGQQLPQLPQSSQLQQQQQQQQQQQQPQPPQPPFPAGGPPARRGGAGAGGGWKLAEEESCREDVTRVCPKHTWSNNLAVLECLQDVRELLWNYKLNLTTDPKFESVAREVCKSTITEIKECADEPVGKGYMVSCLVDHRGNITEYQCHQYITKMTAIIFSDYRLICGFMDDCKNDINILKCGSIRLGEKDAHSQGEVVSCLEKGLVKEAEEREPKIQVSELCKKAILRVAELSSDDFHLDRHLYFACRDDRERFCENTQAGEGRVYKCLFNHKFEESMSEKCREALTTRQKLIAQDYKVSYSLAKSCKSDLKKYRCNVENLPRSREARLSYLLMCLESAVHRGRQVSSECQGEMLDYRRMLMEDFSLSPEIILSCRGEIEHHCSGLHRKGRTLHCLMKVVRGEKGNLGMNCQQALQTLIQETDPGADYRIDRALNEACESVIQTACKHIRSGDPMILSCLMEHLYTEKMVEDCEHRLLELQYFISRDWKLDPVLYRKCQGDASRLCHTHGWNETSEFMPQGAVFSCLYRHAYRTEEQGRRLSRECRAEVQRILHQRAMDVKLDPALQDKCLIDLGKWCSEKTETGQELECLQDHLDDLVVECRDIVGNLTELESEDIQIEALLMRACEPIIQNFCHDVADNQIDSGDLMECLIQNKHQKDMNEKCAIGVTHFQLVQMKDFRFSYKFKMACKEDVLKLCPNIKKKVDVVICLSTTVRNDTLQEAKEHRVSLKCRRQLRVEELEMTEDIRLEPDLYEACKSDIKNFCSAVQYGNAQIIECLKENKKQLSTRCHQKVFKLQETEMMDPELDYTLMRVCKQMIKP

SEQ ID NO: 3853 - protein, 266 aa, Artificial Sequence
  Synthetic polypeptide
MAHEAMEYDVQVQLNHAEQQPAPAGMASSQGGPALLQPVPADVVSSQGVPSILQPAPAEVISSQATPPLLQPAPQLSVDLTEVEVLGEDTVENINPRTSEQHRQGSDGNHTIPASSLHSMTNFISGLQRLHGMLEFLRPSSSNHSVGPMRTRRRVSASRRARAGGSQRTDSARLRAPLDAYFQVSRTQPDLPATTYDSETRNPVSEELQVSSSSDSDSDSSAEYGGVVDQAEESGAVILEEQLAGVSAEQEVTCIDGGKTLPKQMI

SEQ ID NO: 3854 - protein, 435 aa, Artificial Sequence
  Synthetic polypeptide
MAARWSSENVVVEFRDSQATAMSVDCLGQHAVLSGRRFLYIVNLDAPFEGHRKISRQSKWDIGAVQWNPHDSFAHYFAASSNQRVDLYKWKDGSGEVGTTLQGHTRVISDLDWAVFEPDLLVTSSVDTYIYIWDIKDTRKPTVALSAVAGASQVKWNKKNANCLATSHDGDVRIWDKRKPSTAVEYLAAHLSKIHGLDWHPDSEHILATSSQDNSVKFWDYRQPRKYLNILPCQVPVWKARYTPFSNGLVTVMVPQLRRENSLLLWNVFDLNTPVHTFVGHDDVVLEFQWRKQKEGSKDYQLVTWSRDQTLRMWRVDSQMQRLCANDILDGVDEFIESISLLPEPEKTLHTEDTDHQHTASHGEEEALKEDPPRNLLEERKSDQLGLPQTLQQEFSLINVQIRNVNVEARWLTPVIPALWESEVDRSLETRKPGV

SEQ ID NO: 3855 - protein, 21 aa, Artificial Sequence
  Synthetic polypeptide
MAARWSSENVVVEFRDSQKPR

SEQ ID NO: 3856 - protein, 14 aa, Artificial Sequence
  Synthetic polypeptide
MQRAAAGGQVGRIV

SEQ ID NO: 3857 - protein, 52 aa, Artificial Sequence
  Synthetic polypeptide
MEREGSGGSGGSAGLLQQILSLKVVPRVGNGTLCPNSTSLCSFPGGQVGRIV

SEQ ID NO: 3858 - protein, 36 aa, Artificial Sequence
  Synthetic polypeptide
QQILSLKVVPRVGNGTLCPNSTSLCSFPGGQVGRIV

SEQ ID NO: 3859 - protein, 3 aa, Artificial Sequence
  Synthetic polypeptide
SYT

SEQ ID NO: 3860 - protein, 209 aa, Artificial Sequence
  Synthetic polypeptide
MALYELFSHPVERSYRAGLCSKAALFLLLAAALTYIPPLLVAFRSHGFWLKRSSYEEQPTVRFQHQVLLVALLGPESDGFLAWSTFPAFNRLQGDRLRVPLVSTREEDRNQDGKTDMLHFKLELPLQSTEHVLGVQLILTFSYRLHRMATLVMQSMAFLQSSFPVPGSQLYVNGDLRLQQKQPLSCGGLDARYNKERLRVNGLKLLQES

SEQ ID NO: 3861 - protein, 238 aa, Artificial Sequence
  Synthetic polypeptide
MSSSLTRSSAVTARGSAPKPRCSCCWPLRSRTSRRCWWPSGATVSLPRPLCHEAPRARSARAGLPNRLPTALFNSGFWLKRSSYEEQPTVRFQHQVLLVALLGPESDGFLAWSTFPAFNRLQGDRLRVPLVSTREEDRNQDGKTDMLHFKLELPLQSTEHVLGVQLILTFSYRLHRMATLVMQSMAFLQSSFPVPGSQLYVNGDLRLQQKQPLSCGGLDARYNKERLRVNGLKLLQES

SEQ ID NO: 3862 - protein, 190 aa, Artificial Sequence
  Synthetic polypeptide
MALYELFSHPVERSYRAGLCSKAALFLLLAAALTYIPPLLVAFRSHGFWLKRSSYEEQPTVRFQHQVLLVALLGPESDGFLAWSTFPAFNRLQGDRLRVPLVSTREEDRNQDGKTDMLHFKLELPLQSTEHVLEDGDPRDAEHGVSPVLLSCPGIPVIRERRPEAAAEAAAELWWPRCPIQQRKTESKWA

SEQ ID NO: 3863 - protein, 46 aa, Artificial Sequence
  Synthetic polypeptide
MAGKLKPLNVEAPEATEEAEGCELHENRDCLPLAPLHLKQCLLGVK

SEQ ID NO: 3864 - protein, 24 aa, Artificial Sequence
  Synthetic polypeptide
MSRLGLPEEPVSHVKCLLLLYLPP

SEQ ID NO: 3865 - protein, 110 aa, Artificial Sequence
  Synthetic polypeptide
MSRLGLPEEPVRNSLLDDAKARLRKYDIGGKYSHLPYNKYSVLLPLVAKEGKLHLLFTVRSEKPCEVLAPPLPSAMIVSFLRSPQKPSRRQHHAPCTACETVSQPNLFSL

SEQ ID NO: 3866 - protein, 179 aa, Artificial Sequence
  Synthetic polypeptide
MAALRYAGLDDTDSEDELPPGWEERTTKDGWVYYANHTEEKTQWEHPKTGKRKRVAGDLPYGWEQETDENGQVFFVDHINKRTTYLDPRLAFTVDDNPTKPTTRQRYDGSTTAMEILQGRDFTGKVVVVTGANSGIGFETAKSFALHGAHVILACRNMARASEAVSRILEEWIPCLLTG

SEQ ID NO: 3867 - protein, 271 aa, Artificial Sequence
  Synthetic polypeptide
MAALRYAGLDDTDSEDELPPGWEERTTKDGWVYYANHTEEKTQWEHPKTGKRKRVAGDLPYGWEQETDENGQVFFVDHINKRTTYLDPRLAFTVDDNPTKPTTRQRYDGSTTAMEILQGRDFTGKVVVVTGANSGIGFETAKSFALHGAHVILACRNMARASEAVSRILEEWHKAKVEAMTLDLALLRSVQHFAEAFKAKNVPLHVLVCNAATFALPWSLTKDGLETTFQVNHLGHFYLVQLLQDVLCRSAPARVIVVSSESHRSSIQPRT

SEQ ID NO: 3868 - protein, 361 aa, Artificial Sequence
  Synthetic polypeptide
MAALRYAGLDDTDSEDELPPGWEERTTKDGWVYYANHTEEKTQWEHPKTGKRKRVAGDLPYGWEQETDENGQVFFVDHINKRTTYLDPRLAFTVDDNPTKPTTRQRYDGSTTAMEILQGRDFTGKVVVVTGANSGIGFETAKSFALHGAHVILACRNMARASEAVSRILEEWHKAKVEAMTLDLALLRSVQHFAEAFKAKNVPLHVLVCNAATFALPWSLTKDGLETTFQVNHLGHFYLVQLLQDVLCRSAPARVIVVSSESHRFTDINDSLGKLDFSRLSPTKNDYWAMLAYNRSKLCNILFSNELHRRLSPRGVTSNAVHPGNMMYSNIHRSWWVYTLLFTLARPFTKSMLQYPAQDLT

SEQ ID NO: 3869 - protein, 367 aa, Artificial Sequence
  Synthetic polypeptide
MAALRYAGLDDTDSEDELPPGWEERTTKDGWVYYANHTEEKTQWEHPKTGKRKRVAGDLPYGWEQETDENGQVFFVDHINKRTTYLDPRLAFTVDDNPTKPTTRQRYDGSTTAMEILQGRDFTGKVVVVTGANSGIGFETAKSFALHGAHVILACRNMARASEAVSRILEEWHKAKVEAMTLDLALLRSVQHFAEAFKAKNVPLHVLVCNAATFALPWSLTKDGLETTFQVNHLGHFYLVQLLQDVLCRSAPARVIVVSSESHRFTDINDSLGKLDFSRLSPTKNDYWAMLAYNRSKLCNILFSNELHRRLSPRGVTSNAVHPGNMMYSNIHRSWWVYTLLFTLARPFTKSMEKPAAMLGGYSSIPV

SEQ ID NO: 3870 - protein, 666 aa, Artificial Sequence
  Synthetic polypeptide
MDVTSSSGGGGDPRQIEETKPLLGGDVSAPEGTKMGAVPCRRALLLCNGMRYKLLQEGDIQVCVIRHPRTFLSKILTSKFLRRWEPHHLTLADNSLASATPTGYMENSVSYSAIEDVQLLSWENAPKYCLQLTIPGGTVLLQAANSYLRDQWFHSLQWKKKIYKYKKVLSNPSRWEVVLKEIRTLVDMALTSPLQDDSINQAPLEIVSKLLSENTNLTTQEHENIIVAIAPLLENNHPPPDLCEFFCKHCRERPRSMVVIEVFTPVVQRILKHNMDFGKCPRLRLFTQEYILALNELNAGMEVVKKFIQSMHGPTGHCPHPRVLPNLVAVCLAAIYSCYEEFINSRDNSPSLKEIRNGCQQPCDRKPTLPLRLLHPSPDLVSQEATLSEARLKSVVVASSEIHVEVERTSTAKPALTASAGNDSEPNLIDCLMVSPACSTMSIELGPQADRTLGCYVEILKLLSDYDDWRPSLASLLQPIPFPKEALAHEKFTKELKYVIQRFAEDPRQEVHSCLLSVRAGKDGWFQLYSPGGVACDDDGELFASMVHILMGSCYKTKKFLLSLAENKLGPCMLLALRGNQTMVEILCLMLEYNIIDNNDTQLQIISTLESTDVGKRMYEQLCDRQRELKELVATVSLPHSPTGVSWDHPPVNHLCSNLISGFAPE

SEQ ID NO: 3871 - protein, 572 aa, Artificial Sequence
  Synthetic polypeptide
MGQAAEPTGYMENSVSYSAIEDVQLLSWENAPKYCLQLTIPGGTVLLQAANSYLRDQWFHSLQWKKKIYKYKKVLSNPSRWEVVLKEIRTLVDMALTSPLQDDSINQAPLEIVSKLLSENTNLTTQEHENIIVAIAPLLENNHPPPDLCEFFCKHCRERPRSMVVIEVFTPVVQRILKHNMDFGKCPRLRLFTQEYILALNELNAGMEVVKKFIQSMHGPTGHCPHPRVLPNLVAVCLAAIYSCYEEFINSRDNSPSLKEIRNGCQQPCDRKPTLPLRLLHPSPDLVSQEATLSEARLKSVVVASSEIHVEVERTSTAKPALTASAGNDSEPNLIDCLMVSPACSTMSIELGPQADRTLGCYVEILKLLSDYDDWRPSLASLLQPIPFPKEALAHEKFTKELKYVIQRFAEDPRQEVHSCLLSVRAGKDGWFQLYSPGGVACDDDGELFASMVHILMGSCYKTKKFLLSLAENKLGPCMLLALRGNQTMVEILCLMLEYNIIDNNDTQLQIISTLESTDVGKRMYEQLCDRQRELKELVATVSLPHSPTGVSWDHPPVNHLCSNLISGFAPE

SEQ ID NO: 3872 - protein, 513 aa, Artificial Sequence
  Synthetic polypeptide
MASVAQKKIYKYKKVLSNPSRWEVVLKEIRTLVDMALTSPLQDDSINQAPLEIVSKLLSENTNLTTQEHENIIVAIAPLLENNHPPPDLCEFFCKHCRERPRSMVVIEVFTPVVQRILKHNMDFGKCPRLRLFTQEYILALNELNAGMEVVKKFIQSMHGPTGHCPHPRVLPNLVAVCLAAIYSCYEEFINSRDNSPSLKEIRNGCQQPCDRKPTLPLRLLHPSPDLVSQEATLSEARLKSVVVASSEIHVEVERTSTAKPALTASAGNDSEPNLIDCLMVSPACSTMSIELGPQADRTLGCYVEILKLLSDYDDWRPSLASLLQPIPFPKEALAHEKFTKELKYVIQRFAEDPRQEVHSCLLSVRAGKDGWFQLYSPGGVACDDDGELFASMVHILMGSCYKTKKFLLSLAENKLGPCMLLALRGNQTMVEILCLMLEYNIIDNNDTQLQIISTLESTDVGKRMYEQLCDRQRELKELVATVSLPHSPTGVSWDHPPVNHLCSNLISGFAPE

SEQ ID NO: 3873 - protein, 98 aa, Artificial Sequence
  Synthetic polypeptide
MSTTVNVDSLAEYEKSQIKRALELGTVMTVFSFRKSTPERRTVQVIMETRQVAWSKTADKIEGFCELQSAELSQDACAQRSLSSPCWGGAPVWTLLHS

SEQ ID NO: 3874 - protein, 611 aa, Artificial Sequence
  Synthetic polypeptide
MALPTARPLLGSCGTPALGSLLFLLFSLGWVQPSRTLAGETGQEAAPLDGVLANPPNISSLSPRQLLGFPCAEVSGLSTERVRELAVALAQKNVKLSTEQLRCLAHRLSEPPEDLDALPLDLLLFLNPDAFSGPQACTRFFSRITKANVDLLPRGAPERQRLLPAALACWGVRGSLLSEADVRALGGLACDLPGRFVAESAEVLLPRLVSCPGPLDQDQQEAARAALQGGGPPYGPPSTWSVSTMDALRGLLPVLGQPIIRSIPQGIVAAWRQRSSRDPSWRQPERTILRPRFRREVEKTACPSGKKAREIDESLIFYKKWELEACVDAALLATQMDRVNAIPFTYEQLDVLKHKLDELYPQGYPESVIQHLGYLFLKMSPEDIRKWNVTSLETLKALLEVNKGHEMSPQVATLIDRFVKGRGQLDKDTLDTLTAFYPGYLCSLSPEELSSVPPSSIWAVRPQDLDTCDPRQLDVLYPKARLAFQNMNGSEYFVKIQSFLGGAPTEDLKALSQQNVSMDLATFMKLRTDAVLPLTVAEVQKLLGPHVEGLKAEERHRPVRDWILRQRQDDLDTLGLGLQGGIPNGYLVLDLSMQGAVAHTCYPSALGDRGG

SEQ ID NO: 3875 - protein, 619 aa, Artificial Sequence
  Synthetic polypeptide
MALPTARPLLGSCGTPALGSLLFLLFSLGWVQPSRTLAGETGQEAAPLDGVLANPPNISSLSPRQLLGFPCAEVSGLSTERVRELAVALAQKNVKLSTEQLRCLAHRLSEPPEDLDALPLDLLLFLNPDAFSGPQACTRFFSRITKANVDLLPRGAPERQRLLPAALACWGVRGSLLSEADVRALGGLACDLPGRFVAESAEVLLPRLVSCPGPLDQDQQEAARAALQGGGPPYGPPSTWSVSTMDALRGLLPVLGQPIIRSIPQGIVAAWRQRSSRDPSWRQPERTILRPRFRREVEKTACPSGKKAREIDESLIFYKKWELEACVDAALLATQMDRVNAIPFTYEQLDVLKHKLDELYPQGYPESVIQHLGYLFLKMSPEDIRKWNVTSLETLKALLEVNKGHEMSPQAPRRPLPQVATLIDRFVKGRGQLDKDTLDTLTAFYPGYLCSLSPEELSSVPPSSIWAVRPQDLDTCDPRQLDVLYPKARLAFQNMNGSEYFVKIQSFLGGAPTEDLKALSQQNVSMDLATFMKLRTDAVLPLTVAEVQKLLGPHVEGLKAEERHRPVRDWILRQRQDDLDTLGLGLQGGIPNGYLVLDLSMQGAVAHTCYPSALGDRGG

SEQ ID NO: 3876 - protein, 5 aa, Artificial Sequence
  Synthetic polypeptide
ILAAA

SEQ ID NO: 3877 - protein, 315 aa, Artificial Sequence
  Synthetic polypeptide
VEKTACPSGKKAREIDESLIFYKKWELEACVDAALLATQMDRVNAIPFTYEQLDVLKHKLDELYPQGYPESVIQHLGYLFLKMSPEDIRKWNVTSLETLKALLEVNKGHEMSPQVATLIDRFVKGRGQLDKDTLDTLTAFYPGYLCSLSPEELSSVPPSSIWAVRPQDLDTCDPRQLDVLYPKARLAFQNMNGSEYFVKIQSFLGGAPTEDLKALSQQNVSMDLATFMKLRTDAVLPLTVAEVQKLLGPHVEGLKAEERHRPVRDWILRQRQDDLDTLGLGLQGGIPNGYLVLDLSMQGAVAHTCYPSALGDRGG

SEQ ID NO: 3878 - protein, 211 aa, Artificial Sequence
  Synthetic polypeptide
MSTTVNVDSLAEYEKSQIKRALELGTVMTVFSFRKSTPERRTVQVIMETRQVAWSKTADKIEGFLDIMEIKEIRPGKNSKDFERAKAVRQKEDCCFTILYGTQFVLSTLSLAADSKEDAVNWLSGLKILHQEAMNASTPTIIESWLRKQIYSVDQTRRNRRSGVHLYSQHFGRQRQADCLSSGVRDQPGQHGKTLSLLKYKKLARHGSTLL

SEQ ID NO: 3879 - protein, 469 aa, Artificial Sequence
  Synthetic polypeptide
MSTTVNVDSLAEYEKSQIKRALELGTVMTVFSFRKSTPERRTVQVIMETRQVAWSKTADKIEGFLDIMEIKEIRPGKNSKDFERAKAVRQKEDCCFTILYGTQFVLSTLSLAADSKEDAVNWLSGLKILHQEAMNASTPTIIESWLRKQIYSVDQTRRNSISLRELKTILPLINFKVSSAKFLKDKFVEIGAHKDELSFEQFHLFYKKLMFEQQKSILDEFKKDSSVFILGNTDRPDASAVYLHDFQRFLIHEQQEHWAQDLNKVRERMTKFIDDTMRETAEPFLFVDEFLTYLFSRENSIWDEKYDAVDMQDMNNPLSHYWISSSHNTYLTGDQLRSESSPEAYIRCLRMGCRCIELDCWDGPDGKPVIYHGWTRTTKIKFDDVVQAIKDHAFVTSSFPVILSIEEHCSVEQQRHMAKAFKEVFGDLLLTKPTEASADQLPSPSQLREKIIIKLSPDFEGAHYTKTVK

SEQ ID NO: 3880 - protein, 65 aa, Artificial Sequence
  Synthetic polypeptide
MAAERKTRLSKNLLRMKMGLSSFRKTSSGLPLILHCGELYNYFMTYYNIIIETKCTINVMHLNHP

SEQ ID NO: 3881 - protein, 220 aa, Artificial Sequence
  Synthetic polypeptide
MQPRTPLVLCVLLSQVLLLTSAEDLDCTPGFQQKVFHINQPAEFIEDQSILNLTFSDCKGNDKLRYEVSSPYFKVNSDGGLVALRNITAVGKTLFVHARTPHAEDMAELVIVGGKDIQGSLQDIFKFARTSPVPRQKRSIVVSPILIPENQRQPFPRDVGKVVDSDRPERSKFRLTGKGVDQEPKGIFRINENTGSVSVTRTLDREVIAVYQAGHGGSCL

SEQ ID NO: 3882 - protein, 267 aa, Artificial Sequence
  Synthetic polypeptide
MKTPPGASSRTKCSRELRSFCAFSCPRAKQPTCTAWFPQQEHPSENGPQMPGRDPPAASTMQVLLLTSAEDLDCTPGFQQKVFHINQPAEFIEDQSILNLTFSDCKGNDKLRYEVSSPYFKVNSDGGLVALRNITAVGKTLFVHARTPHAEDMAELVIVGGKDIQGSLQDIFKFARTSPVPRQKRSIVVSPILIPENQRQPFPRDVGKVVDSDRPERSKFRLTGKGVDQEPKGIFRINENTGSVSVTRTLDREVIAVYQAGHGGSCL

SEQ ID NO: 3883 - protein, 181 aa, Artificial Sequence
  Synthetic polypeptide
MQPRTPLVLCVLLSQVLLLTSAEDLDCTPGFQQKVFHINQPAEFIEDQSILNLTFSDCKGNDKLRYEVSSPYFKVNSDGGLVALRNITAVGKTLFVHARTPHAEDMAELVIVGGKDIQGSLQVVDSDRPERSKFRLTGKGVDQEPKGIFRINENTGSVSVTRTLDREVIAVYQAGHGGSCL

SEQ ID NO: 3884 - protein, 229 aa, Artificial Sequence
  Synthetic polypeptide
MSSSRKDHLGASSSEPLPVIIVGNGPSGICLSYLLSGYTPYTKPDAIHPHPLLQRKLTEAPGVSILDQDLDYLSEGLEGRSQSPVALLFDALLRPDTDFGGNMKSVLTWKHRKEHAIPHVVLGRNLPGGAWHSIEGSMVILSQGQWMGLPDLEVKDWMQKKRRGLRNSRATAGDIAHYYRDYVVKKGLGHNFVSGAVVTAVEWGTPDPSSCGAQDSSPLFQCLALPTWM

SEQ ID NO: 3885 - protein, 312 aa, Artificial Sequence
  Synthetic polypeptide
MGKWRPRGCCRGNMQCRQEVPATLTSSELFSTRNQPQPQPQPLLADAPVPWAVASRMCLTPGQGCGHQGQDEGPLPAPSPPPAMSSSRKDHLGASSSEPLPVIIVGNGPSGICLSYLLSGYTPYTKPDAIHPHPLLQRKLTEAPGVSILDQDLDYLSEGLEGRSQSPVALLFDALLRPDTDFGGNMKSVLTWKHRKEHAIPHVVLGRNLPGGAWHSIEGSMVILSQGQWMGLPDLEVKDWMQKKRRGLRNSRATAGDIAHYYRDYVVKKGLGHNFVSGAVVTAVEWGTPDPSSCGAQDSSPLFQCLALPTWM

SEQ ID NO: 3886 - protein, 491 aa, Artificial Sequence
  Synthetic polypeptide
MSSSRKDHLGASSSEPLPVIIVGNGPSGICLSYLLSGYTPYTKPDAIHPHPLLQRKLTEAPGVSILDQDLDYLSEGLEGRSQSPVALLFDALLRPDTDFGGNMKSVLTWKHRKEHAIPHVVLGRNLPGGAWHSIEGSMVILSQGQWMGLPDLEVKDWMQKKRRGLRNSRATAGDIAHYYRDYVVKKGLGHNFVSGAVVTAVEWGTPDPSSCGAQDSSPLFQVSGFLTRNQAQQPFSLWARNVVLATGTFDSPARLGIPGEALPFIHHELSALEAATRVGAVTPASDPVLIIGAGLSAADAVLYARHYNIPVIHAFRRAVDDPGLVFNQLPKMLYPEYHKVHQMMREQSILSPSPYEGYRSLPRHQLLCFKEDCQAVFQDLEGVEKVFGVSLVLVLIGSHPDLSFLPGAGADFAVDPDQPLSAKRNPIDVDPFTYQSTRQEGLYAMGPLAGDNFVSVWLCPLGCKLQELWETKYTICFAHCWNSVVGHLPGT

SEQ ID NO: 3887 - protein, 574 aa, Artificial Sequence
  Synthetic polypeptide
MGKWRPRGCCRGNMQCRQEVPATLTSSELFSTRNQPQPQPQPLLADAPVPWAVASRMCLTPGQGCGHQGQDEGPLPAPSPPPAMSSSRKDHLGASSSEPLPVIIVGNGPSGICLSYLLSGYTPYTKPDAIHPHPLLQRKLTEAPGVSILDQDLDYLSEGLEGRSQSPVALLFDALLRPDTDFGGNMKSVLTWKHRKEHAIPHVVLGRNLPGGAWHSIEGSMVILSQGQWMGLPDLEVKDWMQKKRRGLRNSRATAGDIAHYYRDYVVKKGLGHNFVSGAVVTAVEWGTPDPSSCGAQDSSPLFQVSGFLTRNQAQQPFSLWARNVVLATGTFDSPARLGIPGEALPFIHHELSALEAATRVGAVTPASDPVLIIGAGLSAADAVLYARHYNIPVIHAFRRAVDDPGLVFNQLPKMLYPEYHKVHQMMREQSILSPSPYEGYRSLPRHQLLCFKEDCQAVFQDLEGVEKVFGVSLVLVLIGSHPDLSFLPGAGADFAVDPDQPLSAKRNPIDVDPFTYQSTRQEGLYAMGPLAGDNFVSVWLCPLGCKLQELWETKYTICFAHCWNSVVGHLPGT

SEQ ID NO: 3888 - protein, 63 aa, Artificial Sequence
  Synthetic polypeptide
MPLTGVGPGSCRRQIIRALCLLLLLLHAGSAKNIWKRALPARLAEKSRASCLTSLNPSNLICK

SEQ ID NO: 3889 - protein, 1244 aa, Artificial Sequence
  Synthetic polypeptide
MVEGRVSEFLKKLGFSGGGRQYQALEKDEEEALIDEQSELKAIEKEKKVTALPPKEACKCQKEDLARAFCVDLHTGLSEFSVTQRRLAHGWNEFVADNSEPVWKKYLDQFKNPLILLLLGSALVSVLTKEYEDAVSIATAVLVVVTVAFIQEYRSEKSLEELTKMVPPECNCLREGKLQHLLARELVPGDVVSLSIGDRIPADIRLTEVTDLLVDESSFTGEAEPCSKTDSPLTGGGDLTTLSNIVFMGTLVQYGRGQGVVIGTGESSQFGEVFKMMQAEETPKTPLQKSMDRLGKQLTLFSFGIIGLIMLIGWSQGKQLLSMFTIGVSLAVAAIPEGLPIVVMVTLVLGVLRMAKKRVIVKKLPIVETLGCCSVLCSDKTGTLTANEMTVTQLVTSDGLRAEVSGVGYDGQGTVCLLPSKEVIKEFSNVSVGKLVEAGCVANNAVIRKNAVMGQPTEGALMALAMKMDLSDIKNSYIRKKEIPFSSEQKWMAVKCSLKTEDQEDIYFMKGALEEVIRYCTMYNNGGIPLPLTPQQRSFCLQEEKRMGSLGLRVLALASGPELGRLTFLGLVGIIDPPRVGVKEAVQVLSESGVSVKMITGDALETALAIGRNIGLCNGKLQAMSGEEVDSVEKGELADRVGKVSVFFRTSPKHKLKIIKALQESGAIVAMTGDGVNDAVALKSADIGIAMGQTGTDVSKEAANMILVDDDFSAIIQTESQIMSELPFTIASKRIKYLGIQLTRDVKDLFKENYKPLLKEIKEDTNKWKNIPCSWVGRINIVKMAILPKVIYRFNAIPIKLPMTFFTELEKTTLKFIWKQKRARIAKSILSQKNKAGGITLPDFKLYYKATVTKTAWYWYQNRDIDQWNRTEPSEIMPHIYNYLIFDKPEKNKQWGKDSLFNKWCWENWLAICRKLKLDPFLTPYTKINSRWIKDLNVRPKTIKTLEENLGITIQDIGMGKDFMSKTPKAMATKAKIDKWDLIKLKSFCTAKETTIRVNRQPTTWEKIFTTYSSDKGLISRIYNELKQIYKKKTNNPIKKWAKDMNRHFSKEDIYAAKKHMKKCSSSLAIREMQIKTTMRYHLTPVRMAIIKKSGNNRCWRGCGEIGTLLHCWWDCKLVQPLWKSVWRFLRDLELEIPFDPAIPLLGIYPKDYKSCCYKDTCTRMFIAALFTIAKTWNQPKCPTMIDWIKKMWHIYTMEYYAAIKNDEFMSFVGTWMKLETIILSKLLQEQKTKHHIFSLIGGN

SEQ ID NO: 3890 - protein, 377 aa, Artificial Sequence
  Synthetic polypeptide
MGNSRSRVGRSFCSQFLPEEQAEIDQLFDALSSDKNSPNVSSKSFSLKALQNHVGEALPPEMVTRLYDGMRRVDLTGKAKGPSENVSQEQFTASMSHLLKGNSEEKSLMIMKMISATEGPVKAREVQKFTEDLVGSVVHVLSHRQELRGWTGKEAPGPNPRVQVLAAQLLSDMKLQDGKRLLGPQWLDYDCDRAVIEDWVFRVPHVAIFLSVVICKGFLILCSSLDLTTLVPERQVDQGRGFESILDVLSVMYINAQLPREQRHRWCLLFSSELHGHSFSQLCGHITHRGPCVAVLEDHDKHVFGGFASCSWEVKPQFQGDNRCFLFSICPSMAVYTHTGYNDHYMYLNHGQQTIPNGLGLQEQHAPATPGPRTSGL

SEQ ID NO: 3891 - protein, 350 aa, Artificial Sequence
  Synthetic polypeptide
MGLPSWTRRSRNHDVSGAPLPLECNHVGEALPPEMVTRLYDGMRRVDLTGKAKGPSENVSQEQFTASMSHLLKGNSEEKSLMIMKMISATEGPVKAREVQKFTEDLVGSVVHVLSHRQELRGWTGKEAPGPNPRVQVLAAQLLSDMKLQDGKRLLGPQWLDYDCDRAVIEDWVFRVPHVAIFLSVVICKGFLILCSSLDLTTLVPERQVDQGRGFESILDVLSVMYINAQLPREQRHRWCLLFSSELHGHSFSQLCGHITHRGPCVAVLEDHDKHVFGGFASCSWEVKPQFQGDNRCFLFSICPSMAVYTHTGYNDHYMYLNHGQQTIPNGLGLQEQHAPATPGPRTSGL

SEQ ID NO: 3892 - protein, 356 aa, Artificial Sequence
  Synthetic polypeptide
MGNSRSRVGRSFCSQFLPEEQAEIDQLFDALSSDKNSPNVSSKSFSLKALQNHVGEALPPEMVTRLYDGMRRVDLTGKAKGPSENVSQEQFTASMSHLLKGNSEEKSLMIMKMISATEGPVKAREVQKFTEDLVGSVVHVLSHRQELRGWTGKEAPGPNPRVQVLAAQLLSDMKLQDGKRLLGPQWLDYDCDRAVIEDWVFRVPHVAIFLSVVICKGFLILCSSLDLTTLVPERQVDQGRGFESILDVLSVMYINAQLPREQRHRWCLLFSSELHGHSFSQLCGHITHRGPCVAVLEDHDKHVFGGFASCSWEVKPQFQDMAVSMTGVSELCVPHQRIIQPEGGCGKLLDLQSVSE

SEQ ID NO: 3893 - protein, 329 aa, Artificial Sequence
  Synthetic polypeptide
MGLPSWTRRSRNHDVSGAPLPLECNHVGEALPPEMVTRLYDGMRRVDLTGKAKGPSENVSQEQFTASMSHLLKGNSEEKSLMIMKMISATEGPVKAREVQKFTEDLVGSVVHVLSHRQELRGWTGKEAPGPNPRVQVLAAQLLSDMKLQDGKRLLGPQWLDYDCDRAVIEDWVFRVPHVAIFLSVVICKGFLILCSSLDLTTLVPERQVDQGRGFESILDVLSVMYINAQLPREQRHRWCLLFSSELHGHSFSQLCGHITHRGPCVAVLEDHDKHVFGGFASCSWEVKPQFQDMAVSMTGVSELCVPHQRIIQPEGGCGKLLDLQSVSE

SEQ ID NO: 3894 - protein, 14 aa, Artificial Sequence
  Synthetic polypeptide
GPGRPRVHLLHLWG

SEQ ID NO: 3895 - protein, 14 aa, Artificial Sequence
  Synthetic polypeptide
GPGRPRVHLLHLWG

SEQ ID NO: 3896 - protein, 14 aa, Artificial Sequence
  Synthetic polypeptide
GPGRPRVHLLHLWG

SEQ ID NO: 3897 - protein, 27 aa, Artificial Sequence
  Synthetic polypeptide
MLATRVFSLVGKRAISTSVCVRAHAHR

SEQ ID NO: 3898 - protein, 28 aa, Artificial Sequence
  Synthetic polypeptide
MLATRVFSLVGKRAISTSVCVRAHEVCH

SEQ ID NO: 3899 - protein, 211 aa, Artificial Sequence
  Synthetic polypeptide
MCDRNGGRRLRQWLIEQIDSSMYPGLIWENEEKSMFRIPWKHAGKQDYNQEVDASIFKAWAVFKGKFKEGDKAEPATWKTRLRCALNKSPDFEEVTDRSQLDISEPYKVYRIVPEEEQKCKLGVATAGCVNEVTEMECGRSEIDELIKEPSVDDYMGMIKRSPSPPEACRSQLLPDWWAQQPSTGVPLVTGYTTYDAHHSGSRPQCPWQCL

SEQ ID NO: 3900 - protein, 177 aa, Artificial Sequence
  Synthetic polypeptide
MRASRSPPSPRRCHHHHEATGAASGAAAGGPGAGCVGLCRLALTPSAQDGRNSTFQTYKKEVCLPRHSMHPGPWAICCECQTRFGGRLPVSRVEAALPYWVPLSLRPRKQSQKTVQFPIPQTAKMCPCLCHRFGGRLPMPRDQAVMPYWVPQVLRSQQQIVRRQQSLKGIQGSNLRC

SEQ ID NO: 3901 - protein, 113 aa, Artificial Sequence
  Synthetic polypeptide
MRASRSPPSPRRCHHHHEATGAASGAAAGGPGAGCVGLCRLALTPSAQDGRNSTFQTYKKEVCLPRHSMHPGPWAICCECQTRFGGRLPVSRVEAALPYWVPLSLRPRKQDLI

SEQ ID NO: 3902 - protein, 11 aa, Artificial Sequence
  Synthetic polypeptide
SPLGSRQWRST

SEQ ID NO: 3903 - protein, 200 aa, Artificial Sequence
  Synthetic polypeptide
MGKKGKKEKKGRGAEKTAAKMEKKVSKRSRKEEEDLEALIAHFQTLDAKRTQTVELPCPPPSPRLNASLSVHPEKDELILFGGEYFNGQKTFLYNELYVYNTRKDTWTKVDIPSPPPRRCAHQAVVVPQGGGQLWVFGGEFASPNGEQFYHYKDLWVLHLATKTWEQVKSTGGPSGRSGHRMVAWKRQLILFGGFHESTR

SEQ ID NO: 3904 - protein, 143 aa, Artificial Sequence
  Synthetic polypeptide
MGKKGKKEKKGRGAEKTAAKMEKKVSKRSRKEETFLYNELYVYNTRKDTWTKVDIPSPPPRRCAHQAVVVPQGGGQLWVFGGEFASPNGEQFYHYKDLWVLHLATKTWEQVKSTGGPSGRSGHRMVAWKRQLILFGGFHESTR

SEQ ID NO: 3905 - protein, 110 aa, Artificial Sequence
  Synthetic polypeptide
MGKKGKKEKKGRGAEKTAAKMEKKVSKRSRKEEAVVVPQGGGQLWVFGGEFASPNGEQFYHYKDLWVLHLATKTWEQVKSTGGPSGRSGHRMVAWKRQLILFGGFHESTR

SEQ ID NO: 3906 - protein, 79 aa, Artificial Sequence
  Synthetic polypeptide
MGKKGKKEKKGRGAEKTAAKMEKKVSKRSRKEEEDLEALIAHFQTLDAKRTQTVELPCPPPSPRNIFWSWHYGARLGER

SEQ ID NO: 3907 - protein, 126 aa, Artificial Sequence
  Synthetic polypeptide
MGKKGKKEKKGRGAEKTAAKMEKKVSKRSRKEEPGVCRRIRPDLGVECSAAAAHGFPNRGQFYGLPCARHSSLGFTPHEQEDLEALIAHFQTLDAKRTQTVELPCPPPSPRNIFWSWHYGARLGER

SEQ ID NO: 3908 - protein, 240 aa, Artificial Sequence
  Synthetic polypeptide
MINPYRNLPLAIIISLPIVTLVYVLTNLAYFTTLSTEQMLSSEAVAVDFGNYHLGVMSWIIPVFVGLSCFGSVNGSLFTSSRLFFVGSREGHLPSILSMIHPQLLTPVPSLVFTCVMTLLYAFSKDIFSVINFFSFFNWLCVALAIIGMIWLRHRKPELERPIKVNLALPVFFILACLFLIAVSFWKTPVECGIGFTIILSGLPVYFFGVWWKNKPKWLLQGIYQLGVVAHTCNPSYSGG

SEQ ID NO: 3909 - protein, 506 aa, Artificial Sequence
  Synthetic polypeptide
MAGAGPKRRALAAPAAEEKEEAREKMLAAKSADGSAPAGEGEGVTLQRNITLLNGVAIIVGTIIGSGIFVTPTGVLKEAGSPGLALVVWAACGVFSIVGALCYAELGTTISKSGGDYAYMLEVYGSLPAFLKLWIELLIIRPSSQYIVALVFATYLLKPLFPTCPVPEEAAKLVACLCVLLLTAVNCYSVKAATRVQDAFAAAKLLALALIILLGFVQIGKGDVSNLDPNFSFEGTKLDVGNIVLALYSGLFAYGGWNYLNFVTEEMINPYRNLPLAIIISLPIVTLVYVLTNLAYFTTLSTEQMLSSEAVAVDFGNYHLGVMSWIIPVFVGLSCFGSVNGSLFTSSRLFFVGSREGHLPSILSMIHPQLLTPVPSLVFTCVMTLLYAFSKDIFSVINFFSFFNWLCVALAIIGMIWLRHRKPELERPIKVNLALPVFFILACLFLIAVSFWKTPVECGIGFTIILSGLPVYFFGVWWKNKPKWLLQGIYQLGVVAHTCNPSYSGG

SEQ ID NO: 3910 - protein, 61 aa, Artificial Sequence
  Synthetic polypeptide
MGQIEWAMWANEQALASGLNLLSVPQGLGTSCCFCRASWLSHLFLNSNATCLGRSFQTVQP

SEQ ID NO: 3911 - protein, 1895 aa, Artificial Sequence
  Synthetic polypeptide
MEPHVLGAVLYWLLLPCALLAACLLRFSGLSLVYLLFLLLLPWFPGPTRCGLQGHTGRLLRALLGLSLLFLVAHLALQICLHIVPRLDQLLGPSCSRWETLSRHIGVTRLDLKDIPNAIRLVAPDLGILVVSSVCLGICGRLARNTRQSPHPRELDDDERDVDASPTAGLQEAATLAPTRRSRLAARFRVTAHWLLVAAGRVLAVTLLALAGIAHPSALSSVYLLLFLALCTWWACHFPISTRGFSRLCVAVGCFGAGHLICLYCYQMPLAQALLPPAGIWARVLGLKDFVGPTNCSSPHALVLNTGLDWPVYASPGVLLLLCYATASLRKLRAYRPSGQRKEAAKGYEARELELAELDQWPQERESDQHVVPTAPDTEADNCIVHELTGQSSVLRRPVRPKRAEPREASPLHSLGHLIMDQSYVCALIAMMVWSITYHSWLTFVLLLWACLIWTVRSRHQLAMLCSPCILLYGMTLCCLRYVWAMDLRPELPTTLGPVSLRQLGLEHTRYPCLDLGAMLLYTLTFWLLLRQFVKEKLLKWAESPAALTEVTVADTEPTRTQTLLQSLGELVKGVYAKYWIYVCAGMFIVVSFAGRLVVYKIVYMFLFLLCLTLFQVYYSLWRKLLKAFWWLVVAYTMLVLIAVYTFQFQDFPAYWRNLTGFTDEQLGDLGLEQFSVSELFSSILVPGFFLLACILQLHYFHRPFMQLTDMEHVSLPGTRLPRWAHRQDAVSGTPLLREEQQEHQQQQQEEEEEEEDSRDEGLGVATPHQATQVPEGAAKWGLVAERLLELAAGFSDVLSRVQVFLRRLLELHVFKLVALYTVWVALKEVSVMNLLLVVLWAFALPYPRFRPMASCLSTVWTCVIIVCKMLYQLKVVNPQEYSSNCTEPFPNSTNLLPTEISQSLLYRGPVDPANWFGVRKGFPNLGYIQNHLQVLLLLVFEAIVYRRQEHYRRQHQLAPLPAQAVFASGTRQQLDQDLLGCLKYFINFFFYKFGLEICFLMAVNVIGQRMNFLVTLHGCWLVAILTRRHRQAIARLWPNYCLFLALFLLYQYLLCLGMPPALCIDYPWRWSRAVPMNSALIKWLYLPDFFRAPNSTNLISDFLLLLCASQQWQVFSAERTEEWQRMAGVNTDRLEPLRGEPNPVPNFIHCRSYLDMLKVAVFRYLFWLVLVVVFVTGATRISIFGLGYLLACFYLLLFGTALLQRDTRARLVLWDCLILYNVTVIISKNMLSLLACVFVEQMQTGFCWVIQLFSLVCTVKGYYDPKEMMDRDQDCLLPVEEAGIIWDSVCFFFLLLQRRVFLSHYYLHVRADLQATALLASRGFALYNAANLKSIDFHRRIEEKSLAQLKRQMERIRAKQEKHRQGRVDRSRPQDTLGPKDPGLEPGPDSPGGSSPPRRQWWRPWLDHATVIHSGDYFLFESDSEEEEEAVPEDPRPSAQSAFQLAYQAWVTNAQAVLRRRQQEQEQARQEQAGQLPTGGGPSQEVEPAEGPEEAAAGRSHVVQRVLSTAQFLWMLGQALVDELTRWLQEFTRHHGTMSDVLRAERYLLTQELLQGGEVHRGVLDQLYTSQAEATLPGPTEAPNAPSTVSSGLGAEEPLSSMTDDMGSPLSTGYHTRSGSEEAVTDPGEREAGASLYQGLMRTASELLLDRRLRIPELEEAELFAEGQGRALRLLRAVYQCVAAHSELLCYFIIILNHMVTASAGSLVLPVLVFLWAMLSIPRPSKRFWMTAIVFTEIAVVVKYLFQFGFFPWNSHVVLRRYENKPYFPPRILGLEKTDGYIKYDLVQLMALFFHRSQLLCYGLWDHEEDSPSKEHDKSGEEEQGAEEGPGVPAATTEDHIQVEARVGPTDGTPEPQVELRPRDTRRISLRFRRRKKEGPARKGAAAIGRMPAS

SEQ ID NO: 3912 - protein, 152 aa, Artificial Sequence
  Synthetic polypeptide
MPDSPAEVKTQPRSTPPSMPPPPPAASQGATRPPSFTPHTLMNGSSHSPTAINGAPCTPNGFSNGPATSSTASLSTQHLPPACGARQLSKLKRFLTTLQQFGSDISPEIGERVRTLVLGLVNSTLTIEEFHSKLQEATNFPLRPFVIPFLKM

SEQ ID NO: 3913 - protein, 238 aa, Artificial Sequence
  Synthetic polypeptide
MPASRLRDRAASSASGSTCGSMSQTHPVLESGLLASAGCSAPRGPRKGGPAPVDRKAKASAMPDSPAEVKTQPRSTPPSMPPPPPAASQGATRPPSFTPHTHREDGPATLPHGRFHGCLKWSMVCLLMNGSSHSPTAINGAPCTPNGFSNGPATSSTASLSTQHLPPACGARQLSKLKRFLTTLQQFGSDISPEIGERVRTLVLGLVNSTLTIEEFHSKLQEATNFPLRPFVIPFLKM

SEQ ID NO: 3914 - protein, 213 aa, Artificial Sequence
  Synthetic polypeptide
MPASRLRDRAASSASGSTCGSMSQTHPVLESGLLASAGCSAPRGPRKGGPAPVDRKAKASAMPDSPAEVKTQPRSTPPSMPPPPPAASQGATRPPSFTPHTLMNGSSHSPTAINGAPCTPNGFSNGPATSSTASLSTQHLPPACGARQLSKLKRFLTTLQQFGSDISPEIGERVRTLVLGLVNSTLTIEEFHSKLQEATNFPLRPFVIPFLKM

SEQ ID NO: 3915 - protein, 162 aa, Artificial Sequence
  Synthetic polypeptide
MPASRLRDRAASSASGSTCGSMSQTHPVLESGLLASAGCSAPRGPRKGGPVMNGSSHSPTAINGAPCTPNGFSNGPATSSTASLSTQHLPPACGARQLSKLKRFLTTLQQFGSDISPEIGERVRTLVLGLVNSTLTIEEFHSKLQEATNFPLRPFVIPFLKM

SEQ ID NO: 3916 - protein, 177 aa, Artificial Sequence
  Synthetic polypeptide
MPDSPAEVKTQPRSTPPSMPPPPPAASQGATRPPSFTPHTHREDGPATLPHGRFHGCLKWSMVCLLMNGSSHSPTAINGAPCTPNGFSNGPATSSTASLSTQHLPPACGARQLSKLKRFLTTLQQFGSDISPEIGERVRTLVLGLVNSTLTIEEFHSKLQEATNFPLRPFVIPFLKM

SEQ ID NO: 3917 - protein, 153 aa, Artificial Sequence
  Synthetic polypeptide
MAAPDLAHGGHVSRDSVCLHEEQTQAAGMVAGWLINCYQDAVTFDDVAVDFTQEEWTLLDPSQRDLYRDVMLENYENLASVEWRLKTKGPALRQDRSWFRASNETQTARSHNGGQLCDRTQCGEAFSEHSGLSTHGTFSSWGLAVGARPSLSG

SEQ ID NO: 3918 - protein, 111 aa, Artificial Sequence
  Synthetic polypeptide
MLENYENLASVGHHLFQPSVIYWLEQEEELRAGRRAVLQEWRLKTKGPALRQDRSWFRASNETQTARSHNGGQLCDRTQCGEAFSEHSGLSTHGTFSSWGLAVGARPSLSG

SEQ ID NO: 3919 - protein, 2613 aa, Artificial Sequence
  Synthetic polypeptide
MPKGGCPKAPQQEELPLSSDMVEKQTGKKDKDKVSLTKTPKLERGDGGKEVRERASKRKLPFTAGANGEQKDSDTEKQGPERKRIKKEPVTRKAGLLFGMGLSGIRAGYPLSERQQVALLMQMTAEESANSPVDTTPKHPSQSTVCQKGTPNSASKTKDKVNKRNERGETRLHRAAIRGDARRIKELISEGADVNVKDFAGWTALHEACNRGYYDVAKQLLAAGAEVNTKGLDDDTPLHDAANNGHYKVVKLLLRYGGNPQQSNRKGETPLKVANSPTMVNLLLGKGTYTSSEESSTESSEEEDAPSFAPSSSVDGNNTDSEFEKGLKHKAKNPEPQKATAPVKDEYEFDEDDEQDRVPPVDDKHLLKKDYRKETKSNSFISIPKMEVKSYTKNNTIAPKKASHRILSDTSDEEDASVTVGTGEKLRLSAHTILPGSKTREPSNAKQQKEKNKVKKKRKKETKGREVRFGKRSDKFCSSESESESSESGEDDRDSLGSSGCLKGSPLVLKDPSLFSSLSASSTSSHGSSAAQKQNPSHTDQHTKHWRTDNWKTISSPAWSEVSSLSDSTRTRLTSESDYSSEGSSVESLKPVRKRQEHRKRASLSEKKSPFLSSAEGAVPKLDKEGKVVKKHKTKHKHKNKEKGQCSISQELKLKSFTYEYEDSKQKSDKAILLENDLSTENKLKVLKHDRDHFKKEEKLSKMKLEEKEWLFKDEKSLKRIKDTNKDISRSFREEKDRSNKAEKERSLKEKSPKEEKLRLYKEERKKKSKDRPSKLEKKNDLKEDKISKEKEKIFKEDKEKLKKEKVYREDSAFDEYCNKNQFLENEDTKFSLSDDQRDRWFSDLSDSSFDFKGEDSWDSPVTDYRDMKSDSVAKLILETVKEDSKERRRDSRAREKRDYREPFFRKKDRDYLDKNSEKRKEQTEKHKSVPGYLSEKDKKRRESAEAGRDRKDALESCKERRDGRAKPEEAHREELKECGCESGFKDKSDGDFGKGLEPWERHHPAREKEKKDGPDKERKEKTKPERYKEKSSDKDKSEKSILEKCQKDKEFDKCFKEKKDTKEKHKDTHGKDKERKASLDQGKEKKEKAFPGIISEDFSEKKDDKKGKEKSWYIADIFTDESEDDRDSCMGSGFKMGEASDLPRTDGLQEKEEGREAYASDRHRKSSDKQHPERQKDKEPRDRRKDRGAADAGRDKKEKVFEKHKEKKDKESTEKYKDRKDRASVDSTQDKKNKQKLPEKAEKKHAAEDKAKSKHKEKSDKEHSKERKSSRSADAEKSLLEKLEEEALHEYREDSNDKISEVSSDSFTDRGQEPGLTAFLEVSFTEPPGDDKPRESACLPEKLKEKERHRHSSSSSKKSHDRERAKKEKAEKKEKGEDYKEGGSRKDSGQYEKDFLEADAYGVSYNMKADIEDELDKTIELFSTEKKDKNDSEREPSKKIEKELKPYGSSAINILKEKKKREKHREKWRDEKERHRDRHADGLLRHHRDELLRHHRDEQKPATRDKDSPPRVLKDKSRDEGPRLGDAKLKEKFKDGAEKEKGDPVKMSNGNDKVAPSKDPGKKDARPREKLLGDGDLMMTSFERMLSQKDLEIEERHKRHKERMKQMEKLRHRSGDPKLKEKAKPADDGRKKGLDIPAKKPPGLDPPFKDKKLKESTPIPPAAENKLHPASGADSKDWLAGPHMKEVLPASPRPDQSRPTGVPTPTSVLSCPSYEEVMHTPRTPSCSADDYADLVFDCADSQHSTPVPTAPTSACSPSFFDRFSVASSGLSENASQAPARPLSTNLYRSVSVDIRRTPEEEFSVGDKLFRQQSVPAASSYDSPMPPSMEDRAPLPPVPAEKFACLSPGYYSPDYGLPSPKVDALHCPPAAVVTVTPSPEGVFSSLQAKPSPSPRAELLVPSLEGALPPDLDTSEDQQATAAIIPPEPSYLEPLDEGPFSAVITEEPVEWAHPSEQALASSLIGGTSENPVSWPVGSDLLLKSPQRFPESPKRFCPADPLHSAAPGPFSASEAPYPAPPASPAPYALPVAEPGLEDVKDGVDAVPAAISTSEAAPYAPPSGLESFFSNCKSLPEAPLDVAPEPACVAAVAQVEALGPLENSFLDGSRGLSHLGQVEPVPWADAFAGPEDDLDLGPFSLPELPLQTKDAADGEAEPVEESLAPPEEMPPGAPGVINGGDVSTVVAEEPPALPPDQASTRLPAELEPEPSGEPKLDVALEAAVEAETVPEERARGDPDSSVEPAPVPPEQRPLGSGDQGAEAEGPPAASLCAPDGPAPNTVAQAQAADGAGPEDDTEASRAAAPAEGPPGGIQPEAAEPKPTAEAPKAPRVEEIPQRMTRNRAQMLANQSKQGPPPSEKECAPTPAPVTRAKARGSEDDDAQAQHPRKRRFQRSTQQLQQQLNTSTQQTREVIQQTLAAIVDAIKLDAIEPYHSDRANPYFEYLQIRKKIEEKRKILCCITPQAPQCYAEYVTYTGSYLLDGKPLSKLHIPVIAPPPSLAEPLKELFRQQEAVRGKLRLQHSIEREKLIVSCEQEILRVHCRAARTIANQAVPFSACTMLLDSEVYNMPLESQGDENKSVRDRFNARQFISWLQDVDDKYDRMKVINLQVVLSER

SEQ ID NO: 3920 - protein, 11 aa, Artificial Sequence
  Synthetic polypeptide
VSRLDGAARGL

SEQ ID NO: 3921 - protein, 11 aa, Artificial Sequence
  Synthetic polypeptide
VSRLDGAARGL

SEQ ID NO: 3922 - protein, 250 aa, Artificial Sequence
  Synthetic polypeptide
MPKGGCPKAPQQEELPLSSDMVEKQTGKKDKDKVSLTKTPKLERGDGGKEVRERASKRKLPFTAGANGEQKDSDTEKQGPERKRIKKEPVTRKAGLLFGMGLSGIRAGYPLSERQQVALLMQMTAEESANSPVDTTPKHPSQSTVCQKGTPNSASKTKDKVNKRNERGETRLHRAAIRGDARRIKELISEGADVNVKDFAGWTALHEACNRGYYDVAKQLLAAGAEVNTKGLDDDTPLHDAANNGHYKPP

SEQ ID NO: 3923 - protein, 105 aa, Artificial Sequence
  Synthetic polypeptide
MGSRSGRGRTEARSASESLQLRLLTPTFEGINGLLLKQHLVQNPVRLWQLLGGTFYFNTSRLKQKNKEKDKSKGKAPEEDEVHHRTPAWVTERDPISTKIKKKRK

SEQ ID NO: 3924 - protein, 149 aa, Artificial Sequence
  Synthetic polypeptide
MAVLLLLLRALRRGPGPGPRPLWGPGPAWSPGFPARPGRGRPYMASRPPGDLAEAGGRALQSLQLRLLTPTFEGINGLLLKQHLVQNPVRLWQLLGGTFYFNTSRLKQKNKEKDKSKGKAPEEDEVHHRTPAWVTERDPISTKIKKKRK

SEQ ID NO: 3925 - protein, 181 aa, Artificial Sequence
  Synthetic polypeptide
MWARGSPSCGPRRGATVGALDRGRWAGREEAGLGSAQSSAWTFPTRLLCVDVLRPSSSPFKVESSNGFRRSTNLQSTPVDRFRHQEFQRLPVRSLQLRLLTPTFEGINGLLLKQHLVQNPVRLWQLLGGTFYFNTSRLKQKNKEKDKSKGKAPEEDEVHHRTPAWVTERDPISTKIKKKRK

SEQ ID NO: 3926 - protein, 334 aa, Artificial Sequence
  Synthetic polypeptide
MAVLLLLLRALRRGPGPGPRPLWGPGPAWSPGFPARPGRGRPYMASRPPGDLAEAGGRALQSLQLRLLTPTFEGINGLLLKQHLVQNPVRLWQLLGGTFYFNTSRLKQKNKEKDKSKGKAPEEDEEERRRRERDDQMYRERLRTLLVIAVVMSLLNALSTSGGSISWNDFVHEMLAKGEVQRVQVVPESDVVEVYLHPGAVVFGRPRLALMYRMQVANIDKFEEKLRAAEDELNIEAKDRIPVSYKRTGFFGNALYSVGMTAVGLAILWYVFRLAGMTGREGGFSAFNQLKMARFTIVDGKMGKGVSFKDVAGMHEAKLEVREFVDYLKCSTQK

SEQ ID NO: 3927 - protein, 573 aa, Artificial Sequence
  Synthetic polypeptide
MAVLLLLLRALRRGPGPGPRPLWGPGPAWSPGFPARPGRGRPYMASRPPGDLAEAGGRALQSLQLRLLTPTFEGINGLLLKQHLVQNPVRLWQLLGGTFYFNTSRLKQKNKEKDKSKGKAPEEDEEERRRRERDDQMYRERLRTLLVIAVVMSLLNALSTSGGSISWNDFVHEMLAKGEVQRVQVVPESDVVEVYLHPGAVVFGRPRLALMYRMQVANIDKFEEKLRAAEDELNIEAKDRIPVSYKRTGFFGNALYSVGMTAVGLAILWYVFRLAGMTGREGGFSAFNQLKMARFTIVDGKMGKGVSFKDVAGMHEAKLEVREFVDYLKSPERFLQLGAKVPKGALLLGPPGCGKTLLAKAVATEAQVPFLAMAGPEFVEVIGGLGAARVRSLFKEARARAPCIVYIDEIDAVGKKRSTTMSGFSNTEEEQTLNQLLVEMDGMGTTDHVIVLASTNRADILDGALMRPGRLDRHVFIDLPTLQERREIFEQHLKSLKLTQSSTFYSQRLAELTPGFSGADIANICNEAALHAAREGHTSVHTLNFEYAVERVLAATQEAAAGGLLEPGRLKQQ

SEQ ID NO: 3928 - protein, 25 aa, Artificial Sequence
  Synthetic polypeptide
QADWTGTSSLISPRCRRGGRFLSST

SEQ ID NO: 3929 - protein, 88 aa, Artificial Sequence
  Synthetic polypeptide
REIFEQHLKSLKLTQSSTFYSQRLAELTPGFSGADIANICNEAALHAAREGHTSVHTLNFEYAVERVLAATQEAAAGGLLEPGRLKQQ

SEQ ID NO: 3930 - protein, 222 aa, Artificial Sequence
  Synthetic polypeptide
MSAGSERGAAATPGGLPAPCASKVELRLSCRHLLDRDPLTKSDPSVALLQQAQGQWVQVGRTEVVRSSLHPVFSKVFTVDYYFEEVQRLRFEVYDTHGPSGFSCQEDDFLGGMECTLGQPAQKWLLQVVMRVSVDVLGPAGHCAKHFLCCTESSHLARTGPSFLLRKEISQAWWCVPVVPATGEAEAGESLEPGRQRFQRAEIAPLHTSPGDSESLSQKKKK

SEQ ID NO: 3931 - protein, 458 aa, Artificial Sequence
  Synthetic polypeptide
MSAGSERGAAATPGGLPAPCASKVELRLSCRHLLDRDPLTKSDPSVALLQQAQGQWVQVGRTEVVRSSLHPVFSKVFTVDYYFEEVQRLRFEVYDTHGPSGFSCQEDDFLGGMECTLGQPAQKWLLQVVMRVSVDVLGPAGHCAKHFLCCTESSHLARTGPSFLLRYDDLCLPWATAGAVRWWTCRGGHTQGWQIVAQKKVTRPLLLKFGRNAGKSTITVIAEDISGNNGYVELSFRARKLDDKDLFSKSDPFLELYRVNDDQGLQLVYRTEVVKNNLNPVWEAFKVSLSSLCSCEETRPLKCLVWDYDSRGKHDFIGEFSTTFEEMQKAFEEGQAQWDCVNPKYKQKRRSYKNSGVVVLADLKFHRVYSFLDYIMGGCQIHFTVAIDFTASNGDPRNSCSLHYINPYQPNEYLKALVSVGEICQDYDSWAWWQMPVIPATQEAEAGESLEPGRRRLQ

SEQ ID NO: 3932 - protein, 383 aa, Artificial Sequence
  Synthetic polypeptide
MSAGSERGAAATPGGLPAPCASKVELRLSCRHLLDRDPLTKSDPSVALLQQAQGQWVQVGRTEVVRSSLHPVFSKVFTVDYYFEEVQRLRFEVYDTHGPSGFSCQEDDFLGGMECTLGQIVAQKKVTRPLLLKFGRNAGKSTITVIAEDISGNNGYVELSFRARKLDDKDLFSKSDPFLELYRVNDDQGLQLVYRTEVVKNNLNPVWEAFKVSLSSLCSCEETRPLKCLVWDYDSRGKHDFIGEFSTTFEEMQKAFEEGQAQWDCVNPKYKQKRRSYKNSGVVVLADLKFHRVYSFLDYIMGGCQIHFTVAIDFTASNGDPRNSCSLHYINPYQPNEYLKALVSVGEICQDYDSWAWWQMPVIPATQEAEAGESLEPGRRRLQ

SEQ ID NO: 3933 - protein, 103 aa, Artificial Sequence
  Synthetic polypeptide
FHRVYSFLDYIMGGCQIHFTTKRERGETGVAIDFTASNGDPRNSCSLHYINPYQPNEYLKALVSVGEICQDYDSWAWWQMPVIPATQEAEAGESLEPGRRRLQ

SEQ ID NO: 3934 - protein, 31 aa, Artificial Sequence
  Synthetic polypeptide
DSWAWWQMPVIPATQEAEAGESLEPGRRRLQ

SEQ ID NO: 3935 - protein, 81 aa, Artificial Sequence
  Synthetic polypeptide
MDDTLFQLKFTAKQLEKLAKKAEKDSKAEQAKVKKLLGRLRRENCLSPGGGGCSEPRSHCCTPSWATERDSISKKRKKRKE

SEQ ID NO: 3936 - protein, 47 aa, Artificial Sequence
  Synthetic polypeptide
MDVHGEAAGEAGQEGGEGLQGGAGQSEEATRKAEAGELLEPRRWRLQ

SEQ ID NO: 3937 - protein, 79 aa, Artificial Sequence
  Synthetic polypeptide
MVTHAAGARTFCEEQKKGSTYSVPKSKEKLMEKHSQEARQADRESEKPVDSLHPGAGTAKHPPPAASLEVNECHEIRWF

SEQ ID NO: 3938 - protein, 86 aa, Artificial Sequence
  Synthetic polypeptide
TPLARGPFVSRSRLRGRGGEEQKKGSTYSVPKSKEKLMEKHSQEARQADRESEKPVDSLHPGAGTAKHPPPAASLEVNECHEIRWF

SEQ ID NO: 3939 - protein, 80 aa, Artificial Sequence [sequence omitted]

SEQ ID NO: 3940 - protein, 49 aa, Artificial Sequence
  Synthetic polypeptide
MEKHSQEARQADRESEKPVDSLHPGAGTAKHPPPAASLEVNECHEIRWF

SEQ ID NO: 3941 - protein, 83 aa, Artificial Sequence
  Synthetic polypeptide
MVTHAAGARTFCEEQKKGSTYSVPKSKEKLMEKHSQEARQADRESEKPVDSLHPGAGTAKHPPPAASLEGVVAGACSPSCSGG

SEQ ID NO: 3942 - protein, 90 aa, Artificial Sequence
  Synthetic polypeptide
TPLARGPFVSRSRLRGRGGEEQKKGSTYSVPKSKEKLMEKHSQEARQADRESEKPVDSLHPGAGTAKHPPPAASLEGVVAGACSPSCSGG

SEQ ID NO: 3943 - protein, 84 aa, Artificial Sequence
  Synthetic polypeptide
MGLSKSKEKPRKGEEQKKGSTYSVPKSKEKLMEKHSQEARQADRESEKPVDSLHPGAGTAKHPPPAASLEGVVAGACSPSCSGG

SEQ ID NO: 3944 - protein, 53 aa, Artificial Sequence
  Synthetic polypeptide
MEKHSQEARQADRESEKPVDSLHPGAGTAKHPPPAASLEGVVAGACSPSCSGG

SEQ ID NO: 3945 - protein, 107 aa, Artificial Sequence
  Synthetic polypeptide
MAAAAGDGTVKPLQSAMKLANGAIELDTGNRPREAYTEYLRSIHYISQVLLEEVETTKVPATREAEAGELLEPGSRGCSEPRSPHCTPAWNKSETPSQKKKKEKKKK

SEQ ID NO: 3946 - protein, 631 aa, Artificial Sequence
  Synthetic polypeptide
MARAGSCGGAAAGAGRPEPWELSLEEVLKAYEQPLNEEQAWAVCFQGCRGLRGSPGRRLRDTGDLLLRGDGSVGAREPEAAEPATMVVPLASSEAQTVQSLGFAIYRALDWGLDESEERELSPQLERLIDLMANNDSEDSGCGAADEGYGGPEEEEEAEGVPRSVRTFAQAMRLCAARLTDPRGAQAHYQAVCRALFVETLELRAFLARVREAKEMLQKLREDEPHLETPRAELDSLGHTDWARLWVQLMRELRRGVKLKKVQEQEFNPLPTEFQLTPFEMLMQDIRARNYKLRKVMVDGDIPPRVKKDAHELILDFIRSRPPLKQVSERRLRPLPPKQRSLHEKILEEIKQERRLRPVRGEGWAARGFGSLPCILNACSGDAKSTSCINLSVTDAGGSAQRPRPRVLLKAPTLAEMEEMNTSEEEESPCGEVTLKRDRSFSEHDLAQLRSEVASGLQSATHPPGGTEPPRPRAGSAHVWRPGSRDQGTCPASVSDPSHPLLSNRGSSGDRPEASMTPDAKHLWLEFSHPVESLALTVEEVMDVRRVLVKAEMEKFLQNKELFSSLKKGKICCCCRAKFPLFSWPPSCLFCKSQEQTGCETMVFKTAGNKKETQRGKPAITTVIAWRVSRS

SEQ ID NO: 3947 - protein, 617 aa, Artificial Sequence
  Synthetic polypeptide
MARAGSCGGAAAGAGRPEPWELSLEEVLKAYEQPLNEEQAWAVCFQGCRGLRGSPGRRLRDTGDLLLRGDGSVGAREPEAAEPATMVVPLASSEAQTVQSLGFAIYRALDWGLDESEERELSPQLERLIDLMANNDSEDSGCGAADEGYGGPEEEEEAEGVPRSVRTFAQAMRLCAARLTDPRGAQAHYQAVCRALFVETLELRAFLARVREAKEMLQKLREDEPHLETPRAELDSLGHTDWARLWVQLMRELRRGVKLKKVQEQEFNPLPTEFQLTPFEMLMQDIRARNYKLRKVMVDGDIPPRVKKDAHELILDFIRSRPPLKQVSERRLRPLPPKQRSLHEKILEEIKQERRLRPVRGEGWAARGFGSLPCILNACSGDAKSTSCINLSVTDAGGSAQRPRPRVLLKAPTLAEMEEMNTSEEEESPCGEVTLKRDRSFSEHDLAQLRSEVASGLQSATHPPGGTEPPRPRAGSAHVWRPGSRDQGTCPASVSDPSHPLLSNRGSSGDRPEASMTPDAKHLWLEFSHPVESLALTVEEVMDVRRVLVKAEMEKFLQNKELFSSLKKGKICCCCRAKFPLFSWPPSCLFCKRAVCTSCSIKPGAVAHACSSCTLGG

SEQ ID NO: 3948 - protein, 413 aa, Artificial Sequence
  Synthetic polypeptide
MSRRALRRLRGEQRGQEPLGPGALHFDLRDDDDAEEEGPKRELGVRRPGGAGKEGVRVNNRFELINIDDLEDDPVVNGERSGCALTDAVAPGNKGRGQRGNTESKTDGDDTETVPSEQSHASGKLRKKKKKQKNKKSSTGEASENGLEDIDRILERIEDSTGLNRPGPAPLSSRKHVLYVEHRHLNPDTELKRYFGARAILGEQRPRQRQRVYPKCTWLTTPKSTWPRYSKPGLSMRLLESKKGLSFFAFEHSEEYQQAQHKFLVAVESMEPNNIVVLLQTSPYHVDSLLQLSDACRFQEDQEMARDLVERALYSMECAFHPLFSLTSGACRLDYRRPENRSFYLALYKQMSFLEKRGCPRTALEYCKLILSLEPDEDPLCMLLLIDHLALRARNYEYLIRLFQEWELPENLN

SEQ ID NO: 3949 - protein, 18 aa, Artificial Sequence
  Synthetic polypeptide
GRSIGKRTRRYRSHPRED

SEQ ID NO: 3950 - protein, 178 aa, Artificial Sequence
  Synthetic polypeptide
MRLLESKKGLSFFAFEHSEEYQQAQHKFLVAVESMEPNNIVVLLQTSPYHVDSLLQLSDACRFQEDQEMARDLVERALYSMECAFHPLFSLTSGACRLDYRRPENRSFYLALYKQMSFLEKRGCPRTALEYCKLILSLEPDEDPLCMLLLIDHLALRARNYEYLIRLFQEWELPENLN

SEQ ID NO: 3951 - protein, 40 aa, Artificial Sequence
  Synthetic polypeptide
QTLESRHRTEKVFWCPGNPGGAKATAETTCVPQVHMADHP

SEQ ID NO: 3952 - protein, 15 aa, Artificial Sequence
  Synthetic polypeptide
SEAARARRWSTASSS

SEQ ID NO: 3953 - protein, 190 aa, Artificial Sequence
  Synthetic polypeptide
MEYDEKLARFRQAHLNPFNKQSGPRQHEQGPGEEVPDVTPEEALPELPPGEPEFRCPERVMDLGLSEDHFSRPVGLFLASDVQQLRQAIEECKQVILELPEQSEKQKDAVVRLIHLRLKLQELKDPNEDEPNIRVLLEHRFYKEKSKSVKQTCDKCNTIIWGLIQTWYTCTGFSSAKMGGSLGPWSLRLQ

SEQ ID NO: 3954 - protein, 184 aa, Artificial Sequence
  Synthetic polypeptide
MRGGGQAHLNPFNKQSGPRQHEQGPGEEVPDVTPEEALPELPPGEPEFRCPERVMDLGLSEDHFSRPVGLFLASDVQQLRQAIEECKQVILELPEQSEKQKDAVVRLIHLRLKLQELKDPNEDEPNIRVLLEHRFYKEKSKSVKQTCDKCNTIIWGLIQTWYTCTGFSSAKMGGSLGPWSLRLQ

SEQ ID NO: 3955 - protein, 251 aa, Artificial Sequence
  Synthetic polypeptide
MAILSLRAPGPWQAMQVWADRTLLTPHTGVTSQVLGVAAAVMTPLPGGHAAGRTREARWDAMEYDEKLARFRQAHLNPFNKQSGPRQHEQGPGEEVPDVTPEEALPELPPGEPEFRCPERVMDLGLSEDHFSRPVGLFLASDVQQLRQAIEECKQVILELPEQSEKQKDAVVRLIHLRLKLQELKDPNEDEPNIRVLLEHRFYKEKSKSVKQTCDKCNTIIWGLIQTWYTCTGFSSAKMGGSLGPWSLRLQ

SEQ ID NO: 3956 - protein, 130 aa, Artificial Sequence
  Synthetic polypeptide
MDLGLSEDHFSRPVGLFLASDVQQLRQAIEECKQVILELPEQSEKQKDAVVRLIHLRLKLQELKDPNEDEPNIRVLLEHRFYKEKSKSVKQTCDKCNTIIWGLIQTWYTCTGFSSAKMGGSLGPWSLRLQ

SEQ ID NO: 3957 - protein, 180 aa, Artificial Sequence
  Synthetic polypeptide
MEYDEKLARFRQAHLNPFNKQSGPRQHEQGPGEEVPDVTPEEALPELPPGEPEFRCPERVMDLGLSEDHFSRPVLRQAIEECKQVILELPEQSEKQKDAVVRLIHLRLKLQELKDPNEDEPNIRVLLEHRFYKEKSKSVKQTCDKCNTIIWGLIQTWYTCTGFSSAKMGGSLGPWSLRLQ

SEQ ID NO: 3958 - protein, 3 aa, Artificial Sequence
  Synthetic polypeptide
MLQ

SEQ ID NO: 3959 - protein, 107 aa, Artificial Sequence
  Synthetic polypeptide
MSPERSQEESPEGDTERTERKPMVKDAFKDISIYFTKEEWAEMGDWEKTRYRNVKMNYNALITVGLRATRPAFMCHRRQAIKLQVDDTEDSDEEWTPRQQGKQQKTD

SEQ ID NO: 3960 - protein, 67 aa, Artificial Sequence
  Synthetic polypeptide
MSPERSQEESPEGDTERTERKPMVSEPLDQLSCVTEGRPSNSRWMTQKIPMKNGHLGSKESSRKQTK

SEQ ID NO: 3961 - protein, 227 aa, Artificial Sequence
  Synthetic polypeptide
MEERKEEGEAEIQEHGPEHWFSKWERQCLAEAEQDEQLPPELQEEAAAAAQPEHKQQKLWHLFQNSATAVAQLYKDRVCQQPGLSLWVPFQNAATAVTNLYKESVDTHQRSFDIGIQIGYQRRNKDVLAWVKKRRRTIRREDLISFLCGKVPPPRNSRAPPRLTVVSPNRATSTETSSSVETDLQPFREAIALHGAMAGDGAAIWNKTSFSEWRMKNMQQDRRKSFS

SEQ ID NO: 3962 - protein, 118 aa, Artificial Sequence
  Synthetic polypeptide
MEPLSHRGLPRLSWIDTLYSNFSYGTDEYDGEGNEEQKGPPEGSETMPYIDESPTMSPQLSARSQGGGDGVSPTPPEGLAPGVEAGKGLEMRKLVLSGFLASEEIYINQLEALLLIGR

SEQ ID NO: 3963 - protein, 72 aa, Artificial Sequence
  Synthetic polypeptide
MPYIDESPTMSPQLSARSQGGGDGVSPTPPEGLAPGVEAGKGLEMRKLVLSGFLASEEIYINQLEALLLIGR

SEQ ID NO: 3964 - protein, 81 aa, Artificial Sequence
  Synthetic polypeptide
MEEEEEAIGLLDKVLEDEDVFLLEECELGTPTSPGSGSPFLVAVKVEAGKGLEMRKLVLSGFLASEEIYINQLEALLLIGR

SEQ ID NO: 3965 - protein, 28 aa, Artificial Sequence
  Synthetic polypeptide
MRKLVLSGFLASEEIYINQLEALLLIGR

SEQ ID NO: 3966 - protein, 74 aa, Artificial Sequence
  Synthetic polypeptide
MEEEEEAIGLLDKVLEDEDVFLLEECELGTPTSPGSGSPFLVAVKGAVAHTCNPSTLGGQGGRITRSGDRDHPG

SEQ ID NO: 3967 - protein, 3353 aa, Artificial Sequence
  Synthetic polypeptide
MRLAEERAALAAENADGEPGADRRLRLLGTYVAMSLRPAAGAWERCAGSAEAEQLLQAFLGRDAAEGPRPLLVVRPGPRGLAIRPGLEVGPESGLAGAKALFFLRTGPEPPGPDSFRGAVVCGDLPAAPLEHLAALFSEVVLPVLANEKNRLNWPHMICEDVRRHAHSLQCDLSVILEQVKGKTLLPLPAGSEKMEFADSKSETVLDSIDKSVIYAIESAVIKWSYQVQVVLKRESSQPLLQGENPTPKVELEFWKSRYEDLKYIYNQLRTITVRGMAKLLDKLQSSYFPAFKAMYRDVVAALAEAQDIHVHLIPLQRHLEALENAEFPEVKPQLRPLLHVVCLIWATCKSYRSPGRLTVLLQEICNLLIQQASNYLSPEDLLRSEVEESQRKLQVVSDTLSFFKQEFQDRRENLHTYFKENQEVKEWDFQSSLVFVRLDGFLGQLHVVEGLLKTALDFHKLGKVEFSGVRGNALSQQVQQMHEEFQEMYRLLSGSSSDCLYLQSTDFENDVSEFNQKVEDLDRRLGTIFIQAFDDAPGLEHAFKLLDIAGNLLERPLVARDTSDKYLVLIQMFNKDLDAVRMIYSQHVQEEAELGFSPVHKNMPTVAGGLRWAQELRQRIQGPFSNFGRITHPCMESAEGKRMQQKYEDMLSLLEKYETRLYEDWCRTVSEKSQYNLSQPLLKRDPETKEITINFNPQLISVLKEMSYLEPREMKHMPETAAAMFSSRDFYRQLVANLELMANWYNKVMKTLLEVEFPLVEEELQNIDLRLRAAEETLNWKTEGICDYVTEITSSIHDLEQRIQKTKDNVEEIQNIMKTWVTPIFKTKDGKRESLLSLDDRHDRMEKYYNLIKESGLKIHALVQENLGLFSADPTSNIWKTYVNSIDNLLLNGFFLAIECSLKYLLENTECKAGLTPIFEAQLSLAIPELVFYPSLESGVKGGFCDIVEGLITSIFRIPSLVPRLSPQNGSPHYQVDLDGIPDLANMRRTLMERVQRMMGLCCGYQSTFSQYSYLYVEDRKEVLGQFLLYGHILTPEEIEDHVEDGIPENPPLLSQFKVQIDSYETLYEEVCRLEPIKVFDGWMKIDIRPFKASLLNIIKRWSLLFKQHLVDHVTHSLANLDAFIKKSESGLLKKVEKGDFQGLVEIMGHLMAVKERQSNTDEMFEPLKQTIELLKTYEQELPETVFKQLEELPEKWNNIKKVAITVKQQVAPLQANEVTLLRQRCTAFDAEQQQFWEQFHKEAPFRFDSIHPHQMLDARHIEIQQMESTMASISESASLFEVNVPDYKQLRQCRKEVCQLKELWDTIGMVTSSIHAWETTPWRNINVEAMELECKQFARHIRNLDKEVRAWDAFTGLESTVWNTLSSLRAVAELQNPAIRERHWRQLMQATGVSFTMDQDTTLAHLLQLQLHHYEDEVRGIVDKAAKEMGMEKTLKELQTTWAGMEFQYEPHPRTNVPLLCSDEDLIEVLEDNQVQLQNLVMSKYVAFFLEEVSGWQKKLSTVDAVISIWFEVQRTWTHLESIFTGSEDIRAQLPQDSKRFEGIDIDFKELAYDAQKIPNVVQTTNKPGLYEKLEDIQGRLCLCEKALAEYLDTKRLAFPRFYFLSSSDLLDILSNGTAPQQVQRHLSKLFDNMAKMRFQLDASGEPTKTSLGMYSKEEEYVAFSEPCDCSGQVEIWLNHVLGHMKATVRHEMTEGVTAYEEKPREQWLFDHPAQVALTCTQIWWTTEVGMAFARLEEGYESAMKDYYKKQVAQLKTLITMLIGQLSKGDRQKIMTICTIDVHARDVVAKMIAQKVDNAQAFLWLSQLRHRWDDEVKHCFANICDAQFLYSYEYLGNTPRLVITPLTDRCYITLTQSLHLTMSGAPAGPAGTGKTETTKDLGRALGILVYVFNCSEQMDYKSCGNIYKGLAQTGAWGCFDEFNRISVEVLSVVAVQVKSIQDAIRDKKQWFSFLGEEISLNPSVGIFITMNPGYAGRTELPENLKSLFRPCAMVVPDFELICEIMLVAEGFIEAQSLARKFITLYQLCKELLSKQDHYDWGLRAIKSVLVVAGSLKRGDPDRPEDQVLMRSLRDFNIPKIVTDDMPIFMGLIGDLFPALDVPRRRDPNFEALVRKAIVDLKLQAEDNFVLKVVQLEELLAVRHSVFVVGGAGTGKSQVLRSLHKTYQIMKRRPVWTDLNPKAVTNDELFGIINPATGEWKDGLFSSIMRELANITHDGPKWILLDGDIDPMWIESLNTVMDDNKVLTLASNERIPLNPTMKLLFEISHLRTATPATVSRAGILYINPADLGWNPPVSSWIEKREIQTERANLTILFDKYLPTCLDTLRTRFKKIIPIPEQSMVQMVCHLLECLLTTEDIPADCPKEIYEHYFVFAAIWAFGGAMVQDQLVDYRAEFSKWWLTEFKTVKFPSQGTIFDYYIDPETKKFEPWSKLVPQFEFDPEMPLQACLVHTSETIRVCYFMERLMARQRPVMLVGTAGTGKSVLVGAKLASLDPEAYLVKNVPFNYYTTSAMLQAVLEKPLEKKAGRNYGPPGNKKLIYFIDDMNMPEVDAYGTVQPHTIIRQHLDYGHWYDRSKLSLKEITNVQYVSCMNPTAGSFTINPRLQRHFSVFVLSFPGADALSSIYSIILTQHLKLGNFPASLQKSIPPLIDLALAFHQKIATTFLPTGIKFHYIFNLRDFANIFQGILFSSVECVKSTWDLIRLYLHESNRVYRDKMVEEKDFDLFDKIQTEVLKKTFDDIEDPVEQTQSPNLYCHFANGIGEPKYMPVQSWELLTQTLVEALENHNEVNTVMDLVLFEDAMRHVCHINRILESPRGNALLVGVGGSGKQSLTRLAAFISSMDVFQITLRKGYQIQDFKMDLASLCLKAGVKNLNTVFLMTDAQVADERFLVLINDLLASGEIPDLYSDDEVENIISNVRNEVKSQGLVDNRENCWKFFIDRIRRQLKVTLCFSPVGNKLRVRSRKFPAIVNCTAIHWFHEWPQQALESVSLRFLQNTEGIEPTVKQSISKFMAFVHTSVNQTSQSYLSNEQRYNYTTPKSFLEFIRLYQSLLHRHRKELKCKTERLENGLLKLHSTSAQVDDLKAKLAAQEVELKQKNEDADKLIQVVGVETDKVSREKAMADEEEQKVAVIMLEVKQKQKDCEEDLAKAEPALTAAQAALNTLNKTNLTELKSFGSPPLAVSNVSAAVMVLMAPRGRVPKDRSWKAAKVTMAKVDGFLDSLINFNKENIHENCLKAIRPYLQDPEFNPEFVATKSYAAAGLCSWVINIVRFYEVFCDVEPKRQALNKATADLTAAQEKLAAIKAKIAHLNENLAKLTARFEKATADKLKCQQEAEVTAVTISLANRLHL

SEQ ID NO: 3968 - protein, 167 aa, Artificial Sequence
  Synthetic polypeptide
NVSAAVMVLMAPRGRVPKDRSWKAAKVTMAKVDGFLDSLINFNKENIHENCLKAIRPYLQDPEFNPEFVATKSYAAAGLCSWVINIVRFYEVFCDVEPKRQALNKATADLTAAQEKLAAIKAKIAHLNENLAKLTARFEKATADKLKCQQEAEVTAVTISLANRLHL

SEQ ID NO: 3969 - protein, 27 aa, Artificial Sequence
  Synthetic polypeptide
MDDREDLVYQAKLAEQAERYDGSSSMC

SEQ ID NO: 3970 - protein, 1063 aa, Artificial Sequence
  Synthetic polypeptide
MALQVELVPTGEIIRVVHPHRPCKLALGSDGVRVTMESALTARDRVGVQDFVLLENFTSEAAFIENLRRRFRENLIYTYIGPVLVSVNPYRDLQIYSRQHMERYRGVSFYEVPPHLFAVADTVYRALRTERRDQAVMISGESGAGKTEATKRLLQFYAETCPAPERGGAVRDRLLQSNPVLEAFGNAKTLRNDNSSRFGKYMDVQFDFKGAPVGGHILSYLLEKSRVVHQNHGERNFHIFYQLLEGGEEETLRRLGLERNPQSYLYLVKGQCAKVSSINDKSDWKVVRKALTVIDFTEDEVEDLLSIVASVLHLGNIHFAANEESNAQVTTENQLKYLTRLLSVEGSTLREALTHRKIIAKGEELLSPLNLEQAAYARDALAKAVYSRTFTWLVGKINRSLASKDVESPSWRSTTVLGLLDIYGFEVFQHNSFEQFCINYCNEKLQQLFIELTLKSEQEEYEAEGIAWEPVQYFNNKIICDLVEEKFKGIISILDEECLRPGEATDLTFLEKLEDTVKHHPHFLTHKLADQRTRKSLGRGEFRLLHYAGEVTYSVTGFLDKNNDLLFRNLKETMCSSKNPIMSQCFDRSELSDKKRPETVATQFKMSLLQLVEILQSKEPAYVRCIKPNDAKQPGRFDEVLIRHQVKYLGLLENLRVRRAGFAYRRKYEAFLQRYKSLCPETWPTWAGRPQDGVAVLVRHLGYKPEEYKMGRTKIFIRFPKTLFATEDALEVRRQSLATKIQAAWRGFHWRQKFLRVKRSAICIQSWWRGTLGRRKAAKRKWAAQTIRRLIRGFVLRHAPRCPENAFFLDHVRTSFLLNLRRQLPQNVLDTSWPTPPPALREASELLRELCIKNMVWKYCRSISPEWKQQLQQKAVASEIFKGKKDNYPQSVPRLFISTRLGTDEISPRVLQALGSEPIQYAVPVVKYDRKGYKPRSRQLLLTPNAVVIVEDAKVKQRIDYANLTGISVSSLSDSLFVLHVQRADNKQKGDVVLQSDHVIETLTKTALSANRVNSININQGSITFAGGPGRDGTIDFTPGSELLITKAKNGHLAVGSRGGRTA

SEQ ID NO: 3971 - protein, 1044 aa, Artificial Sequence
  Synthetic polypeptide
MRYRASALGSDGVRVTMESALTARDRVGVQDFVLLENFTSEAAFIENLRRRFRENLIYTYIGPVLVSVNPYRDLQIYSRQHMERYRGVSFYEVPPHLFAVADTVYRALRTERRDQAVMISGESGAGKTEATKRLLQFYAETCPAPERGGAVRDRLLQSNPVLEAFGNAKTLRNDNSSRFGKYMDVQFDFKGAPVGGHILSYLLEKSRVVHQNHGERNFHIFYQLLEGGEEETLRRLGLERNPQSYLYLVKGQCAKVSSINDKSDWKVVRKALTVIDFTEDEVEDLLSIVASVLHLGNIHFAANEESNAQVTTENQLKYLTRLLSVEGSTLREALTHRKIIAKGEELLSPLNLEQAAYARDALAKAVYSRTFTWLVGKINRSLASKDVESPSWRSTTVLGLLDIYGFEVFQHNSFEQFCINYCNEKLQQLFIELTLKSEQEEYEAEGIAWEPVQYFNNKIICDLVEEKFKGIISILDEECLRPGEATDLTFLEKLEDTVKHHPHFLTHKLADQRTRKSLGRGEFRLLHYAGEVTYSVTGFLDKNNDLLFRNLKETMCSSKNPIMSQCFDRSELSDKKRPETVATQFKMSLLQLVEILQSKEPAYVRCIKPNDAKQPGRFDEVLIRHQVKYLGLLENLRVRRAGFAYRRKYEAFLQRYKSLCPETWPTWAGRPQDGVAVLVRHLGYKPEEYKMGRTKIFIRFPKTLFATEDALEVRRQSLATKIQAAWRGFHWRQKFLRVKRSAICIQSWWRGTLGRRKAAKRKWAAQTIRRLIRGFVLRHAPRCPENAFFLDHVRTSFLLNLRRQLPQNVLDTSWPTPPPALREASELLRELCIKNMVWKYCRSISPEWKQQLQQKAVASEIFKGKKDNYPQSVPRLFISTRLGTDEISPRVLQALGSEPIQYAVPVVKYDRKGYKPRSRQLLLTPNAVVIVEDAKVKQRIDYANLTGISVSSLSDSLFVLHVQRADNKQKGDVVLQSDHVIETLTKTALSANRVNSININQGSITFAGGPGRDGTIDFTPGSELLITKAKNGHLAVGSRGGRTA

SEQ ID NO: 3972 - protein, 1028 aa, Artificial Sequence
  Synthetic polypeptide
MESALTARDRVGVQDFVLLENFTSEAAFIENLRRRFRENLIYTYIGPVLVSVNPYRDLQIYSRQHMERYRGVSFYEVPPHLFAVADTVYRALRTERRDQAVMISGESGAGKTEATKRLLQFYAETCPAPERGGAVRDRLLQSNPVLEAFGNAKTLRNDNSSRFGKYMDVQFDFKGAPVGGHILSYLLEKSRVVHQNHGERNFHIFYQLLEGGEEETLRRLGLERNPQSYLYLVKGQCAKVSSINDKSDWKVVRKALTVIDFTEDEVEDLLSIVASVLHLGNIHFAANEESNAQVTTENQLKYLTRLLSVEGSTLREALTHRKIIAKGEELLSPLNLEQAAYARDALAKAVYSRTFTWLVGKINRSLASKDVESPSWRSTTVLGLLDIYGFEVFQHNSFEQFCINYCNEKLQQLFIELTLKSEQEEYEAEGIAWEPVQYFNNKIICDLVEEKFKGIISILDEECLRPGEATDLTFLEKLEDTVKHHPHFLTHKLADQRTRKSLGRGEFRLLHYAGEVTYSVTGFLDKNNDLLFRNLKETMCSSKNPIMSQCFDRSELSDKKRPETVATQFKMSLLQLVEILQSKEPAYVRCIKPNDAKQPGRFDEVLIRHQVKYLGLLENLRVRRAGFAYRRKYEAFLQRYKSLCPETWPTWAGRPQDGVAVLVRHLGYKPEEYKMGRTKIFIRFPKTLFATEDALEVRRQSLATKIQAAWRGFHWRQKFLRVKRSAICIQSWWRGTLGRRKAAKRKWAAQTIRRLIRGFVLRHAPRCPENAFFLDHVRTSFLLNLRRQLPQNVLDTSWPTPPPALREASELLRELCIKNMVWKYCRSISPEWKQQLQQKAVASEIFKGKKDNYPQSVPRLFISTRLGTDEISPRVLQALGSEPIQYAVPVVKYDRKGYKPRSRQLLLTPNAVVIVEDAKVKQRIDYANLTGISVSSLSDSLFVLHVQRADNKQKGDVVLQSDHVIETLTKTALSANRVNSININQGSITFAGGPGRDGTIDFTPGSELLITKAKNGHLAVGSRGGRTA

SEQ ID NO: 3973 - protein, 1039 aa, Artificial Sequence
  Synthetic polypeptide
MALGSDGVRVTMESALTARDRVGVQDFVLLENFTSEAAFIENLRRRFRENLIYTYIGPVLVSVNPYRDLQIYSRQHMERYRGVSFYEVPPHLFAVADTVYRALRTERRDQAVMISGESGAGKTEATKRLLQFYAETCPAPERGGAVRDRLLQSNPVLEAFGNAKTLRNDNSSRFGKYMDVQFDFKGAPVGGHILSYLLEKSRVVHQNHGERNFHIFYQLLEGGEEETLRRLGLERNPQSYLYLVKGQCAKVSSINDKSDWKVVRKALTVIDFTEDEVEDLLSIVASVLHLGNIHFAANEESNAQVTTENQLKYLTRLLSVEGSTLREALTHRKIIAKGEELLSPLNLEQAAYARDALAKAVYSRTFTWLVGKINRSLASKDVESPSWRSTTVLGLLDIYGFEVFQHNSFEQFCINYCNEKLQQLFIELTLKSEQEEYEAEGIAWEPVQYFNNKIICDLVEEKFKGIISILDEECLRPGEATDLTFLEKLEDTVKHHPHFLTHKLADQRTRKSLGRGEFRLLHYAGEVTYSVTGFLDKNNDLLFRNLKETMCSSKNPIMSQCFDRSELSDKKRPETVATQFKMSLLQLVEILQSKEPAYVRCIKPNDAKQPGRFDEVLIRHQVKYLGLLENLRVRRAGFAYRRKYEAFLQRYKSLCPETWPTWAGRPQDGVAVLVRHLGYKPEEYKMGRTKIFIRFPKTLFATEDALEVRRQSLATKIQAAWRGFHWRQKFLRVKRSAICIQSWWRGTLGRRKAAKRKWAAQTIRRLIRGFVLRHAPRCPENAFFLDHVRTSFLLNLRRQLPQNVLDTSWPTPPPALREASELLRELCIKNMVWKYCRSISPEWKQQLQQKAVASEIFKGKKDNYPQSVPRLFISTRLGTDEISPRVLQALGSEPIQYAVPVVKYDRKGYKPRSRQLLLTPNAVVIVEDAKVKQRIDYANLTGISVSSLSDSLFVLHVQRADNKQKGDVVLQSDHVIETLTKTALSANRVNSININQGSITFAGGPGRDGTIDFTPGSELLITKAKNGHLAVGSRGGRTA

SEQ ID NO: 3974 - protein, 637 aa, Artificial Sequence
  Synthetic polypeptide
MALQVELVPTGEIIRVVHPHRPCKLALGSDGVRVTMESALTARDRVGVQDFVLLENFTSEAAFIENLRRRFRENLIYTYIGPVLVSVNPYRDLQIYSRQHMERYRGVSFYEVPPHLFAVADTVYRALRTERRDQAVMISGESGAGKTEATKRLLQFYAETCPAPERGGAVRDRLLQSNPVLEAFGNAKTLRNDNSSRFGKYMDVQFDFKGAPVGGHILSYLLEKSRVVHQNHGERNFHIFYQLLEGGEEETLRRLGLERNPQSYLYLVKGQCAKVSSINDKSDWKVVRKALTVIDFTEDEVEDLLSIVASVLHLGNIHFAANEESNAQVTTENQLKYLTRLLSVEGSTLREALTHRKIIAKGEELLSPLNLEQAAYARDALAKAVYSRTFTWLVGKINRSLASKDVESPSWRSTTVLGLLDIYGFEVFQHNSFEQFCINYCNEKLQQLFIELTLKSEQEEYEAEGIAWEPVQYFNNKIICDLVEEKFKGIISILDEECLRPGEATDLTFLEKLEDTVKHHPHFLTHKLADQRTRKSLGRGEFRLLHYAGEVTYSVTGFLDKNNDLLFRNLKETMCSSKNPIMSQCFDRSELSDKKRPETLSRASFPEDVTWCPLTLRLDELSLCGALRTHRHTPATL

SEQ ID NO: 3975 - protein, 618 aa, Artificial Sequence
  Synthetic polypeptide
MRYRASALGSDGVRVTMESALTARDRVGVQDFVLLENFTSEAAFIENLRRRFRENLIYTYIGPVLVSVNPYRDLQIYSRQHMERYRGVSFYEVPPHLFAVADTVYRALRTERRDQAVMISGESGAGKTEATKRLLQFYAETCPAPERGGAVRDRLLQSNPVLEAFGNAKTLRNDNSSRFGKYMDVQFDFKGAPVGGHILSYLLEKSRVVHQNHGERNFHIFYQLLEGGEEETLRRLGLERNPQSYLYLVKGQCAKVSSINDKSDWKVVRKALTVIDFTEDEVEDLLSIVASVLHLGNIHFAANEESNAQVTTENQLKYLTRLLSVEGSTLREALTHRKIIAKGEELLSPLNLEQAAYARDALAKAVYSRTFTWLVGKINRSLASKDVESPSWRSTTVLGLLDIYGFEVFQHNSFEQFCINYCNEKLQQLFIELTLKSEQEEYEAEGIAWEPVQYFNNKIICDLVEEKFKGIISILDEECLRPGEATDLTFLEKLEDTVKHHPHFLTHKLADQRTRKSLGRGEFRLLHYAGEVTYSVTGFLDKNNDLLFRNLKETMCSSKNPIMSQCFDRSELSDKKRPETLSRASFPEDVTWCPLTLRLDELSLCGALRTHRHTPATL

SEQ ID NO: 3976 - protein, 602 aa, Artificial Sequence
  Synthetic polypeptide
MESALTARDRVGVQDFVLLENFTSEAAFIENLRRRFRENLIYTYIGPVLVSVNPYRDLQIYSRQHMERYRGVSFYEVPPHLFAVADTVYRALRTERRDQAVMISGESGAGKTEATKRLLQFYAETCPAPERGGAVRDRLLQSNPVLEAFGNAKTLRNDNSSRFGKYMDVQFDFKGAPVGGHILSYLLEKSRVVHQNHGERNFHIFYQLLEGGEEETLRRLGLERNPQSYLYLVKGQCAKVSSINDKSDWKVVRKALTVIDFTEDEVEDLLSIVASVLHLGNIHFAANEESNAQVTTENQLKYLTRLLSVEGSTLREALTHRKIIAKGEELLSPLNLEQAAYARDALAKAVYSRTFTWLVGKINRSLASKDVESPSWRSTTVLGLLDIYGFEVFQHNSFEQFCINYCNEKLQQLFIELTLKSEQEEYEAEGIAWEPVQYFNNKIICDLVEEKFKGIISILDEECLRPGEATDLTFLEKLEDTVKHHPHFLTHKLADQRTRKSLGRGEFRLLHYAGEVTYSVTGFLDKNNDLLFRNLKETMCSSKNPIMSQCFDRSELSDKKRPETLSRASFPEDVTWCPLTLRLDELSLCGALRTHRHTPATL

SEQ ID NO: 3977 - protein, 613 aa, Artificial Sequence
  Synthetic polypeptide
MALGSDGVRVTMESALTARDRVGVQDFVLLENFTSEAAFIENLRRRFRENLIYTYIGPVLVSVNPYRDLQIYSRQHMERYRGVSFYEVPPHLFAVADTVYRALRTERRDQAVMISGESGAGKTEATKRLLQFYAETCPAPERGGAVRDRLLQSNPVLEAFGNAKTLRNDNSSRFGKYMDVQFDFKGAPVGGHILSYLLEKSRVVHQNHGERNFHIFYQLLEGGEEETLRRLGLERNPQSYLYLVKGQCAKVSSINDKSDWKVVRKALTVIDFTEDEVEDLLSIVASVLHLGNIHFAANEESNAQVTTENQLKYLTRLLSVEGSTLREALTHRKIIAKGEELLSPLNLEQAAYARDALAKAVYSRTFTWLVGKINRSLASKDVESPSWRSTTVLGLLDIYGFEVFQHNSFEQFCINYCNEKLQQLFIELTLKSEQEEYEAEGIAWEPVQYFNNKIICDLVEEKFKGIISILDEECLRPGEATDLTFLEKLEDTVKHHPHFLTHKLADQRTRKSLGRGEFRLLHYAGEVTYSVTGFLDKNNDLLFRNLKETMCSSKNPIMSQCFDRSELSDKKRPETLSRASFPEDVTWCPLTLRLDELSLCGALRTHRHTPATL

SEQ ID NO: 3978 - protein, 170 aa, Artificial Sequence
  Synthetic polypeptide
MAASPHTLSSRLLTGCVGGSVWYLERRTIQDSPHKFLHLLRNVNKQWITFQHFSFLKRMYVTQLNRSHNQQVRPKPEPVASPFLEKTSSGQAKAEIYEMRPLSPPSLSLSRKPNEKELIELEPDSVIEDSIDVGKETKEEKRWKEMKLQVYDLPGILARLSKIKLTENPT

SEQ ID NO: 3979 - protein, 33 aa, Artificial Sequence
  Synthetic polypeptide
MICQEFWLDYPKSNSQKIQLKCHLLEAFPDLPT

SEQ ID NO: 3980 - protein, 127 aa, Artificial Sequence
  Synthetic polypeptide
MVGLRWWNHIDEDGKSHWVFESRKESSQENKTVSEAESRIFWLGLIACSVLWVIFAFSALFSFTVKWLAVVIMGVVLQGANLYGYIRCKVRSRKHLTSMATSYFGKQFLRQVTVFGDRTFKDMIKIK

SEQ ID NO: 3981 - protein, 149 aa, Artificial Sequence
  Synthetic polypeptide
MVTIILLLSCDFWAVKNVTGRLMVGLRWWNHIDEDGKSHWVFESRKESSQENKTVSEAESRIFWLGLIACSVLWVIFAFSALFSFTVKWLAVVIMGVVLQGANLYGYIRCKVRSRKHLTSMATSYFGKQFLRQVTVFGDRTFKDMIKIK

SEQ ID NO: 3982 - protein, 213 aa, Artificial Sequence
  Synthetic polypeptide
MLQQDSNDDTEDVSLFDAEEETTNRPRKAKIRHPVASFFHLFFRVSAIIVCLLCELLSSSFITCMVTIILLLSCDFWAVKNVTGRLMVGLRWWNHIDEDGKSHWVFESRKESSQENKTVSEAESRIFWLGLIACSVLWVIFAFSALFSFTVKWLAVVIMGVVLQGANLYGYIRCKVRSRKHLTSMATSYFGKQFLRQVTVFGDRTFKDMIKIK

SEQ ID NO: 3983 - protein, 117 aa, Artificial Sequence
  Synthetic polypeptide
MVGLRWWNHIDEDGKSHWVFESRKESSQENKTVSEAESRIFWLGLIACSVLWVIFAFSALFSFTVKWLAVVIMGVVLQGANLYGYIRCKVRSRKHLTSMATSYFGKQFLRQISHLIS

SEQ ID NO: 3984 - protein, 139 aa, Artificial Sequence
  Synthetic polypeptide
MVTIILLLSCDFWAVKNVTGRLMVGLRWWNHIDEDGKSHWVFESRKESSQENKTVSEAESRIFWLGLIACSVLWVIFAFSALFSFTVKWLAVVIMGVVLQGANLYGYIRCKVRSRKHLTSMATSYFGKQFLRQISHLIS

SEQ ID NO: 3985 - protein, 203 aa, Artificial Sequence
  Synthetic polypeptide
MLQQDSNDDTEDVSLFDAEEETTNRPRKAKIRHPVASFFHLFFRVSAIIVCLLCELLSSSFITCMVTIILLLSCDFWAVKNVTGRLMVGLRWWNHIDEDGKSHWVFESRKESSQENKTVSEAESRIFWLGLIACSVLWVIFAFSALFSFTVKWLAVVIMGVVLQGANLYGYIRCKVRSRKHLTSMATSYFGKQFLRQISHLIS

SEQ ID NO: 3986 - protein, 176 aa, Artificial Sequence
  Synthetic polypeptide
MLQQDSNDDTEDVSLFDAEEETTNRPRKAKIRHPVASFFHLFFRVSAIIVCLLCELLSSSFITCMVTIILLLSCDFWAVKNVTGRLMVGLRWWNHIDEDGKSHWVFESRKESSQENKTVSEAESRIFWLGLIACSVLWVIFAFSALFSFTVKWLVFCWNSWEEKPSSKRGLETGKL

SEQ ID NO: 3987 - protein, 90 aa, Artificial Sequence
  Synthetic polypeptide
MVGLRWWNHIDEDGKSHWVFESRKESSQENKTVSEAESRIFWLGLIACSVLWVIFAFSALFSFTVKWLVFCWNSWEEKPSSKRGLETGKL

SEQ ID NO: 3988 - protein, 66 aa, Artificial Sequence
  Synthetic polypeptide
ESSQENKTVSEAESRIFWLGLIACSVLWVIFAFSALFSFTVKWLVFCWNSWEEKPSSKRGLETGKL

SEQ ID NO: 3989 - protein, 112 aa, Artificial Sequence
  Synthetic polypeptide
MVTIILLLSCDFWAVKNVTGRLMVGLRWWNHIDEDGKSHWVFESRKESSQENKTVSEAESRIFWLGLIACSVLWVIFAFSALFSFTVKWLVFCWNSWEEKPSSKRGLETGKL

SEQ ID NO: 3990 - protein, 189 aa, Artificial Sequence
  Synthetic polypeptide
MLQQDSNDDTEDVSLFDAEEETTNRPRKAKIRHPVASFFHLFFRVSAIIVCLLCELLSSSFITCMVTIILLLSCDFWAVKNVTGRLMVGLRWWNHIDEDGKSHWVFESRKESSQENKTVSEAESRIFWLGLIACSVLWVIFAFSALFSFTVKWLRILGHRHTEEGPCEDEGGRCRPQAKERGLRGNQPC

SEQ ID NO: 3991 - protein, 103 aa, Artificial Sequence
  Synthetic polypeptide
MVGLRWWNHIDEDGKSHWVFESRKESSQENKTVSEAESRIFWLGLIACSVLWVIFAFSALFSFTVKWLRILGHRHTEEGPCEDEGGRCRPQAKERGLRGNQPC

SEQ ID NO: 3992 - protein, 79 aa, Artificial Sequence
  Synthetic polypeptide
ESSQENKTVSEAESRIFWLGLIACSVLWVIFAFSALFSFTVKWLRILGHRHTEEGPCEDEGGRCRPQAKERGLRGNQPC

SEQ ID NO: 3993 - protein, 125 aa, Artificial Sequence
  Synthetic polypeptide
MVTIILLLSCDFWAVKNVTGRLMVGLRWWNHIDEDGKSHWVFESRKESSQENKTVSEAESRIFWLGLIACSVLWVIFAFSALFSFTVKWLRILGHRHTEEGPCEDEGGRCRPQAKERGLRGNQPC

SEQ ID NO: 3994 - protein, 190 aa, Artificial Sequence
  Synthetic polypeptide
MLQQDSNDDTEDVSLFDAEEETTNRPRKAKIRHPVASFFHLFFRVSAIIVCLLCELLSSSFITCMVTIILLLSCDFWAVKNVTGRLMVGLRWWNHIDEDGKSHWVFESRKESSQENKTVSEAESRIFWLGLIACSVLWVIFAFSALFSFTVKWLKRILGHRHTEEGPCEDEGGRCRPQAKERGLRGNQPC

SEQ ID NO: 3995 - protein, 104 aa, Artificial Sequence
  Synthetic polypeptide
MVGLRWWNHIDEDGKSHWVFESRKESSQENKTVSEAESRIFWLGLIACSVLWVIFAFSALFSFTVKWLKRILGHRHTEEGPCEDEGGRCRPQAKERGLRGNQPC

SEQ ID NO: 3996 - protein, 80 aa, Artificial Sequence
  Synthetic polypeptide
ESSQENKTVSEAESRIFWLGLIACSVLWVIFAFSALFSFTVKWLKRILGHRHTEEGPCEDEGGRCRPQAKERGLRGNQPC

SEQ ID NO: 3997 - protein, 126 aa, Artificial Sequence
  Synthetic polypeptide
MVTIILLLSCDFWAVKNVTGRLMVGLRWWNHIDEDGKSHWVFESRKESSQENKTVSEAESRIFWLGLIACSVLWVIFAFSALFSFTVKWLKRILGHRHTEEGPCEDEGGRCRPQAKERGLRGNQPC

SEQ ID NO: 3998 - protein, 130 aa, Artificial Sequence
  Synthetic polypeptide
MLQQDSNDDTEDVSLFDAEEETTNRPRKAKIRHPVASFFHLFFRVSAIIVCLLCELLSSSFITCMVTIILLLSCDFWAVKECCLCFWFELLICKLCCLPDLYLHSGLSSQLKASPCVFLTFLCGCLEGIS

SEQ ID NO: 3999 - protein, 66 aa, Artificial Sequence
  Synthetic polypeptide
MVTIILLLSCDFWAVKECCLCFWFELLICKLCCLPDLYLHSGLSSQLKASPCVFLTFLCGCLEGIS

SEQ ID NO: 4000 - protein, 275 aa, Artificial Sequence
  Synthetic polypeptide
MGLGLLLPLLLLWTRGTQGSELDPKGQHVCVASSPSAELQCCAGWRQKDQECTIPICEGPDACQKDEVCVKPGLCRCKPGFFGAHCSSRCPGQYWGPDCRESCPCHPHGQCEPATGACQCQADRWGARCEFPCACGPHGRCDPATGVCHCEPGWWSSTCRRPCQCNTAAARCEQATGACVCKPGWWGRRCSFRCNCHGSPCEQDSGRCACRPGWWGPECQQQCECVRGRCSAASGECTCPPGFRGARCELPCPAGSHGVQCAHRDMEEIGNHHSQ

SEQ ID NO: 4001 - protein, 206 aa, Artificial Sequence
  Synthetic polypeptide
MAELDLMAPGPLPRATAQPPAPLSPDSGSPSPDSGSASPVEEEDVGSSEKLGRETEEQDSDSAEQGDPAGEGKEVLCDFCLDDTRRVKAVKSCLTCMVNYCEEHLQPHQVNIKLQSHLLTEPVKDHNWRYCPAHHSPLSAFCCPDQQCICQDCCQEHSGHTIVSLDAARRDKELLRRLRQENRMNPGGGGCSEPRLHHCTPAWTTV

SEQ ID NO: 4002 - protein, 64 aa, Artificial Sequence
  Synthetic polypeptide
LSQKGYLKKENMAALCRTAESQEKDRAGDQFADSDPKPESSLGLHLQKRRLGHRYVQREDHVKT

SEQ ID NO: 4003 - protein, 169 aa, Artificial Sequence
  Synthetic polypeptide
MLLETQDALYVALELVIAALSVAGNVLVCAAVGTANTLQTPTNYFLVSLAAADVAVGLFAIPFAITISLGFCTDFYGCLFLACFVLVLTQSSIFSLLAVAVDRYLAICVPLRKCKCVGGNPKESSSSLHLPAPVDLQDLLVLPPQRISTSIIFAVTLAQADVVSSQLPK

SEQ ID NO: 4004 - protein, 1175 aa, Artificial Sequence
  Synthetic polypeptide
MSSSGYPPNQGAFSTEQSRYPPHSVQYTFPNTRHQQEFAVPDYRSSHLEVSQASQLLQQQQQQQLRRRPSLLSEFHPGSDRPQERRTSYEPFHPGPSPVDHDSLESKRPRLEQVSDSHFQRVSAAVLPLVHPLPEGLRASADAKKDPAFGGKHEAPSSPISGQPCGDDQNASPSKLSKEELIQSMDRVDREIAKVEQQILKLKKKQQQLEEEAAKPPEPEKPVSPPPVEQKHRSIVQIIYDENRKKAEEAHKIFEGLGPKVELPLYNQPSDTKVYHENIKTNQVMRKKLILFFKRRNHARKQREQKICQRYDQLMEAWEKKVDRIENNPRRKAKESKTREYYEKQFPEIRKQREQQERFQRVGQRGAGLSATIARSEHEISEIIDGLSEQENNEKQMRQLSVIPPMMFDAEQRRVKFINMNGLMEDPMKVYKDRQFMNVWTDHEKEIFKDKFIQHPKNFGLIASYLERKSVPDCVLYYYLTKKNENYKALVRRNYGKRRGRNQQIARPSQEEKVEEKEEDKAEKTEKKEEEKKDEEEKDEKEDSKENTKEKDKIDGTAEETEEREQATPRGRKTANSQGRRKGRITRSMTNEAAAASAAAAAATEEPPPPLPPPPEPISTEPVETSRWTEEEMEVAKKGLVEHGRNWAAIAKMVGTKSEAQCKNFYFNYKRRHNLDNLLQQHKQKTSRKPREERDVSQCESVASTVSAQEDEDIEASNEEENPEDSEVEAVKPSEDSPENATSRGNTEPAVELEPTTETAPSTSPSLAVPSTKPAEDESVETQVNDSISAETAEQMDVDQQEHSAEEGSVCDPPPATKADSVDVEVRVPENHASKVEGDNTKERDLDRASEKVEPRDEDLVVAQQINAQRPEPQSDNDSSATCSADEDVDGEPERQRMFPMDSKPSLLNPTGSILVSSPLKPNPLDLPQLQHRAAVIPPMVSCTPCNIPIGTPVSGYALYQRHIKAMHESALLEEQRQRQEQIDLECRSSTSPCGTSKSPNREWEVLQPAPHQVITNLPEGVRLPTTRPTRPPPPLIPSSKTTVASEKPSFIMGGSISQGTPGTYLTSHNQASYTQETPKPSVGSISLGLPRQQESAKSATLPYIKQEEFSPRSQNSQPEGLLVRAQHEGVVRGTAGAIQEGSITRGTPTSKISVESIPSLRGSITQARRGGSRL

SEQ ID NO: 4005 - protein, 1191 aa, Artificial Sequence
  Synthetic polypeptide
MSSSGYPPNQGAFSTEQSRYPPHSVQYTFPNTRHQQEFAVPDYRSSHLEVSQASQLLQQQQQQQLRRRPSLLSEFHPGSDRPQERRTSYEPFHPGPSPVDHDSLESKRPRLEQVSDSHFQRVSAAVLPLVHPLPEGLRASADAKKDPAFGGKHEAPSSPISGQPCGDDQNASPSKLSKEELIQSMDRVDREIAKVEQQILKLKKKQQQLEEEAAKPPEPEKPVSPPPVEQKHRSIVQIIYDENRKKAEEAHKIFEGLGPKVELPLYNQPSDTKVYHENIKTNQVMRKKLILFFKRRNHARKQREQKICQRYDQLMEAWEKKVDRIENNPRRKAKESKTREYYEKQFPEIRKQREQQERFQRVGQRGAGLSATIARSEHEISEIIDGLSEQENNEKQMRQLSVIPPMMFDAEQRRVKFINMNGLMEDPMKVYKDRQFMNVWTDHEKEIFKDKFIQHPKNFGLIASYLERKSVPDCVLYYYLTKKNENYKALVRRNYGKRRGRNQQIARPSQEEKVEEKEEDKAEKTEKKEEEKKDEEEKDEKEDSKENTKEKDKIDGTAEETEEREQATPRGRKTANSQGRRKGRITRSMTNEAAAASAAAAAATEEPPPPLPPPPEPISTEPVETSRWTEEEMEVAKKGLVEHGRNWAAIAKMVGTKSEAQCKNFYFNYKRRHNLDNLLQQHKQKTSRKPREERDVSQCESVASTVSAQEDEDIEASNEEENPEDSEGAENSSDTESAPSPSPVEAVKPSEDSPENATSRGNTEPAVELEPTTETAPSTSPSLAVPSTKPAEDESVETQVNDSISAETAEQMDVDQQEHSAEEGSVCDPPPATKADSVDVEVRVPENHASKVEGDNTKERDLDRASEKVEPRDEDLVVAQQINAQRPEPQSDNDSSATCSADEDVDGEPERQRMFPMDSKPSLLNPTGSILVSSPLKPNPLDLPQLQHRAAVIPPMVSCTPCNIPIGTPVSGYALYQRHIKAMHESALLEEQRQRQEQIDLECRSSTSPCGTSKSPNREWEVLQPAPHQVITNLPEGVRLPTTRPTRPPPPLIPSSKTTVASEKPSFIMGGSISQGTPGTYLTSHNQASYTQETPKPSVGSISLGLPRQQESAKSATLPYIKQEEFSPRSQNSQPEGLLVRAQHEGVVRGTAGAIQEGSITRGTPTSKISVESIPSLRGSITQARRGGSRL

SEQ ID NO: 4006 - protein, 40 aa, Artificial Sequence
  Synthetic polypeptide
FQWRAFHPYGALSLRPGAVAHACNPSTLGGQGERITRSGV

SEQ ID NO: 4007 - protein, 687 aa, Artificial Sequence
  Synthetic polypeptide
MSSSGYPPNQGAFSTEQSRYPPHSVQYTFPNTRHQQEFAVPDYRSSHLEVSQASQLLQQQQQQQLRRRPSLLSEFHPGSDRPQERRTSYEPFHPGPSPVDHDSLESKRPRLEQVSDSHFQRVSAAVLPLVHPLPEGLRASADAKKDPAFGGKHEAPSSPISGQPCGDDQNASPSKLSKEELIQSMDRVDREIAKVEQQILKLKKKQQQLEEEAAKPPEPEKPVSPPPVEQKHRSIVQIIYDENRKKAEEAHKIFEGLGPKVELPLYNQPSDTKVYHENIKTNQVMRKKLILFFKRRNHARKQREQKICQRYDQLMEAWEKKVDRIENNPRRKAKESKTREYYEKQFPEIRKQREQQERFQRVGQRGAGLSATIARSEHEISEIIDGLSEQENNEKQMRQLSVIPPMMFDAEQRRVKFINMNGLMEDPMKVYKDRQFMNVWTDHEKEIFKDKFIQHPKNFGLIASYLERKSVPDCVLYYYLTKKNENYKALVRRNYGKRRGRNQQIARPSQEEKVEEKEEDKAEKTEKKEEEKKDEEEKDEKEDSKENTKEKDKIDGTAEETEEREQATPRGRKTANSQGRRKGRITRSMTNEAAAASAAAAAATEEPPPPLPPPPEPISTEPVETSRWTEEEMEVAKKGLVEHGRNWAAIAKMVGTKSEAQCKNFYFNYKRRHNLDNLLQQHKQKIF

SEQ ID NO: 4008 - protein, 578 aa, Artificial Sequence
  Synthetic polypeptide
MSSSGYPPNQGAFSTEQSRYPPHSVQYTFPNTRHQQDPAFGGKHEAPSSPISGQPCGDDQNASPSKLSKEELIQSMDRVDREIAKVEQQILKLKKKQQQLEEEAAKPPEPEKPVSPPPVEQKHRSIVQIIYDENRKKAEEAHKIFEGLGPKVELPLYNQPSDTKVYHENIKTNQVMRKKLILFFKRRNHARKQREQKICQRYDQLMEAWEKKVDRIENNPRRKAKESKTREYYEKQFPEIRKQREQQERFQRVGQRGAGLSATIARSEHEISEIIDGLSEQENNEKQMRQLSVIPPMMFDAEQRRVKFINMNGLMEDPMKVYKDRQFMNVWTDHEKEIFKDKFIQHPKNFGLIASYLERKSVPDCVLYYYLTKKNENYKALVRRNYGKRRGRNQQIARPSQEEKVEEKEEDKAEKTEKKEEEKKDEEEKDEKEDSKENTKEKDKIDGTAEETEEREQATPRGRKTANSQGRRKGRITRSMTNEAAAASAAAAAATEEPPPPLPPPPEPISTEPVETSRWTEEEMEVAKKGLVEHGRNWAAIAKMVGTKSEAQCKNFYFNYKRRHNLDNLLQQHKQKIF

SEQ ID NO: 4009 - protein, 137 aa, Artificial Sequence
  Synthetic polypeptide
MAPTGLLVAGASFLAFRGLHWGLRRLPTPESAARDRWQWWNLCVSLAHSLLSGTGALLGLSLYPQMAADPIHGHPRWALVLVAVSVGYFLADGADLLWNQTLGKTWDLLCHHLVSPSHAEPKLDCTAAISAHCNLPA

SEQ ID NO: 4010 - protein, 118 aa, Artificial Sequence
  Synthetic polypeptide
MEAMWLLCVALAVLAWGFLWVWDSSERMKSREQGGRLGAESRTLLVIAHPDDEAMFFAPTVLGLARLRHWVYLLCFSAGNYYNQGETRKKELLQSCDVLGIPLSSVMIIDNRAAEMMG

SEQ ID NO: 4011 - protein, 49 aa, Artificial Sequence
  Synthetic polypeptide
GSNVAPVCGVGGLGMGLPLGLGLLRTNEESGAGRTAGSRKPDPAGHSAP

SEQ ID NO: 4012 - protein, 49 aa, Artificial Sequence; identical to SEQ ID NO: 4011
  Synthetic polypeptide

SEQ ID NO: 4013 - protein, 183 aa, Artificial Sequence
  Synthetic polypeptide
MEAMWLLCVALAVLAWGFLWVWDSSERMKSREQGGRLGAESRTLLVIAHPDDEAMFFAPTVLGLARLRHWVYLLCFSAGNYYNQGETRKKELLQSCDVLGIPLSSVMIIDNRDFPDDPGMQWDTEHVARVLLQHIEVNGINLVVTFDAGGVSGHSNHIALYAAVRKLEGQICKPCGTGQDFKE

SEQ ID NO: 4014 - protein, 41 aa, Artificial Sequence
  Synthetic polypeptide
VVTFDAGGVSGHSNHIALYAAVRKLEGQICKPCGTGQDFKE

SEQ ID NO: 4015 - protein, 139 aa, Artificial Sequence
  Synthetic polypeptide
MHAGPCSSQPDTVVPRTQRALFPSGAQARTILCVKTISLIALICLRIGQEMVQQHLSEPVATFFQVFSQLHELRQQDLKLDPAGRGEGQLPQVVFSDGQQRPVDPALLDELQKVFTLEMAYTIYVPFSCLLVPSTARHI

SEQ ID NO: 4016 - protein, 301 aa, Artificial Sequence
  Synthetic polypeptide
MLVRVVLSLTPSFPEPSALYTACKMVRWLSAKLGPTVASRHVARNLLRLLTSCYVGPTRQQFTVSSGESPPLSAGNIYQKRPVLGDIVSGPVLSCLLHIARLYGEPVLTYQYLPYISYLVAPGSASGPSRLNSRKEAGLLAAVTLTQKIIVYLSDTTLMDILPRISHEVLLPVLSFLTSLVTGFPSGAQARTILCVKTISLIALICLRIGQEMVQQHLSEPVATFFQVFSQLHELRQQDLKLDPAGRGEGQLPQVVFSDGQQRPVDPALLDELQKVFTLEMAYTIYVPFSCLLVPSTARHI

SEQ ID NO: 4017 - protein, 453 aa, Artificial Sequence
  Synthetic polypeptide
MDGEPPASSGLGLPDYTSGVSFHDQADLPETEDFQAGLYVTESPQPQEAEAVSLGRLSDKSSTSETSLGEERAPDEGGAPVDKSSLRSGDSSQDLKQSEGSEEEEEEEDSCVVLEEEEGEQEEVTGASELTLSDTVLSMETVVAGGSGGDGEEEEEALPEQSEGKEQKILLDTACKMVRWLSAKLGPTVASRHVARNLLRLLTSCYVGPTRQQFTVSSGESPPLSAGNIYQKRPVLGDIVSGPVLSCLLHIARLYGEPVLTYQYLPYISYLVAPGSASGPSRLNSRKEAGLLAAVTLTQKIIVYLSDTTLMDILPRISHEVLLPVLSFLTSLVTGFPSGAQARTILCVKTISLIALICLRIGQEMVQQHLSEPVATFFQVFSQLHELRQQDLKLDPAGRGEGQLPQVVFSDGQQRPVDPALLDELQKVFTLEMAYTIYVPFSCLLVPSTARHI

SEQ ID NO: 4018 - protein, 143 aa, Artificial Sequence
  Synthetic polypeptide
MDILPRISHEVLLPVLSFLTSLVTGFPSGAQARTILCVKTISLIALICLRIGQEMVQQHLSEPVATFFQVFSQLHELRQQDLKLDPAGRGEGQLPQVVFSDGQQRPVDPALLDELQKVFTLEMAYTIYVPFSCLLVPSTARHI

SEQ ID NO: 4019 - protein, 277 aa, Artificial Sequence
  Synthetic polypeptide
MVRWLSAKLGPTVASRHVARNLLRLLTSCYVGPTRQQFTVSSGESPPLSAGNIYQKRPVLGDIVSGPVLSCLLHIARLYGEPVLTYQYLPYISYLVAPGSASGPSRLNSRKEAGLLAAVTLTQKIIVYLSDTTLMDILPRISHEVLLPVLSFLTSLVTGFPSGAQARTILCVKTISLIALICLRIGQEMVQQHLSEPVATFFQVFSQLHELRQQDLKLDPAGRGEGQLPQVVFSDGQQRPVDPALLDELQKVFTLEMAYTIYVPFSCLLVPSTARHI

SEQ ID NO: 4020 - protein, 89 aa, Artificial Sequence
  Synthetic polypeptide
MVQQHLSEPVATFFQVFSQLHELRQQDLKLDPAGRGEGQLPQVVFSDGQQRPVDPALLDELQKVFTLEMAYTIYVPFSCLLVPSTARHI

SEQ ID NO: 4021 - protein, 1504 aa, Artificial Sequence
  Synthetic polypeptide
MAQGSGGREGALRTPAGGWHSPPSPDMQELLRSVERDLSIDPRQLAPAPGGTHVVALVPARWLASLRDRRLPLGPCPRAEGLGEAEVRTLLQRSVQRLPAGWTRVEVHGLRKRRLSYPLGGGLPFEDGSCGPETLTRFMQEVAAQNYRNLWRHAYHTYGQPYSHSPAPSAVPALDSVRQALQRVYGCSFLPVGETTQCPSYAREGPCPPRGSPACPSLLRAEALLESPEMLYVVHPYVQFSLHDVVTFSPAKLTNSQAKVLFILFRVLRAMDACHRQGLACGALSLYHIAVDEKLCSELRLDLSAYERPEEDENEEAPVARDEAGIVSQEEQGGQPGQPTGQEELRSLVLDWVHGRISNFHYLMQLNRLAGRRQGDPNYHPVLPWVVDFTTPHGRFRDLRKSKFRLNKGDKQLDFTYEMTRQAFVAGGAGGGEPPHVPHHISDVLSDITYYVYKARRTPRSVLCGHVRAQWEPHEYPASMERMQNWTPDECIPEFYTDPSIFRSIHPDMPDLDVPAWCSSSQEFVAAHRALLESREVSRDLHHWIDLTFGYKLQGKEAVKEKNVCLHLVDAHTHLASYGVVQLFDQPHPQRLAGAPALAPEPPLIPKLLVQTIQETTGREDFTENPGQLPNGVGRPVLEATPCEASWTRDRPVAGEDDLEQATEALDSISLAGKAGDQLGSSSQASPGLLSFSVASASRPGRRNKAAGADPGEGEEGRILLPEGFNPMQALEELEKTGNFLAKGLGGLLEVPEQPRVQPAVPLQCLLHRDMQALGVLLAEMVFATRVRTLQPDAPLWVRFQAVRGLCTRHPKEVPVSLQPVLDTLLQMSGPEVPMGAERGKLDQLFEYRPVSQGLPPPCPSQLLSPFSSVVPFPPYFPALHRFILLYQARRVEDEAQGRELVFALWQQLGAVLKDITPEGLEILLPFVLSLMSEEHTAVYTAWYLFEPVAKALGPKNANKYLLKPLIGAYESPCQLHGRFYLYTDCFVAQLMVRLGLQAFLTHLLPHVLQVLAGAEASQEESKDLAGAAEEEESGLPGAGPGSCAFGEEIPMDGEPPASSGLGLPDYTSGVSFHDQADLPETEDFQAGLYVTESPQPQEAEAVSLGRLSDKSSTSETSLGEERAPDEGGAPVDKSSLRSGDSSQDLKQSEGSEEEEEEEDSCVVLEEEEGEQEEVTGASELTLSDTVLSMETVVAGGSGGDGEEEEEALPEQSEGKEQKILLDTACKMVRWLSAKLGPTVASRHVARNLLRLLTSCYVGPTRQQFTVSSGESPPLSAGNIYQKRPVLGDIVSGPVLSCLLHIARLYGEPVLTYQYLPYISYLVAPGSASGPSRLNSRKEAGLLAAVTLTQKIIVYLSDTTLMDILPRISHEVLLPVLSFLTSLVTGFPSGAQARTILCVKTISLIALICLRIGQEMVQQHLSEPVATFFQVFSQLHELRQQDLKLDPAGRGEGQLPQVVFSDGQQRPVDPALLDELQKVFTLEMAYTIYVPFSCLLVPSTARHI

SEQ ID NO: 4022 - protein, 135 aa, Artificial Sequence
  Synthetic polypeptide
MGSLSSPTSTCPTSATWFPSGAQARTILCVKTISLIALICLRIGQEMVQQHLSEPVATFFQVFSQLHELRQQDLKLDPAGRGEGQLPQVVFSDGQQRPVDPALLDELQKVFTLEMAYTIYVPFSCLLVPSTARHI

SEQ ID NO: 4023 - protein, 104 aa, Artificial Sequence
  Synthetic polypeptide
MGTRQTKGSLAERASPGAAPGPRRERPDFWASLLLRAGDKAGRAGAGMPPYHRRVGMVQELLRMVRQGRREEAGTLLQHLRQGESSWLLTHSQLGLWSRRSRTP

SEQ ID NO: 4024 - protein, 109 aa, Artificial Sequence
  Synthetic polypeptide
MGTRQTKGSLAERASPGAAPGPRRERPDFWASLLLRAGDKAGRAGAGMPPYHRRVGMVQELLRMVRQGRREEAGTLLQHLRQLSPKTPKTMHQKKTNTQHTGNKDRWAV

SEQ ID NO: 4025 - protein, 119 aa, Artificial Sequence
  Synthetic polypeptide
MSGLGRSRRGGRSRVDQEERWSLSCRKEQGKFYDHLLRDCISCASICGQHPKQCAYFCENKLRSPVNLPPELRRQRSGEVENNSDNSGRYQGLEHRGSEASPGIHPRKWKTSIHTNMWM

SEQ ID NO: 4026 - protein, 165 aa, Artificial Sequence
  Synthetic polypeptide
MSGLGRSRRGGRSRVDQEERFPQGLWTGVAMRSCPEEQYWDPLLGTCMSCKTICNHQSQRTCAAFCRSLSCRKEQGKFYDHLLRDCISCASICGQHPKQCAYFCENKLRSPVNLPPELRRQRSGEVENNSDNSGRYQGLEHRGSEASPGIHPRKWKTSIHTNMWM

SEQ ID NO: 4027 - protein, 134 aa, Artificial Sequence
  Synthetic polypeptide
MADTIFGSGNDQWVCPNDRQLALRAKLQTGWSVHTYQTEKQRRKQHLSPAEVEAILQVIQRAERLDVLEQQRIGRLVERLETMRRNVMGNGLSQCLLCGEVLGFLGSSSVFCKDCRKIQEYFPLCHSCLQPSVQ

SEQ ID NO: 4028 - protein, 130 aa, Artificial Sequence
  Synthetic polypeptide
IFGSGNDQWVCPNDRQLALRAKLQTGWSVHTYQTEKQRRKQHLSPAEVEAILQVIQRAERLDVLEQQRIGRLVERLETMRRNVMGNGLSQCLLCGEVLGFLGSSSVFCKDCRKIQEYFPLCHSCLQPSVQ

SEQ ID NO: 4029 - protein, 110 aa, Artificial Sequence
  Synthetic polypeptide
MSAAKENPCRKFQANIFNKSKCQNCFKPRESHLLNDEDLTQAKPIYGGWLLLAPDGTDFDNPVHRSRKWQRRFFILYEHGLLRYALDEMMAPSSCRKTSSGLPLIDSTLW

SEQ ID NO: 4030 - protein, 497 aa, Artificial Sequence
  Synthetic polypeptide
MSAAKENPCRKFQANIFNKSKCQNCFKPRESHLLNDEDLTQAKPIYGGWLLLAPDGTDFDNPVHRSRKWQRRFFILYEHGLLRYALDEMPTTLPQGTINMNQCTDVVDGEGRTGQKFSLCILTPEKEHFIRAETKEIVSGWLEMLMVYPRTNKQNQKKKRKVEPPTPQEPGPAKVAVTSSSSSSSSSSSIPSAEKVPTTKSTLWQEEMRTKDQPDGSSLSPAQSPSQSQPPAASSLREPGLESKEEESAMSSDRMDCGRKVRVESGYFSLEKTKQDLKAEEQQLPPPLSPPSPSTPNHRRSQVIEKFEALDIEKAEHMETNAVGPSPSSDTRQGRSEKRAFPRKRDFTNEAPPAPLPDASASPLSPHRRAKSLDRRSTEPSVTPDLLNFKKGWLTKQYEDGQWKKHWFVLADQSLRYYRDSVAEEAADLDGEIDLSACYDVTEYPVQRNYGFQIHTKEGEFTLSAMTSGIRRNWIQTIMKHVHPTTAPDVTSRQRLW

SEQ ID NO: 4031 - protein, 459 aa, Artificial Sequence
  Synthetic polypeptide
MSAAKENPCRKFQANIFNKSKCQNCFKPRESHLLNDEDLTQAKPIYGGWLLLAPDGTDFDNPVHRSRKWQRRFFILYEHGLLRYALDEMPTTLPQGTINMNQCTDVVDGEGRTGQKFSLCILTPEKEHFIRAETKEIVSGWLEMLMVYPRTNKQNQKKKRKVEPPTPQEPGPAKVAVTSSSSSSSSSSSIPSAEKVPTTKSTLWQEEMRTKDQPDGSSLSPAQSPSQSQPPAASSLREPGLESKEEESAMSSDRMDCGRKVRVESGYFSLEKTKQDLKAEEQQLPPPLSPPSPSTPNHRRSQVIEKFEALDIEKAEHMETNAVGPSPSSDTRQGRSEKRAFPRKRPDLLNFKKGWLTKQYEDGQWKKHWFVLADQSLRYYRDSVAEEAADLDGEIDLSACYDVTEYPVQRNYGFQIHTKEGEFTLSAMTSGIRRNWIQTIMKHVHPTTAPDVTSRQRLW

SEQ ID NO: 4032 - protein, 303 aa, Artificial Sequence
  Synthetic polypeptide
KKKRKVEPPTPQEPGPAKVAVTSSSSSSSSSSSIPSAEKVPTTKSTLWQEEMRTKDQPDGSSLSPAQSPSQSQPPAASSLREPGLESKEEESAMSSDRMDCGRKVRVESGYFSLEKTKQDLKAEEQQLPPPLSPPSPSTPNHRRSQVIEKFEALDIEKAEHMETNAVGPSPSSDTRQGRSEKRAFPRKRPDLLNFKKGWLTKQYEDGQWKKHWFVLADQSLRYYRDSVAEEAADLDGEIDLSACYDVTEYPVQRNYGFQIHTKEGEFTLSAMTSGIRRNWIQTIMKHVHPTTAPDVTSRQRLW

SEQ ID NO: 4033 - protein, 8 aa, Artificial Sequence
  Synthetic polypeptide
GGTGSRPS

SEQ ID NO: 4034 - protein, 160 aa, Artificial Sequence
  Synthetic polypeptide
MIRLGGWCARRLCSAAVPAGRRGAAGGLGLAGGRALRVLVDMDGVLADFEGGFLRKFRARFPDQPFIALEDRRGFWVSEQYGRLRPGLSEKAISIWESKNFFFELEPLPGAVEAVKEMASLQNTDVFICTSPIKMFKYCPYEKMFHVPATLQGFPHSSNT

SEQ ID NO: 4035 - protein, 13 aa, Artificial Sequence
  Synthetic polypeptide
MVGQLSEGAIALT

SEQ ID NO: 4036 - protein, 87 aa, Artificial Sequence
  Synthetic polypeptide
MASAGVAAGRQAEDVLPPTSDQPLPDTKPLPPPQPPPVPAPQPQQSPAPRPQSPARAREEENYSFLPLVHNIIKCCNTHREDLQLHS

SEQ ID NO: 4037 - protein, 109 aa, Artificial Sequence
  Synthetic polypeptide
MQKGDTNIKPILQVINIRPITTGNSPPRYRLLMSDGLNTLSSFMLATQLNPLVEEEQLSSNCVCQIHRFIVNTLKDGRRVVILMELEVLKSAEAVGVKIGNPVPYNEGG

SEQ ID NO: 4038 - protein, 122 aa, Artificial Sequence
  Synthetic polypeptide
MVGQLSEGAIAAIMQKGDTNIKPILQVINIRPITTGNSPPRYRLLMSDGLNTLSSFMLATQLNPLVEEEQLSSNCVCQIHRFIVNTLKDGRRVVILMELEVLKSAEAVGVKIGNPVPYNEGG

SEQ ID NO: 4039 - protein, 141 aa, Artificial Sequence
  Synthetic polypeptide
AVQLFLCDLLLVVRTSLWRQQQPPAPAPAAQGTSSRPQASALELRGFQRDLSSLRRLAQSFRPAMRRVFLHEATARLMAGASPTRTHQLLDRSLRRRAGPGGKGGKLPEGTSSVFFPGCMPSPWKSSLTSSEHVMNPCGRT

SEQ ID NO: 4040 - protein, 14 aa, Artificial Sequence
  Synthetic polypeptide
GPAPHGHTSSSTAV

SEQ ID NO: 4041 - protein, 854 aa, Artificial Sequence
  Synthetic polypeptide
MKTDGATVKAAGLSPLVSGTTVQTGPLPTLVSGGTILATVPLVVDAEKLPINRLAAGSKAPASAQSRGEKRTAHNAIEKRYRSSINDKIIELKDLVVGTEAKLNKSAVLRKAIDYIRFLQHSNQKLKQENLSLRTAVHKSKSLKDLVSACGSGGNTDVLMEGVKTEVEDTLTPPPSDAGSPFQSSPLSLGSRGSGSGGSGSDSEPDSPVFEDSKAKPEQRPSLHSRGMLDRSRLALCTLVFLCLSCNPLASLLGARGLPSPSDTTSVYHSPGRNVLGTESRDGPGWAQWLLPPVVWLLNGLLVLVSLVLLFVYGEPVTRPHSGPAVYFWRHRKQADLDLARGDFAQAAQQLWLALRALGRPLPTSHLDLACSLLWNLIRHLLQRLWVGRWLAGRAGGLQQDCALRVDASASARDAALVYHKLHQLHTMGKHTGGHLTATNLALSALNLAECAGDAVSVATLAEIYVAAALRVKTSLPRALHFLTRFFLSSARQACLAQSGSVPPAMQWLCHPVGHRFFVDGDWSVLSTPWESLYSLAGNPVDPLAQVTQLFREHLLERALNCVTQPNPSPGSADGDKEFSDALGYLQLLNSCSDAAGAPAYSFSISSSMATTTGVDPVAKWWASLTAVVIHWLRRDEEAAERLCPLVEHLPRVLQESERPLPRAALHSFKAARALLGCAKAESGPASLTICEKASGYLQDSLATTPASSSIDKAVQLFLCDLLLVVRTSLWRQQQPPAPAPAAQGTSSRPQASALELRGFQRDLSSLRRLAQSFRPAMRRVFLHEATARLMAGASPTRTHQLLDRSLRRRAGPGGKGGKLPEGTSSVFFPGCMPSPWKSSLTSSEHVMNPCGRT

SEQ ID NO: 4042 - protein, 1138 aa, Artificial Sequence
  Synthetic polypeptide
MDEPPFSEAALEQALGEPCDLDAALLTDIEGEVGAGRGRANGLDAPRAGADRGAMDCTFEDMLQLINNQDSDFPGLFDPPYAGSGAGGTDPASPDTSSPGSLSPPPATLSSSLEAFLSGPQAAPSPLSPPQPAPTPLKMYPSMPAFSPGPGIKEESVPLSILQTPTPQPLPGALLPQSFPAPAPPQFSSTPVLGYPSPPGGFSTGSPPGNTQQPLPGLPLASPPGVPPVSLHTQVQSVVPQQLLTVTAAPTAAPVTTTVTSQIQQVPVLLQPHFIKADSLLLTAMKTDGATVKAAGLSPLVSGTTVQTGPLPTLVSGGTILATVPLVVDAEKLPINRLAAGSKAPASAQSRGEKRTAHNAIEKRYRSSINDKIIELKDLVVGTEAKLNKSAVLRKAIDYIRFLQHSNQKLKQENLSLRTAVHKSKSLKDLVSACGSGGNTDVLMEGVKTEVEDTLTPPPSDAGSPFQSSPLSLGSRGSGSGGSGSDSEPDSPVFEDSKAKPEQRPSLHSRGMLDRSRLALCTLVFLCLSCNPLASLLGARGLPSPSDTTSVYHSPGRNVLGTESRDGPGWAQWLLPPVVWLLNGLLVLVSLVLLFVYGEPVTRPHSGPAVYFWRHRKQADLDLARGDFAQAAQQLWLALRALGRPLPTSHLDLACSLLWNLIRHLLQRLWVGRWLAGRAGGLQQDCALRVDASASARDAALVYHKLHQLHTMGKHTGGHLTATNLALSALNLAECAGDAVSVATLAEIYVAAALRVKTSLPRALHFLTRFFLSSARQACLAQSGSVPPAMQWLCHPVGHRFFVDGDWSVLSTPWESLYSLAGNPVDPLAQVTQLFREHLLERALNCVTQPNPSPGSADGDKEFSDALGYLQLLNSCSDAAGAPAYSFSISSSMATTTGVDPVAKWWASLTAVVIHWLRRDEEAAERLCPLVEHLPRVLQESERPLPRAALHSFKAARALLGCAKAESGPASLTICEKASGYLQDSLATTPASSSIDKAVQLFLCDLLLVVRTSLWRQQQPPAPAPAAQGTSSRPQASALELRGFQRDLSSLRRLAQSFRPAMRRVFLHEATARLMAGASPTRTHQLLDRSLRRRAGPGGKGGKLPEGTSSVFFPGCMPSPWKSSLTSSEHVMNPCGRT

SEQ ID NO: 4043 - protein, 1108 aa, Artificial Sequence
  Synthetic polypeptide
MDEPPFSEAALEQALGEPCDLDAALLTDIEDMLQLINNQDSDFPGLFDPPYAGSGAGGTDPASPDTSSPGSLSPPPATLSSSLEAFLSGPQAAPSPLSPPQPAPTPLKMYPSMPAFSPGPGIKEESVPLSILQTPTPQPLPGALLPQSFPAPAPPQFSSTPVLGYPSPPGGFSTGSPPGNTQQPLPGLPLASPPGVPPVSLHTQVQSVVPQQLLTVTAAPTAAPVTTTVTSQIQQVPVLLQPHFIKADSLLLTAMKTDGATVKAAGLSPLVSGTTVQTGPLPTLVSGGTILATVPLVVDAEKLPINRLAAGSKAPASAQSRGEKRTAHNAIEKRYRSSINDKIIELKDLVVGTEAKLNKSAVLRKAIDYIRFLQHSNQKLKQENLSLRTAVHKSKSLKDLVSACGSGGNTDVLMEGVKTEVEDTLTPPPSDAGSPFQSSPLSLGSRGSGSGGSGSDSEPDSPVFEDSKAKPEQRPSLHSRGMLDRSRLALCTLVFLCLSCNPLASLLGARGLPSPSDTTSVYHSPGRNVLGTESRDGPGWAQWLLPPVVWLLNGLLVLVSLVLLFVYGEPVTRPHSGPAVYFWRHRKQADLDLARGDFAQAAQQLWLALRALGRPLPTSHLDLACSLLWNLIRHLLQRLWVGRWLAGRAGGLQQDCALRVDASASARDAALVYHKLHQLHTMGKHTGGHLTATNLALSALNLAECAGDAVSVATLAEIYVAAALRVKTSLPRALHFLTRFFLSSARQACLAQSGSVPPAMQWLCHPVGHRFFVDGDWSVLSTPWESLYSLAGNPVDPLAQVTQLFREHLLERALNCVTQPNPSPGSADGDKEFSDALGYLQLLNSCSDAAGAPAYSFSISSSMATTTGVDPVAKWWASLTAVVIHWLRRDEEAAERLCPLVEHLPRVLQESERPLPRAALHSFKAARALLGCAKAESGPASLTICEKASGYLQDSLATTPASSSIDKAVQLFLCDLLLVVRTSLWRQQQPPAPAPAAQGTSSRPQASALELRGFQRDLSSLRRLAQSFRPAMRRVFLHEATARLMAGASPTRTHQLLDRSLRRRAGPGGKGGKLPEGTSSVFFPGCMPSPWKSSLTSSEHVMNPCGRT

SEQ ID NO: 4044 - protein, 178 aa, Artificial Sequence
  Synthetic polypeptide
GCAKAESGPASLTICEKASGYLQDSLATTPASSSIDKAVQLFLCDLLLVVRTSLWRQQQPPAPAPAAQGTSSRPQASALELRGFQRDLSSLRRLAQSFRPAMRRVFLHEATARLMAGASPTRTHQLLDRSLRRRAGPGGKGGKLPEGTSSVFFPGCMPSPWKSSLTSSEHVMNPCGRT

SEQ ID NO: 4045 - protein, 464 aa, Artificial Sequence
  Synthetic polypeptide
MVGQLSEGAIAAIMQKGDTNIKPILQVINIRPITTGNSPPRYRLLMSDGLNTLSSFMLATQLNPLVEEEQLSSNCVCQIHRFIVNTLKDGRRVVILMELEVLKSAEAVGVKIGNPVPYNEGLGQPQVAPPAPAASPAASSRPQPQNGSSGMGSTVSKAYGASKTFGKAAGPSLSHTSGGTQSKVVPIASLTPYQSKWTICARVTNKSQIRTWSNSRGEGKLFSLELVDESGEIRATAFNEQVDKFFPLIEVNKVYYFSKGTLKIANKQFTAVKNDYEMTFNNETSVMPCEDDHHLPTVQFDFTGIDDLENKSKDSLVDIIGICKSYEDATKITVRSNNREVAKRNIYLMDTSGKVVTATLWGEDADKFDGSRQPVLAIKGARVSDFGGRSLSVLSSSTIIANPDIPEAYKLRGWFDAEGQALDGVSISDLKSGGVGGSNTNWKTLYEVKSENLGQGDKKQLADP

SEQ ID NO: 4046 - protein, 220 aa, Artificial Sequence
  Synthetic polypeptide
FFPLIEVNKVYYFSKGTLKIANKQFTAVKNDYEMTFNNETSVMPCEDDHHLPTVQFDFTGIDDLENKSKDSLVDIIGICKSYEDATKITVRSNNREVAKRNIYLMDTSGKVVTATLWGEDADKFDGSRQPVLAIKGARVSDFGGRSLSVLSSSTIIANPDIPEAYKLRGWFDAEGQALDGVSISDLKSGGVGGSNTNWKTLYEVKSENLGQGDKKQLADP

SEQ ID NO: 4047 - protein, 43 aa, Artificial Sequence
  Synthetic polypeptide
MEFLLGNPFSTPVGQCLGGRSEQLQTRCLKSCNTHREGLQLHS

SEQ ID NO: 4048 - protein, 38 aa, Artificial Sequence
  Synthetic polypeptide
MEFLLGNPFSTPVGQCLVFLLRLAQTTNPLGGMNNSRR

SEQ ID NO: 4049 - protein, 265 aa, Artificial Sequence
  Synthetic polypeptide
MWRSCLRLRDGGRRLLNRPAGGPSASMSPGPTIPSPARAYAPPTERKRFYQNVSITQGEGGFEINLDHRKLKTPQAKLFTVPSEALAIAVATEWDSQQDTIKYYTMHLTTLCNTSLDNPTQRNKDQLIRAAVKFLDTDTICYRVEEPETLVELQRNEWDPIIEWAEKRYGVEISSSTSIMGPSIPAKTREVLVSHLASYNTWALQGIEFVAAQLKSMVLTLGLIDLRLTVEQAVLLSRLEEEYQLPEATSQTSHLRASPCLTSAS

SEQ ID NO: 4050 - protein, 46 aa, Artificial Sequence
  Synthetic polypeptide
MWRSCLRLRDGGRRLLNRPAGGPSASMSPGPTIPSPARAYAPPTAS

SEQ ID NO: 4051 - protein, 183 aa, Artificial Sequence
  Synthetic polypeptide
MTMPVNGAHKDADLWSSHDKMLAQPLKDSDVEVYNIIKKESNRQRVGLELIASENFASRAVLEALGSCLNNKYSEGYPGQRYYGGTEFIDELETLCQKRALQAYKLDPQCWGVNVQPYSGSPANFAVYTALVEPHGRIMGLDLPDGGHLTHGFMTDKKKISATSIFFESMPYKKLTGRGGGHL

SEQ ID NO: 4052 - protein, 45 aa, Artificial Sequence
  Synthetic polypeptide
MGLDLPDGGHLTHGFMTDKKKISATSIFFESMPYKKLTGRGGGHL

SEQ ID NO: 4053 - protein, 195 aa, Artificial Sequence
  Synthetic polypeptide
MFCVTPPELETKMNITKGGLVLFSANSNSSCMELSKKIAERLGVEMGKVQVYQEPNRETRVQIQESVRGKDVFIIQTVSKDVNTTIMELLIMVYACKTSCAKSIIGVIPYFPYSKQCKMRKRGSIVSKLLASMMCKAGLTHLITMDLHQKEIQGFFNIPVDNLRASPFLLQYIQEEIPDYRNAVIVAKSPASAKR

SEQ ID NO: 4054 - protein, 155 aa, Artificial Sequence
  Synthetic polypeptide
MFCVTPPELETKMNITKGGLVLFSANSNSSCMELSKKIAEDVNTTIMELLIMVYACKTSCAKSIIGVIPYFPYSKQCKMRKRGSIVSKLLASMMCKAGLTHLITMDLHQKEIQGFFNIPVDNLRASPFLLQYIQEEIPDYRNAVIVAKSPASAKR

SEQ ID NO: 4055 - protein, 109 aa, Artificial Sequence
  Synthetic polypeptide
MELLIMVYACKTSCAKSIIGVIPYFPYSKQCKMRKRGSIVSKLLASMMCKAGLTHLITMDLHQKEIQGFFNIPVDNLRASPFLLQYIQEEIPDYRNAVIVAKSPASAKR

SEQ ID NO: 4056 - protein, 172 aa, Artificial Sequence
  Synthetic polypeptide
MFCVTPPELETKMNITKGGLVLFSANSNSSCMELSKKIAERLGVEMGKVQVYQEPNRETRVQIQESVRGKDVFIIQTVSKDVNTTIMELLIMVYACKTSCAKSIIGVIPYFPYSKQCKMRKRGSIVSKLLASMMCKADPRLQECSNRGQVSSLGEEITHRSKKKSKVKLKSI

SEQ ID NO: 4057 - protein, 18 aa, Artificial Sequence
  Synthetic polypeptide
WIYTRRKFRASSIFLLTI

SEQ ID NO: 4058 - protein, 114 aa, Artificial Sequence
  Synthetic polypeptide
MESVALYSFQATESDELAFNKGDTLKILNMEDDQNWYKAELRGVEGFIPKNYIRVKPHPWYSGRISRQLAEEILMKRNHLGAFLIRESESSPGEFSVSVKFWPQQAMPKHIFVE

SEQ ID NO: 4059 - protein, 85 aa, Artificial Sequence
  Synthetic polypeptide
MEDDQNWYKAELRGVEGFIPKNYIRVKPHPWYSGRISRQLAEEILMKRNHLGAFLIRESESSPGEFSVSVKFWPQQAMPKHIFVE

SEQ ID NO: 4060 - protein, 36 aa, Artificial Sequence
  Synthetic polypeptide
HPRQAPSVVLGQDFPAAGRRDSDEAEPSGSLPDPGE

SEQ ID NO: 4061 - protein, 12 aa, Artificial Sequence
  Synthetic polypeptide
RVRAPQGSSLCL

SEQ ID NO: 4062 - protein, 45 aa, Artificial Sequence
  Synthetic polypeptide
MRRQVMAALVVSGAAEQGGRDGPGRDCWSLRDKVTFLSLLVRPPP

SEQ ID NO: 4063 - protein, 3 aa, Artificial Sequence
  Synthetic polypeptide
AGR

SEQ ID NO: 4064 - protein, 409 aa, Artificial Sequence
  Synthetic polypeptide
MELEVRRVRQAFLSGRSRPLRFRLQQLEALRRMVQEREKDILTAIAADLCKSEFNVYSQEVITVLGEIDFMLENLPEWVTAKPVKKNVLTMLDEAYIQPQPLGVVLIIGAWNYPFVLTIQPLIGAIAAGNAVIIKPSELSENTAKILAKLLPQYLDQDLYIVINGGVEETTELLKQRFDHIFYTGNTAVGKIVMEAAAKHLTPVTLELGGKSPCYIDKDCDLDIVCRRITWGKYMNCGQTCIAPDYILCEASLQNQIVWKIKETVKEFYGENIKESPDYERIINLRHFKRILSLLEGQKIAFGGETDEATRYIAPTVLTDVDPKTKVMQEEIFGPILPIVPVKNVDEAINFINEREKPLALYVFSHNHKEVSSVSAWLPIVWDVRSPCAWPPHLGSEARLCLAATTSRK

SEQ ID NO: 4065 - protein, 82 aa, Artificial Sequence
  Synthetic polypeptide
MQEEIFGPILPIVPVKNVDEAINFINEREKPLALYVFSHNHKEVSSVSAWLPIVWDVRSPCAWPPHLGSEARLCLAATTSRK

SEQ ID NO: 4066 - protein, 78 aa, Artificial Sequence
  Synthetic polypeptide
IFGPILPIVPVKNVDEAINFINEREKPLALYVFSHNHKEVSSVSAWLPIVWDVRSPCAWPPHLGSEARLCLAATTSRK

SEQ ID NO: 4067 - protein, 347 aa, Artificial Sequence
  Synthetic polypeptide
MDSLQDTVALDHGGCCPALSRLVPRGFGTEMWTLFALSGPLFLFQVLTFMIYIVSTVFCGHLGKVELASVTLAVAFVNVCGVSVGVGLSSACDTLMSQSFGSPNKKHVGVILQRGALVLLLCCLPCWALFLNTQHILLLFRQDPDVSRLTQDYVMIFIPGLPVIFLYNLLAKYLQNQGWLKGQEEESPFQTPGLSILHPSHSHLSRASFHLFQKITWPQVLSGVVGNCVNGVANYALVSVLNLGVRGSAYANIISQFAQTVFLLLYIVLKKLHLETWAGWSSQCLQDWGPFFSLAVPSMLMICVEWWAYEIGSFLMGLLSVVDLSAQAVIYEVATVTYMAGRSGSRV

SEQ ID NO: 4068 - protein, 311 aa, Artificial Sequence
  Synthetic polypeptide
MDSLQDTVALDHGGCCPALSRLVPRGFGTEMWTLFALSGPLFLFQVLTFMIYIVSTVFCGHLGKVELASVTLAVAFVNVCGVSVGVGLSSACDTLMSQSFGSPNKKHVGVILQRGALVLLLCCLPCWALFLNTQHILLLFRQDPDVSRLTQDYVMIFIPGLPVIFLYNLLAKYLQNQKITWPQVLSGVVGNCVNGVANYALVSVLNLGVRGSAYANIISQFAQTVFLLLYIVLKKLHLETWAGWSSQCLQDWGPFFSLAVPSMLMICVEWWAYEIGSFLMGLLSVVDLSAQAVIYEVATVTYMAGRSGSRV

SEQ ID NO: 4069 - protein, 337 aa, Artificial Sequence
  Synthetic polypeptide
MEVVGDFEYSKRDLVGHGAFAVVFRGRHRQKTDWEVAIKSINKKNLSKSQILLGKEIKILKELQHENIVALYDVQELPNSVFLVMEYCNGGDLADYLQAKGTLSEDTIRVFLHQIAAAMRILHSKGIIHRDLKPQNILLSYANRRKSSVSGIRIKIADFGFARYLHSNMMAATLCGSPMYMAPEVIMSQHYDAKADLWSIGTVIYQCLVGKPPFQANSPQDLRMFYEKNRSLMPSIPRETSPYLANLLLGLLQRNQKDRMDFEAFFSHPFLEQGPVKKSCPVPVPMYSGSVSGSSCGSSPSCRFASPPEFKTSVGNISRPPISTKKKKKKIARRAWA

SEQ ID NO: 4070 - protein, 133 aa, Artificial Sequence
  Synthetic polypeptide
MRSAAKPWNPAIRAGGHGPDRVRPLPAASSGMKSSKSSTSLAFESRLSRLKRASSEDTLNKPGSTAASGVVRLKKTATAGAISELTESRLRSGTGQARWLMPVIPALWEAEVGGSRGQEMETILTNTVKPRLY

SEQ ID NO: 4071 - protein, 227 aa, Artificial Sequence
  Synthetic polypeptide
MASWGGEKRGGAGGSPKPAVYATRKTPSVGSQEDQWYLDYPGDQWSLGFSYSWWKNSVGSESKHGEGALDQLQHDVRLEDLGELHRAARSGDVPGVEHVLAPGDTGVDKRDRKKSIQQLVPEYKEKQTPESLPQNNNPAAPSQAEGGEGGVACGTVEQMTWLCSLPHAVGGGDGDHSSTGAVGGHPRGPGEYCHLHEQRVHHHIFARGKRKGKNHVSNVVRCSGSHP

SEQ ID NO: 4072 - protein, 305 aa, Artificial Sequence
  Synthetic polypeptide
MASWGGEKRGGAGGSPKPAVYATRKTPSVGSQEDQWYLDYPGDQWSLGFSYSWWKNSVGSESKHGEGALDQLQHDVRLEDLGELHRAARSGDVPGVEHVLAPGDTGVDKRDRKKSIQQLVPEYKEKQTPESLPQNNNPAAPSQAEGGEGGVACGTVEQMTWLCSLPHAVGGGDGDHSSTGAVGGHPRGPGEYCHLHEQRVHHHIFARGKRKGKNHVSNVVRLSKVDFPNDVGGSHQSVEVLNRIRRLSFLGVRRNFLLPESIEMGHWFLPTFGLKLKLWLSLSVKPACQLSHWSYATISPESPDC

SEQ ID NO: 4073 - protein, 104 aa, Artificial Sequence
  Synthetic polypeptide
MGSAEDAVKEKLLWNVKKEKTVLNVHSSSIHNSPKLETTQTPGVCTFTPRRVNNLQLYTTRTENEQSTAIHNMNKFQNDTGEQKKLVTKHYTLSDSTYKKYKNP

SEQ ID NO: 4074 - protein, 103 aa, Artificial Sequence
  Synthetic polypeptide
MGSAEDAVKEKLLWNVKKETVLNVHSSSIHNSPKLETTQTPGVCTFTPRRVNNLQLYTTRTENEQSTAIHNMNKFQNDTGEQKKLVTKHYTLSDSTYKKYKNP

SEQ ID NO: 4075 - protein, 33 aa, Artificial Sequence
  Synthetic polypeptide
MGSAEDAVKEKLLWNVKKEGVVACTCCPSYSGG

SEQ ID NO: 4076 - protein, 564 aa, Artificial Sequence
  Synthetic polypeptide
MGSAEDAVKEKLLWNVKKEVKQIMEEAVTRKFVHEDSSHIIALCGAVEACLLHQLRRRAAGFLRSDKMAALFTKVGKTCPVAGEICHKVQELQQQAEGRKPSGVSQEALRRQGSASGKAPALSPQALKHVWVRTALIEKVLDKVVQYLAENCSKYYEKEALLADPVFGPILASLLVGPCALEYTKLKTADHYWTDPSADELVQRHRIRGPPTRQDSPAKRPALGIRKRHSSGSASEDRLAACARECVESLHQNSRTRLLYGKNHVLVQPKEDMEAVPGYLSLHQSAESLTLKWTPNQLMNGTLGDSELEKSVYWDYALVVPFSQVVCIHCHQQKSGGTLVLVSQDGIQRPPLHFPQGGHLLSFLSCLENGLLPRGQLEPPLWTQQGKGKVFPKLRKRSSIRSVDMEEMGTGRATDYVFRIIYPGHRHEHITINYHHLAASRAASVDDDEEEEDKLHAMLSMICSRNLTAPNPMKDAGDMIEMQGFGPSLPAWHLEPLCSQGSSCLSCSSSSSPHATPSHCSCIPDRFLICKMGMMPLAACSTYEDRMRENPSEGPELCRHIMGS

SEQ ID NO: 4077 - protein, 519 aa, Artificial Sequence
  Synthetic polypeptide
MGSAEDAVKEKLLWNVKKEVKQIMEEAVTRKFVHEDSSHIIALCGAVEACLLHQLRRRAAGFLRSDKMAALFTKVGKTCPVAGEICHKVQELQQQAEGRKPSGVSQEALRRQGSASGKAPALSPQALKHVWVRTALIEKVLDKVVQYLAENCSKYYEKEALLADPVFGPILASLLVGPCALEYTKLKTADHYWTDPSADELVQRHRIRGPPTRQDSPAKRPALGIRKRHSSGSASEDRLAACARECVESLHQNSRTRLLYGKNHVLVQPKEDMEAVPGYLSLHQSAESLTLKWTPNQLMNGTLGDSELEKSVYWDYALVVPFSQVVCIHCHQQKSGGTLVLVSQDGIQRPPLHFPQGGHLLSFLSCLENGLLPRGQLEPPLWTQQGKGKVFPKLRKRSSIRSVDMEEMGTGRATDYVFRIIYPGHRHEHNAGDMIEMQGFGPSLPAWHLEPLCSQGSSCLSCSSSSSPHATPSHCSCIPDRFLICKMGMMPLAACSTYEDRMRENPSEGPELCRHIMGS

SEQ ID NO: 4078 - protein, 602 aa, Artificial Sequence
  Synthetic polypeptide
MGSAEDAVKEKLLWNVKKEVKQIMEEAVTRKFVHEDSSHIIALCGAVEACLLHQLRRRAAGFLRSDKMAALFTKVGKTCPVAGEICHKVQELQQQAEGRKPSGVSQEALRRQGSASGKAPALSPQALKHVWVRTALIEKVLDKVVQYLAENCSKYYEKEALLADPVFGPILASLLVGPCALEYTKLKTADHYWTDPSADELVQRHRIRGPPTRQDSPAKRPALGIRKRHSSGSASEDRLAACARECVESLHQNSRTRLLYGKNHVLVQPKEDMEAVPGYLSLHQSAESLTLKWTPNQLMNGTLGDSELEKSVYWDYALVVPFSQVVCIHCHQQKSGGTLVLVSQDGIQRPPLHFPQGGHLLSFLSCLENGLLPRGQLEPPLWTQQGKGKVFPKLRKRSSIRSVDMEEMGTGRATDYVFRIIYPGHRHEHITINYHHLAASRAASVDDDEEEEDKLHAMLSMICSRNLTAPNPMKDAGDMIEMQGFGPSLPAWHLEPLCSQGSSCLSCSSSSSPHATPSHCSCIPDRLPLRLLCESMKRQIVSRAFYGWLAHCRHLSTVRTHLSALVHHSVIPPDRPPGASAGLTKDVWSKYQKDKKEGEQNE

SEQ ID NO: 4079 - protein, 557 aa, Artificial Sequence
  Synthetic polypeptide
MGSAEDAVKEKLLWNVKKEVKQIMEEAVTRKFVHEDSSHIIALCGAVEACLLHQLRRRAAGFLRSDKMAALFTKVGKTCPVAGEICHKVQELQQQAEGRKPSGVSQEALRRQGSASGKAPALSPQALKHVWVRTALIEKVLDKVVQYLAENCSKYYEKEALLADPVFGPILASLLVGPCALEYTKLKTADHYWTDPSADELVQRHRIRGPPTRQDSPAKRPALGIRKRHSSGSASEDRLAACARECVESLHQNSRTRLLYGKNHVLVQPKEDMEAVPGYLSLHQSAESLTLKWTPNQLMNGTLGDSELEKSVYWDYALVVPFSQVVCIHCHQQKSGGTLVLVSQDGIQRPPLHFPQGGHLLSFLSCLENGLLPRGQLEPPLWTQQGKGKVFPKLRKRSSIRSVDMEEMGTGRATDYVFRIIYPGHRHEHNAGDMIEMQGFGPSLPAWHLEPLCSQGSSCLSCSSSSSPHATPSHCSCIPDRLPLRLLCESMKRQIVSRAFYGWLAHCRHLSTVRTHLSALVHHSVIPPDRPPGASAGLTKDVWSKYQKDKKEGEQNE

SEQ ID NO: 4080 - protein, 36 aa, Artificial Sequence
  Synthetic polypeptide
MVIKTDELPAAAPADSAREHGSQAGGKGRPGAAAAS

SEQ ID NO: 4081 - protein, 211 aa, Artificial Sequence
  Synthetic polypeptide
METRGPGLAVRAESRRLVGIGPRAPPGRVGLQPSGRLDRRGGAGTMGYKDNDGEEEEREGGAAGPRGSRLPPITGGASELAKRKVKKKKRKKKTKGSGKGDDKHQSQSLKSQPLSSSFHDILSPCKERGPKPEHRQSKVEKKHLPSDSSTVSLPDFAEIENLANRINESLRWDGILADPEAEKERIRIYKLNRRKRDLALGKASCSVVWAA

SEQ ID NO: 4082 - protein, 205 aa, Artificial Sequence
  Synthetic polypeptide
GLAVRAESRRLVGIGPRAPPGRVGLQPSGRLDRRGGAGTMGYKDNDGEEEEREGGAAGPRGSRLPPITGGASELAKRKVKKKKRKKKTKGSGKGDDKHQSQSLKSQPLSSSFHDILSPCKERGPKPEHRQSKVEKKHLPSDSSTVSLPDFAEIENLANRINESLRWDGILADPEAEKERIRIYKLNRRKRDLALGKASCSVVWAA

SEQ ID NO: 4083 - protein, 51 aa, Artificial Sequence
  Synthetic polypeptide
VSLKSVAPEVLSGGPYNHAADWWSLGVLLFSLATGKLDCAAAISAHCNLPA

SEQ ID NO: 4084 - protein, 315 aa, Artificial Sequence
  Synthetic polypeptide
MGAVSCRQGQHTQQGEHTRVAVPHKQGGNIRGPWARGWKSLWTGLGTIRSDLEELWELRGHHYLHQESLKPAPVLVEKPLPEWPVPQFINLFLPEFPIRPIRGQQQLKILGLVAKGSFGTVLKVLDCTQKAVFAVKVVPKVKVLQRDTVRQCKEEVSIQRQINHPFVHSLGDSWQGKRHLFIMCSYCSTDLYSLWSAVGCFPEASIRLFAAELVLVLCYLHDLGIMHRDVKMENILLDERGHLKLTDFGLSRHVPQGAQAYTICGTLQYMAPEVLSGGPYNHAADWWSLGVLLFSLATGKLDCAAAISAHCNLPA

SEQ ID NO: 4085 - protein, 47 aa, Artificial Sequence
  Synthetic polypeptide
CVATAAQICTPFGRLLAAFLRLPSVSLLPSWCWYCVISMTWASCIEM

SEQ ID NO: 4086 - protein, 246 aa, Artificial Sequence
  Synthetic polypeptide
MGAVSCRQGQHTQQGEHTRVAVPHKQGGNIRGPWARGWKSLWTGLGTIRSDLEELWELRGHHYLHQESLKPAPVLVEKPLPEWPVPQFINLFLPEFPIRPIRGQQQLKILGLVAKGSFGTVLKVLDCTQKAVFAVKVVPKVKVLQRDTVRQCKEEVSIQRQINHPFVHSLGDSWQGKRHLFIMCSYCSTDLYSLWSAVGCFPEASIRLFAAELVLVLCYLHDLGIMHRDVKLDCAAAISAHCNLPA

SEQ ID NO: 4087 - protein, 243 aa, Artificial Sequence
  Synthetic polypeptide
MGAVSCRQGQHTQQGEHTRVAVPHKQGGNIRGPWARGWKSLWTGLGTIRSDLEELWELRGHHYLHQESLKPAPVLVEKPLPEWPVPQFINLFLPEFPIRPIRGQQQLKILGLVAKGSFGTVLKVLDCTQKAVFAVKVVPKVKVLQRDTVRQCKEEVSIQRQINHPFVHSLGDSWQGKRHLFITGLCCCHLGSLQPPCLILLTQPVECLRLQARGAMPDWFSYFFGGDGVSLCWPDWSPAPNCE

SEQ ID NO: 4088 - protein, 239 aa, Artificial Sequence
  Synthetic polypeptide
MGAVSCRQGQHTQQGEHTRVAVPHKQGGNIRGPWARGWKSLWTGLGTIRSDLEELWELRGHHYLHQESLKPAPVLVEKPLPEWPVPQFINLFLPEFPIRPIRGQQQLKILGLVAKGSFGTVLKVLDCTQKAVFAVKVVPKVKVLQRDTVRQCKEERQINHPFVHSLGDSWQGKRHLFITGLCCCHLGSLQPPCLILLTQPVECLRLQARGAMPDWFSYFFGGDGVSLCWPDWSPAPNCE

SEQ ID NO: 4089 - protein, 1947 aa, Artificial Sequence
  Synthetic polypeptide
MPLFFSALLVLLLVALSALFLGRWLVVRLATKWCQRKLQAELKIGSFRFFWIQNVSLKFQQHQQTVEIDNLWISSKLLSHDLPHYVALCFGEVRIRTDLQKVSDLSAPFSQSAGVDQKELSFSPSLLKIFCQLFSIHVDAINIMVLKVDTSESLWHIQISRSRFLLDSDGKRLICEVSLCKINSKVLKSGQLEDTCLVELSLALDLCLKVGISSRHLTAITVDVWTLHAELHEGLFQSQLLCQGPSLASKPVPCSEVTENLVEPTLPGLFLLQQLPDQVKVKMENTSVVLSMNSQKRHLTWTLKLLQFLYHRDEDQLPLRSFTANSDMAQMSTELLLEDGLLLSQSRQRIVCLNSLKASVQVTTIDLSASLVLNTCIIHYRHQEFSHWLHLLALETQGSSSPVLKQRKKRTFPQILAPIIFSTSISNVNISIQLGDTPPFALGFNSISLDYQHLRPQSIHQRGVLTVDHLCWRVGSDSHIQRAPHPPNMHVWGEALVLDSFTLQGSYNQPLGLSSTQSDTLFLDCTIRGLQVEASDTCAQCLSRILSLMGPQSGKSAVSRHSSFGESVSLLWKVDLKVEDMNLFTLSALVGASEVRLDTLTILGSAETSTVGIQGLVLALVKSVTEKMQPCCKAPDIPTPVLSLSMLSITYHSSIRSLEVQCGAGLTLLWSPPDHMYLYQHVLATLQCRDLLRATVFPETVPSLALETSGTTSELEGRAPEPLPPKRLLNLTLEVSTAKLTAFVAEDKFITLAAESVSLSRHGGSLQAYCPELAAGFDGNSIFNFKEVEVQLLPELEEMILHRNPFPALQTLRNRVWLLSFGSVSVEFPYQYDFSRTLDEAVGVQKWLKGLHQGTRAWASPSPVPLPPDLLLKVEHFSWVFLDDVFEVKLHDNYELMKDESKESAKRLQLLDAKVAALRKQHGELLPARKIEELYASLERKNIEIYIQRSRRLYGNTPMRRALLTWSLAGLELVALADASFHGPEHVVEQVQELDPGSPFPPEGLDLVIQWCRMLKCNVKSFLVRIRDYPRYLFEIRDWRLMGRLVGTEQSGQPCSRRRQILHLGLPWGNVAVERNMPPLKFYHDFHSEIFQYTVVWGPCWDPAWTLIGQCVDLLTKPSADPSPPLPWWDKSRLLFHGDWHMDIEQANLHQLATEDPYNTTENMHWEWSHLSFHWKPGQFVFKGDLDINVRTASKYDDCCFLHLPDLCMTLDLQWLCHGNPHDHHSVTLRAPEFLPEVPLGQLHDSYRAFRSENLNLSIKMDLTRHSGTISQPRILLYSSTLRWMQNFWATWTSVTRPICRGKLFNNLKPSKKKLGQHYKQLSYTALFPQLQVHYWASFAQQRGIQIECSQGHVFTRGTQRLIPQAGTVMRRLISDWSVTQMVSDLSQVTVHLMASPTEENADHCLDPLVTKTHLLSLSSLTYQRHSNRTAEEELSARDGDPTFHTHQLHLVDLRISWTTTNRDIAFGLYDGYKKAAVLKRNLSTEALKGLKIDPQMPAKKPKRGVPTSASAPPRVNTPSFSGQPDKGSSGGAYMLQKLIEETDRFVVFTEEESGMSDQLCGIAACQTDDIYNRNCLIELVNCQMVLRGAETEGCVIVSAAKAQLLQCQHHPAWYGDTLKQKTSWTCLLDGMQYFATTESSPTEQDGRQLWLEVKNIEEHRQRSLDSVQELMESGQAVGGMVTTTTDWNQPAEAQQAQQVQRIISRCNCRMYYISYSHDIDPELATQIKPPEVLENQEKEDLLKKQEGAVDTFTLIHHELEISTNPAQYAMILDIVNNLLLHVEPKRKEHSEKKQRVRFQLEISSNPEEQRSSILHLQEAVRQHVAQIRQLEKQMYSIMKSLQDDSKNENLLDLNQKLQLQLNQEKANLQLESEELNILIRCFKDFQLQRANKMELRKQQEDVSVVRRTEFYFAQARWRLTEEDGQLGIAELELQRFLYSKPSYSGG

SEQ ID NO: 4090 - protein, 1804 aa, Artificial Sequence
  Synthetic polypeptide
MVLKVDTSESLWHIQISRSRFLLDSDGKRLICEVSLCKINSKVLKSGQLEDTCLVELSLALDLCLKVGISSRHLTAITVDVWTLHAELHEGLFQSQLLCQGPSLASKPVPCSEVTENLVEPTLPGLFLLQQLPDQVKVKMENTSVVLSMNSQKRHLTWTLKLLQFLYHRDEDQLPLRSFTANSDMAQMSTELLLEDGLLLSQSRQRIVCLNSLKASVQVTTIDLSASLVLNTCIIHYRHQEFSHWLHLLALETQGSSSPVLKQRKKRTFPQILAPIIFSTSISNVNISIQLGDTPPFALGFNSISLDYQHLRPQSIHQRGVLTVDHLCWRVGSDSHIQRAPHPPNMHVWGEALVLDSFTLQGSYNQPLGLSSTQSDTLFLDCTIRGLQVEASDTCAQCLSRILSLMGPQSGKSAVSRHSSFGESVSLLWKVDLKVEDMNLFTLSALVGASEVRLDTLTILGSAETSTVGIQGLVLALVKSVTEKMQPCCKAPDIPTPVLSLSMLSITYHSSIRSLEVQCGAGLTLLWSPPDHMYLYQHVLATLQCRDLLRATVFPETVPSLALETSGTTSELEGRAPEPLPPKRLLNLTLEVSTAKLTAFVAEDKFITLAAESVSLSRHGGSLQAYCPELAAGFDGNSIFNFKEVEVQLLPELEEMILHRNPFPALQTLRNRVWLLSFGSVSVEFPYQYDFSRTLDEAVGVQKWLKGLHQGTRAWASPSPVPLPPDLLLKVEHFSWVFLDDVFEVKLHDNYELMKDESKESAKRLQLLDAKVAALRKQHGELLPARKIEELYASLERKNIEIYIQRSRRLYGNTPMRRALLTWSLAGLELVALADASFHGPEHVVEQVQELDPGSPFPPEGLDLVIQWCRMLKCNVKSFLVRIRDYPRYLFEIRDWRLMGRLVGTEQSGQPCSRRRQILHLGLPWGNVAVERNMPPLKFYHDFHSEIFQYTVVWGPCWDPAWTLIGQCVDLLTKPSADPSPPLPWWDKSRLLFHGDWHMDIEQANLHQLATEDPYNTTENMHWEWSHLSFHWKPGQFVFKGDLDINVRTASKYDDCCFLHLPDLCMTLDLQWLCHGNPHDHHSVTLRAPEFLPEVPLGQLHDSYRAFRSENLNLSIKMDLTRHSGTISQPRILLYSSTLRWMQNFWATWTSVTRPICRGKLFNNLKPSKKKLGQHYKQLSYTALFPQLQVHYWASFAQQRGIQIECSQGHVFTRGTQRLIPQAGTVMRRLISDWSVTQMVSDLSQVTVHLMASPTEENADHCLDPLVTKTHLLSLSSLTYQRHSNRTAEEELSARDGDPTFHTHQLHLVDLRISWTTTNRDIAFGLYDGYKKAAVLKRNLSTEALKGLKIDPQMPAKKPKRGVPTSASAPPRVNTPSFSGQPDKGSSGGAYMLQKLIEETDRFVVFTEEESGMSDQLCGIAACQTDDIYNRNCLIELVNCQMVLRGAETEGCVIVSAAKAQLLQCQHHPAWYGDTLKQKTSWTCLLDGMQYFATTESSPTEQDGRQLWLEVKNIEEHRQRSLDSVQELMESGQAVGGMVTTTTDWNQPAEAQQAQQVQRIISRCNCRMYYISYSHDIDPELATQIKPPEVLENQEKEDLLKKQEGAVDTFTLIHHELEISTNPAQYAMILDIVNNLLLHVEPKRKEHSEKKQRVRFQLEISSNPEEQRSSILHLQEAVRQHVAQIRQLEKQMYSIMKSLQDDSKNENLLDLNQKLQLQLNQEKANLQLESEELNILIRCFKDFQLQRANKMELRKQQEDVSVVRRTEFYFAQARWRLTEEDGQLGIAELELQRFLYSKPSYSGG

SEQ ID NO: 4091 - protein, 77 aa, Artificial Sequence
  Synthetic polypeptide
MAVVPLLLLGGLWSAVGASSLGVVTCGSVVKLLNTRHNVRLHSHDVRYGSGSEERLCLAAHRLGCEERLCLAAPSGI

SEQ ID NO: 4092 - protein, 58 aa, Artificial Sequence
  Synthetic polypeptide
SLGVVTCGSVVKLLNTRHNVRLHSHDVRYGSGSEERLCLAAHRLGCEERLCLAAPSGI

SEQ ID NO: 4093 - protein, 59 aa, Artificial Sequence
  Synthetic polypeptide
MAVVPLLLLGGLWSAVGASSLGVVTCGSVVKLLNTRHNVRLHSHDVRYGSAACLGLPKC

SEQ ID NO: 4094 - protein, 40 aa, Artificial Sequence
  Synthetic polypeptide
SLGVVTCGSVVKLLNTRHNVRLHSHDVRYGSAACLGLPKC

SEQ ID NO: 4095 - protein, 1226 aa, Artificial Sequence
  Synthetic polypeptide
MSDFVESEAEESEEEYNDEGEVVPRVTKKFVEEEDDDEEEEEENLDDQDEQGNLKGFINDDDDEDEGEEDEGSDSGDSEDDVGHKKRKRTSFDDRLEDDDFDLIEENLGVKVKRGQKYRRVKKMSDDEDDDEEEYGKEEHEKEAIAEEIFQDGEGEEGQEAMEAPMAPPEEEEEDDEESDIDDFIVDDDGQPLKKPKWRKKLPGYTDAALQEAQEIFGVDFDYDEFEKYNEYDEELEEEYEYEDDEAEGEIRVRPKKTTKKRVSRRSIFEMYEPSELESSHLTDQDNEIRATDLPERFQLRSIPVKGAEDDELEEEADWIYRNAFATPTISLQESCDYLDRGQPASSFSRKGPSTIQKIKEALGFMRNQHFEVPFIAFYRKEYVEPELHINDLWRVWQWDEKWTQLRIRKENLTRLFEKMQAYQYEQISADPDKPLADGIRALDTTDMERLKDVQSMDELKDVYNHFLLYYGRDIPKMQNAAKASRKKLKRVREEGDEEGEGDEAEDEEQRGPELKQASRRDMYTICQSAGLDGLAKKFGLTPEQFGENLRDSYQRHETEQFPAEPLELAKDYVCSQFPTPEAVLEGARYMVALQIAREPLVRQVLRQTFQERAKLNITPTKKGRKDVDEAHYAYSFKYLKNKPVKELRDDQFLKICLAEDEGLLTTDISIDLKGVEGYGNDQTYFEEIKQFYYRDEFSHQVQEWNRQRTMAIERALQQFLYVQMAKELKNKLLAEAKEYVIKACSRKLYNWLRVAPYRPDQQVEEDDDFMDENQGKGIRVLGIAFSSARDHPVFCALVNGEGEVTDFLRLPHFTKRRTAWREEEREKKAQDIETLKKFLLNKKPHVVTVAGENRDAQMLIEDVKRIVHELDQGQQLSSIGVELVDNELAILYMNSKKSEAEFRDYPPVLRQAVSLARRIQDPLIEFAQVCSSDEDILCLKFHPLQEHVVKEELLNALYCEFINRVNEVGVDVNRAIAHPYSQALIQYVCGLGPRKGTHLLKILKQNNTRLESRTQLVTMCHMGPKVFMNCAGFLKIDTASLGDSTDSYIEVLDGSRVHPETYEWARKMAVDALEYDESAEDANPAGALEEILENPERLKDLDLDAFAEELERQGYGDKHITLYDIRAELSCRYKDLRTAYRSPNTEEIFNMLTKETPETFYIGKLIICNVTGIAHRRPQGESYDQAIRNDETGLWQCPFCQQDNFPELSEGPRQVECLPRSSRPT

SEQ ID NO: 4096 - protein, 1265 aa, Artificial Sequence
  Synthetic polypeptide
MSDFVESEAEESEEEYNDEGEVVPRVTKKFVEEEDDDEEEEEENLDDQDEQGNLKGFINDDDDEDEGEEDEGSDSGDSEDDVGHKKRKRTSFDDRLEDDDFDLIEENLGVKVKRGQKYRRVKKMSDDEDDDEEEYGKEEHEKEAIAEEIFQDGEGEEGQEAMEAPMAPPEEEEEDDEESDIDDFIVDDDGQPLKKPKWRKKLPGYTDAALQEAQEIFGVDFDYDEFEKYNEYDEELEEEYEYEDDEAEGEIRVRPKKTTKKRVSRRSIFEMYEPSELESSHLTDQDNEIRATDLPERFQLRSIPVKGAEDDELEEEADWIYRNAFATPTISLQESCDYLDRGQPASSFSRKGPSTIQKIKEALGFMRNQHFEVPFIAFYRKEYVEPELHINDLWRVWQWDEKWTQLRIRKENLTRLFEKMQAYQYEQISADPDKPLADGIRALDTTDMERLKDVQSMDELKDVYNHFLLYYGRDIPKMQNAAKASRKKLKRVREEGDEEGEGDEAEDEEQRGPELKQASRRDMYTICQSAGLDGLAKKFGLTPEQFGENLRDSYQRHETEQFPAEPLELAKDYVCSQFPTPEAVLEGARYMVALQIAREPLVRQVLRQTFQERAKLNITPTKKGRKDVDEAHYAYSFKYLKNKPVKELRDDQFLKICLAEDEGLLTTDISIDLKGVEGYGNDQTYFEEIKQFYYRDEFSHQVQEWNRQRTMAIERALQQFLYVQMAKELKNKLLAEAKEYVIKACSRKLYNWLRVAPYRPDQQVEEDDDFMDENQGKGIRVLGIAFSSARDHPVFCALVNGEGEVTDFLRLPHFTKRRTAWREEEREKKAQDIETLKKFLLNKKPHVVTVAGENRDAQMLIEDVKRIVHELDQGQQLSSIGVELVDNELAILYMNSKKSEAEFRDYPPVLRQAVSLARRIQDPLIEFAQVCSSDEDILCLKFHPLQEHVVKEELLNALYCEFINRVNEVGVDVNRAIAHPYSQALIQYVCGLGPRKGTHLLKILKQNNTRLESRTQLVTMCHMGPKVFMNCAGFLKIDTASLGDSTDSYIEVLDGSRVHPETYEWARKMAVDALEYDESAEDANPAGALEEILENPERLKDLDLDAFAEELERQGYGDKHITLYDIRAELSCRYKDLRTAYRSPNTEEIFNMLTKETPETFYIGKLIICNVTGIAHRRPQGESYDQAIRNDETGLWQCPFCQQDNFPELSEVWNHFDSGSCPGQAIGVKTRLDNGVTGFIPTKFLSDKVVKRPEERVKLKCSVDL

SEQ ID NO: 4097 - protein, 410 aa, Artificial Sequence
  Synthetic polypeptide
MAAPSWRGARLVQSVLRVWQVGPHVARERVIPFSSLLGFQRRCVSCVAGSAFSGPRLASASRSNGQGSALDHFLGFSQPDSSVTPCVPAVSMNRDEQDVLLVHHPDMPENSRVLRVVLLGAPNAGKSTLSNQLLGRKVFPVSRKVHTTRCQALGVITEKETQVILLDTPGIISPGKQKRHHLELSLLEDPWKSMESADLVVVLVDVSDKWTRNQLSPQLLRCLTKYSQIPSVLVMNKVDCLKQKSVLLELTAALTEGVVNGKKLKMRQAFHSHPGTHCPSPAVKDPNTQSVGNPQRIGWPHFKEIFMLSALSQEDVKTLKQYLLTQAQPGPWEYHSAVLTSQTPEEICANIIREKLLEHLPQEVPYNVQQKTAVWEEGPGGELVIQQKLLVPKESYVMGRRSWRQFIFFF

SEQ ID NO: 4098 - protein, 83 aa, Artificial Sequence
  Synthetic polypeptide
QPGPWEYHSAVLTSQTPEEICANIIREKLLEHLPQEVPYNVQQKTAVWEEGPGGELVIQQKLLVPKESYVMGRRSWRQFIFFF

SEQ ID NO: 4099 - protein, 32 aa, Artificial Sequence
  Synthetic polypeptide
MGNCHTVGPNEALVVSGIAMYGRLRLEDRLSP

SEQ ID NO: 4100 - protein, 395 aa, Artificial Sequence
  Synthetic polypeptide
MWEKMETKTIVYDLDTSGGLMEQIQALLAPPKTDEAEKRSRKPEKEPRRSGRATNHDSCDSCKEGGDLLCCDHCPAAFHLQCCNPPLSEEMLPPGEWMCHRCTVRRKKREQKKELGHVNGLVDKSGKRTTSPSSDTDLLDRSASKTELKAIAHARILERRASRPGTPTSSASTETPTSEQNDVDEDIIDVDEEPVAAEPDYVQPQLRRPFELLIAAAMERNPTQFQLPNELTCTTALPGSSKRRRKEETTGKNVKKTQHELDHNGLVPLPVKVCFTCNRSCRVAPLIQCDYCPLLFHMDCLEPPLTAMPLGRWMCPNHIEHVVLNQKNMTLSNRCQVFDRFQDTVSQHVVKVDFLNRIHKKHPPNRRVLQSVKRRSLKTHICLPIPQISQDEPPP

SEQ ID NO: 4101 - protein, 402 aa, Artificial Sequence
  Synthetic polypeptide
MWEKMETKTIVYDLDTSGGLMEQIQALLAPPKTDEAEKRSRKPEKEPRRSGRATNHDSCDSCKEGGDLLCCDHCPAAFHLQCCNPPLSEEMLPPGEWMCHRCTVRRKKREQKKELGHVNGLVDKSGKRTTSPSSDTDLLDRSASKTELKAIAHARILERRASRPGTPTSSASTETPTSEQNDVDEDIIDVDEEPVAAEPDYVQPQLRRPFELLIAAAMERNPTQFQLPNELTCTTALPGSSKRRRKEETTGKNVKKTQHELDHNGLVPLPVKVCFTCNRSCRVAPLIQCDYCPLLFHMDCLEPPLTAMPLGRWMCPNHIEHVVLNQKNMTLSNRCQVFDRFQDTVSQHVVKVDFLNRIHKKHPPNRRVLQSVKRRSLKAPVIPATREAEAGESLEPGRWRLQ

SEQ ID NO: 4102 - protein, 899 aa, Artificial Sequence
  Synthetic polypeptide
MPSTNRAGSLKDPEIAELFFKEDPEKLFTDLREIGHGSFGAVYFARDVRTNEVVAIKKMSYSGKQSTEKWQDIIKEVKFLQRIKHPNSIEYKGCYLREHTAWLVMEYCLGSASDLLEVHKKPLQEVEIAAITHGALQGLAYLHSHTMIHRDIKAGNILLTEPGQVKLADFGSASMASPANSFVGTPYWMAPEVILAMDEGQYDGKVDVWSLGITCIELAERKPPLFNMNAMSALYHIAQNESPTLQSNEWSDYFRNFVDSCLQKIPQDRPTSEELLKHIFVLRERPETVLIDLIQRTKDAVRELDNLQYRKMKKLLFQEAHNGPAVEAQEEEEEQDHGVGRTGTVNSVGSNQSIPSMSISASSQSSSVNSLPDVSDDKSELDMMEGDHTVMSNSSVIHLKPEEENYREEGDPRTRASDPQSPPQVSRHKSHYRNREHFATIRTASLVTRQMQEHEQDSELREQMSGYKRMRRQHQKQLMTLENKLKAEMDEHRLRLDKDLETQRNNFAAEMEKLIKKHQAAMEKEAKVMSNEEKKFQQHIQAQQKKELNSFLESQKREYKLRKEQLKEELNENQSTPKKEKQEWLSKQKENIQHFQAEEEANLLRRQRQYLELECRRFKRRMLLGRHNLEQDLVREELNKRQTQKDLEHAMLLRQHESMQELEFRHLNTIQKMRCELIRLQHQTELTNQLEYNKRRERELRRKHVMEVRQQPKSLKSKELQIKKQFQDTCKIQTRQYKALRNHLLETTPKSEHKAVLKRLKEEQTRKLAILAEQYDHSINEMLSTQALRLDEAQEAECQVLKMQLQQELELLNAYQSKIKMQAEAQHDRELRELEQRVSLRRALLEQKVLWLMLVIPALGRRRQADRLSSGVQDQPGQHGKTLPLQKIQKLAKCGVRHL

SEQ ID NO: 4103 - protein, 751 aa, Artificial Sequence
  Synthetic polypeptide
MPSTNRAGSLKDPEIAELFFKEDPEKLFTDLREIGHGSFGAVYFARDVRTNEVVAIKKMSYSGKQSTEKWQDIIKEVKFLQRIKHPNSIEYKGCYLREHTAWLVMEYCLGSASDLLEVHKKPLQEVEIAAITHGALQGLAYLHSHTMIHRDIKAGNILLTEPGQVKLADFGSASMASPANSFVGTPYWMAPEVILAMDEGQYDGKVDVWSLGITCIELAERKPPLFNMNAMSALYHIAQNESPTLQSNEWSDYFRNFVDSCLQKIPQDRPTSEELLKHIFVLRERPETVLIDLIQRTKDAVRELDNLQYRKMKKLLFQEAHNGPAVEAQEEEEEQDHGVGRTGTVNSVGSNQSIPSMSISASSQSSSVNSLPDVSDDKSELDMMEGDHTVMSNSSVIHLKPEEENYREEGDPRTRASDPQSPPQVSRHKSHYRNREHFATIRTASLVTRQMQEHEQDSELREQMSGYKRMRRQHQKQLMTLENKLKAEMDEHRLRLDKDLETQRNNFAAEMEKLIKKHQAAMEKEAKVMSNEEKKFQQHIQAQQKKELNSFLESQKREYKLRKEQLKESKELQIKKQFQDTCKIQTRQYKALRNHLLETTPKSEHKAVLKRLKEEQTRKLAILAEQYDHSINEMLSTQALRLDEAQEAECQVLKMQLQQELELLNAYQSKIKMQAEAQHDRELRELEQRVSLRRALLEQKVLWLMLVIPALGRRRQADRLSSGVQDQPGQHGKTLPLQKIQKLAKCGVRHL

SEQ ID NO: 4104 - protein, 48 aa, Artificial Sequence
  Synthetic polypeptide
MALVTVQRSPTPSTTSSPCASSSHLEDSESAALLCCECEESEIFTDSN

SEQ ID NO: 4105 - protein, 24 aa, Artificial Sequence
  Synthetic polypeptide
MALVTVQRSPTPSTTSSPCASVSA

SEQ ID NO: 4106 - protein, 47 aa, Artificial Sequence
  Synthetic polypeptide
MDEIKSQGKEFIMKTPKANAIKQKINKWDLIQLKSFCTAKEITIRLN

SEQ ID NO: 4107 - protein, 103 aa, Artificial Sequence
  Synthetic polypeptide
MNESASQEELRPAQENRKEDKERKWNLTEVKELHETLQSVPDVPVKEDTNSVVEKAMDEIKSQGKEFIMKTPKANAIKQKINKWDLIQLKSFCTAKEITIRLN

SEQ ID NO: 4108 - protein, 28 aa, Artificial Sequence
  Synthetic polypeptide
MDEIKSQAQFTLAKIWNQPKCPPTNEWI

SEQ ID NO: 4109 - protein, 84 aa, Artificial Sequence
  Synthetic polypeptide
MNESASQEELRPAQENRKEDKERKWNLTEVKELHETLQSVPDVPVKEDTNSVVEKAMDEIKSQAQFTLAKIWNQPKCPPTNEWI

SEQ ID NO: 4110 - protein, 13 aa, Artificial Sequence
  Synthetic polypeptide
MEFTECNQTRTQD

SEQ ID NO: 4111 - protein, 300 aa, Artificial Sequence
  Synthetic polypeptide
MDEIKSQELNLEGQRKISPGSIKDSKTEASGNIAIRKSAKVIFALDETELKSKPEHTWKKNLFERMEARAQAMQQKIIDKENLKKELEKKAEKKLPRDNLAKEWFNTDSMTLNNTAYLLDKLLPTLVPGVENMLTQVEKKKVLTEADTPSKFDPINYLGEYLIRNNPNYIKDPGMSGYQRLMKEVTEDLKIYVPDTICNRVSKMKENVKQNRKQRESIDKIIVKVANTRKQALQEQFDEWILDPKGMIPKSVIQNVLQEFFQNPDFKLGSHCKQLDITDSTEPRLNKMEFTECNQTRTQD

SEQ ID NO: 4112 - protein, 356 aa, Artificial Sequence
  Synthetic polypeptide
MNESASQEELRPAQENRKEDKERKWNLTEVKELHETLQSVPDVPVKEDTNSVVEKAMDEIKSQELNLEGQRKISPGSIKDSKTEASGNIAIRKSAKVIFALDETELKSKPEHTWKKNLFERMEARAQAMQQKIIDKENLKKELEKKAEKKLPRDNLAKEWFNTDSMTLNNTAYLLDKLLPTLVPGVENMLTQVEKKKVLTEADTPSKFDPINYLGEYLIRNNPNYIKDPGMSGYQRLMKEVTEDLKIYVPDTICNRVSKMKENVKQNRKQRESIDKIIVKVANTRKQALQEQFDEWILDPKGMIPKSVIQNVLQEFFQNPDFKLGSHCKQLDITDSTEPRLNKMEFTECNQTRTQD

SEQ ID NO: 4113 - protein, 162 aa, Artificial Sequence
  Synthetic polypeptide
KKKVLTEADTPSKFDPINYLGEYLIRNNPNYIKDPGMSGYQRLMKEVTEDLKIYVPDTICNRVSKMKENVKQNRKQRESIDKIIVKVANTRKQALQEQFDEWILDPKGMIPKSVIQNVLQEFFQNPDFKLGSHCKQLDITDSTEPRLNKMEFTECNQTRTQD

SEQ ID NO: 4114 - skipped

SEQ ID NO: 4115 - protein, 98 aa, Artificial Sequence
  Synthetic polypeptide
MAAGTSSYWEDLRKQARQLENELDLKLVSFSKLCTSYSHSSTRDGRRDSHLPWPPKVPRLQPLPGRHPVWKVRSASARPPSHLGSEERLFPAAIPSRK

SEQ ID NO: 4116 - protein, 8 aa, Artificial Sequence
  Synthetic polypeptide
RDQQLLGR

SEQ ID NO: 4117 - protein, 228 aa, Artificial Sequence
  Synthetic polypeptide
MAAGTSSYWEDLRKQARQLENELDLKLVSFSKLCTSYSHSSTRDGRRDRYSSDTTPLLNGSSQDRMFETMAIEIEQLLARLTGVNDKMAEYTNSAGVPSLNAALMHTLQRHRDILQDYTHEFHKTKANFMAIRERENLMGSVRKDIESYKSGSGVNNRRTELFLKEHDHLRKYYFLQTEGWWQPCVEEVLQCRFSNSICSLRVSVLHFGNSILDVFIIIISVIAISDL

SEQ ID NO: 4118 - protein, 226 aa, Artificial Sequence
  Synthetic polypeptide
MAAGTSSYWEDLRKQARQLENELDLKLVSFSKLCTSYSHSSTRDGRRDSSDTTPLLNGSSQDRMFETMAIEIEQLLARLTGVNDKMAEYTNSAGVPSLNAALMHTLQRHRDILQDYTHEFHKTKANFMAIRERENLMGSVRKDIESYKSGSGVNNRRTELFLKEHDHLRKYYFLQTEGWWQPCVEEVLQCRFSNSICSLRVSVLHFGNSILDVFIIIISVIAISDL

SEQ ID NO: 4119 - protein, 163 aa, Artificial Sequence
  Synthetic polypeptide
MFETMAIEIEQLLARLTGVNDKMAEYTNSAGVPSLNAALMHTLQRHRDILQDYTHEFHKTKANFMAIRERENLMGSVRKDIESYKSGSGVNNRRTELFLKEHDHLRKYYFLQTEGWWQPCVEEVLQCRFSNSICSLRVSVLHFGNSILDVFIIIISVIAISDL

SEQ ID NO: 4120 - protein, 224 aa, Artificial Sequence
  Synthetic polypeptide
MAAGTSSYWEDLRKQARQLENELDLKLVSFSKLCTSYSHSSTRDGRRDRYSSDTTPLLNGSSQDRMFETMAIEIEQLLARLTGVNDKMAEYTNSAGVPSLNAALMHTLQRHRDILQDYTHEFHKTKANFMAIRERENLMGSVRKDIDGSGVNNRRTELFLKEHDHLRKYYFLQTEGWWQPCVEEVLQCRFSNSICSLRVSVLHFGNSILDVFIIIISVIAISDL

SEQ ID NO: 4121 - protein, 8 aa, Artificial Sequence
  Synthetic polypeptide
RDQQLLGR

SEQ ID NO: 4122 - protein, 8 aa, Artificial Sequence
  Synthetic polypeptide
RDQQLLGR

SEQ ID NO: 4123 - protein, 259 aa, Artificial Sequence
  Synthetic polypeptide
MAAGTSSYWEDLRKQARQLENELDLKLVSFSKLCTSYSHSSTRDGRRDRYSSDTTPLLNGSSQDRMFETMAIEIEQLLARLTGVNDKMAEYTNSAGVPSLNAALMHTLQRHRDILQDYTHEFHKTKANFMAIRERENLMGSVRKDIESYKSGSGVNNRRTELFLKEHDHLRNSDRLIEETISLPSACNCRRAPPRLTASASRGAGIADGVSFTQCSMVPRLECSGVISAHYNLHLPATCLGLPKCRDCSLCPAATPSGK

SEQ ID NO: 4124 - protein, 257 aa, Artificial Sequence
  Synthetic polypeptide
MAAGTSSYWEDLRKQARQLENELDLKLVSFSKLCTSYSHSSTRDGRRDSSDTTPLLNGSSQDRMFETMAIEIEQLLARLTGVNDKMAEYTNSAGVPSLNAALMHTLQRHRDILQDYTHEFHKTKANFMAIRERENLMGSVRKDIESYKSGSGVNNRRTELFLKEHDHLRNSDRLIEETISLPSACNCRRAPPRLTASASRGAGIADGVSFTQCSMVPRLECSGVISAHYNLHLPATCLGLPKCRDCSLCPAATPSGK

SEQ ID NO: 4125 - protein, 194 aa, Artificial Sequence
  Synthetic polypeptide
MFETMAIEIEQLLARLTGVNDKMAEYTNSAGVPSLNAALMHTLQRHRDILQDYTHEFHKTKANFMAIRERENLMGSVRKDIESYKSGSGVNNRRTELFLKEHDHLRNSDRLIEETISLPSACNCRRAPPRLTASASRGAGIADGVSFTQCSMVPRLECSGVISAHYNLHLPATCLGLPKCRDCSLCPAATPSGK

SEQ ID NO: 4126 - skipped

SEQ ID NO: 4127 - protein, 28 aa, Artificial Sequence
  Synthetic polypeptide
MAAHRPVEWVQAVVSRFDEQGQRGGSRL

SEQ ID NO: 4128 - protein, 62 aa, Artificial Sequence
  Synthetic polypeptide
SLPLPSPQPPLPALFPAQGAGPPFPPPPPGRGEDMAAHRPVEWVQAVVSRFDEQGQRGGSRL

SEQ ID NO: 4129 - protein, 56 aa, Artificial Sequence
  Synthetic polypeptide
SPASLPLAPGCALRLCPLSFGEGVEFDPLPPKEVRVVGEIKLDPVSKVLRRRVPGT

SEQ ID NO: 4130 - protein, 75 aa, Artificial Sequence
  Synthetic polypeptide
SPASLPLAPGCALRLCPLSFGEGVEFDPLPPKEVSSSTQWRCDLHLCTSVSSLRVVGEIKLDPVSKVLRRRVPGT

SEQ ID NO: 4131 - protein, 39 aa, Artificial Sequence
  Synthetic polypeptide
MDLQAAGAQAQGAAEPSRGPPLPSARGAPPSPESVPARC

SEQ ID NO: 4132 - protein, 45 aa, Artificial Sequence
  Synthetic polypeptide
MKKDVRILLVGEQKNHHEGRGFVFLLAVSPVARTDLAQKRHSGIS

SEQ ID NO: 4133 - protein, 15 aa, Artificial Sequence
  Synthetic polypeptide
MKKDVRILLVGEQSS

SEQ ID NO: 4134 - protein, 14 aa, Artificial Sequence
  Synthetic polypeptide
MKKDVRILLVGERP

SEQ ID NO: 4135 - protein, 155 aa, Artificial Sequence
  Synthetic polypeptide
MKKDVRILLVGEPRVGKTSLIMSLVSEEFPEEVPPRAEEITIPADVTPERVPTHIVDYSEAEQSDEQLHQEISQANVICIVYAVNNKHSIDKVTSRWIPLINERTDKDSSDLPLLPSLDCTAVISAHCNLPASGSHDSPASAYRVPGIPGTCHHS

SEQ ID NO: 4136 - protein, 134 aa, Artificial Sequence
  Synthetic polypeptide
MSLVSEEFPEEVPPRAEEITIPADVTPERVPTHIVDYSEAEQSDEQLHQEISQANVICIVYAVNNKHSIDKVTSRWIPLINERTDKDSSDLPLLPSLDCTAVISAHCNLPASGSHDSPASAYRVPGIPGTCHHS

SEQ ID NO: 4137 - protein, 111 aa, Artificial Sequence
  Synthetic polypeptide
MKKDVRILLVGEPRVGKTSLIMSLVSEEFPEEVPPRAEEITIPADVTPERVPTHIVDYSEAEQSDEQLHQEISQANVICIVYAVNNKHSIDKVTSRWIPLINERTDKDSRK

SEQ ID NO: 4138 - protein, 90 aa, Artificial Sequence
  Synthetic polypeptide
MSLVSEEFPEEVPPRAEEITIPADVTPERVPTHIVDYSEAEQSDEQLHQEISQANVICIVYAVNNKHSIDKVTSRWIPLINERTDKDSRK

SEQ ID NO: 4139 - protein, 653 aa, Artificial Sequence
  Synthetic polypeptide
MKKDVRILLVGEPRVGKTSLIMSLVSEEFPEEVPPRAEEITIPADVTPERVPTHIVDYSEAEQSDEQLHQEISQANVICIVYAVNNKHSIDKVTSRWIPLINERTDKDSRLPLILVGNKSDLVEYSSMETILPIMNQYTEIETCVECSAKNLKNISELFYYAQKAVLHPTGPLYCPEEKEMKPACIKALTRIFKISDQDNDGTLNDAELNFFQRICFNTPLAPQALEDVKNVVRKHISDGVADSGLTLKGFLFLHTLFIQRGRHETTWTVLRRFGYDDDLDLTPEYLFPLLKIPPDCTTELNHHAYLFLQSTFDKHDLDRDCALSPDELKDLFKVFPYIPWGPDVNNTVCTNERGWITYQGFLSQWTLTTYLDVQRCLEYLGYLGYSILTEQESQASAVTVTRDKKIDLQKKQTQRNVFRCNVIGVKNCGKSGVLQALLGRNLMRQKKIREDHKSYYAINTVYVYGQEKYLLLHDISESEFLTEAEIICDVVCLVYDVSNPKSFEYCARIFKQHFMDSRIPCLIVAAKSDLHEVKQEYSISPTDFCRKHKMPPPQAFTCNTADAPSKDIFVKLTTMAMYPEDHYRDRLSRDMGHTDRIENLRKIWVFLKTAFHARLRCMCTCNRCTFCICQNFLNSDLLQSVKNKIFTAVLNR

SEQ ID NO: 4140 - protein, 621 aa, Artificial Sequence
  Synthetic polypeptide
MKKDVRILLVGEPRVGKTSLIMSLVSEEFPEEVPPRAEEITIPADVTPERVPTHIVDYSEAEQSDEQLHQEISQANVICIVYAVNNKHSIDKVTSRWIPLINERTDKDSRLPLILVGNKSDLVEYSSMETILPIMNQYTEIETCVECSAKNLKNISELFYYAQKAVLHPTGPLYCPEEKEMKPACIKALTRIFKISDQDNDGTLNDAELNFFQRICFNTPLAPQALEDVKNVVRKHISDGVADSGLTLKGFLFLHTLFIQRGRHETTWTVLRRFGYDDDLDLTPEYLFPLLKIPPDCTTELNHHAYLFLQSTFDKHDLDRDCALSPDELKDLFKVFPYIPWGPDVNNTVCTNERGWITYQGFLSQWTLTTYLDVQRCLEYLGYLGYSILTEQESQASAVTVTRDKKIDLQKKQTQRNVFRCNVIGVKNCGKSGVLQALLGRNLMRQKKIREDHKSYYAINTVYVYGQEKYLLLHDISESEFLTEAEIICDVVCLVYDVSNPKSFEYCARIFKQHFMDSRIPCLIVAAKSDLHEVKQEYSISPTDFCRKHKMPPPQAFTCNTADAPSKDIFVKLTTMAMYPHARLRCMCTCNRCTFCICQNFLNSDLLQSVKNKIFTAVLNR

SEQ ID NO: 4141 - protein, 144 aa, Artificial Sequence
  Synthetic polypeptide
ESEFLTEAEIICDVVCLVYDVSNPKSFEYCARIFKQHFMDSRIPCLIVAAKSDLHEVKQEYSISPTDFCRKHKMPPPQAFTCNTADAPSKDIFVKLTTMAMYPHARLRCMCTCNRCTFCICQNFLNSDLLQSVKNKIFTAVLNR

SEQ ID NO: 4142 - protein, 44 aa, Artificial Sequence
  Synthetic polypeptide
MYPHARLRCMCTCNRCTFCICQNFLNSDLLQSVKNKIFTAVLNR

SEQ ID NO: 4143 - protein, 968 aa, Artificial Sequence
  Synthetic polypeptide
MAEQESLEFGKADFVLMDTVSMPEFMANLRLRFEKGRIYTFIGEVVVSVNPYKLLNIYGRDTIEQYKGRELYERPPHLFAIADAAYKAMKRRSKDTCIVISGESGAGKTEASKYIMQYIAAITNPSQRAEVERVKNMLLKSNCVLEAFGNAKTNRNDNSSRFGKYMDINFDFKGDPIGGHINNYLLEKSRVIVQQPGERSFHSFYQLLQGGSEQMLRSLHLQKSLSSYNYIHVGAQLKSSINDAAEFRVVADAMKVIGFKPEEIQTVYKILAAILHLGNLKFVVDGDTPLIENGKVVSIIAELLSTKTDMVEKALLYRTVATGRDIIDKQHTEQEASYGRDAFAKAIYERLFCWIVTRINDIIEVKNYDTTIHGKNTVIGVLDIYGFEIFDNNSFEQFCINYCNEKLQQLFIQLVLKQEQEEYQREGIPWKHIDYFNNQIIVDLVEQQHKGIIAILDDACMNVGKVTDEMFLEALNSKLGKHAHFSSRKLCASDKILEFDRDFRIRHYAGDVVYSVIGFIDKNKDTLFQDFKRLMYNSSNPVLKNMWPEGKLSITEVTKRPLTAATLFKNSMIALVDNLASKEPYYVRCIKPNDKKSPQIFDDERCRHQVEYLGLLENVRVRRAGFAFRQTYEKFLHRYKMISEFTWPNHDLPSDKEAVKKLIERCGFQDDVAYGKTKIFIRTPRTLFTLEELRAQMLIRIVLFLQKVWRGTLARMRYKRTKAALTIIRYYRRYKVKSYIHEVARRFHGVKTMRDYGKHVKWPSPPKVLRRFEEALQTIFNRWRASQLIKSIPASDLPQVRAKVAAVEMLKGQRADLGLQRAWEGNYLASKPDTPQTSGTFVPVANELKRKDKYMNVLFSCHVRKVNRFSKVEDRAIFVTDRHLYKMDPTKQYKVMKTIPLYNLTGLSVSNGKDQLVVFHTKDNKDLIVCLFSKQPTHESRIGELVGVLVNHFKRLREVRKLQTKSGS

SEQ ID NO: 4144 - protein, 880 aa, Artificial Sequence
  Synthetic polypeptide
MKRRSKDTCIVISGESGAGKTEASKYIMQYIAAITNPSQRAEVERVKNMLLKSNCVLEAFGNAKTNRNDNSSRFGKYMDINFDFKGDPIGGHINNYLLEKSRVIVQQPGERSFHSFYQLLQGGSEQMLRSLHLQKSLSSYNYIHVGAQLKSSINDAAEFRVVADAMKVIGFKPEEIQTVYKILAAILHLGNLKFVVDGDTPLIENGKVVSIIAELLSTKTDMVEKALLYRTVATGRDIIDKQHTEQEASYGRDAFAKAIYERLFCWIVTRINDIIEVKNYDTTIHGKNTVIGVLDIYGFEIFDNNSFEQFCINYCNEKLQQLFIQLVLKQEQEEYQREGIPWKHIDYFNNQIIVDLVEQQHKGIIAILDDACMNVGKVTDEMFLEALNSKLGKHAHFSSRKLCASDKILEFDRDFRIRHYAGDVVYSVIGFIDKNKDTLFQDFKRLMYNSSNPVLKNMWPEGKLSITEVTKRPLTAATLFKNSMIALVDNLASKEPYYVRCIKPNDKKSPQIFDDERCRHQVEYLGLLENVRVRRAGFAFRQTYEKFLHRYKMISEFTWPNHDLPSDKEAVKKLIERCGFQDDVAYGKTKIFIRTPRTLFTLEELRAQMLIRIVLFLQKVWRGTLARMRYKRTKAALTIIRYYRRYKVKSYIHEVARRFHGVKTMRDYGKHVKWPSPPKVLRRFEEALQTIFNRWRASQLIKSIPASDLPQVRAKVAAVEMLKGQRADLGLQRAWEGNYLASKPDTPQTSGTFVPVANELKRKDKYMNVLFSCHVRKVNRFSKVEDRAIFVTDRHLYKMDPTKQYKVMKTIPLYNLTGLSVSNGKDQLVVFHTKDNKDLIVCLFSKQPTHESRIGELVGVLVNHFKRLREVRKLQTKSGS

SEQ ID NO: 4145 - protein, 992 aa, Artificial Sequence
  Synthetic polypeptide
MAEQESLEFGKADFVLMDTVSMPEFMANLRLRFEKGRIYTFIGEVVVSVNPYKLLNIYGRDTIEQYKGRELYERPPHLFAIADAAYKAMKRRSKDTCIVISGESGAGKTEASKYIMQYIAAITNPSQRAEVERVKNMLLKSNCVLEAFGNAKTNRNDNSSRFGKYMDINFDFKGDPIGGHINNYLLEKSRVIVQQPGERSFHSFYQLLQGGSEQMLRSLHLQKSLSSYNYIHVGAQLKSSINDAAEFRVVADAMKVIGFKPEEIQTVYKILAAILHLGNLKFVVDGDTPLIENGKVVSIIAELLSTKTDMVEKALLYRTVATGRDIIDKQHTEQEASYGRDAFAKAIYERLFCWIVTRINDIIEVKNYDTTIHGKNTVIGVLDIYGFEIFDNNSFEQFCINYCNEKLQQLFIQLVLKQEQEEYQREGIPWKHIDYFNNQIIVDLVEQQHKGIIAILDDACMNVGKVTDEMFLEALNSKLGKHAHFSSRKLCASDKILEFDRDFRIRHYAGDVVYSVIGFIDKNKDTLFQDFKRLMYNSSNPVLKNMWPEGKLSITEVTKRPLTAATLFKNSMIALVDNLASKEPYYVRCIKPNDKKSPQIFDDERCRHQVEYLGLLENVRVRRAGFAFRQTYEKFLHRYKMISEFTWPNHDLPSDKEAVKKLIERCGFQDDVAYGKTKIFIRTPRTLFTLEELRAQMLIRIVLFLQKVWRGTLARMRYKRTKAALTIIRYYRRYKVKSYIHEVARRFHGVKTMRDYGKHVKWPSPPKVLRRFEEALQTIFNRWRASQLIKSIPASDLPQVRAKVAAVEMLKGQRADLGLQRAWEGNYLASKPDTPQTSGTFVPVANELKRKDKYMNVLFSCHVRKVNRFSKVEDRAIFVTDRHLYKMDPTKQYKVMKTIPLYNLTGLSVSNGKDQLVVFHTKDNKDLIVCLFSKQPTHESRIGELVGVLVNHFKRLPYSLRYNKIEIRSVNNPTVAFKCSSEWESYTSLSLF

SEQ ID NO: 4146 - protein, 904 aa, Artificial Sequence
  Synthetic polypeptide
MKRRSKDTCIVISGESGAGKTEASKYIMQYIAAITNPSQRAEVERVKNMLLKSNCVLEAFGNAKTNRNDNSSRFGKYMDINFDFKGDPIGGHINNYLLEKSRVIVQQPGERSFHSFYQLLQGGSEQMLRSLHLQKSLSSYNYIHVGAQLKSSINDAAEFRVVADAMKVIGFKPEEIQTVYKILAAILHLGNLKFVVDGDTPLIENGKVVSIIAELLSTKTDMVEKALLYRTVATGRDIIDKQHTEQEASYGRDAFAKAIYERLFCWIVTRINDIIEVKNYDTTIHGKNTVIGVLDIYGFEIFDNNSFEQFCINYCNEKLQQLFIQLVLKQEQEEYQREGIPWKHIDYFNNQIIVDLVEQQHKGIIAILDDACMNVGKVTDEMFLEALNSKLGKHAHFSSRKLCASDKILEFDRDFRIRHYAGDVVYSVIGFIDKNKDTLFQDFKRLMYNSSNPVLKNMWPEGKLSITEVTKRPLTAATLFKNSMIALVDNLASKEPYYVRCIKPNDKKSPQIFDDERCRHQVEYLGLLENVRVRRAGFAFRQTYEKFLHRYKMISEFTWPNHDLPSDKEAVKKLIERCGFQDDVAYGKTKIFIRTPRTLFTLEELRAQMLIRIVLFLQKVWRGTLARMRYKRTKAALTIIRYYRRYKVKSYIHEVARRFHGVKTMRDYGKHVKWPSPPKVLRRFEEALQTIFNRWRASQLIKSIPASDLPQVRAKVAAVEMLKGQRADLGLQRAWEGNYLASKPDTPQTSGTFVPVANELKRKDKYMNVLFSCHVRKVNRFSKVEDRAIFVTDRHLYKMDPTKQYKVMKTIPLYNLTGLSVSNGKDQLVVFHTKDNKDLIVCLFSKQPTHESRIGELVGVLVNHFKRLPYSLRYNKIEIRSVNNPTVAFKCSSEWESYTSLSLF

SEQ ID NO: 4147 - protein, 242 aa, Artificial Sequence
  Synthetic polypeptide
MSRIGGAGLPAAALTGPGRFRMAREEPAPAALAAAGQPGGGRGGERALQGPGVARRGRPSLSRAKLHGLRHMCAGRTAAGGSFQRRALWVLAFCTSFGLLLSWSSNRLLYWLSFPSHTRVHREWSRQLPFPAVTVCNNNPLRFPRLSKGDLYYAGHWLGLLLPNRTARPLVSELLRGDEPRRQWFRKLADFRLFLPPRHFEGISAAFMDRLGHQLEDMLLSCKYRGELCGPHNFSSPERTAR

SEQ ID NO: 4148 - protein, 33 aa, Artificial Sequence
  Synthetic polypeptide
MAEALRRIQVVHAFDIFQMLDVLQELRGTVAQQ

SEQ ID NO: 4149 - protein, 15 aa, Artificial Sequence
  Synthetic polypeptide
MLDVLQELRGTVAQQ

SEQ ID NO: 4150 - protein, 73 aa, Artificial Sequence
  Synthetic polypeptide
MAANVAHGLQQNVLYVDSNGGLTASRLLQLLQAKTQDEEEQAEALRRIQVVHAFDIFQMLDVLQELRGTVAQQ

SEQ ID NO: 4151 - protein, 192 aa, Artificial Sequence
  Synthetic polypeptide
MGVLRVGLCPGLTEEMIQLLRSHRIKTVVDLVSADLEEVAQKCGLSYKALVALRRVLLAQFSAFPVNGADLYEELKTSTAILSTGIGSLDKLLDAGLYTGEVTEIVGGPGSGKTQVCLCMAANVAHGLQQNVLYVDSNGGLTASRLLQLLQAKTQDEEEQAEALRRIQVVHAFDIFQMLDVLQELRGTVAQQ

SEQ ID NO: 4152 - protein, 147 aa, Artificial Sequence
  Synthetic polypeptide
MGVLRVGLCPGLTEEMIQLLRSHRIKTVVDLVSADLEEVAQKCGLSYKALVALRRVLLAQFSAFPVNGADLYEELKTSTAILSTGIGSLDKLLDAGLYTGEVTEIVGGPGSGKTQAEALRRIQVVHAFDIFQMLDVLQELRGTVAQQ

SEQ ID NO: 4153 - protein, 80 aa, Artificial Sequence
  Synthetic polypeptide
MGVLRVGLCPGLTEEMIQLLRSHRIKTVVDLVSADLEEVAQKCGLSYKAEALRRIQVVHAFDIFQMLDVLQELRGTVAQQ

SEQ ID NO: 4154 - protein, 212 aa, Artificial Sequence
  Synthetic polypeptide
MGVLRVGLCPGLTEEMIQLLRSHRIKTVVDLVSADLEEVAQKCGLSYKTWRAHSSGNLGGLQLPQVPAGRSWSGVRNALKKAGLGHGGTDGLSLNAFDERGTAVSTSRLDKLLDAGLYTGEVTEIVGGPGSGKTQVCLCMAANVAHGLQQNVLYVDSNGGLTASRLLQLLQAKTQDEEEQAEALRRIQVVHAFDIFQMLDVLQELRGTVAQQ

SEQ ID NO: 4155 - protein, 194 aa, Artificial Sequence
  Synthetic polypeptide
MTPSPTLGAASSSLLSPPAASAPVSSLGRVVDLVSADLEEVAQKCGLSYKALVALRRVLLAQFSAFPVNGADLYEELKTSTAILSTGIGSLDKLLDAGLYTGEVTEIVGGPGSGKTQVCLCMAANVAHGLQQNVLYVDSNGGLTASRLLQLLQAKTQDEEEQAEALRRIQVVHAFDIFQMLDVLQELRGTVAQQ

SEQ ID NO: 4156 - protein, 103 aa, Artificial Sequence
  Synthetic polypeptide
MGVLRVGLCPGLTEEMIQLLRSHRIKTVVDLVSADLEEVAQKCGLSYKALVALRRVLLAQFSAFPVNGADLYEELKTSTAILSTGIGRPGAVAHACDHSTLGG

SEQ ID NO: 4157 - protein, 105 aa, Artificial Sequence
  Synthetic polypeptide
MTPSPTLGAASSSLLSPPAASAPVSSLGRVVDLVSADLEEVAQKCGLSYKALVALRRVLLAQFSAFPVNGADLYEELKTSTAILSTGIGRPGAVAHACDHSTLGG

SEQ ID NO: 4158 - protein, 6 aa, Artificial Sequence
  Synthetic polypeptide
MQTWKR

SEQ ID NO: 4159 - protein, 407 aa, Artificial Sequence
  Synthetic polypeptide
MEANQCPLVVEPSYPDLVINVGEVTLGEENRKKLQKIQRDQEKERVMRAACALLNSGGGVIRMAKKVEHPVEMGLDLEQSLRELIQSSDLQAFFETKQQGRCFYIFVKSWSSGPFPEDRSVKPRLCSLSSSLYRRSETSVRSMDSREAFCFLKTKRKPKILEEGPFHKIHKGVYQELPNSDPADPNSDPADLIFQKDYLEYGEILPFPESQLVEFKQFSTKHFQEYVKRTIPEYVPAFANTGGGYLFIGVDDKSREVLGCAKENVDPDSLRRKIEQAIYKLPCVHFCQPQRPITFTLKIVNVLKRGELYGYACMIRVNPFCCAVFSEAPNSWIVEDKYVCSLTTEKWVGMMTDTDPDLLQLSEDFECQLSLSSGPPLSRPVYSKKGLEHKKELQQLLFSGCRDNQVV

SEQ ID NO: 4160 - protein, 416 aa, Artificial Sequence
  Synthetic polypeptide
MDLARKEFLRGNGLAAGKMNISIDLDTNYAELVLNVGRVTLGENNRKKMKDCQLRKQQNENVSRAVCALLNSGGGVIKAEVENKGYSYKKDGIGLDLENSFSNMLPFVPNFLDFMQNGNYFHIFVKSWSLETSGPQIATLSSSLYKRDVTSAKVMNASAALEFLKDMEKTGGRAYLRPEFPAKRACVDVQEESNMEALAADFFNRTELGYKEKLTFTESTHVEIKNFSTEKLLQRITEILPQYVSAFANTDGGYLFVGLNEDKEVIGFKAEKSYLTKLEEVTKNSIGKLPVHHFCVEKGTINYLCKFLGVYDKGRLCGYVYALRVERFCCAVFAKKPDSWHVKDNRVKQLTEKEWIQFMVDSEPVCEELPSPASTSSPVSQSYPLREYINFKIQPLRYHLPGTWMELEAITLSKLT

SEQ ID NO: 4161 - protein, 445 aa, Artificial Sequence
  Synthetic polypeptide
MAMKIMEKIRNVFHCEAHRILYICESQFLRNFIRKEFLRGNGLAAGKMNISIDLDTNYAELVLNVGRVTLGENNRKKMKDCQLRKQQNENVSRAVCALLNSGGGVIKAEVENKGYSYKKDGIGLDLENSFSNMLPFVPNFLDFMQNGNYFHIFVKSWSLETSGPQIATLSSSLYKRDVTSAKVMNASAALEFLKDMEKTGGRAYLRPEFPAKRACVDVQEESNMEALAADFFNRTELGYKEKLTFTESTHVEIKNFSTEKLLQRITEILPQYVSAFANTDGGYLFVGLNEDKEVIGFKAEKSYLTKLEEVTKNSIGKLPVHHFCVEKGTINYLCKFLGVYDKGRLCGYVYALRVERFCCAVFAKKPDSWHVKDNRVKQLTEKEWIQFMVDSEPVCEELPSPASTSSPVSQSYPLREYINFKIQPLRYHLPGTWMELEAITLSKLT

SEQ ID NO: 4162 - protein, 447 aa, Artificial Sequence
  Synthetic polypeptide
MQLSEGLAAHTRRAGKWKRTQVPLLGEECADMDLARKEFLRGNGLAAGKMNISIDLDTNYAELVLNVGRVTLGENNRKKMKDCQLRKQQNENVSRAVCALLNSGGGVIKAEVENKGYSYKKDGIGLDLENSFSNMLPFVPNFLDFMQNGNYFHIFVKSWSLETSGPQIATLSSSLYKRDVTSAKVMNASAALEFLKDMEKTGGRAYLRPEFPAKRACVDVQEESNMEALAADFFNRTELGYKEKLTFTESTHVEIKNFSTEKLLQRITEILPQYVSAFANTDGGYLFVGLNEDKEVIGFKAEKSYLTKLEEVTKNSIGKLPVHHFCVEKGTINYLCKFLGVYDKGRLCGYVYALRVERFCCAVFAKKPDSWHVKDNRVKQLTEKEWIQFMVDSEPVCEELPSPASTSSPVSQSYPLREYINFKIQPLRYHLPGTWMELEAITLSKLT

SEQ ID NO: 4163 - protein, 266 aa, Artificial Sequence
  Synthetic polypeptide
MTSCHIAEEHIQKVAIFGGTHGNELTGVFLVKHWLENGAEIQRTGLEVKPFITNPRAVKKCTRYIDCDLNRIFDLENLGKKMSEDLPYEVRRAQEINHLFGPKDSEDSYDIIFDLHNTTSNMGCTLILEDSRNNFLIQMFHYIKTSLAPLPCYVYLIEHPSLKYATTRSIAKYPVGIEVGPQPQGVLRADILDQMRKMIKHALDFIHHFNEGKEFPPCAIEVYKIIEKVDYPRDENGEIAAIIHPNLQAERGEEAAGSWERLVHKV

SEQ ID NO: 4164 - protein, 810 aa, Artificial Sequence
  Synthetic polypeptide
MLQQVNGHNPGSDGQAREYLREDLQEFLGGEVLLYKLDDLTRVNPVTLETVLRCLQARYMADTFYTNAGCTLVALNPFKPVPQLYSPELMREYHAAPQPQKLKPHVFTVGEQTYRNVKSLIEPVNQSIVVSGESGAGKTWTSRCLMKFYAVVATSPASWESHKIAERIEQRILNSNPVMEAFGNACTLRNNNSSRFGKFIQLQLNRAQQMTGAAVQTYLLEKTRVACQASSERNFHIFYQICKGASEDERLQWHLPEGAAFSWLPNPERSLEEDCFEVTREAMLHLGIDTPTQNNIFKVLAGLLHLGNIQFAASEDEAQPCQPMDDAKYSVRTAASLLGLPEDVLLEMVQIRTIRAGRQQQVFRKPCARAECDTRRDCLAKLIYARLFDWLVSVINSSICADTDSWTTFIGLLDVYGFESFPDNSLEQLCINYANEKLQQHFVAHYLRAQQEEYAVEGLEWSFINYQDNQPCLDLIEGSPISICSLINEECRLNRPSSAAQLQTRIETALAGSPCLGHNKLSREPSFIVVHYAGPVRYHTAGLVEKNKDPIPPELTRLLQQSQDPLLMGLFPTNPKEKTQEEPPGQSRAPVLTVVSKFKASLEQLLQVLHSTTPHYIRCIKPNSQGQAQTFLQEEVLSQLEACGLVETIHISAAGFPIRVSHRNFVERYKLLRRLHPCTSSGPDSPYPAKGLPEWCPHSEEATLEPLIQDILHTLPVLTQAAAITGDSAEAMPAPMHCGRTKVFMTDSMLELLECGRARVLEQCARCIQGGWRRHRHREQERQWRAVMLIQAGKVLERTQISNSGDIMAK

SEQ ID NO: 4165 - protein, 610 aa, Artificial Sequence
  Synthetic polypeptide
MLQQVNGHNPGSDGQAREYLREDLQEFLGGEVLLYKLDDLTRVNPVTLETVLRCLQARYMADTFYTNAGCTLVALNPFKPVPQLYSPELMREYHAAPQPQKLKPHVFTVGEQTYRNVKSLIEPVNQSIVVSGESGAGKTWTSRCLMKFYAVVATSPASWESHKIAERIEQRILNSNPVMEAFGNACTLRNNNSSRFGKFIQLQLNRAQQMTGAAVQTYLLEKTRVACQASSERNFHIFYQICKGASEDERLQWHLPEGAAFSWLPNPERSLEEDCFEVTREAMLHLGIDTPTQNNIFKVLAGLLHLGNIQFAASEDEAQPCQPMDDAKYSVRTAASLLGLPEDVLLEMVQIRTIRAGRQQQVFRKPCARAECDTRRDCLAKLIYARLFDWLVSVINSSICADTDSWTTFIGLLDVYGFESFPDNSLEQLCINYANEKLQLEACGLVETIHISAAGFPIRVSHRNFVERYKLLRRLHPCTSSGPDSPYPAKGLPEWCPHSEEATLEPLIQDILHTLPVLTQAAAITGDSAEAMPAPMHCGRTKVFMTDSMLELLECGRARVLEQCARCIQGGWRRHRHREQERQWRAVMLIQAGKVLERTQISNSGDIMAK

SEQ ID NO: 4166 - protein, 796 aa, Artificial Sequence
  Synthetic polypeptide
MLQQVNGHNPGSDGQAREYLREDLQEFLGGEVLLYKLDDLTRVNPVTLETVLRCLQARYMADTFYTNAGCTLVALNPFKPVPQLYSPELMREYHAAPQPQKLKPHVFTVGEQTYRNVKSLIEPVNQSIVVSGESGAGKTWTSRCLMKFYAVVATSPASWESHKIAERIEQRILNSNPVMEAFGNACTLRNNNSSRFGKFIQLQLNRAQQMTGAAVQTYLLEKTRVACQASSERNFHIFYQICKGASEDERLQWHLPEGAAFSWLPNPERSLEEDCFEVTREAMLHLGIDTPTQNNIFKVLAGLLHLGNIQFAASEDEAQPCQPMDDAKYSVRTAASLLGLPEDVLLEMVQIRTIRAGRQQQVFRKPCARAECDTRRDCLAKLIYARLFDWLVSVINSSICADTDSWTTFIGLLDVYGFESFPDNSLEQLCINYANEKLQQHFVAHYLRAQQEEYAVEGLEWSFINYQDNQPCLDLIEGSPISICSLINEECRLNRPSSAAQLQTRIETALAGSPCLGHNKLSREPSFIVVHYAGPVRYHTAGLVEKNKDPIPPELTRLLQQSQDPLLMGLFPTNPKEKTQEEPPGQSRAPVLTVVSKFKASLEQLLQVLHSTTPHYIRCIKPNSQGQAQTFLQEEVLSQLEACGLVETIHISAAGFPIRVSHRNFVERYKLLRRLHPCTSSGPDSPYPAKGLPEWCPHSEEATLEPLIQDILHTLPVLTQAAAITGDSAEAMPAPMHCGRTKVFMTDSMLELLECGRARVLEQCARCIQGGWRRHRHREQERQWRAVMLIQAVVLF

SEQ ID NO: 4167 - protein, 596 aa, Artificial Sequence
  Synthetic polypeptide
MLQQVNGHNPGSDGQAREYLREDLQEFLGGEVLLYKLDDLTRVNPVTLETVLRCLQARYMADTFYTNAGCTLVALNPFKPVPQLYSPELMREYHAAPQPQKLKPHVFTVGEQTYRNVKSLIEPVNQSIVVSGESGAGKTWTSRCLMKFYAVVATSPASWESHKIAERIEQRILNSNPVMEAFGNACTLRNNNSSRFGKFIQLQLNRAQQMTGAAVQTYLLEKTRVACQASSERNFHIFYQICKGASEDERLQWHLPEGAAFSWLPNPERSLEEDCFEVTREAMLHLGIDTPTQNNIFKVLAGLLHLGNIQFAASEDEAQPCQPMDDAKYSVRTAASLLGLPEDVLLEMVQIRTIRAGRQQQVFRKPCARAECDTRRDCLAKLIYARLFDWLVSVINSSICADTDSWTTFIGLLDVYGFESFPDNSLEQLCINYANEKLQLEACGLVETIHISAAGFPIRVSHRNFVERYKLLRRLHPCTSSGPDSPYPAKGLPEWCPHSEEATLEPLIQDILHTLPVLTQAAAITGDSAEAMPAPMHCGRTKVFMTDSMLELLECGRARVLEQCARCIQGGWRRHRHREQERQWRAVMLIQAVVLF

SEQ ID NO: 4168 - protein, 332 aa, Artificial Sequence
  Synthetic polypeptide
MLQQVNGHNPGSDGQAREYLREDLQEFLGGEVLLYKLDDLTRVNPVTLETVLRCLQARYMADTFYTNAGCTLVALNPFKPVPQLYSPELMREYHAAPQPQKLKPHVFTVGEQTYRNVKSLIEPVNQSIVVSGESGAGKTWTSRCLMKFYAVVATSPASWESHKIAERIEQRILNSNPVMEAFGNACTLRNNNSSRFGKFIQLQLNRAQQMTGAAVQTYLLEKTRVACQASSERNFHIFYQICKGASEDERLQWHLPEGAAFSWLPNPERSLEEDCFEVTREAMLHLGIDTPTQNNIFKVLAGLLHLGNIQFAASEDEAQPCQPMDDAKLPRE

SEQ ID NO: 4169 - protein, 336 aa, Artificial Sequence
  Synthetic polypeptide
MLQQVNGHNPGSDGQAREYLREDLQEFLGGEVLLYKLDDLTRVNPVTLETVLRCLQARYMADTFYTNAGCTLVALNPFKPVPQLYSPELMREYHAAPQPQKLKPHVFTVGEQTYRNVKSLIEPVNQSIVVSGESGAGKTWTSRCLMKFYAVVATSPASWESHKIAERIEQRILNSNPVMEAFGNACTLRNNNSSRFGKFIQLQLNRAQQMTGAAVQTYLLEKTRVACQASSERNFHIFYQICKGASEDERLQWHLPEGAAFSWLPNPERSLEEDCFEVTREAMLHLGIDTPTQNNIFKVLAGLLHLGNIQFAASEDEAQPCQPMDDAKFGQVMVPL

SEQ ID NO: 4170 - protein, 216 aa, Artificial Sequence
  Synthetic polypeptide
MALLSTVRGATWGRLVTRHFSHAARHGERPGGEELSRLLLDDLVPTSRLELLFGMTPCLLALQAARRSVARLLLQAGKAGLQGKRAELLRMAEARDIPVLRPRRQKLDTMCRYQVHQGVCMEVSPLRPRPWREAGEASPGDDPQQLWLVLDGIQDPRNFGAVLRSAHFLGVDKVITSRRNSCPLTPVVSKSSAGAMEVMDVFSTDDLTGFLQSWEP

SEQ ID NO: 4171 - protein, 21 aa, Artificial Sequence
  Synthetic polypeptide
MEVMDVFSTDDLTGFLQSWEP

SEQ ID NO: 4172 - protein, 272 aa, Artificial Sequence
  Synthetic polypeptide
MALLSTVRGATWGRLVTRHFSHAARHGERPGGEELSRLLLDDLVPTSRLELLFGMTPCLLALQAARRSVARLLLQAGKAGLQGKRAELLRMAEARDIPVLRPRRQKLDTMCRYQVHQGVCMEVSPLRPRPWREAGEASPGDDPQQLWLVLDGIQDPRNFGAVLRSAHFLGVDKVITSRRNSCPLTPVVSKSSAGAMEVMDVFSTDDLTGFLQTKAQQGWLVAGTVGCPSTEDPQSSEIPIMSCLEFLWERPTLLVLELGTLNEITHTKALST

SEQ ID NO: 4173 - protein, 77 aa, Artificial Sequence
  Synthetic polypeptide
MEVMDVFSTDDLTGFLQTKAQQGWLVAGTVGCPSTEDPQSSEIPIMSCLEFLWERPTLLVLELGTLNEITHTKALST

SEQ ID NO: 4174 - protein, 312 aa, Artificial Sequence
  Synthetic polypeptide
MALLSTVRGATWGRLVTRHFSHAARHGERPGGEELSRLLLDDLVPTSRLELLFGMTPCLLALQAARRSVARLLLQAGKAGLQGKRAELLRMAEARDIPVLRPRRQKLDTMCRYQVHQGVCMEVSPLRPRPWREAGEASPGDDPQQLWLVLDGIQDPRNFGAVLRSAHFLGVDKVITSRRNSCPLTPVVSKSSAGAMEVMDVFSTDDLTGFLQTKAQQGWLVAGTVGCPSTEDPQSSEIPIMSCLEFLWERPTLLVLGNEGSGLSQEVQASCQLLLTILPRRQLPPGLESLNVSVAAELGTLNEIMHTKALST

SEQ ID NO: 4175 - protein, 117 aa, Artificial Sequence
  Synthetic polypeptide
MEVMDVFSTDDLTGFLQTKAQQGWLVAGTVGCPSTEDPQSSEIPIMSCLEFLWERPTLLVLGNEGSGLSQEVQASCQLLLTILPRRQLPPGLESLNVSVAAELGTLNEIMHTKALST

SEQ ID NO: 4176 - protein, 312 aa, Artificial Sequence
  Synthetic polypeptide
MALLSTVRGATWGRLVTRHFSHAARHGERPGGEELSRLLLDDLVPTSRLELLFGMTPCLLALQAARRSVARLLLQAGKAGLQGKRAELLRMAEARDIPVLRPRRQKLDTMCRYQVHQGVCMEVSPLRPRPWREAGEASPGDDPQQLWLVLDGIQDPRNFGAVLRSAHFLGVDKVITSRRNSCPLTPVVSKSSAGAMEVMDVFSTDDLTGFLQTKAQQGWLVAGTVGCPSTEDPQSSEIPIMSCLEFLWERPTLLVLGNEGSGLSQEVQASCQLLLTILPRRQLPPGLESLNVSVAAELGTLNEITHTKALST

SEQ ID NO: 4177 - protein, 117 aa, Artificial Sequence
  Synthetic polypeptide
MEVMDVFSTDDLTGFLQTKAQQGWLVAGTVGCPSTEDPQSSEIPIMSCLEFLWERPTLLVLGNEGSGLSQEVQASCQLLLTILPRRQLPPGLESLNVSVAAELGTLNEITHTKALST

SEQ ID NO: 4178 - protein, 456 aa, Artificial Sequence
  Synthetic polypeptide
MWWSTLMSILRARSFWKWISTQTVRIIRAVRAHFGGIMDEPSPLAQPLELNQHSRFIIGSVSEDNSEDEISNLVKLDLLEEKEGSLSPASVGSDTLSDLGISSLQDGLALHIRSSMSGLHLVKQGRDRKKIDSQRDFTVASPAEFVTRFGGNKVIEKVLIANNGIAAVKCMRSIRRWSYEMFRNERAIRFVVMVTPEDLKANAEYIKMADHYVPVPGGPNNNNYANVELILDIAKRIPVQAVWAGWGHASENPKLPELLLKNGIAFMGPPSQAMWALGDKIASSIVAQTAGIPTLPWSGSGLRVDWQENDFSKRILNVPQELYEKGYVKDVDDGLQAAEEVGYPVMIKASEGGGGKGIRKVNNADDFPNLFRQVQAEVPGSPIFVMRLAKQSRHLEVQILADQYGNAISLFGRDCSVQRRHQKIIEEAPATIATPAVFEHMEQGWVLWLTPIIPAL

SEQ ID NO: 4179 - protein, 361 aa, Artificial Sequence
  Synthetic polypeptide
MEGSPEENKEMRYYMLQRSSMSGLHLVKQGRDRKKIDSQRDFTVASPAEFVTRFGGNKVIEKVLIANNGIAAVKCMRSIRRWSYEMFRNERAIRFVVMVTPEDLKANAEYIKMADHYVPVPGGPNNNNYANVELILDIAKRIPVQAVWAGWGHASENPKLPELLLKNGIAFMGPPSQAMWALGDKIASSIVAQTAGIPTLPWSGSGLRVDWQENDFSKRILNVPQELYEKGYVKDVDDGLQAAEEVGYPVMIKASEGGGGKGIRKVNNADDFPNLFRQVQAEVPGSPIFVMRLAKQSRHLEVQILADQYGNAISLFGRDCSVQRRHQKIIEEAPATIATPAVFEHMEQGWVLWLTPIIPAL

SEQ ID NO: 4180 - protein, 419 aa, Artificial Sequence
  Synthetic polypeptide
MDEPSPLAQPLELNQHSRFIIGSVSEDNSEDEISNLVKLDLLEEKEGSLSPASVGSDTLSDLGISSLQDGLALHIRSSMSGLHLVKQGRDRKKIDSQRDFTVASPAEFVTRFGGNKVIEKVLIANNGIAAVKCMRSIRRWSYEMFRNERAIRFVVMVTPEDLKANAEYIKMADHYVPVPGGPNNNNYANVELILDIAKRIPVQAVWAGWGHASENPKLPELLLKNGIAFMGPPSQAMWALGDKIASSIVAQTAGIPTLPWSGSGLRVDWQENDFSKRILNVPQELYEKGYVKDVDDGLQAAEEVGYPVMIKASEGGGGKGIRKVNNADDFPNLFRQVQAEVPGSPIFVMRLAKQSRHLEVQILADQYGNAISLFGRDCSVQRRHQKIIEEAPATIATPAVFEHMEQGWVLWLTPIIPAL

SEQ ID NO: 4181 - protein, 341 aa, Artificial Sequence
  Synthetic polypeptide
MSGLHLVKQGRDRKKIDSQRDFTVASPAEFVTRFGGNKVIEKVLIANNGIAAVKCMRSIRRWSYEMFRNERAIRFVVMVTPEDLKANAEYIKMADHYVPVPGGPNNNNYANVELILDIAKRIPVQAVWAGWGHASENPKLPELLLKNGIAFMGPPSQAMWALGDKIASSIVAQTAGIPTLPWSGSGLRVDWQENDFSKRILNVPQELYEKGYVKDVDDGLQAAEEVGYPVMIKASEGGGGKGIRKVNNADDFPNLFRQVQAEVPGSPIFVMRLAKQSRHLEVQILADQYGNAISLFGRDCSVQRRHQKIIEEAPATIATPAVFEHMEQGWVLWLTPIIPAL

SEQ ID NO: 4182 - protein, 384 aa, Artificial Sequence
  Synthetic polypeptide
MWWSTLMSILRARSFWKWISTQTVRIIRAVRAHFGGIMDEPSPLAQPLELNQHSRFIIGSVSEDNSEDEISNLVKLDLLEEKEGSLSPASVGSDTLSDLGISSLQDGLALHIRSSMSGLHLVKQGRDRKKIDSQRDFTVASPAEFVTRFGGNKVIEKVLIANNGIAAVKCMRSIRRWSYEMFRNERAIRFVVMVTPEDLKANAEYIKMADHYVPVPGGPNNNNYANVELILDIAKRIPVQAVWAGWGHASENPKLPELLLKNGIAFMGPPSQAMWALGDKIASSIVAQTAGIPTLPWSGSGLRVDWQENDFSKRILNVPQELYEKGYVKDVDDGLQAAEEVGYPVMIKASEGGGGKGIRKVNNADDFPNLFRQFPGLWIKRNCT

SEQ ID NO: 4183 - protein, 289 aa, Artificial Sequence
  Synthetic polypeptide
MEGSPEENKEMRYYMLQRSSMSGLHLVKQGRDRKKIDSQRDFTVASPAEFVTRFGGNKVIEKVLIANNGIAAVKCMRSIRRWSYEMFRNERAIRFVVMVTPEDLKANAEYIKMADHYVPVPGGPNNNNYANVELILDIAKRIPVQAVWAGWGHASENPKLPELLLKNGIAFMGPPSQAMWALGDKIASSIVAQTAGIPTLPWSGSGLRVDWQENDFSKRILNVPQELYEKGYVKDVDDGLQAAEEVGYPVMIKASEGGGGKGIRKVNNADDFPNLFRQFPGLWIKRNCT

SEQ ID NO: 4184 - protein, 347 aa, Artificial Sequence
  Synthetic polypeptide
MDEPSPLAQPLELNQHSRFIIGSVSEDNSEDEISNLVKLDLLEEKEGSLSPASVGSDTLSDLGISSLQDGLALHIRSSMSGLHLVKQGRDRKKIDSQRDFTVASPAEFVTRFGGNKVIEKVLIANNGIAAVKCMRSIRRWSYEMFRNERAIRFVVMVTPEDLKANAEYIKMADHYVPVPGGPNNNNYANVELILDIAKRIPVQAVWAGWGHASENPKLPELLLKNGIAFMGPPSQAMWALGDKIASSIVAQTAGIPTLPWSGSGLRVDWQENDFSKRILNVPQELYEKGYVKDVDDGLQAAEEVGYPVMIKASEGGGGKGIRKVNNADDFPNLFRQFPGLWIKRNCT

SEQ ID NO: 4185 - protein, 269 aa, Artificial Sequence
  Synthetic polypeptide
MSGLHLVKQGRDRKKIDSQRDFTVASPAEFVTRFGGNKVIEKVLIANNGIAAVKCMRSIRRWSYEMFRNERAIRFVVMVTPEDLKANAEYIKMADHYVPVPGGPNNNNYANVELILDIAKRIPVQAVWAGWGHASENPKLPELLLKNGIAFMGPPSQAMWALGDKIASSIVAQTAGIPTLPWSGSGLRVDWQENDFSKRILNVPQELYEKGYVKDVDDGLQAAEEVGYPVMIKASEGGGGKGIRKVNNADDFPNLFRQFPGLWIKRNCT

SEQ ID NO: 4186 - protein, 421 aa, Artificial Sequence
  Synthetic polypeptide
MVFRNVGRPPEEEDVEAAPEPGPSELLCPRHRCALDPKALPPGLALERTWGPAAGLEAQLAALGLGQPAGPGVKTVGGGCCPCPCPPQPPPPQPQPPAAAPQAGEDPTETSDALLVLEGLESEAESLETNSCSEEELSSPGRGGGGGGRLLLQPPGPELPPVPFPLQDLVPLGRLSRGEQQQQQQQQPPPPPPPPGPLRPLAGPSRKGSFKIRLSRLFRTKSCNGGSGGGDGTGKRPSGELAASAASLTDMGGSAGRELDAGRKPKLTRTQSAFSPVSFSPLFTGETVSLVDVDISQRGLTSPHPPTPPPPPRRSLSLLDAFPRIAPIRAAESLHSQPPQHLQCPLYRPDSSSFAASLRELEKCGWYWGPMNWEDAEMKLKGKPDGSFLVRDSSDPRYILSLSFRSQGITHHTRMEHYRGF

SEQ ID NO: 4187 - protein, 455 aa, Artificial Sequence
  Synthetic polypeptide
MVFRNVGRPPEEEDVEAAPEPGPSELLCPRHRCALDPKALPPGLALERTWGPAAGLEAQLAALGLGQPAGPGVKTVGGGCCPCPCPPQPPPPQPQPPAAAPQAGEDPTETSDALLVLEGLESEAESLETNSCSEEELSSPGRGGGGGGRLLLQPPGPELPPVPFPLQDLVPLGRLSRGEQQQQQQQQPPPPPPPPGPLRPLAGPSRKGSFKIRLSRLFRTKSCNGGSGGGDGTGKRPSGELAASAASLTDMGGSAGRELDAGRKPKLTRTQSAFSPVSFSPLFTGETVSLVDVDISQRGLTSPHPPTPPPPPRRSLSLLDDISGTLPTSVLVAPMGSSLQSFPLPPPPPPHAPDAFPRIAPIRAAESLHSQPPQHLQCPLYRPDSSSFAASLRELEKCGWYWGPMNWEDAEMKLKGKPDGSFLVRDSSDPRYILSLSFRSQGITHHTRMEHYRGF

SEQ ID NO: 4188 - protein, 63 aa, Artificial Sequence
  Synthetic polypeptide
RQEAFWRAGCFSCEPDRHGRLCGPGAGRGEETQVDKNSKCLFSGLLQPPVHRCISPDCSHPSS

SEQ ID NO: 4189 - protein, 138 aa, Artificial Sequence
  Synthetic polypeptide
MAAVRGLRVSVKAEAPAGPALGLPSPEAESGVDRGEPEPMEVEEGELEIVPVRRSLKELIPDTSRRYENKAGSFITGIDVTSKEAIEKKEQRAKRFHFRSEVNLAQRNVALDRDMMKKGVVAHACNPSTLGGQGRWIT

SEQ ID NO: 4190 - protein, 136 aa, Artificial Sequence
  Synthetic polypeptide
MRRDVNGVTKSRFEMFSNSDEAVINKKLPKELLLRIFSFLDVVTLCRCAQVSRAWNVLALDGSNWQRIDLFDFQRDIEGRVVENISKRCGGFLRKLSLRGCLGVGDNALRTFAQNCRNIEVLNLNGCTKTTDAQER

SEQ ID NO: 4191 - protein, 138 aa, Artificial Sequence
  Synthetic polypeptide
MAPSRDRLLHFGFKATMFSNSDEAVINKKLPKELLLRIFSFLDVVTLCRCAQVSRAWNVLALDGSNWQRIDLFDFQRDIEGRVVENISKRCGGFLRKLSLRGCLGVGDNALRTFAQNCRNIEVLNLNGCTKTTDAQER

SEQ ID NO: 4192 - protein, 138 aa, Artificial Sequence
  Synthetic polypeptide
MRRDVNGVTKSRFEMFSNSDEAVINKKLPKELLLRIFSFLDVVTLCRCAQVSRAWNVLALDGSNWQRIDLFDFQRDIEGRVVENISKRCGGFLRKLSLRGCLGVGDNALRTFAQNCRNIEVLNLNGCTKTTDALVKKE

SEQ ID NO: 4193 - protein, 140 aa, Artificial Sequence
  Synthetic polypeptide
MAPSRDRLLHFGFKATMFSNSDEAVINKKLPKELLLRIFSFLDVVTLCRCAQVSRAWNVLALDGSNWQRIDLFDFQRDIEGRVVENISKRCGGFLRKLSLRGCLGVGDNALRTFAQNCRNIEVLNLNGCTKTTDALVKKE

SEQ ID NO: 4194 - protein, 392 aa, Artificial Sequence
  Synthetic polypeptide
MSKLPRELTRDLERSLPAVASLGSSLSHSQSLSSHLLPPPEKRRAISDVRRTFCLFVTFDLLFISLLWIIELNTNTGIRKNLEQEIIQYNFKTSFFDIFVLAFFRFSGLLLGYAVLRLRHWWVIAVTTLVSSAFLIVKVILSELLSKGAFGYLLPIVSFVLAWLETWFLDFKVLPQEAEEERWYLAAQVAVARGPLLFSGALSEGQFYSPPESFAGSDNESDEEVAGKKSFSAQEREYIRQGKEATAVVDQILAQEENWKFEKNNEYGDTVYTIEVPFHGKTFILKTFLPCPAELVYQEVILQPERMVLWNKTVTACQILQRVEDNTLISYDVSAGAAGGVVSPRDFVNVRRIERRRDRYLSSGIATSHSAKPPTHKYVRMGLGVLSGAEGE

SEQ ID NO: 4195 - protein, 392 aa, Artificial Sequence
  Synthetic polypeptide
MSKLPRELTRDLERSLPAVASLGSSLSHSQSLSSHLLPPPEKRRAISDVRRTFCLFVTFDLLFISLLWIIELNTNTGIRKNLEQEIIQYNFKTSFFDIFVLAFFRFSGLLLGYAVLRLRHWSRRWCPVHSSLSRSSSLSCSAKGHLATCSPSSLLSSPGWRPGSLTSKSYPRKLKRSDSAPPGYLAAQVAVARGPLLFSGALSEGQFYSPPESFAGSDNESDEEVAGKKSFSAQEREYIRQGKEATAVVDQILAQEENWKFEKNNEYGDTVYTIEVPFHGKTFILKTFLPCPAELVYQEVILQPERMVLWNKTVTACQILQRVEDNTLISYDVSAGAAGGVVSPRDFVNVRRIERRRDRYLSSGIATSHSAKPPTHKYVRMGLGVLSGAEGE

SEQ ID NO: 4196 - protein, 374 aa, Artificial Sequence
  Synthetic polypeptide
MSKLPRELTRDLERSLPAVASLGSSLSHSQSLSSHLLPPPEKRRAISDVRRTFCLFVTFDLLFISLLWIIELNTNTGIRKNLEQEIIQYNFKTSFFDIFVLAFFRFSGLLLGYAVLRLRHWWVIALLSKGAFGYLLPIVSFVLAWLETWFLDFKVLPQEAEEERWYLAAQVAVARGPLLFSGALSEGQFYSPPESFAGSDNESDEEVAGKKSFSAQEREYIRQGKEATAVVDQILAQEENWKFEKNNEYGDTVYTIEVPFHGKTFILKTFLPCPAELVYQEVILQPERMVLWNKTVTACQILQRVEDNTLISYDVSAGAAGGVVSPRDFVNVRRIERRRDRYLSSGIATSHSAKPPTHKYVRMGLGVLSGAEGE

SEQ ID NO: 4197 - protein, 366 aa, Artificial Sequence
  Synthetic polypeptide
MSKLPRELTRDLERSLPAVASLGSSLSHSQSLSSHLLPPPEKRRAISDVRRTFCLFVTFDLLFISLLWIIELNVLAFFRFSGLLLGYAVLRLRHWWVIAVTTLVSSAFLIVKVILSELLSKGAFGYLLPIVSFVLAWLETWFLDFKVLPQEAEEERWYLAAQVAVARGPLLFSGALSEGQFYSPPESFAGSDNESDEEVAGKKSFSAQEREYIRQGKEATAVVDQILAQEENWKFEKNNEYGDTVYTIEVPFHGKTFILKTFLPCPAELVYQEVILQPERMVLWNKTVTACQILQRVEDNTLISYDVSAGAAGGVVSPRDFVNVRRIERRRDRYLSSGIATSHSAKPPTHKYVRMGLGVLSGAEGE

SEQ ID NO: 4198 - protein, 37 aa, Artificial Sequence
  Synthetic polypeptide
TTVASVSCTAQPWSPTTQTRLSPCPIPRAGIHSAPAV

SEQ ID NO: 4199 - protein, 368 aa, Artificial Sequence
  Synthetic polypeptide
MKLRLPASPETHLDMLRHLYQGCQVVQGNLELTYLPTNASLSFLQDIQEVQGYVLIAHNQVRQVPLQRLRIVRGTQLFEDNYALAVLDNGDPLNNTTPVTGASPGGLRELQLRSLTEILKGGVLIQRNPQLCYQDTILWKDIFHKNNQLALTLIDTNRSRACHPCSPMCKGSRCWGESSEDCQSLTRTVCAGGCARCKGPLPTDCCHEQCAAGCTGPKHSDCLACLHFNHSGICELHCPALVTYNTDTFESMPNPEGRYTFGASCVTACPYNYLSTDVGSCTLVCPLHNQEVTAEDGTQRCEKCSKPCARVCYGLGMEHLREVRAVTSANIQEFAGCKKIFGSLAFLPESFDGLGDRVRPCLKKKKKK

SEQ ID NO: 4200 - protein, 383 aa, Artificial Sequence
  Synthetic polypeptide
MPRGSWKPQVCTGTDMKLRLPASPETHLDMLRHLYQGCQVVQGNLELTYLPTNASLSFLQDIQEVQGYVLIAHNQVRQVPLQRLRIVRGTQLFEDNYALAVLDNGDPLNNTTPVTGASPGGLRELQLRSLTEILKGGVLIQRNPQLCYQDTILWKDIFHKNNQLALTLIDTNRSRACHPCSPMCKGSRCWGESSEDCQSLTRTVCAGGCARCKGPLPTDCCHEQCAAGCTGPKHSDCLACLHFNHSGICELHCPALVTYNTDTFESMPNPEGRYTFGASCVTACPYNYLSTDVGSCTLVCPLHNQEVTAEDGTQRCEKCSKPCARVCYGLGMEHLREVRAVTSANIQEFAGCKKIFGSLAFLPESFDGLGDRVRPCLKKKKKK

SEQ ID NO: 4201 - protein, 122 aa, Artificial Sequence
  Synthetic polypeptide
MELAALCRWGLLLALLPPGAASTQDNYLSTDVGSCTLVCPLHNQEVTAEDGTQRCEKCSKPCARVCYGLGMEHLREVRAVTSANIQEFAGCKKIFGSLAFLPESFDGLGDRVRPCLKKKKKK

SEQ ID NO: 4202 - protein, 398 aa, Artificial Sequence
  Synthetic polypeptide
MELAALCRWGLLLALLPPGAASTQVCTGTDMKLRLPASPETHLDMLRHLYQGCQVVQGNLELTYLPTNASLSFLQDIQEVQGYVLIAHNQVRQVPLQRLRIVRGTQLFEDNYALAVLDNGDPLNNTTPVTGASPGGLRELQLRSLTEILKGGVLIQRNPQLCYQDTILWKDIFHKNNQLALTLIDTNRSRACHPCSPMCKGSRCWGESSEDCQSLTRTVCAGGCARCKGPLPTDCCHEQCAAGCTGPKHSDCLACLHFNHSGICELHCPALVTYNTDTFESMPNPEGRYTFGASCVTACPYNYLSTDVGSCTLVCPLHNQEVTAEDGTQRCEKCSKPCARVCYGLGMEHLREVRAVTSANIQEFAGCKKIFGSLAFLPESFDGLGDRVRPCLKKKKKK

SEQ ID NO: 4203 - protein, 265 aa, Artificial Sequence
  Synthetic polypeptide
MARRFQEELAAFLFEYDTPRMVLVRNKKVGVIFRLIQLVVLVYVIGWVFLYEKGYQTSSGLISSVSVKLKGLAVTQLPGLGPQVWDVADYVFPAQGDNSFVVMTNFIVTPKQTQGYCAEHPEGGICKEDSGCTPGKAKRKAQGIRTGKCVAFNDTVKTCEIFGWCPVEVDDDIPRPALLREAENFTLFIKNSISFPRFKVNRRNLVEEVNAAHMKTCLFHKTLHPLCPVFQLGYVVQESGQNFSTLAEKVLAWNWHEGGAQNERM

SEQ ID NO: 4204 - protein, 452 aa, Artificial Sequence
  Synthetic polypeptide
MKQEGSARRRGADKAKPPPGGGEQEPPPPPAPQDVEMKEEAATGGGSTGEADGKTAAAAAEHSQRELDTVTLEDIKEHVKQLEKAVSGKEPRFVLRALRMLPSTSRRLNHYVLYKAVQGFFTSNNATRDFLLPFLEEPMDTEADLQFRPRTGKAASTPLLPEVEAYLQLLVVIFMMNSKRYKEAQKISDDLMQKISTQNRRALDLVAAKCYYYHARVYEFLDKLDVVRSFLHARLRTATLRHDADGQATLLNLLLRNYLHYSLYDQAEKLVSKSVFPEQANNNEWARYLYYTGRIKAIQLEYSEARRTMTNALRKAPQHTAVGFKQTVHKLLIVVELLLGEIPDRLQFRQPSLKRSLMPYFLLTQAVRTGNLAKFNQVLDQFGEKFQADGTYTLIIRLRHNVIKTGVRMISLSYSRISLADIAQKLQLDSPEDAEFIVAKSETPSQKKKKRR

SEQ ID NO: 4205 - protein, 314 aa, Artificial Sequence
  Synthetic polypeptide
MDTEADLQFRPRTGKAASTPLLPEVEAYLQLLVVIFMMNSKRYKEAQKISDDLMQKISTQNRRALDLVAAKCYYYHARVYEFLDKLDVVRSFLHARLRTATLRHDADGQATLLNLLLRNYLHYSLYDQAEKLVSKSVFPEQANNNEWARYLYYTGRIKAIQLEYSEARRTMTNALRKAPQHTAVGFKQTVHKLLIVVELLLGEIPDRLQFRQPSLKRSLMPYFLLTQAVRTGNLAKFNQVLDQFGEKFQADGTYTLIIRLRHNVIKTGVRMISLSYSRISLADIAQKLQLDSPEDAEFIVAKSETPSQKKKKRR

SEQ ID NO: 4206 - protein, 1423 aa, Artificial Sequence
  Synthetic polypeptide
MEVSPLQPVNENMQVNKIKKNEDAKKRLSVERIYQKKTQLEHILLRPDTYIGSVELVTQQMWVYDEDVGINYREVTFVPGLYKIFDEILVNAADNKQRDPKMSCIRVTIDPENNLISIWNNGKGIPVVEHKVEKMYVPALIFGQLLTSSNYDDDEKKVTGGRNGYGAKLCNIFSTKFTVETASREYKKMFKQTWMDNMGRAGEMELKPFNGEDYTCITFQPDLSKFKMQSLDKDIVALMVRRAYDIAGSTKDVKVFLNGNKLPVKGFRSYVDMYLKDKLDETGNSLKVIHEQVNHRWEVCLTMSEKGFQQISFVNSIATSKGGRHVDYVADQIVTKLVDVVKKKNKGGVAVKAHQVKNHMWIFVNALIENPTFDSQTKENMTLQPKSFGSTCQLSEKFIKAAIGCGIVESILNWVKFKAQVQLNKKCSAVKHNRIKGIPKLDDANDAGGRNSTECTLILTEGDSAKTLAVSGLGVVGRDKYGVFPLRGKILNVREASHKQIMENAEINNIIKIVGLQYKKNYEDEDSLKTLRYGKIMIMTDQDQDGSHIKGLLINFIHHNWPSLLRHRFLEEFITPIVKVSKNKQEMAFYSLPEFEEWKSSTPNHKKWKVKYYKGLGTSTSKEAKEYFADMKRHRIQFKYSGPEDDAAISLAFSKKQIDDRKEWLTNFMEDRRQRKLLGLPEDYLYGQTTTYLTYNDFINKELILFSNSDNERSIPSMVDGLKPGQRKVLFTCFKRNDKREVKVAQLAGSVAEMSSYHHGEMSLMMTIINLAQNFVGSNNLNLLQPIGQFGTRLHGGKDSASPRYIFTMLSSLARLLFPPKDDHTLKFLYDDNQRVEPEWYIPIIPMVLINGAEGIGTGWSCKIPNFDVREIVNNIRRLMDGEEPLPMLPSYKNFKGTIEELAPNQYVISGEVAILNSTTIEISELPVRTWTQTYKEQVLEPMLNGTEKTPPLITDYREYHTDTTVKFVVKMTEEKLAEAERVGLHKVFKLQTSLTCNSMVLFDHVGCLKKYDTVLDILRDFFELRLKYYGLRKEWLLGMLGAESAKLNNQARFILEKIDGKIIIENKPKKELIKVLIQRGYDSDPVKAWKEAQQKVPDEEENEESDNEKETEKSDSVTDSGPTFNYLLDMPLWYLTKEKKDELCRLRNEKEQELDTLKRKSPSDLWKEDLATFIEELEAVEAKEKQDEQVGLPGKGGKAKGKKTQMAEVLPSPRGQRVIPRITIEMKAEAEKKNKKKIKNENTEGSPQEDGVELEGLKQRLEKKQKREPGTKTKKQTTLAFKPIKKGKKRNPWSDSESDRSSDESNFDVPPRETEPRRAATKTKFTMDLDSDEDFSDFDEKTDDEDFVPSDASPPKTKTSPKLSNKELKPQKSVVSDLEADDVKGSVPLSSSPPATHFPDETEITNPVPKKNVTVKKTAAKI

SEQ ID NO: 4207 - protein, 1440 aa, Artificial Sequence
  Synthetic polypeptide
MEVSPLQPVNENMQVNKIKKNEDAKKRLSVERIYQKKTQLEHILLRPDTYIGSVELVTQQMWVYDEDVGINYREVTFVPGLYKIFDEILVNAADNKQRDPKMSCIRVTIDPENNLISIWNNGKGIPVVEHKVEKMYVPALIFGQLLTSSNYDDDEKKVTGGRNGYGAKLCNIFSTKFTVETASREYKKMFKQTWMDNMGRAGEMELKPFNGEDYTCITFQPDLSKFKMQSLDKDIVALMVRRAYDIAGSTKDVKVFLNGNKLPVKGFRSYVDMYLKDKLDETGNSLKVIHEQVNHRWEVCLTMSEKGFQQISFVNSIATSKGGRHVDYVADQIVTKLVDVVKKKNKGGVAVKAHQVKNHMWIFVNALIENPTFDSQTKENMTLQPKSFGSTCQLSEKFIKAAIGCGIVESILNWVKFKAQVQLNKKCSAVKHNRIKGIPKLDDANDAGGRNSTECTLILTEGDSAKTLAVSGLGVVGRDKYGVFPLRGKILNVREASHKQIMENAEINNIIKIVGLQYKKNYEDEDSLKTLRYGKIMIMTDQDQDGSHIKGLLINFIHHNWPSLLRHRFLEEFITPIVKVSKNKQEMAFYSLPEFEEWKSSTPNHKKWKVKYYKGLGTSTSKEAKEYFADMKRHRIQFKYSGPEDDAAISLAFSKKQIDDRKEWLTNFMEDRRQRKLLGLPEDYLYGQTTTYLTYNDFINKELILFSNSDNERSIPSMVDGLKPGQRKVLFTCFKRNDKREVKVAQLAGSVAEMSSYHHGEMSLMMTIINLAQNFVGSNNLNLLQPIGQFGTRLHGGKDSASPRYIFTMLSSLARLLFPPKDDHTLKFLYDDNQRVEPEWYIPIIPMVLINGAEGIGTGWSCKIPNFDVREIVNNIRRLMDGEEPLPMLPSYKNFKGTIEELAPNQYVISGEVAILNSTTIEISELPVRTWTQTYKEQVLEPMLNGTEKTPPLITDYREYHTDTTVKFVVKMTEEKLAEAERVGLHKVFKLQTSLTCNSMVLFDHVGCLKKYDTVLDILRDFFELRLKYYGLRKEWLLGMLGAESAKLNNQARFILEKIDGKIIIENKPKKELIKVLIQRGYDSDPVKAWKEAQQKVPDEEENEESDNEKETEKSDSVTDSGPTFNYLLDMPLWYLTKEKKDELCRLRNEKEQELDTLKRKSPSDLWKEDLATFIEELEAVEAKEKQDEQVGLPGKGGKAKGKKTQMAEVLPSPRGQRVIPRITIEMKAEAEKKNKKKIKNENTEGSPQEDGVELEGLKQRLEKKQKREPGTKTKKQTTLAFKPIKKGKKRNPWSDSESDRSSDESNFDVPPRETEPRRAATKTKFTMDLDSDEDFSDFDEKTDDEDFVPSDASPPKTKTSPKLSNKELKPQKSVVSDLEADDVKGSVPLSSSPPATHFPDETEITNPVPKKNVTVKKTAAKITDQTPCSTLFPPSHYCT

SEQ ID NO: 4208 - protein, 1255 aa, Artificial Sequence
  Synthetic polypeptide
MEVSPLQPVNENMQVNKIKKNEDAKKRLSVERIYQKKTQLEHILLRPDTYIGSVELVTQQMWVYDEDVGINYREVTFVPGLYKIFDEILVNAADNKQRDPKMSCIRVTIDPENNLISIWNNGKGIPVVEHKVEKMYVPALIFGQLLTSSNYDDDEKKVTGGRNGYGAKLCNIFSTKFTVETASREYKKMFKQTWMDNMGRAGEMELKPFNGEDYTCITFQPDLSKFKMQSLDKDIVALMVRRAYDIAGSTKDVKVFLNGNKLPVKGFRSYVDMYLKDKLDETGNSLKVIHEQVNHRWEVCLTMSEKGFQQISFVNSIATSKGGRHVDYVADQIVTKLVDVVKKKNKGGVAVKAHQVKNHMWIFVNALIENPTFDSQTKENMTLQPKSFGSTCQLSEKFIKAAIGCGIVESILNWVKFKAQVQLNKKCSAVKHNRIKGIPKLDDANDAGGRNSTECTLILTEGDSAKTLAVSGLGVVGRDKYGVFPLRGKILNVREASHKQIMENAEINNIIKIVGLQYKKNYEDEDSLKTLRYGKIMIMTDQDQDGSHIKGLLINFIHHNWPSLLRHRFLEEFITPIVKVSKNKQEMAFYSLPEFEEWKSSTPNHKKWKVKYYKGLGTSTSKEAKEYFADMKRHRIQFKYSGPEDDAAISLAFSKKQIDDRKEWLTNFMEDRRQRKLLGLPEDYLYGQTTTYLTYNDFINKELILFSNSDNERSIPSMVDGLKPGQRKVLFTCFKRNDKREVKVAQLAGSVAEMSSYHHGEMSLMMTIINLAQNFVGSNNLNLLQPIGQFGTRLHGGKDSASPRYIFTMLSSLARLLFPPKDDHTLKFLYDDNQRVEPEWYIPIIPMVLINGAEGIGTGWSCKIPNFDVREIVNNIRRLMDGEEPLPMLPSYKNFKGTIEELAPNQYVISGEVAILNSTTIEISELPVRTWTQTYKEQVLEPMLNGTEKTPPLITDYREYHTDTTVKFVVKMTEEKLAEAERVGLHKVFKLQTSLTCNSMVLFDHVGCLKKYDTVLDILRDFFELRLKYYGLRKEWLLGMLGAESAKLNNQARFILEKIDGKIIIENKPKKELIKVLIQRGYDSDPVKAWKEAQQKVPDEEENEESDNEKETEKSDSVTDSGPTFNYLLDMPLWYLTKEKKDELCRLRNEKEQELDTLKRKSPSDLWKEDLATFIEELEAVEAKEKQDEQVGLPGKGGKAKGKKTQMAEVLPSPRGQRVIPRITIEMKAEAEKKNKKKIKAGMVAGACNPSYSGD

SEQ ID NO: 4209 - protein, 88 aa, Artificial Sequence
  Synthetic polypeptide
MEAAHLLPAADVLRHFSVTAEGGLSPAQVTGARERYGPNELPSEEGKSLWELVLEQFEDLLVRILLLAALVSFPGVVVHACNPIYPGG

SEQ ID NO: 4210 - protein, 128 aa, Artificial Sequence
  Synthetic polypeptide
MSAIQNLHSFDPFADASKGDDLLPAGTEDYIHIRIQQRNGRKTLTTVQGIADDYDKKKLVKAFKKKFACNGTVIEHPEYGEVIQLQGDQRKNICQFLVEFISYCWCILCVAQDNSSSVAQGSEKIRHP

SEQ ID NO: 4211 - protein, 76 aa, Artificial Sequence
  Synthetic polypeptide
DYDKKKLVKAFKKKFACNGTVIEHPEYGEVIQLQGDQRKNICQFLVEFISYCWCILCVAQDNSSSVAQGSEKIRHP

SEQ ID NO: 4212 - protein, 615 aa, Artificial Sequence
  Synthetic polypeptide
MEVMNLMEQPIKVTEWQQTYTYDSGIHSGANTCVPSVSSKGIMEEDEACGRQYTLKKTTTYTQGVPPSQGDLEYQMSTTARAKRVREAMCPGVSGEDSSLLLATQVEGQATNLQRLAEPSQLLKSAIVHLINYQDDAELATRALPELTKLLNDEDPVVVTKAAMIVNQLSKKEASRRALMGSPQLVAAVVRTMQNTSDLDTARCTTSILHNLSHHREGLLAIFKSGGIPALVRMLSSPVESVLFYAITTLHNLLLYQEGAKMAVRLADGLQKMVPLLNKNNPKFLAITTDCLQLLAYGNQESKLIILANGGPQALVQIMRNYSYEKLLWTTSRVLKVLSVCPSNKPAIVEAGGMQALGKHLTSNSPRLVQNCLWTLRNLSDVATKQEGLESVLKILVNQLSVDDVNVLTCATGTLSNLTCNNSKNKTLVTQNSGVEALIHAILRAGDKDDITEPAVCALRHLTSRHPEAEMAQNSVRLNYGIPAIVKLLNQPNQWPLVKATIGLIRNLALCPANHAPLQEAAVIPRLVQLLVKAHQDAQRHVAAGTQQPYTDGVRMEEIVEGCTGALHILARDPMNRMEIFRLNTIPLFVQKEPKKAFLKNQQTGRICASTITDK

SEQ ID NO: 4213 - protein, 611 aa, Artificial Sequence
  Synthetic polypeptide
MSAKAISEQTGKELLYKFICTTSAIQNRFKYARVTPDTDWARLLQDHPWLLSQNLVVKPDQLIKRRGKLGLVGVNLTLDGVKSWLKPRLGQEATVGKATGFLKNFLIEPFVPHSQAEEFYVCIYATREGDYVLFHHEGGVDVGDVDAKAQKLLVGVDEKLNPEDIKKHLLVHAPEDKKEILASFISGLFNFYEDLYFTYLEINPLVVTKDGVYVLDLAAKVDATADYICKVKWGDIEFPPPFGREAYPEEAYIADLDAKSGASLKLTLLNPKGRIWTMVAGGGASVVYSDTICDLGGVNELANYGEYSGAPSEQQTYDYAKTILSLMTREKHPDGKILIIGGSIANFTNVAATFKGIVRAIRDYQGPLKEHEVTIFVRRGGPNYQEGLRVMGEVGKTTGIPIHVFGTETHMTAIVGMALGHRPIPNQPPTAAHTANFLLNASGSTSTPAPSRTASFSESRADEVAPAKKAKPAMPQDSVPSPRSLQGKSTTLFSRHTKAIVWGMQTRAVQGMLDFDYVCSRDEPSVAAMVYPFTGDHKQKFYWGHKEILIPVFKNMADAMRKHPEVDVLINFASLRSAYDSTMETMNYAQDFGRQRQEDCLKPRVQDQPKQ

SEQ ID NO: 4214 - protein, 601 aa, Artificial Sequence
  Synthetic polypeptide
MSAKAISEQTGKELLYKFICTTSAIQNRFKYARVTPDTDWARLLQDHPWLLSQNLVVKPDQLIKRRGKLGLVGVNLTLDGVKSWLKPRLGQEATVGKATGFLKNFLIEPFVPHSQAEEFYVCIYATREGDYVLFHHEGGVDVGDVDAKAQKLLVGVDEKLNPEDIKKHLLVHAPEDKKEILASFISGLFNFYEDLYFTYLEINPLVVTKDGVYVLDLAAKVDATADYICKVKWGDIEFPPPFGREAYPEEAYIADLDAKSGASLKLTLLNPKGRIWTMVAGGGASVVYSDTICDLGGVNELANYGEYSGAPSEQQTYDYAKTILSLMTREKHPDGKILIIGGSIANFTNVAATFKGIVRAIRDYQGPLKEHEVTIFVRRGGPNYQEGLRVMGEVGKTTGIPIHVFGTETHMTAIVGMALGHRPIPNQPPTAAHTANFLLNASGSTSTPAPSRTASFSESRADEVAPAKKAKPAMPQGKSTTLFSRHTKAIVWGMQTRAVQGMLDFDYVCSRDEPSVAAMVYPFTGDHKQKFYWGHKEILIPVFKNMADAMRKHPEVDVLINFASLRSAYDSTMETMNYAQDFGRQRQEDCLKPRVQDQPKQ

SEQ ID NO: 4215 - protein, 340 aa, Artificial Sequence
  Synthetic polypeptide
MSAKAISEQTGKELLYKFICTTSAIQNRFKYARVTPDTDWARLLQDHPWLLSQNLVVKPDQLIKRRGKLGLVGVNLTLDGVKSWLKPRLGQEATGIVRAIRDYQGPLKEHEVTIFVRRGGPNYQEGLRVMGEVGKTTGIPIHVFGTETHMTAIVGMALGHRPIPNQPPTAAHTANFLLNASGSTSTPAPSRTASFSESRADEVAPAKKAKPAMPQGKSTTLFSRHTKAIVWGMQTRAVQGMLDFDYVCSRDEPSVAAMVYPFTGDHKQKFYWGHKEILIPVFKNMADAMRKHPEVDVLINFASLRSAYDSTMETMNYAQDFGRQRQEDCLKPRVQDQPKQ

SEQ ID NO: 4216 - protein, 180 aa, Artificial Sequence
  Synthetic polypeptide
MAGRGGAARPNGPAAGNKICQFKLVLLGESAVGKSSLVLRFVKGQFHEYQESTIGAAFLTQTVCLDDTTVKFEIWDTAGQERYHSLAPMYYRGAQAAIVVYDITNTDTFARAKNWVKELQRQASPNIVIALAGNKADLASKRAVEFQEAQAYADDNSLLFMETSAKTAMNVNEIFMAIVS

SEQ ID NO: 4217 - protein, 213 aa, Artificial Sequence
  Synthetic polypeptide
MELSWRSPSPLSASLHSTSPHPHALWTTTAGRAMAGRGGAARPNGPAAGNKICQFKLVLLGESAVGKSSLVLRFVKGQFHEYQESTIGAAFLTQTVCLDDTTVKFEIWDTAGQERYHSLAPMYYRGAQAAIVVYDITNTDTFARAKNWVKELQRQASPNIVIALAGNKADLASKRAVEFQEAQAYADDNSLLFMETSAKTAMNVNEIFMAIVS

SEQ ID NO: 4218 - protein, 111 aa, Artificial Sequence
  Synthetic polypeptide
VKFEIWDTAGQERYHSLAPMYYRGAQAAIVVYDITNTDTFARAKNWVKELQRQASPNIVIALAGNKADLASKRAVEFQEAQAYADDNSLLFMETSAKTAMNVNEIFMAIVS

SEQ ID NO: 4219 - protein, 178 aa, Artificial Sequence
  Synthetic polypeptide
MAGRGGAARPNGPAAGNKICQFKLVLLGESAVGKSSLVLRFVKGQFHEYQESTIGAAFLTQTVCLDDTTVKFEIWDTAGQERYHSLAPMYYRGAQAAIVVYDITNTDTFARAKNWVKELQRQASPNIVIALAGNKADLASKRAVEFQCLGRLEWEDHLRPGVRDQPRRHSKTLSLQKI

SEQ ID NO: 4220 - protein, 211 aa, Artificial Sequence
  Synthetic polypeptide
MELSWRSPSPLSASLHSTSPHPHALWTTTAGRAMAGRGGAARPNGPAAGNKICQFKLVLLGESAVGKSSLVLRFVKGQFHEYQESTIGAAFLTQTVCLDDTTVKFEIWDTAGQERYHSLAPMYYRGAQAAIVVYDITNTDTFARAKNWVKELQRQASPNIVIALAGNKADLASKRAVEFQCLGRLEWEDHLRPGVRDQPRRHSKTLSLQKI

SEQ ID NO: 4221 - protein, 109 aa, Artificial Sequence
  Synthetic polypeptide
VKFEIWDTAGQERYHSLAPMYYRGAQAAIVVYDITNTDTFARAKNWVKELQRQASPNIVIALAGNKADLASKRAVEFQCLGRLEWEDHLRPGVRDQPRRHSKTLSLQKI

SEQ ID NO: 4222 - protein, 146 aa, Artificial Sequence
  Synthetic polypeptide
MGELFRSEEMTLAQLFLQSEAAYCCVSELGELGKVQFRDLNPDVNVFQRKFVNEVRRCEEMDRKLRFVEKEIRKANIPIMDTGENPEVPFPRDMIDLEANFEKIENELKEINTNQEALKRNFLELTELKFILRKTQQFFDEAGRGG

SEQ ID NO: 4223 - protein, 87 aa, Artificial Sequence
  Synthetic polypeptide
MGELFRSEEMTLAQLFLQSEAAYCCVSELGELGKVQFRDANFEKIENELKEINTNQEALKRNFLELTELKFILRKTQQFFDEAGRGG

SEQ ID NO: 4224 - protein, 72 aa, Artificial Sequence
  Synthetic polypeptide
ANIPIMDTGENPEVPFPRDMIDLEANFEKIENELKEINTNQEALKRNFLELTELKFILRKTQQFFDEAGRGG

SEQ ID NO: 4225 - protein, 37 aa, Artificial Sequence
  Synthetic polypeptide
RPPRGCTATCATSVAATWPGPALSCACRGHCQPCRGS

SEQ ID NO: 4226 - protein, 147 aa, Artificial Sequence
  Synthetic polypeptide
MEAVAVAAAVGVLLLAGAGGAAGDEAREAAAVRALVARLLGPGPAADFSVSVERALAAKPGLDTYSLGGGGAARVRVRGSTGVAAAAGLHRYLRDFCGCHVAWSGSQLRLPRPLPAVPGELTEATPNRASAGPPEKRKEDAYRAVLL

SEQ ID NO: 4227 - protein, 48 aa, Artificial Sequence
  Synthetic polypeptide
RGAAPLPARLLWLPRGLVRLSAAPAAATASRAGGADRGHAQQSLGWPT

SEQ ID NO: 4228 - protein, 134 aa, Artificial Sequence
  Synthetic polypeptide
MPREIITLQLGQCGNQIGFEFWKQLCAEHGISPEGIVEEFATEGTDRKDVFFYQADDEHYIPRAVLLDLEPRVIHSILNSPYAKLYNPENIYLSEHGGGAGNNWASGFSQGEKIHEDIFDIIDREADGSDSLED

SEQ ID NO: 4229 - protein, 136 aa, Artificial Sequence
  Synthetic polypeptide
MPREIITLQLGQCGNQIGFEFWKQLCAEHGISPEGIVEEFATEGTDRKDVFFYQADDEHYIPRAVLLDLEPRVIHSILNSPYAKLYNPENIYLSEHGGGAGNNWASGFSQGEKIHEDIFDIIDREADGSDSLEEQS

SEQ ID NO: 4230 - protein, 243 aa, Artificial Sequence
  Synthetic polypeptide
MPREIITLQLGQCGNQIGFEFWKQLCAEHGISPEGIVEEFATEGTDRKDVFFYQADDEHYIPRAVLLDLEPRVIHSILNSPYAKLYNPENIYLSEHGGGAGNNWASGFSQGEKIHEDIFDIIDREADGSDSLEGFVLCHSIAGGTGSGLGSYLLERLNDRYPKKLVQTYSVFPYQDEMSDVVVQPYNSLLTLKRLTQNADCVCASLHETIGLMKGKTVPVPLCGLPRARHSVWHMWVLTCLFT

SEQ ID NO: 4231 - protein, 1166 aa, Artificial Sequence
  Synthetic polypeptide
MMHLRLFCILLAAVSGAEGWGYYGCDEELVGPLYARSLGASSYYSLLTAPRFARLHGISGWSPRIGDPNPWLQIDLMKKHRIRAVATQGSFNSWDWVTRYMLLYGDRVDSWTPFYQRGHNSTFFGNVNESAVVRHDLHFHFTARYIRIVPLAWNPRGKIGLRLGLYGCPYKADILYFDGDDAISYRFPRGVSRSLWDVFAFSFKTEEKDGLLLHAEGAQGDYVTLELEGAHLLLHMSLGSSPIQPRPGHTTVSAGGVLNDQHWHYVRVDRFGRDVNFTLDGYVQRFILNGDFERLNLDTEMFIGGLVGAARKNLAYRHNFRGCIENVIFNRVNIADLAVRRHSRITFEGKVAFRCLDPVPHPINFGGPHNFVQVPGFPRRGRLAVSFRFRTWDLTGLLLFSRLGDGLGHVELTLSEGQVNVSIAQSGRKKLQFAAGYRLNDGFWHEVNFVAQENHAVISIDDVEGAEVRVSYPLLIRTGTSYFFGGCPKPASRWDCHSNQTAFHGCMELLKVDGQLVNLTLVEGRRLGFYAEVLFDTCGITDRCSPNMCEHDGRCYQSWDDFICYCELTGYKGETCHTPLYKESCEAYRLSGKTSGNFTIDPDGSGPLKPFVVYCDIRENRAWTVVRHDRLWTTRVTGSSMERPFLGAIQYWNASWEEVSALANASQHCEQWIEFSCYNSRLLNTAGGYPYSFWIGRNEEQHFYWGGSQPGIQRCACGLDRSCVDPALYCNCDADQPQWRTDKGLLTFVDHLPVTQVVIGDTNRSTSEAQFFLRPLRCYGDRNSWNTISFHTGAALRFPPIRANHSLDVSFYFRTSAPSGVFLENMGGPYCQWRRPYVRVELNTSRDVVFAFDVGNGDENLTVHSDDFEFNDDEWHLVRAEINVKQARLRVDHRPWVLRPMPLQTYIWMEYDQPLYVGSAELKRRPFVGCLRAMRLNGVTLNLEGRANASEGTSPNCTGHCAHPRLPCFHGGRCVERYSYYTCDCDLTAFDGPYCNHDIGGFFEPGTWMRYNLQSALRSAAREFSHMLSRPVPGYEPGYIPGYDTPGYVPGYHGPGYRLPDYPRPGRPVPGYRGPVYNVTGEEVSFSFSTSSAPAVLLYVSSFVRDYMAVLIKDDGTLQLRYQLGTSPYVYQLTTRPVTDGQPHSINITRVYRNLFIQARCSGSHL

SEQ ID NO: 4232 - protein, 32 aa, Artificial Sequence
  Synthetic polypeptide
MAEELSSAPETVWLPKPKIFAMWPCTESMPTP

SEQ ID NO: 4233 - protein, 22 aa, Artificial Sequence
  Synthetic polypeptide
MAEGTREDEAQESLEPGKRRLQ

SEQ ID NO: 4234 - protein, 533 aa, Artificial Sequence
  Synthetic polypeptide
MAGSPGSGVSLEGISLESSEEAELQREAMQQVLDNLGSLPSATGAAELDLIFLRGIMESPIVRSLAKAHERLEETKLEAVRDNNLELVQEILRDLAHVAEQSSTAAELAHILQEPHFQSLLETHDSVASKTYETPPPSPGLDPTFSNQPVPPDAVRMVGIRKTAGEHLGVTFRVEGGELVIARILHGGMVAQQGLLHVGDIIKEVNGQPVGSDPRALQELLRNASGSVILKILPSYQEPHLPRQVFVKCHFDYDPARDSLIPCKEAGLRFNAGDLLQIVNQDDANWWQACHVEGGSAGLIPSQLLEEKRKAFVKRDLELTPNSGTLCGSLSGKKKKRMMYLTTKNAEFDRHELLIYEEVARMPPFRRKTLVLIGAQGVGRRSLKNKLIMWDPDRYGTTVPYTSRRPKDSEREGQGYSFVSRGEMEADVRAGRYLEHGEYEGNLYGTRIDSIRGVVAAGKVCVLDVNPQAVKVLRTAEFVPYVVFIEAPDFETLRAMNRAALESGISTKQLTQSHHWASTQRRRNRSTKKIPAL

SEQ ID NO: 4235 - protein, 516 aa, Artificial Sequence
  Synthetic polypeptide
MPVAATNSETAMQQVLDNLGSLPSATGAAELDLIFLRGIMESPIVRSLAKAHERLEETKLEAVRDNNLELVQEILRDLAHVAEQSSTAAELAHILQEPHFQSLLETHDSVASKTYETPPPSPGLDPTFSNQPVPPDAVRMVGIRKTAGEHLGVTFRVEGGELVIARILHGGMVAQQGLLHVGDIIKEVNGQPVGSDPRALQELLRNASGSVILKILPSYQEPHLPRQVFVKCHFDYDPARDSLIPCKEAGLRFNAGDLLQIVNQDDANWWQACHVEGGSAGLIPSQLLEEKRKAFVKRDLELTPNSGTLCGSLSGKKKKRMMYLTTKNAEFDRHELLIYEEVARMPPFRRKTLVLIGAQGVGRRSLKNKLIMWDPDRYGTTVPYTSRRPKDSEREGQGYSFVSRGEMEADVRAGRYLEHGEYEGNLYGTRIDSIRGVVAAGKVCVLDVNPQAVKVLRTAEFVPYVVFIEAPDFETLRAMNRAALESGISTKQLTQSHHWASTQRRRNRSTKKIPAL

SEQ ID NO: 4236 - protein, 540 aa, Artificial Sequence
  Synthetic polypeptide
MPVAATNSETAMQQVLDNLGSLPSATGAAELDLIFLRGIMESPIVRSLAKVIMVLWFMQQNVFVPMKYMLKYFGAHERLEETKLEAVRDNNLELVQEILRDLAHVAEQSSTAAELAHILQEPHFQSLLETHDSVASKTYETPPPSPGLDPTFSNQPVPPDAVRMVGIRKTAGEHLGVTFRVEGGELVIARILHGGMVAQQGLLHVGDIIKEVNGQPVGSDPRALQELLRNASGSVILKILPSYQEPHLPRQVFVKCHFDYDPARDSLIPCKEAGLRFNAGDLLQIVNQDDANWWQACHVEGGSAGLIPSQLLEEKRKAFVKRDLELTPNSGTLCGSLSGKKKKRMMYLTTKNAEFDRHELLIYEEVARMPPFRRKTLVLIGAQGVGRRSLKNKLIMWDPDRYGTTVPYTSRRPKDSEREGQGYSFVSRGEMEADVRAGRYLEHGEYEGNLYGTRIDSIRGVVAAGKVCVLDVNPQAVKVLRTAEFVPYVVFIEAPDFETLRAMNRAALESGISTKQLTQSHHWASTQRRRNRSTKKIPAL

SEQ ID NO: 4237 - protein, 377 aa, Artificial Sequence
  Synthetic polypeptide
MVGIRKTAGEHLGVTFRVEGGELVIARILHGGMVAQQGLLHVGDIIKEVNGQPVGSDPRALQELLRNASGSVILKILPSYQEPHLPRQVFVKCHFDYDPARDSLIPCKEAGLRFNAGDLLQIVNQDDANWWQACHVEGGSAGLIPSQLLEEKRKAFVKRDLELTPNSGTLCGSLSGKKKKRMMYLTTKNAEFDRHELLIYEEVARMPPFRRKTLVLIGAQGVGRRSLKNKLIMWDPDRYGTTVPYTSRRPKDSEREGQGYSFVSRGEMEADVRAGRYLEHGEYEGNLYGTRIDSIRGVVAAGKVCVLDVNPQAVKVLRTAEFVPYVVFIEAPDFETLRAMNRAALESGISTKQLTQSHHWASTQRRRNRSTKKIPAL

SEQ ID NO: 4238 - protein, 505 aa, Artificial Sequence
  Synthetic polypeptide
MQQVLDNLGSLPSATGAAELDLIFLRGIMESPIVRSLAKAHERLEETKLEAVRDNNLELVQEILRDLAHVAEQSSTAAELAHILQEPHFQSLLETHDSVASKTYETPPPSPGLDPTFSNQPVPPDAVRMVGIRKTAGEHLGVTFRVEGGELVIARILHGGMVAQQGLLHVGDIIKEVNGQPVGSDPRALQELLRNASGSVILKILPSYQEPHLPRQVFVKCHFDYDPARDSLIPCKEAGLRFNAGDLLQIVNQDDANWWQACHVEGGSAGLIPSQLLEEKRKAFVKRDLELTPNSGTLCGSLSGKKKKRMMYLTTKNAEFDRHELLIYEEVARMPPFRRKTLVLIGAQGVGRRSLKNKLIMWDPDRYGTTVPYTSRRPKDSEREGQGYSFVSRGEMEADVRAGRYLEHGEYEGNLYGTRIDSIRGVVAAGKVCVLDVNPQAVKVLRTAEFVPYVVFIEAPDFETLRAMNRAALESGISTKQLTQSHHWASTQRRRNRSTKKIPAL

SEQ ID NO: 4239 - protein, 561 aa, Artificial Sequence
  Synthetic polypeptide
MSWAPPPQVGQNLRSQTVLRILNGMEDLMWVAMEERRFRALASFTMPVAATNSETAMQQVLDNLGSLPSATGAAELDLIFLRGIMESPIVRSLAKAHERLEETKLEAVRDNNLELVQEILRDLAHVAEQSSTAAELAHILQEPHFQSLLETHDSVASKTYETPPPSPGLDPTFSNQPVPPDAVRMVGIRKTAGEHLGVTFRVEGGELVIARILHGGMVAQQGLLHVGDIIKEVNGQPVGSDPRALQELLRNASGSVILKILPSYQEPHLPRQVFVKCHFDYDPARDSLIPCKEAGLRFNAGDLLQIVNQDDANWWQACHVEGGSAGLIPSQLLEEKRKAFVKRDLELTPNSGTLCGSLSGKKKKRMMYLTTKNAEFDRHELLIYEEVARMPPFRRKTLVLIGAQGVGRRSLKNKLIMWDPDRYGTTVPYTSRRPKDSEREGQGYSFVSRGEMEADVRAGRYLEHGEYEGNLYGTRIDSIRGVVAAGKVCVLDVNPQAVKVLRTAEFVPYVVFIEAPDFETLRAMNRAALESGISTKQLTQSHHWASTQRRRNRSTKKIPAL

SEQ ID NO: 4240 - protein, 112 aa, Artificial Sequence
  Synthetic polypeptide
MAAPPGEYFSVGSQVSCRTCQEQRLQGEVVAFDYQSKMLALKCPSSSGKPNHADILLINLQYVSEVEIINDRTETPPPLASLNVSKNDWSLTTHQHSVKWHVFQEVFSDHPG

SEQ ID NO: 4241 - protein, 64 aa, Artificial Sequence
  Synthetic polypeptide
MNSPNESADGMSGREPSLEILPRTSLHSIPVTGDLGQVSSFSGLTFLPLKTGGIELLVFRPFLP

SEQ ID NO: 4242 - protein, 63 aa, Artificial Sequence
  Synthetic polypeptide
MNSPNESDGMSGREPSLEILPRTSLHSIPVTGDLGQVSSFSGLTFLPLKTGGIELLVFRPFLP

SEQ ID NO: 4243 - protein, 54 aa, Artificial Sequence
  Synthetic polypeptide
MSGREPSLEILPRTSLHSIPVTGDLGQVSSFSGLTFLPLKTGGIELLVFRPFLP

SEQ ID NO: 4244 - protein, 82 aa, Artificial Sequence
  Synthetic polypeptide
MLLVPKAQGLVEMLQTIYETESCFSADGMSGREPSLEILPRTSLHSIPVTGDLGQVSSFSGLTFLPLKTGGIELLVFRPFLP

SEQ ID NO: 4245 - protein, 605 aa, Artificial Sequence
  Synthetic polypeptide
MNGEADCPTDLEMAAPKGQDRWSQEDMLTLLECMKNNLPSNDSSKFKTTESHMDWEKVAFKDFSGDMCKLKWVEISNEVRKFRTLTELILDAQEHVKNPYKGKKLKKHPDFPKKPLTPYFRFFMEKRAKYAKLHPEMSNLDLTKILSKKYKELPEKKKMKYIQDFQREKQEFERNLARFREDHPDLIQNAKKSDIPEKPKTPQQLWYTHEKKVYLKVRPDEIMRDYIQKHPELNISEEGITKSTLTKAERQLKDKFDGRPTKPPPNSYSLYCAELMANMKDVPSTERMVLCSQQWKLLSQKEKDAYHKKCDQKKKDYEVELLRFLESLPEEEQQRVLGEEKMLNINKKQATSPASKKPAQEGGKGGSEKPKRPVSAMFIFSEEKRRQLQEERPELSESELTRLLARMWNDLSEKKKAKYKAREAALKAQSERKPGGEREERGKLPESPKRAEEIWQQSVIGDYLARFKNDRVKALKAMEMTWNNMEKKEKLMWIKKAAEDQKRYERELSEMRAPPAATNSSKKMKFQGEPKKPPMNGYQKFSQELLSNGELNHLPLKERMVEIGSRWQRISQSQKEHYKKLAEEQQKQYKVHLDLWVKVGQGPRK

SEQ ID NO: 4246 - protein, 642 aa, Artificial Sequence
  Synthetic polypeptide
MNGEADCPTDLEMAAPKGQDRWSQEDMLTLLECMKNNLPSNDSSKFKTTESHMDWEKVAFKDFSGDMCKLKWVEISNEVRKFRTLTELILDAQEHVKNPYKGKKLKKHPDFPKKPLTPYFRFFMEKRAKYAKLHPEMSNLDLTKILSKKYKELPEKKKMKYIQDFQREKQEFERNLARFREDHPDLIQNAKKSDIPEKPKTPQQLWYTHEKKVYLKVRPDATTKEVKDSLGKQWSQLSDKKRLKWIHKALEQRKEYEEIMRDYIQKHPELNISEEGITKSTLTKAERQLKDKFDGRPTKPPPNSYSLYCAELMANMKDVPSTERMVLCSQQWKLLSQKEKDAYHKKCDQKKKDYEVELLRFLESLPEEEQQRVLGEEKMLNINKKQATSPASKKPAQEGGKGGSEKPKRPVSAMFIFSEEKRRQLQEERPELSESELTRLLARMWNDLSEKKKAKYKAREAALKAQSERKPGGEREERGKLPESPKRAEEIWQQSVIGDYLARFKNDRVKALKAMEMTWNNMEKKEKLMWIKKAAEDQKRYERELSEMRAPPAATNSSKKMKFQGEPKKPPMNGYQKFSQELLSNGELNHLPLKERMVEIGSRWQRISQSQKEHYKKLAEEQQKQYKVHLDLWVKVGQGPRK

SEQ ID NO: 4247 - protein, 31 aa, Artificial Sequence
  Synthetic polypeptide
RSTTKSWPRSSKSSTRCTWTSGLRLAKDPGR

SEQ ID NO: 4248 - protein, 606 aa, Artificial Sequence
  Synthetic polypeptide
MNGEADCPTDLEMAAPKGQDRWSQEDMLTLLECMKNNLPSNDSSKFKTTESHMDWEKVAFKDFSGDMCKLKWVEISNEVRKFRTLTELILDAQEHVKNPYKGKKLKKHPDFPKKPLTPYFRFFMEKRAKYAKLHPEMSNLDLTKILSKKYKELPEKKKMKYIQDFQREKQEFERNLARFREDHPDLIQNAKKSDIPEKPKTPQQLWYTHEKKVYLKVRPDEIMRDYIQKHPELNISEEGITKSTLTKAERQLKDKFDGRPTKPPPNSYSLYCAELMANMKDVPSTERMVLCSQQWKLLSQKEKDAYHKKCDQKKKDYEVELLRFLESLPEEEQQRVLGEEKMLNINKKQATSPASKKPAQEGGKGGSEKPKRPVSAMFIFSEEKRRQLQEERPELSESELTRLLARMWNDLSEKKKAKYKAREAALKAQSERKPGGEREERGKLPESPKRAEEIWQQSVIGDYLARFKNDRVKALKAMEMTWNNMEKKEKLMWIKKAAEDQKRYERELSEMRAPPAATNSSKKMKFQGEPKKPPMNGYQKFSQELLSNGELNHLPLKERMVEIGSRWQRISQSQKEHYKKLAEEQQKQYKVHLDLWVKAGWPRTQE

SEQ ID NO: 4249 - protein, 643 aa, Artificial Sequence
  Synthetic polypeptide
MNGEADCPTDLEMAAPKGQDRWSQEDMLTLLECMKNNLPSNDSSKFKTTESHMDWEKVAFKDFSGDMCKLKWVEISNEVRKFRTLTELILDAQEHVKNPYKGKKLKKHPDFPKKPLTPYFRFFMEKRAKYAKLHPEMSNLDLTKILSKKYKELPEKKKMKYIQDFQREKQEFERNLARFREDHPDLIQNAKKSDIPEKPKTPQQLWYTHEKKVYLKVRPDATTKEVKDSLGKQWSQLSDKKRLKWIHKALEQRKEYEEIMRDYIQKHPELNISEEGITKSTLTKAERQLKDKFDGRPTKPPPNSYSLYCAELMANMKDVPSTERMVLCSQQWKLLSQKEKDAYHKKCDQKKKDYEVELLRFLESLPEEEQQRVLGEEKMLNINKKQATSPASKKPAQEGGKGGSEKPKRPVSAMFIFSEEKRRQLQEERPELSESELTRLLARMWNDLSEKKKAKYKAREAALKAQSERKPGGEREERGKLPESPKRAEEIWQQSVIGDYLARFKNDRVKALKAMEMTWNNMEKKEKLMWIKKAAEDQKRYERELSEMRAPPAATNSSKKMKFQGEPKKPPMNGYQKFSQELLSNGELNHLPLKERMVEIGSRWQRISQSQKEHYKKLAEEQQKQYKVHLDLWVKAGWPRTQE

SEQ ID NO: 4250 - protein, 32 aa, Artificial Sequence
  Synthetic polypeptide
RSTTKSWPRSSKSSTRCTWTSGLRQVGQGPRK

SEQ ID NO: 4251 - protein, 995 aa, Artificial Sequence
  Synthetic polypeptide
MARALCPLQALWLLEWVLLLLGPCAAPPAWALNLDPVQLTFYAGPNGSQFGFSLDFHKDSHGRVAIVVGAPRTLGPSQEETGGVFLCPWRAEGGQCPSLLFDLRDETRNVGSQTLQTFKARQGLGASVVSWSDVIVACAPWQHWNVLEKTEEAEKTPVGSCFLAQPESGRRAEYSPCRGNTLSRIYVENDFSWDKRYCEAGFSSVVTQAGELVLGAPGGYYFLGLLAQAPVADIFSSYRPGILLWHVSSQSLSFDSSNPEYFDGYWGYSVAVGEFDGDLNTTEYVVGAPTWSWTLGAVEILDSYYQRLHRLRGEQMASYFGHSVAVTDVNGDGRHDLLVGAPLYMESRADRKLAEVGRVYLFLQPRGPHALGAPSLLLTGTQLYGRFGSAIAPLGDLDRDGYNDIAVAAPYGGPSGRGQVLVFLGQSEGLRSRPSQVLDSPFPTGSAFGFSLRGAVDIDDNGYPDLIVGAYGANQVAVYRAQPVVKASVQLLVQDSLNPAVKSCVLPQTKTPVSCFNIQMCVGATGHNIPQKLSLNAELQLDRQKPRQGRRVLLLGSQQAGTTLNLDLGGKHSPICHTTMAFLRDEADFRDKLSPIVLSLNVSLPPTEAGMAPAVVLHGDTHVQEQTRIVLDCGEDDVCVPQLQLTASVTGSPLLVGADNVLELQMDAANEGEGAYEAELAVHLPQGAHYMRALSNVEGFERLICNQKKENETRVVLCELGNPMKKNAQIGIAMLVSVGNLEEAGESVSFQLQIRSKNSQNPNSKIVLLDVPVRAEAQVELRGNSFPASLVVAAEEGEREQNSLDSWGPKVEHTYELHNNGPGTVNGLHLSIHLPGQSQPSDLLYILDIQPQGGLQCFPQPPVNPLKVDWGLPIPSPSPIHPAHHKRDRRQIFLPEPEQPSRLQDPVLVSCDSAPCTVVQCDLQEMARGQRAMVTVLAFLWLPSLYQVWTQLLRALEERAIPIWWVLVGVLGGLLLLTILVLAMWKDFKAVWSEK

SEQ ID NO: 4252 - protein, 1029 aa, Artificial Sequence
  Synthetic polypeptide
MARALCPLQALWLLEWVLLLLGPCAAPPAWALNLDPVQLTFYAGPNGSQFGFSLDFHKDSHGRVAIVVGAPRTLGPSQEETGGVFLCPWRAEGGQCPSLLFDLRDETRNVGSQTLQTFKARQGLGASVVSWSDVIVACAPWQHWNVLEKTEEAEKTPVGSCFLAQPESGRRAEYSPCRGNTLSRIYVENDFSWDKRYCEAGFSSVVTQAGELVLGAPGGYYFLGLLAQAPVADIFSSYRPGILLWHVSSQSLSFDSSNPEYFDGYWGYSVAVGEFDGDLNTTEYVVGAPTWSWTLGAVEILDSYYQRLHRLRGEQMASYFGHSVAVTDVNGDGRHDLLVGAPLYMESRADRKLAEVGRVYLFLQPRGPHALGAPSLLLTGTQLYGRFGSAIAPLGDLDRDGYNDIAVAAPYGGPSGRGQVLVFLGQSEGLRSRPSQVLDSPFPTGSAFGFSLRGAVDIDDNGYPDLIVGAYGANQVAVYRAQPVVKASVQLLVQDSLNPAVKSCVLPQTKTPVSCFNIQMCVGATGHNIPQKLSLNAELQLDRQKPRQGRRVLLLGSQQAGTTLNLDLGGKHSPICHTTMAFLRDEADFRDKLSPIVLSLNVSLPPTEAGMAPAVVLHGDTHVQEQTRIVLDCGEDDVCVPQLQLTASVTGSPLLVGADNVLELQMDAANEGEGAYEAELAVHLPQGAHYMRALSNVEGFERLICNQKKENETRVVLCELGNPMKKNAQIGIAMLVSVGNLEEAGESVSFQLQIRSKNSQNPNSKIVLLDVPVRAEAQVELRGNSFPASLVVAAEEGEREQNSLDSWGPKVEHTYELHNNGPGTVNGLHLSIHLPGQSQPSDLLYILDIQPQGGLQCFPQPPVNPLKVDWGLPIPSPSPIHPAHHKRDRRQIFLPEPEQPSRLQDPVLVSCDSAPCTVVQCDLQEMARGQRAMVTVLAFLWLPSLYQRPLDQFVLQSHAWFNVSSLPYAVPPLSLPRGEAQVWTQLLRALEERAIPIWWVLVGVLGGLLLLTILVLAMWKDFKAVWSEK

SEQ ID NO: 4253 - protein, 63 aa, Artificial Sequence
  Synthetic polypeptide
MARALCPLQALWLLEWVLLLLGPCAAPPAWALNLDPVQLTFYAGPNGSQFGFSLDFHKDSHGR

SEQ ID NO: 4254 - protein, 143 aa, Artificial Sequence
  Synthetic polypeptide
MEVRRGDTCPRPHPSGLREEGLEPKVAFPGGANRCWNLGADAGSRLTDVFGSVMLTGSASFYDCYTSQSEDNVDLRQTYTPFSSTEYSSSVDSSLFCAPWSTYGDDIKQPSNSQISIKNRIQEKNLKSKTPLIPSILDKEYST

SEQ ID NO: 4255 - protein, 346 aa, Artificial Sequence
  Synthetic polypeptide
MLSVVENGLDPQAAIPVIKKKLVGSVKALQKQYVSLDTVVTSEDGDANTMCSALEAVFIHGLHAKHIRAEAGGKRKKSAHQKPLPQPVFWPLLKAVTHKHIISELEHLTFVNTDVGRCRAWLRLALNDGLMECYLKLLLQEQARLHEYYQPTALLRDAEEGEFLLSFLQGLTSLSFELSYKSAILNEWTLTPLALSGLCPLSELDPLSTSGAELQRKESLDSISHSSGSEDIEVHHSGHKIRRNQKLTASSLSLDTASSSQLSCSLNSDSCLLQENGSKSPDHCEEPMSCDSDLGTANAEDSDRSLQDWARWLTPVIPAPWEAKAGGSQGQEIETILTNMVKPRLY

SEQ ID NO: 4256 - protein, 257 aa, Artificial Sequence
  Synthetic polypeptide
MDWTPRLPSRHIISELEHLTFVNTDVGRCRAWLRLALNDGLMECYLKLLLQEQARLHEYYQPTALLRDAEEGEFLLSFLQGLTSLSFELSYKSAILNEWTLTPLALSGLCPLSELDPLSTSGAELQRKESLDSISHSSGSEDIEVHHSGHKIRRNQKLTASSLSLDTASSSQLSCSLNSDSCLLQENGSKSPDHCEEPMSCDSDLGTANAEDSDRSLQDWARWLTPVIPAPWEAKAGGSQGQEIETILTNMVKPRLY

SEQ ID NO: 4257 - protein, 208 aa, Artificial Sequence
  Synthetic polypeptide
MMCLECASAAAGGAEEEEADAERRRRRRGAQRGAGGSGCCGARGAGGAGVSAAGDEVQTLSGSVRRAPTGPPGTPGTPGCAATAKGPGAQQPKPASLGRGRGAAAAILSLGNVLNYLDRYTVAGVLLDIQQHFGVKDRGAGLLQSVFICSFMVAAPIFGYLGDRFNRKVILSCGIFFWSAVTFSSSFIPQQLCDLEELNVSEPQFPHL

SEQ ID NO: 4258 - protein, 514 aa, Artificial Sequence
  Synthetic polypeptide
MAGRSMQAARCPTDELSLTNCAVVNEKDFQSGQHVIVRTSPNHRYTFTLKTHPSVVPGSIAFSLPQRKWAGLSIGQEIEVSLYTFDKAKQCIGTMTIEIDFLQKKSIDSNPYDTDKMAAEFIQQFNNQAFSVGQQLVFSFNEKLFGLLVKDIEAMDPSILKGEPATGKRQKIEVGLVVGNSQVAFEKAENSSLNLIGKAKTKENRQSIINPDWNFEKMGIGGLDKEFSDIFRRAFASRVFPPEIVEQMGCKHVKGILLYGPPGCGKTLLARQIGKMLNAREPKVVNGPEILNKYVGESEANIRKLFADAEEEQRRLGANSGLHIIIFDEIDAICKQRGSMAGSTGVHDTVVNQLLSKIDGVEQLNNILVIGMTNRPDLIDEALLRPGRLEVKMEIGLPDEKGRLQILHIHTARMRGHQLLSADVDIKELAVETKNFSGAELEGLVRAAQSTAMNRHIKASTKVEVDMEKAESLQVTRGDFLASLENDIKPMGPYSCRKTSSGLPLMLHYGELYN

SEQ ID NO: 4259 - protein, 420 aa, Artificial Sequence
  Synthetic polypeptide
MTIEIDFLQKKSIDSNPYDTDKMAAEFIQQFNNQAFSVGQQLVFSFNEKLFGLLVKDIEAMDPSILKGEPATGKRQKIEVGLVVGNSQVAFEKAENSSLNLIGKAKTKENRQSIINPDWNFEKMGIGGLDKEFSDIFRRAFASRVFPPEIVEQMGCKHVKGILLYGPPGCGKTLLARQIGKMLNAREPKVVNGPEILNKYVGESEANIRKLFADAEEEQRRLGANSGLHIIIFDEIDAICKQRGSMAGSTGVHDTVVNQLLSKIDGVEQLNNILVIGMTNRPDLIDEALLRPGRLEVKMEIGLPDEKGRLQILHIHTARMRGHQLLSADVDIKELAVETKNFSGAELEGLVRAAQSTAMNRHIKASTKVEVDMEKAESLQVTRGDFLASLENDIKPMGPYSCRKTSSGLPLMLHYGELYN

SEQ ID NO: 4260 - protein, 509 aa, Artificial Sequence
  Synthetic polypeptide
MQAARCPTDELSLTNCAVVNEKDFQSGQHVIVRTSPNHRYTFTLKTHPSVVPGSIAFSLPQRKWAGLSIGQEIEVSLYTFDKAKQCIGTMTIEIDFLQKKSIDSNPYDTDKMAAEFIQQFNNQAFSVGQQLVFSFNEKLFGLLVKDIEAMDPSILKGEPATGKRQKIEVGLVVGNSQVAFEKAENSSLNLIGKAKTKENRQSIINPDWNFEKMGIGGLDKEFSDIFRRAFASRVFPPEIVEQMGCKHVKGILLYGPPGCGKTLLARQIGKMLNAREPKVVNGPEILNKYVGESEANIRKLFADAEEEQRRLGANSGLHIIIFDEIDAICKQRGSMAGSTGVHDTVVNQLLSKIDGVEQLNNILVIGMTNRPDLIDEALLRPGRLEVKMEIGLPDEKGRLQILHIHTARMRGHQLLSADVDIKELAVETKNFSGAELEGLVRAAQSTAMNRHIKASTKVEVDMEKAESLQVTRGDFLASLENDIKPMGPYSCRKTSSGLPLMLHYGELYN

SEQ ID NO: 4261 - protein, 152 aa, Artificial Sequence
  Synthetic polypeptide
MDPLFQQTHKQVHEIQSCMGRLETADKQSVHIVENEIQASIDQIFSRLERLEILSSKEPPNKRQNARLRVDQLKYDVQHLQTALRNFQHRRHAREQQERQREELLSRTFTTNGTQKKILDIANMLGLSNTVMRLIEKRAFQDKYFMIASVSS

SEQ ID NO: 4262 - protein, 199 aa, Artificial Sequence
  Synthetic polypeptide
MDPLFQQTHKQVHEIQSCMGRLETADKQSVHIVENEIQASIDQIFSRLERLEILSSKEPPNKRQNARLRVDQLKYDVQHLQTALRNFQHRRHAREQQERQREELLSRTFTTNDSDTTIPMDESLQFNSSLQKVHNGMDDLILDGHNILDGLRTQRLTLKGTQKKILDIANMLGLSNTVMRLIEKRAFQDKYFMIASVSS

SEQ ID NO: 4263 - protein, 134 aa, Artificial Sequence
  Synthetic polypeptide
MGRLETADKQSVHIVENEIQASIDQIFSRLERLEILSSKEPPNKRQNARLRVDQLKYDVQHLQTALRNFQHRRHAREQQERQREELLSRTFTTNGTQKKILDIANMLGLSNTVMRLIEKRAFQDKYFMIASVSS

SEQ ID NO: 4264 - protein, 30 aa, Artificial Sequence
  Synthetic polypeptide
IPCSSKRTSRSTRSSLAWDAWRRQTSSLCT

SEQ ID NO: 4265 - protein, 40 aa, Artificial Sequence
  Synthetic polypeptide
GTQKKILDIANMLGLSNTVMRLIEKRAFQDKYFMIASVSS

SEQ ID NO: 4266 - protein, 125 aa, Artificial Sequence
  Synthetic polypeptide
MAPKKPEPKKEAAKPAPAPAPAPAPAPAPAPEAPKEPAFDPKSVKIDFTADQIEEFKEAFSLFDRTPTGEMKITYGQCGDVLRALGQNPTNAEVLRVLGKPKPEGLSRQGSKLSVRPGPRGTSDP

SEQ ID NO: 4267 - protein, 156 aa, Artificial Sequence
  Synthetic polypeptide
MAPKKPEPKKEAAKPAPAPAPAPAPAPAPAPEAPKEPAFDPKSVKIDFTADQIEGEYGQPHLSVSIALSWRRRRRRKKRRSSCPHEFKEAFSLFDRTPTGEMKITYGQCGDVLRALGQNPTNAEVLRVLGKPKPEGLSRQGSKLSVRPGPRGTSDP

SEQ ID NO: 4268 - protein, 16 aa, Artificial Sequence
  Synthetic polypeptide
CWASPSLKVCHVKGLN

SEQ ID NO: 4269 - protein, 239 aa, Artificial Sequence
  Synthetic polypeptide
MAPKKPEPKKEAAKPAPAPAPAPAPAPAPAPEAPKEPAFDPKSVKIDFTADQIEEFKEAFSLFDRTPTGEMKITYGQCGDVLRALGQNPTNAEVLRVLGKPKPEEMNVKMLDFETFLPILQHISRNKEQGTYEDFVEGLRVFDKESNGTVMGAELRHVLATLGEKMTEAEVEQLLAGQEDANGCINYEGPQDQPFLLLSLLNLKTRKMKALKIIHFHLLVNIFSFPYDFLNFFLQLTLL

SEQ ID NO: 4270 - protein, 9 aa, Artificial Sequence
  Synthetic polypeptide
CWASPSLKR

SEQ ID NO: 4271 - protein, 711 aa, Artificial Sequence
  Synthetic polypeptide
METKVHLFCQAEENIDLLDDGSNSFATDLSSGTINHKKYIKFSKTIEKEISPEIRSLSPEYKKIFETSIIFCGEEKSSDFSGEKKVGRKSLQVQQHSKRTEIIPPFLKLSKEKVTRKENSLCKLPNQYSVHKTSSPLCTSSAITREKEMLSNLYMTLYDEVTHGYLHSKELSALHKACKIFSKIRSGKIYVNDLPVILCILRISISDLEMRQALKTVDIDAFQDALKIFCRIKGGRVSTDDVFAVLDSMGIPINREILEEVTKHTYIDSNHMVDIGDIIFTLNELQEQYEDVSITEGSPLNEITSDRKLSSVAGCYLKYKKKNSLSSKLPEPSISKKLNKKSNQYYSKIMENDDLESKRPKNTWQIRKFLGGVGSSNVGVQEPYSKNGINFKKHSEKGEIHDSKSKPQSLKSSTSLSKSLDKSDISSIPKLQKPAVRKHSSLQKQVSSTEKTAISTLENFCEAISKLQENYIAAEELQSILPSTGINLLDEEFQKIVTDTSRNENGMVELDDFVNALAKERSFPECNALPGVIKAIDKIKDKNVDYEDLNTCLQNFGIYLSKPEFKKITELTEAGETKKVNFKEFIDTMMSNTECFSEKLVLPDAIETLDDLRKETMSVSDLWNTLSSLNSNLKKDEFLAALELVTVDAEAGLYCCHLGSLQPPCLILLPQPAKCLQLQARAATPDWFSYFFGGDGVSLCWPGWSPAPSRE

SEQ ID NO: 4272 - protein, 615 aa, Artificial Sequence
  Synthetic polypeptide
METKVHLFCQAEENIDLLDDGSNSFATDLSSGTINHKKYIKFSKTIEKEISPEIRSLSPEYKKIFETSIIFCGEEKSSDFSGEKKVGRKSLQVQQHSKRTEIIPPFLKLSKEKVTRKENSLCKLPNQYSVHKTSSPLCTSSAITREKEMLSNLYMTLYDEVTHGYLHSKELSGNHMVDIGDIIFTLNELQEQYEDVSITEGSPLNEITSDRKLSSVAGCYLKYKKKNSLSSKLPEPSISKKLNKKSNQYYSKIMENDDLESKRPKNTWQIRKFLGGVGSSNVGVQEPYSKNGINFKKHSEKGEIHDSKSKPQSLKSSTSLSKSLDKSDISSIPKLQKPAVRKHSSLQKQVSSTEKTAISTLENFCEAISKLQENYIAAEELQSILPSTGINLLDEEFQKIVTDTSRNENGMVELDDFVNALAKERSFPECNALPGVIKAIDKIKDKNVDYEDLNTCLQNFGIYLSKPEFKKITELTEAGETKKVNFKEFIDTMMSNTECFSEKLVLPDAIETLDDLRKETMSVSDLWNTLSSLNSNLKKDEFLAALELVTVDAEAGLYCCHLGSLQPPCLILLPQPAKCLQLQARAATPDWFSYFFGGDGVSLCWPGWSPAPSRE

SEQ ID NO: 4273 - protein, 237 aa, Artificial Sequence
  Synthetic polypeptide
EELQSILPSTGINLLDEEFQKIVTDTSRNENGMVELDDFVNALAKERSFPECNALPGVIKAIDKIKDKNVDYEDLNTCLQNFGIYLSKPEFKKITELTEAGETKKVNFKEFIDTMMSNTECFSEKLVLPDAIETLDDLRKETMSVSDLWNTLSSLNSNLKKDEFLAALELVTVDAEAGLYCCHLGSLQPPCLILLPQPAKCLQLQARAATPDWFSYFFGGDGVSLCWPGWSPAPSRE

SEQ ID NO: 4274 - protein, 774 aa, Artificial Sequence
  Synthetic polypeptide
METKVHLFCQAEENIDLLDDGSNSFATDLSSGTINHKKYIKFSKTIEKEISPEIRSLSPEYKKIFETSIIFCGEEKSSDFSGEKKVGRKSLQVQQHSKRTEIIPPFLKLSKEKVTRKENSLCKLPNQYSVHKTSSPLCTSSAITREKEMLSNLYMTLYDEVTHGYLHSKELSALHKACKIFSKIRSGKIYVNDLPVILCILRISISDLEMRQALKTVDIDAFQDALKIFCRIKGGRVSTDDVFAVLDSMGIPINREILEEVTKHTYIDSNHMVDIGDIIFTLNELQEQYEDVSITEGSPLNEITSDRKLSSVAGCYLKYKKKNSLSSKLPEPSISKKLNKKSNQYYSKIMENDDLESKRPKNTWQIRKFLGGVGSSNVGVQEPYSKNGINFKKHSEKGEIHDSKSKPQSLKSSTSLSKSLDKSDISSIPKLQKPAVRKHSSLQKQVSSTEKTAISTLENFCEAISKLQENYIAAEELQSILPSTGINLLDEEFQKIVTDTSRNENGMVELDDFVNALAKERSFPECNALPGVIKAIDKIKDKNVDYEDLNTCLQNFGIYLSKPEFKKITELTEAGETKKVNFKEFIDTMMSNTECFSEKLVLPDAIETLDDLRKETMSVSDLWNTLSSLNSNLKKDEFLAALELVTVDAGLYCCHLGSLQPPCLILLPQPAKCLQLQAHAATPDWFSYFFGGDGVSLCWPGWSPAPNVSDPPASASQGAGVADGVWFTQCSMVPRLECSGVISARYNLHLPAACLGLPKCRDCSLCPAATPSGK

SEQ ID NO: 4275 - protein, 678 aa, Artificial Sequence
  Synthetic polypeptide
METKVHLFCQAEENIDLLDDGSNSFATDLSSGTINHKKYIKFSKTIEKEISPEIRSLSPEYKKIFETSIIFCGEEKSSDFSGEKKVGRKSLQVQQHSKRTEIIPPFLKLSKEKVTRKENSLCKLPNQYSVHKTSSPLCTSSAITREKEMLSNLYMTLYDEVTHGYLHSKELSGNHMVDIGDIIFTLNELQEQYEDVSITEGSPLNEITSDRKLSSVAGCYLKYKKKNSLSSKLPEPSISKKLNKKSNQYYSKIMENDDLESKRPKNTWQIRKFLGGVGSSNVGVQEPYSKNGINFKKHSEKGEIHDSKSKPQSLKSSTSLSKSLDKSDISSIPKLQKPAVRKHSSLQKQVSSTEKTAISTLENFCEAISKLQENYIAAEELQSILPSTGINLLDEEFQKIVTDTSRNENGMVELDDFVNALAKERSFPECNALPGVIKAIDKIKDKNVDYEDLNTCLQNFGIYLSKPEFKKITELTEAGETKKVNFKEFIDTMMSNTECFSEKLVLPDAIETLDDLRKETMSVSDLWNTLSSLNSNLKKDEFLAALELVTVDAGLYCCHLGSLQPPCLILLPQPAKCLQLQAHAATPDWFSYFFGGDGVSLCWPGWSPAPNVSDPPASASQGAGVADGVWFTQCSMVPRLECSGVISARYNLHLPAACLGLPKCRDCSLCPAATPSGK

SEQ ID NO: 4276 - protein, 300 aa, Artificial Sequence
  Synthetic polypeptide
EELQSILPSTGINLLDEEFQKIVTDTSRNENGMVELDDFVNALAKERSFPECNALPGVIKAIDKIKDKNVDYEDLNTCLQNFGIYLSKPEFKKITELTEAGETKKVNFKEFIDTMMSNTECFSEKLVLPDAIETLDDLRKETMSVSDLWNTLSSLNSNLKKDEFLAALELVTVDAGLYCCHLGSLQPPCLILLPQPAKCLQLQAHAATPDWFSYFFGGDGVSLCWPGWSPAPNVSDPPASASQGAGVADGVWFTQCSMVPRLECSGVISARYNLHLPAACLGLPKCRDCSLCPAATPSGK

SEQ ID NO: 4277 - protein, 927 aa, Artificial Sequence
  Synthetic polypeptide
MASFSMDCSPSFCVPGLWNPFIIFRSRSSRRRLHSLGLAAMPEKRPFERLPADVSPINYSLCLKPDLLDFTFEGKLEAAAQVRQATNQIVMNCADIDIITASYAPEGDEEIHATGFNYQNEDEKVTLSFPSTLQTGTGTLKIDFVGELNDKMKGFYRSKYTTPSGEVRYAAVTQFEATDARRAFPCWDEPAIKATFDISLVVPKDRVALSNMNVIDRKPYPDDENLVEVKFARTPVMSTYLVAFVVGEYDFVETRSKDGVCVRVYTPVGKAEQGKFALEVAAKTLPFYKDYFNVPYPLPKIDLIAIADFAAGAMENWGLVTYRETALLIDPKNSCSSSRQWVALVVGHELAHQWFGNLVTMEWWTHLWLNEGFASWIEYLCVDHCFPEYDIWTQFVSADYTRAQELDALDNSHPIEVSVGHPSEVDEIFDAISYSKGASVIRMLHDYIGDKDFKKGMNMYLTKFQQKNAATEDLWESLENASGKPIAAVMNTWTKQMGFPLIYVEAEQVEDDRLLRLSQKKFCAGGSYVGEDCPQWMVPITISTSEDPNQAKLKILMDKPEMNVVLKNVKPDQWVKLNLGTVGFYRTQYSSAMLESLLPGIRDLSLPPVDRLGLQNDLFSLARAGIISTVEVLKVMEAFVNEPNYTVWSDLSCNLGILSTLLSHTDFYEEIQEFVKDVFSPIGERLGWDPKPGEGHLDALLRGLVLGKLGKAGHKATLEEARRRFKDHVEGKQILSADLRSPVYLTVLKHGDGTTLDIMLKLHKQADMQEEKNRIERVLGATLLPDLIQKVLTFALSEEVRPQDTVSVIGGVAGGSKHGRKAAWKFIKDNWEELYNRYQGGFLISRLIKLSVEGFAVDKMAGEVKHFGRLRWEDCLSSRVQDQSGQHGRTPSLQKGKNNLAWECTLVVPATQEVKVGGLLEPRRLRL

SEQ ID NO: 4278 - protein, 931 aa, Artificial Sequence
  Synthetic polypeptide
MWLAAAAPSLARRLLFLGPPPPPLLLLVFSRSSRRRLHSLGLAAMPEKRPFERLPADVSPINYSLCLKPDLLDFTFEGKLEAAAQVRQATNQIVMNCADIDIITASYAPEGDEEIHATGFNYQNEDEKVTLSFPSTLQTGTGTLKIDFVGELNDKMKGFYRSKYTTPSGEVRYAAVTQFEATDARRAFPCWDEPAIKATFDISLVVPKDRVALSNMNVIDRKPYPDDENLVEVKFARTPVMSTYLVAFVVGEYDFVETRSKDGVCVRVYTPVGKAEQGKFALEVAAKTLPFYKDYFNVPYPLPKIDLIAIADFAAGAMENWGLVTYRETALLIDPKNSCSSSRQWVALVVGHELAHQWFGNLVTMEWWTHLWLNEGFASWIEYLCVDHCFPEYDIWTQFVSADYTRAQELDALDNSHPIEVSVGHPSEVDEIFDAISYSKGASVIRMLHDYIGDKDFKKGMNMYLTKFQQKNAATEDLWESLENASGKPIAAVMNTWTKQMGFPLIYVEAEQVEDDRLLRLSQKKFCAGGSYVGEDCPQWMVPITISTSEDPNQAKLKILMDKPEMNVVLKNVKPDQWVKLNLGTVGFYRTQYSSAMLESLLPGIRDLSLPPVDRLGLQNDLFSLARAGIISTVEVLKVMEAFVNEPNYTVWSDLSCNLGILSTLLSHTDFYEEIQEFVKDVFSPIGERLGWDPKPGEGHLDALLRGLVLGKLGKAGHKATLEEARRRFKDHVEGKQILSADLRSPVYLTVLKHGDGTTLDIMLKLHKQADMQEEKNRIERVLGATLLPDLIQKVLTFALSEEVRPQDTVSVIGGVAGGSKHGRKAAWKFIKDNWEELYNRYQGGFLISRLIKLSVEGFAVDKMAGEVKHFGRLRWEDCLSSRVQDQSGQHGRTPSLQKGKNNLAWECTLVVPATQEVKVGGLLEPRRLRL

SEQ ID NO: 4279 - protein, 851 aa, Artificial Sequence
  Synthetic polypeptide
MPEKRPFERLPADVSPINYSLCLKPDLLDFTFEGKLEAAAQVRQATNQIVMNCADIDIITASYAPEGDEEIHATGFNYQNEDEKVTLSFPSTLQTGTGTLKIDFVGELNDKMKGFYRSKYTTPSGEVRYAAVTQFENVIDRKPYPDDENLVEVKFARTPVMSTYLVAFVVGEYDFVETRSKDGVCVRVYTPVGKAEQGKFALEVAAKTLPFYKDYFNVPYPLPKIDLIAIADFAAGAMENWGLVTYRETALLIDPKNSCSSSRQWVALVVGHELAHQWFGNLVTMEWWTHLWLNEGFASWIEYLCVDHCFPEYDIWTQFVSADYTRAQELDALDNSHPIEVSVGHPSEVDEIFDAISYSKGASVIRMLHDYIGDKDFKKGMNMYLTKFQQKNAATEDLWESLENASGKPIAAVMNTWTKQMGFPLIYVEAEQVEDDRLLRLSQKKFCAGGSYVGEDCPQWMVPITISTSEDPNQAKLKILMDKPEMNVVLKNVKPDQWVKLNLGTVGFYRTQYSSAMLESLLPGIRDLSLPPVDRLGLQNDLFSLARAGIISTVEVLKVMEAFVNEPNYTVWSDLSCNLGILSTLLSHTDFYEEIQEFVKDVFSPIGERLGWDPKPGEGHLDALLRGLVLGKLGKAGHKATLEEARRRFKDHVEGKQILSADLRSPVYLTVLKHGDGTTLDIMLKLHKQADMQEEKNRIERVLGATLLPDLIQKVLTFALSEEVRPQDTVSVIGGVAGGSKHGRKAAWKFIKDNWEELYNRYQGGFLISRLIKLSVEGFAVDKMAGEVKHFGRLRWEDCLSSRVQDQSGQHGRTPSLQKGKNNLAWECTLVVPATQEVKVGGLLEPRRLRL

SEQ ID NO: 4280 - protein, 181 aa, Artificial Sequence
  Synthetic polypeptide
LHKQADMQEEKNRIERVLGATLLPDLIQKVLTFALSEEVRPQDTVSVIGGVAGGSKHGRKAAWKFIKDNWEELYNRYQGGFLISRLIKVQWLTPVIPALWDAELSVEGFAVDKMAGEVKHFGRLRWEDCLSSRVQDQSGQHGRTPSLQKGKNNLAWECTLVVPATQEVKVGGLLEPRRLRL

SEQ ID NO: 4281 - protein, 52 aa, Artificial Sequence
  Synthetic polypeptide
CLCRDPSKPVARTHSSAGGQCHKPQQHRAHEGVDIGSHRLYLPRYRPRAATR

SEQ ID NO: 4282 - protein, 104 aa, Artificial Sequence
  Synthetic polypeptide
MKESTLEAIGYICQDIDPEQLQDKSNEILTAIIQGMRKEEPSNNVKLAATNALLNSLEFTKANFDKEGMVVHTGTPATSEAKAGGLLESSYSRPAWATKSDIVP

SEQ ID NO: 4283 - protein, 249 aa, Artificial Sequence
  Synthetic polypeptide
MELITILEKTVSPDRLELEAAQKFLERAAVENLPTFLVELSRVLANPGNSQVARVAAGLQIKNSLTSKDPDIKAQYQQRWLAIDANARREVKNYVLQTLGTETYRPSSASQCVAGIACAEIPVNQWPELIPQLVANVTNPNSTEHMKESTLEAIGYICQDIDPEQLQDKSNEILTAIIQGMRKEEPSNNVKLAATNALLNSLEFTKANFDKEGMVVHTGTPATSEAKAGGLLESSYSRPAWATKSDIVP

SEQ ID NO: 4284 - protein, 134 aa, Artificial Sequence
  Synthetic polypeptide
MNKLYIGNLNESVTPADLEKVFAEHKISYSGQFLVKSGYAFVDCPDEHWAMKAIETFSGKVELQGKRLEIEHSVPKKQRSRKIQIRNIPPQLRWEVLDSLLAQYGTVENCEQAPQRQRFCWFTTVFPVTGRLFL

SEQ ID NO: 4285 - protein, 486 aa, Artificial Sequence
  Synthetic polypeptide
MPRRKRNAGSSSDGTEDSDFSTDLEHTDSSESDGTSRRSARVTRSSARLSQSSQDSSPVRNLQSFGTEEPAYSTRRVTRSQQQPTPVTPKKYPLRQTRSSGSETEQVVDFSDRETKNTADHDESPPRTPTGNAPSSESDIDISSPNVSHDESIAKDMSLKDSGSDLSHRPKRRRFHESYNFNMKCPTPGCNSLGHLTGKHERHFSISGCPLYHNLSADECKVRAQSRDKQIEERMLSHRQDDNNRHATRHQAPTERQLRYKEKVAELRKKRNSGLSKEQKEKYMEHRQTYGNTREPLLENLTSEYDLDLFRRAQARASEDLEKLRLQGQITEGSNMIKTIAFGRYELDTWYHSPYPEEYARLGRLYMCEFCLKYMKSQTILRRHMAKCVWKHPPGDEIYRKGSISVFEVDGKKNKIYCQNLCLLAKLFLDHKTLYYDVEPFLFYVMTEADNTGCHLIGYFSKEKNSFLNYNVSFSITCSQLRSKNR

SEQ ID NO: 4286 - protein, 347 aa, Artificial Sequence
  Synthetic polypeptide
MPRRKRNAGSSSDGTEDSDFSTDLEHTDSSESDGTSRRSARVTRSSARLSQSSQGHLTGKHERHFSISGCPLYHNLSADECKVRAQSRDKQIEERMLSHRQDDNNRHATRHQAPTERQLRYKEKVAELRKKRNSGLSKEQKEKYMEHRQTYGNTREPLLENLTSEYDLDLFRRAQARASEDLEKLRLQGQITEGSNMIKTIAFGRYELDTWYHSPYPEEYARLGRLYMCEFCLKYMKSQTILRRHMAKCVWKHPPGDEIYRKGSISVFEVDGKKNKIYCQNLCLLAKLFLDHKTLYYDVEPFLFYVMTEADNTGCHLIGYFSKEKNSFLNYNVSFSITCSQLRSKNR

SEQ ID NO: 4287 - protein, 376 aa, Artificial Sequence
  Synthetic polypeptide
MPRRKRNAGSSSDGTEDSDFSTDLEHTDSSESDGTSRRSARVTRSSARLSQSSQDSSPVRNLQSFGTEEPAYSTRRVTRSQQQPTPVTPKKYPLRQTRSSGSETEQVVDFSDRGHLTGKHERHFSISGCPLYHNLSADECKAPTERQLRYKEKVAELRKKRNSGLSKEQKEKYMEHRQTYGNTREPLLENLTSEYDLDLFRRAQARASEDLEKLRLQGQITEGSNMIKTIAFGRYELDTWYHSPYPEEYARLGRLYMCEFCLKYMKSQTILRRHMAKCVWKHPPGDEIYRKGSISVFEVDGKKNKIYCQNLCLLAKLFLDHKTLYYDVEPFLFYVMTEADNTGCHLIGYFSKEKNSFLNYNVSFSITCSQLRSKNR

SEQ ID NO: 4288 - protein, 317 aa, Artificial Sequence
  Synthetic polypeptide
MPRRKRNAGSSSDGTEDSDFSTDLEHTDSSESDGTSRRSARVTRSSARLSQSSQGHLTGKHERHFSISGCPLYHNLSADECKAPTERQLRYKEKVAELRKKRNSGLSKEQKEKYMEHRQTYGNTREPLLENLTSEYDLDLFRRAQARASEDLEKLRLQGQITEGSNMIKTIAFGRYELDTWYHSPYPEEYARLGRLYMCEFCLKYMKSQTILRRHMAKCVWKHPPGDEIYRKGSISVFEVDGKKNKIYCQNLCLLAKLFLDHKTLYYDVEPFLFYVMTEADNTGCHLIGYFSKEKNSFLNYNVSFSITCSQLRSKNR

SEQ ID NO: 4289 - protein, 456 aa, Artificial Sequence
  Synthetic polypeptide
MPRRKRNAGSSSDGTEDSDFSTDLEHTDSSESDGTSRRSARVTRSSARLSQSSQDSSPVRNLQSFGTEEPAYSTRRVTRSQQQPTPVTPKKYPLRQTRSSGSETEQVVDFSDRETKNTADHDESPPRTPTGNAPSSESDIDISSPNVSHDESIAKDMSLKDSGSDLSHRPKRRRFHESYNFNMKCPTPGCNSLGHLTGKHERHFSISGCPLYHNLSADECKAPTERQLRYKEKVAELRKKRNSGLSKEQKEKYMEHRQTYGNTREPLLENLTSEYDLDLFRRAQARASEDLEKLRLQGQITEGSNMIKTIAFGRYELDTWYHSPYPEEYARLGRLYMCEFCLKYMKSQTILRRHMAKCVWKHPPGDEIYRKGSISVFEVDGKKNKIYCQNLCLLAKLFLDHKTLYYDVEPFLFYVMTEADNTGCHLIGYFSKEKNSFLNYNVSFSITCSQLRSKNR

SEQ ID NO: 4290 - protein, 330 aa, Artificial Sequence
  Synthetic polypeptide
MSLKDSGSDLSHRPKRRRFHESYNFNMKCPTPGCNSLGHLTGKHERHFSISGCPLYHNLSADECKVRAQSRDKQIEERMLSHRQDDNNRHATRHQAPTERQLRYKEKVAELRKKRNSGLSKEQKEKYMEHRQTYGNTREPLLENLTSEYDLDLFRRAQARASEDLEKLRLQGQITEGSNMIKTIAFGRYELDTWYHSPYPEEYARLGRLYMCEFCLKYMKSQTILRRHMAKCVWKHPPGDEIYRKGSISVFEVDGKKNKIYCQNLCLLAKLFLDHKTLYYDVEPFLFYVMTEADNTGCHLIGYFSKEKNSFLNYNVSFSITCSQLRSKNR

SEQ ID NO: 4291 - protein, 300 aa, Artificial Sequence
  Synthetic polypeptide
MSLKDSGSDLSHRPKRRRFHESYNFNMKCPTPGCNSLGHLTGKHERHFSISGCPLYHNLSADECKAPTERQLRYKEKVAELRKKRNSGLSKEQKEKYMEHRQTYGNTREPLLENLTSEYDLDLFRRAQARASEDLEKLRLQGQITEGSNMIKTIAFGRYELDTWYHSPYPEEYARLGRLYMCEFCLKYMKSQTILRRHMAKCVWKHPPGDEIYRKGSISVFEVDGKKNKIYCQNLCLLAKLFLDHKTLYYDVEPFLFYVMTEADNTGCHLIGYFSKEKNSFLNYNVSFSITCSQLRSKNR

SEQ ID NO: 4292 - protein, 516 aa, Artificial Sequence
  Synthetic polypeptide
MPRRKRNAGSSSDGTEDSDFSTDLEHTDSSESDGTSRRSARVTRSSARLSQSSQDSSPVRNLQSFGTEEPAYSTRRVTRSQQQPTPVTPKKYPLRQTRSSGSETEQVVDFSDRETKNTADHDESPPRTPTGNAPSSESDIDISSPNVSHDESIAKDMSLKDSGSDLSHRPKRRRFHESYNFNMKCPTPGCNSLGHLTGKHERHFSISGCPLYHNLSADECKVRAQSRDKQIEERMLSHRQDDNNRHATRHQAPTERQLRYKEKVAELRKKRNSGLSKEQKEKYMEHRQTYGNTREPLLENLTSEYDLDLFRRAQARASEDLEKLRLQGQITEGSNMIKTIAFGRYELDTWYHSPYPEEYARLGRLYMCEFCLKYMKSQTILRRHMAKCVWKHPPGDEIYRKGSISVFEVDGKKNKIYCQNLCLLAKLFLDHKTLYYDVEPFLFYVMTEADNTGCHLIGYFSKEKNSFLNYNVSCILTMPQYMRQGYGKMLIDFINCGPKIGEYSTIRYFERQTTFT

SEQ ID NO: 4293 - protein, 377 aa, Artificial Sequence
  Synthetic polypeptide
MPRRKRNAGSSSDGTEDSDFSTDLEHTDSSESDGTSRRSARVTRSSARLSQSSQGHLTGKHERHFSISGCPLYHNLSADECKVRAQSRDKQIEERMLSHRQDDNNRHATRHQAPTERQLRYKEKVAELRKKRNSGLSKEQKEKYMEHRQTYGNTREPLLENLTSEYDLDLFRRAQARASEDLEKLRLQGQITEGSNMIKTIAFGRYELDTWYHSPYPEEYARLGRLYMCEFCLKYMKSQTILRRHMAKCVWKHPPGDEIYRKGSISVFEVDGKKNKIYCQNLCLLAKLFLDHKTLYYDVEPFLFYVMTEADNTGCHLIGYFSKEKNSFLNYNVSCILTMPQYMRQGYGKMLIDFINCGPKIGEYSTIRYFERQTTFT

SEQ ID NO: 4294 - protein, 406 aa, Artificial Sequence
  Synthetic polypeptide
MPRRKRNAGSSSDGTEDSDFSTDLEHTDSSESDGTSRRSARVTRSSARLSQSSQDSSPVRNLQSFGTEEPAYSTRRVTRSQQQPTPVTPKKYPLRQTRSSGSETEQVVDFSDRGHLTGKHERHFSISGCPLYHNLSADECKAPTERQLRYKEKVAELRKKRNSGLSKEQKEKYMEHRQTYGNTREPLLENLTSEYDLDLFRRAQARASEDLEKLRLQGQITEGSNMIKTIAFGRYELDTWYHSPYPEEYARLGRLYMCEFCLKYMKSQTILRRHMAKCVWKHPPGDEIYRKGSISVFEVDGKKNKIYCQNLCLLAKLFLDHKTLYYDVEPFLFYVMTEADNTGCHLIGYFSKEKNSFLNYNVSCILTMPQYMRQGYGKMLIDFINCGPKIGEYSTIRYFERQTTFT

SEQ ID NO: 4295 - protein, 347 aa, Artificial Sequence
  Synthetic polypeptide
MPRRKRNAGSSSDGTEDSDFSTDLEHTDSSESDGTSRRSARVTRSSARLSQSSQGHLTGKHERHFSISGCPLYHNLSADECKAPTERQLRYKEKVAELRKKRNSGLSKEQKEKYMEHRQTYGNTREPLLENLTSEYDLDLFRRAQARASEDLEKLRLQGQITEGSNMIKTIAFGRYELDTWYHSPYPEEYARLGRLYMCEFCLKYMKSQTILRRHMAKCVWKHPPGDEIYRKGSISVFEVDGKKNKIYCQNLCLLAKLFLDHKTLYYDVEPFLFYVMTEADNTGCHLIGYFSKEKNSFLNYNVSCILTMPQYMRQGYGKMLIDFINCGPKIGEYSTIRYFERQTTFT

SEQ ID NO: 4296 - protein, 486 aa, Artificial Sequence
  Synthetic polypeptide
MPRRKRNAGSSSDGTEDSDFSTDLEHTDSSESDGTSRRSARVTRSSARLSQSSQDSSPVRNLQSFGTEEPAYSTRRVTRSQQQPTPVTPKKYPLRQTRSSGSETEQVVDFSDRETKNTADHDESPPRTPTGNAPSSESDIDISSPNVSHDESIAKDMSLKDSGSDLSHRPKRRRFHESYNFNMKCPTPGCNSLGHLTGKHERHFSISGCPLYHNLSADECKAPTERQLRYKEKVAELRKKRNSGLSKEQKEKYMEHRQTYGNTREPLLENLTSEYDLDLFRRAQARASEDLEKLRLQGQITEGSNMIKTIAFGRYELDTWYHSPYPEEYARLGRLYMCEFCLKYMKSQTILRRHMAKCVWKHPPGDEIYRKGSISVFEVDGKKNKIYCQNLCLLAKLFLDHKTLYYDVEPFLFYVMTEADNTGCHLIGYFSKEKNSFLNYNVSCILTMPQYMRQGYGKMLIDFINCGPKIGEYSTIRYFERQTTFT

SEQ ID NO: 4297 - protein, 360 aa, Artificial Sequence
  Synthetic polypeptide
MSLKDSGSDLSHRPKRRRFHESYNFNMKCPTPGCNSLGHLTGKHERHFSISGCPLYHNLSADECKVRAQSRDKQIEERMLSHRQDDNNRHATRHQAPTERQLRYKEKVAELRKKRNSGLSKEQKEKYMEHRQTYGNTREPLLENLTSEYDLDLFRRAQARASEDLEKLRLQGQITEGSNMIKTIAFGRYELDTWYHSPYPEEYARLGRLYMCEFCLKYMKSQTILRRHMAKCVWKHPPGDEIYRKGSISVFEVDGKKNKIYCQNLCLLAKLFLDHKTLYYDVEPFLFYVMTEADNTGCHLIGYFSKEKNSFLNYNVSCILTMPQYMRQGYGKMLIDFINCGPKIGEYSTIRYFERQTTFT

SEQ ID NO: 4298 - protein, 330 aa, Artificial Sequence
  Synthetic polypeptide
MSLKDSGSDLSHRPKRRRFHESYNFNMKCPTPGCNSLGHLTGKHERHFSISGCPLYHNLSADECKAPTERQLRYKEKVAELRKKRNSGLSKEQKEKYMEHRQTYGNTREPLLENLTSEYDLDLFRRAQARASEDLEKLRLQGQITEGSNMIKTIAFGRYELDTWYHSPYPEEYARLGRLYMCEFCLKYMKSQTILRRHMAKCVWKHPPGDEIYRKGSISVFEVDGKKNKIYCQNLCLLAKLFLDHKTLYYDVEPFLFYVMTEADNTGCHLIGYFSKEKNSFLNYNVSCILTMPQYMRQGYGKMLIDFINCGPKIGEYSTIRYFERQTTFT

SEQ ID NO: 4299 - protein, 180 aa, Artificial Sequence
  Synthetic polypeptide
MIQRKEWDLSEYSYKDPEDQGNLYIGYTMQVGSFILHPKNITIVTGAPRHRHMGAVFLLSQEAGGDLRRRQVLEGSQVGAYFGSAIALADLNNDGWQDLLVGAPYYFERKEEVGGAIYVFMNQAGTSFPAHPSLLLHGPSGSAFGLSVASIGDINQDGFQVSQDIAENQEEGKGASEDPK

SEQ ID NO: 4300 - protein, 405 aa, Artificial Sequence
  Synthetic polypeptide
MGPGPSRAPRAPRLMLCALALMVAAGGCVVSAFNLDTRFLVVKEAGNPGSLFGYSVALHRQTERQQRYLLLAGAPRELAVPDGYTNRTGAVYLCPLTAHKDDCERMNITVKNDPGHHIIEDMWLGVTVASQGPAGRVLVCAHRYTQVLWSGSEDQRRMVGKCYVRGNDLELDSSDDWQTYHNEMCNSNTDYLETGMCQLGTSGGFTQNTVYFGAPGAYNWKGNSYMIQRKEWDLSEYSYKDPEDQGNLYIGYTMQVGSFILHPKNITIVTGAPRHRHMGAVFLLSQEAGGDLRRRQVLEGSQVGAYFGSAIALADLNNDGWQDLLVGAPYYFERKEEVGGAIYVFMNQAGTSFPAHPSLLLHGPSGSAFGLSVASIGDINQDGFQVSQDIAENQEEGKGASEDPK

SEQ ID NO: 4301 - protein, 13 aa, Artificial Sequence
  Synthetic polypeptide
HQPGWISGFPGHS

SEQ ID NO: 4302 - protein, 21 aa, Artificial Sequence
  Synthetic polypeptide
MASVVLALRTRTAAGRGGVHL

SEQ ID NO: 4303 - protein, 356 aa, Artificial Sequence
  Synthetic polypeptide
MRAPARGTGCCGRSGGRWLAGAAQPRCLWAGGAGQRFMVPGGTMKSLKKDSRLRITPTRLLEASENVKEKKRAKGPEQPTPTIQEEPEPVSNVLQGDDILALAIKKEDLKEQHIPRLTEKEDKRVITQKFIIRKLKPMDPRRKVCHLVARPANPDEATKPLDYSGPGDSFDGSDQILPHHILGSLQDFKRIALARGNTQLAERIPTSPCLMTLISAEGESKQKAPKEEKRPPWAPPPQHNFLKNWQRNTALRKKQQEALSEHLKKPVSELLMHTGETYRRIQEERELIDCTLPTRRDRKSWENSGFWSRLEYLGDEMTGLVMTKTKTQRGLMEPITHIRKPHSIRVETVWHLENFQ

SEQ ID NO: 4304 - protein, 18 aa, Artificial Sequence
  Synthetic polypeptide
GVSGPAVQGNVSWCRAAP

SEQ ID NO: 4305 - protein, 319 aa, Artificial Sequence
  Synthetic polypeptide
MVPGGTMKSLKKDSRLRITPTRLLEASENVKEKKRAKGPEQPTPTIQEEPEPVSNVLQGDDILALAIKKEDLKEQHIPRLTEKEDKRVITQKFIIRKLKPMDPRRKVCHLVARPANPDEATKPLDYSGPGDSFDGSDQILPHHILGSLQDFKRIALARGNTQLAERIPTSPCLMTLISAEGESKQKAPKEEKRPPWAPPPQHNFLKNWQRNTALRKKQQEALSEHLKKPVSELLMHTGETYRRIQEERELIDCTLPTRRDRKSWENSGFWSRLEYLGDEMTGLVMTKTKTQRGLMEPITHIRKPHSIRVETVWHLENFQ

SEQ ID NO: 4306 - protein, 35 aa, Artificial Sequence
  Synthetic polypeptide
MEKPPSLGDQETRRKARVAEHGGTRLWSQLLEKLR

SEQ ID NO: 4307 - protein, 46 aa, Artificial Sequence
  Synthetic polypeptide
MADLLGSILSSMEKPPSLGDQETRRKARVAEHGGTRLWSQLLEKLR

SEQ ID NO: 4308 - protein, 480 aa, Artificial Sequence
  Synthetic polypeptide
MDALCGSGELGSKFWDSNLSVHTENPDLTPCFQNSLLAWVPCIYLWVALPCYLLYLRHHCRGYIILSHLSKLKMVLGVLLWCVSWADLFYSFHGLVHGRAPAPVFFVTPLVVGVTMLLATLLIQYERLQGVQSSGVLIIFWFLCVVCAIVPFRSKILLAKAEGEISDPFRFTTFYIHFALVLSALILACFREKPPFFSAKNVDPNPYPETSAGFLSRLFFWWFTKMAIYGYRHPLEEKDLWSLKEEDRSQMVVQQLLEAWRKQEKQTARHKASAAPGKNASGEDEVLLGARPRPRKPSFLKALLATFGSSFLISACFKLIQDLLSFINPQLLSILIRFISNPMAPSWWGFLVAGLMFLCSMMQSLILQHYYHYIFVTGVKFRTGIMGVIYRKALVITNSVKRASTVGEIVNLMSVDAQRFMDLAPFLNLLWSAPLQIILAIYFLWQNLGPSVLAGVAFMVLLIPLNGAVAVKMRAFQSLP

SEQ ID NO: 4309 - protein, 498 aa, Artificial Sequence
  Synthetic polypeptide
MDALCGSGELGSKFWDSNLSVHTENPDLTPCFQNSLLAWVPCIYLWVALPCYLLYLRHHCRGYIILSHLSKLKMVLGVLLWCVSWADLFYSFHGLVHGRAPAPVFFVTPLVVGVTMLLATLLIQYERLQGVQSSGVLIIFWFLCVVCAIVPFRSKILLAKAEGEISDPFRFTTFYIHFALVLSALILACFREKPPFFSAKNVDPNPYPETSAGFLSRLFFWWFTKLLNPDPLRGCLPGFTSPQDGHLWLPASPGGEGPLVPKGRGQIPDGGAAAAGGMEEAGKADGTTQGFSSTWEKCLRRGRGAAGCPAQAPEALLPEGPAGHLRLQLPHQCLLQAYPGPALLHQSTAAQHPDQVYLQPHGPLLVGLPGGWADVPVLHDAVADLTTLLPLHLCDWGEVSYWDHGCHLQEGSGYHQLSQTCVHCGGNCQPHVSGCPALHGPCPLPQSAVVSTPADHPGDLLPLAEPRSLCPGWSRFHGLADSTQRSCGREDARLPVTS

SEQ ID NO: 4310 - protein, 764 aa, Artificial Sequence
  Synthetic polypeptide
MDALCGSGELGSKFWDSNLSVHTENPDLTPCFQNSLLAWVPCIYLWVALPCYLLYLRHHCRGYIILSHLSKLKMVLGVLLWCVSWADLFYSFHGLVHGRAPAPVFFVTPLVVGVTMLLATLLIQYERLQGVQSSGVLIIFWFLCVVCAIVPFRSKILLAKAEGEISDPFRFTTFYIHFALVLSALILACFREKPPFFSAKNVDPNPYPETSAGFLSRLFFWWFTKMAIYGYRHPLEEKDLWSLKEEDRSQMVVQQLLEAWRKQEKQTARHKASAAPGKNASGEDEVLLGARPRPRKPSFLKALLATFGSSFLISACFKLIQDLLSFINPQLLSILIRFISNPMAPSWWGFLVAGLMFLCSMMQSLILQHYYHYIFVTGVKFRTGIMGVIYRKALVITNSVKRASTVGEIVNLMSVDAQRFMDLAPFLNLLWSAPLQIILAIYFLWQNLGPSVLAGVAFMVLLIPLNGAVAVKMRAFQVKQMKLKDSRIKLMSEILNGIKVLKLYAWEPSFLKQVEGIRQGELQLLRTAAYLHTTTTFTWMCSPFLVTLITLWVYVYVDPNNVLDAEKAFVSVSLFNILRLPLNMLPQLISNLTQASVSLKRIQQFLSQEELDPQSVERKTISPGYAITIHSGTFTWAQDLPPTLHSLDIQVPKGALVAVVGPVGCGKSSLVSALLGEMEKLEGKVHMKGSVAYVPQQAWIQNCTLQENVLFGKALNPKRYQQTLEACALLADLEMLPGGDQTEIGEKSVARHGGPAINPSYSGG

SEQ ID NO: 4311 - protein, 789 aa, Artificial Sequence
  Synthetic polypeptide
MDALCGSGELGSKFWDSNLSVHTENPDLTPCFQNSLLAWVPCIYLWVALPCYLLYLRHHCRGYIILSHLSKLKMVLGVLLWCVSWADLFYSFHGLVHGRAPAPVFFVTPLVVGVTMLLATLLIQYERLQGVQSSGVLIIFWFLCVVCAIVPFRSKILLAKAEGEISDPFRFTTFYIHFALVLSALILACFREKPPFFSAKNVDPNPYPETSAGFLSRLFFWWFTKMAIYGYRHPLEEKDLWSLKEEDRSQMVVQQLLEAWRKQEKQTARHKASAAPGKNASGEDEVLLGARPRPRKPSFLKALLATFGSSFLISACFKLIQDLLSFINPQLLSILIRFISNPMAPSWWGFLVAGLMFLCSMMQSLILQHYYHYIFVTGVKFRTGIMGVIYRKALVITNSVKRASTVGEIVNLMSVDAQRFMDLAPFLNLLWSAPLQIILAIYFLWQNLGPSVLAGVAFMVLLIPLNGAVAVKMRAFQVKQMKLKDSRIKLMSEILNGIKVLKLYAWEPSFLKQVEGIRQGELQLLRTAAYLHTTTTFTWMCSPFLVTLITLWVYVYVDPNNVLDAEKAFVSVSLFNILRLPLNMLPQLISNLTQASVSLKRIQQFLSQEELDPQSVERKTISPGYAITIHSGTFTWAQDLPPTLHSLDIQVPKGALVAVVGPVGCGKSSLVSALLGEMEKLEGKVHMKGSVAYVPQQAWIQNCTLQENVLFGKALNPKRYQQTLEACALLADLEMLPGGDQTEIGEKLLGRLRHENCSNARGRGCSEPRSHHCTPAWVSETPSQEKKKK

SEQ ID NO: 4312 - protein, 561 aa, Artificial Sequence
  Synthetic polypeptide
MPPERRRRMKLDRRTGAKPKRKPGMRPDWKAGAGPGGPPQKPAPSSQRKPPARPSAAAAAIAVAAAEEERRLRQRNRLRLEEDKPAVERCLEELVFGDVENDEDALLRRLRGPRVQEHEDSGDSEVENEAKGNFPPQKKPVWVDEEDEDEEMVDMMNNRFRKDMMKNASESKLSKDNLKKRLKEEFQHAMGGVPAWAETTKRKTSSDDESEEDEDDLLQRTGNFISTSTSLPRGILKMKNCQHANAERPTVARISSVQFHPGAQIVMVAGLDNAVSLFQVDGKTNPKIQSIYLERFPIFKACFSANGEEVLATSTHSKVLYVYDMLAGKLIPVHQVRGLKEKIVRSFEVSPDGSFLLINGIAGYLHLLAMKTKELIGSMKINGRVAASTFSSDSKKVYASSGDGEVYVWDVNSRKCLNRFVDEGSLYGLSIATSRNGQYVACGSNCGVVNIYNQDSCLQETNPKPIKAIMNLVTGVTSLTFNPTTEILAIASEKMKEAVRLVHLPSCTVFSNFPVIKNKNISHVHTMDFSPRSGYFALGNEKGKALMYRTELEKLVVLPKA

SEQ ID NO: 4313 - protein, 64 aa, Artificial Sequence
  Synthetic polypeptide
MDTFTVQDSTAMSWWRNNFWIILAVAIIVVSVGLGLILYCVCLSFLIHTVKGGTSTNLQEPFQP

SEQ ID NO: 4314 - protein, 843 aa, Artificial Sequence
  Synthetic polypeptide
MAQPGPASQPDVSLQQRVAELEKINAEFLRAQQQLEQEFNQKRAKFKELYLAKEEDLKRQNAVLQAAQDDLGHLRTQLWEAQAEMENIKAIATVSENTKQEAIDEVKRQWREEVASLQAVMKETVRDYEHQFHLRLEQERTQWAQYRESAEREIADLRRRLSEGQEEENLENEMKKAQEDAEKLRSVVMPMEKEIAALKDKLTEAEDKIKELEASKVKELNHYLEAEKSCRTDLEMYVAVLNTQKSVLQEDAEKLRKELHEVCHLLEQERQQHNQLKHTWQKANDQFLESQRLLMRDMQRMEIVLTSEQLRQVEELKKKDQEDDEQQRLNKRKDHKKADVEEEIKIPVVCALTQEESSAQLSNEEEHLDSTRGSVHSLDAGLLLPSGDPFSKSDNDMFKDGLRRAQSTDSLGTSGSLQSKALGYNYKAKSAGNLDESDFGPLVGADSVSENFDTASLGSLQMPSGFMLTKDQERAIKAMTPEQEETASLLSSVTQGMESAYVSPSGYRLVSETEWNLLQKEVHNAGNKLGRRCDMCSNYEKQLQGIQIQEAETRDQVKKLQLMLRQANDQLEKTMKDKQELEDFIKQSSEDSSHQISALVLRAQASEILLEELQQGLSQAKRDVQEQMAVLMQSREQVSEELVRLQKDNDSLQGKHSLHVSLQQAEDFILPDTTEALRELVLKYREDIINVRTAADHVEEKLKAEILFLKEQIQAEQCLKENLEETLQLEIENCKEEIASISSLKAELERIKVEKGQLESTLREKSQQLESLQEIKISLEEQLKKETAAKATVEQLMFEEKNKAQRLQTELDVSEQVQRDFVKLSQTLQRGVLSGKHPHLIPS

SEQ ID NO: 4315 - protein, 810 aa, Artificial Sequence
  Synthetic polypeptide
MAQPGPASQPDVSLQQRVAELEKINAEFLRAQQQLEQEFNQKRAKFKELYLAKEEDLKRQNAVLQAAQDDLGHLRTQLWEAQAEMENIKAIATVSENTKQEAIDEVKRQWREEVASLQAVMKETVRDYEHQFHLRLEQERTQWAQYRESAEREIADLRRRLSEGQEEENLENEMKKAQEDAEKLRSVVMPMEKEIAALKDKLTEAEDKIKELEASKVKELNHYLEAEKSCRTDLEMYVAVLNTQKSVLQEDAEKLRKELHEVCHLLEQERQQHNQLKHTWQKANDQFLESQRLLMRDMQRMEIVLTSEQLRQVEELKKKDQEDDEQQRLNKRKDHKKADVEEEIKIPVVCALTQEESSAQLSNEEEHLDSTRGSVHSLDAGLLLPSGDPFSKSDNDMFKDGLRRAQSTDSLGTSGSLQSKALGYNYKAKSAGNLDESDFGPLVGADSVSENFDTASLGSLQMPSGFMLTKDQERAIKAMTPEQEETASLLSSVTQGMESAYVSPSGYRLVSETEWNLLQKEVHNAGNKLGRRCDMCSNYEKQLQGIQIQEAETRDQVKKLQLMLRQANDQLEKTMKDKQELEDFIKQSSEDSSHQISALVLRAQASEILLEELQQGLSQAKRDVQEQMAVLMQSREQVSEELVRLQKDNDSLQGKHSLHVSLQQAEDFILPDTTEALRELVLKYREDIINVRTAADHVEEKLKAEILFLKEQIQAEQCLKENLEETLQLEIENCKEEIASISSLKAELERIKVEKGQATVEQLMFEEKNKAQRLQTELDVSEQVQRDFVKLSQTLQRGVLSGKHPHLIPS

SEQ ID NO: 4316 - protein, 800 aa, Artificial Sequence
  Synthetic polypeptide
MAQPGPASQPDEDLKRQNAVLQAAQDDLGHLRTQLWEAQAEMENIKAIATVSENTKQEAIDEVKRQWREEVASLQAVMKETVRDYEHQFHLRLEQERTQWAQYRESAEREIADLRRRLSEGQEEENLENEMKKAQEDAEKLRSVVMPMEKEIAALKDKLTEAEDKIKELEASKVKELNHYLEAEKSCRTDLEMYVAVLNTQKSVLQEDAEKLRKELHEVCHLLEQERQQHNQLKHTWQKANDQFLESQRLLMRDMQRMEIVLTSEQLRQVEELKKKDQEDDEQQRLNKRKDHKKADVEEEIKIPVVCALTQEESSAQLSNEEEHLDSTRGSVHSLDAGLLLPSGDPFSKSDNDMFKDGLRRAQSTDSLGTSGSLQSKALGYNYKAKSAGNLDESDFGPLVGADSVSENFDTASLGSLQMPSGFMLTKDQERAIKAMTPEQEETASLLSSVTQGMESAYVSPSGYRLVSETEWNLLQKEVHNAGNKLGRRCDMCSNYEKQLQGIQIQEAETRDQVKKLQLMLRQANDQLEKTMKDKQELEDFIKQSSEDSSHQISALVLRAQASEILLEELQQGLSQAKRDVQEQMAVLMQSREQVSEELVRLQKDNDSLQGKHSLHVSLQQAEDFILPDTTEALRELVLKYREDIINVRTAADHVEEKLKAEILFLKEQIQAEQCLKENLEETLQLEIENCKEEIASISSLKAELERIKVEKGQLESTLREKSQQLESLQEIKISLEEQLKKETAAKATVEQLMFEEKNKAQRLQTELDVSEQVQRDFVKLSQTLQRGVLSGKHPHLIPS

SEQ ID NO: 4317 - protein, 16 aa, Artificial Sequence
  Synthetic polypeptide
FPKRADPSRTVFKRKS

SEQ ID NO: 4318 - protein, 228 aa, Artificial Sequence
  Synthetic polypeptide
MGGLWRPGWRCVPFCGWRWIHPGSPTRAAERVEPFLRPEWSGTGGAERGLRWLGTWKRCSLRARHPALQPPRRPKSSNPFTRAQEEERRRQNKTTLTYVAAVAVGMLGASYAAVPLYRLYCQTTGLGGSAVAGHASDKIENMVPVKDRIIKISFNADVHASLQWNFRPQQTEIYVVPGETALAFYRAKNPTDKPVIGISTYNIVPFEAGQYFNKIQIRKISTVGAFAT

SEQ ID NO: 4319 - protein, 7 aa, Artificial Sequence
  Synthetic polypeptide
CTGVLQS

SEQ ID NO: 4320 - protein, 53 aa, Artificial Sequence
  Synthetic polypeptide
MKTLPVLVLSLTLLTVFSETSPILTEKQAKQLLRSRRQDRPSKPGFPDEPMRT

SEQ ID NO: 4321 - protein, 77 aa, Artificial Sequence
  Synthetic polypeptide
MASFKLADSVWEDSLSKRQRNQGRMKTLPVLVLSLTLLTVFSETSPILTEKQAKQLLRSRRQDRPSKPGFPDEPMRT

SEQ ID NO: 4322 - protein, 54 aa, Artificial Sequence
  Synthetic polypeptide
MKTLPVLVLSLTLLTVFSETSPILTEKQAKQLLRSRRQDRPSKPGFPDEPMRGS

SEQ ID NO: 4323 - protein, 78 aa, Artificial Sequence
  Synthetic polypeptide
MASFKLADSVWEDSLSKRQRNQGRMKTLPVLVLSLTLLTVFSETSPILTEKQAKQLLRSRRQDRPSKPGFPDEPMRGS

SEQ ID NO: 4324 - protein, 176 aa, Artificial Sequence
  Synthetic polypeptide
MAGSRLETVGSIFSRTRDLVRAGVLKEKPLWFDVYDAFPPLREPVFQRPRVRYGKAKAPIQDIWYHEDRIRAKFYSVYGSGQRAFDLFNPNFKSTCQRFVEKYTELQKLGETDEEKLFVETGKALLAEGVILRRVGEARTEHCPETDIHEEAWDERPHGEKGPPSFCTNYQRRKGG

SEQ ID NO: 4325 - protein, 152 aa, Artificial Sequence
  Synthetic polypeptide
MAGSRLETVGSIFSRTRDLVRAGVLKEKPLWFDVYDAFPPLREPVFQRPRVRYGKAKAPIQDIWYHEDRIRAKFYSVYGSGQRAFDLFNPNFKSTCQRFVEKYTELQKLGETDEEKLFVETGKALLAEGVILRRVGEARTPTQCEDDKDEDL

SEQ ID NO: 4326 - protein, 111 aa, Artificial Sequence
  Synthetic polypeptide
MAGSRLETVGSIFSRTRDLVRAGVLKEKPLWFDVYDAFPPLREPVFQRPRVRYGKAKAPIQDIWYHEDRIRARPRRVDHLRSGVRNQPGQHGETPPLLKMQKSAGRGGMHL

SEQ ID NO: 4327 - protein, 27 aa, Artificial Sequence
  Synthetic polypeptide
MAKPKLPSKTSGTTRIGLERGRGGWIT

SEQ ID NO: 4328 - protein, 343 aa, Artificial Sequence
  Synthetic polypeptide
MAETVWSTDTGEAVYRSRDPVRNLRLRVHLQRITSSNFLHYQPAAELGKDLIDLATFRPQPTASGHRPEEDEEEEIVIGWQEKLFSQFEVDLYQNETACQSPLDYQYRQEILKLENSGGKKNRRIFTYTDSDRYTNLEEHCQRMTTAASEVPSFLVERMANVRRRRQDRRGMEGGILKSRIVTWEPSEEFVRNNHVINTPLQTMHIMADLGPYKKLGYKKYEHVLCTLKVDSNGVITVKPDFTGLKGPYRIETEGEKQELWKYTIDNVSPHAQPEEEERERRVFKDLYGRHKEYLSSLVGTDFEMTVPGALRLFVNGEVVSAQGYEYDNLYVHFFVELPTARA

SEQ ID NO: 4329 - protein, 333 aa, Artificial Sequence
  Synthetic polypeptide
MAVPVSSFAQRTRSRFRVHLQRITSSNFLHYQPAAELGKDLIDLATFRPQPTASGHRPEEDEEEEIVIGWQEKLFSQFEVDLYQNETACQSPLDYQYRQEILKLENSGGKKNRRIFTYTDSDRYTNLEEHCQRMTTAASEVPSFLVERMANVRRRRQDRRGMEGGILKSRIVTWEPSEEFVRNNHVINTPLQTMHIMADLGPYKKLGYKKYEHVLCTLKVDSNGVITVKPDFTGLKGPYRIETEGEKQELWKYTIDNVSPHAQPEEEERERRVFKDLYGRHKEYLSSLVGTDFEMTVPGALRLFVNGEVVSAQGYEYDNLYVHFFVELPTARA

SEQ ID NO: 4330 - protein, 140 aa, Artificial Sequence
  Synthetic polypeptide
MHIMADLGPYKKLGYKKYEHVLCTLKVDSNGVITVKPDFTGLKGPYRIETEGEKQELWKYTIDNVSPHAQPEEEERERRVFKDLYGRHKEYLSSLVGTDFEMTVPGALRLFVNGEVVSAQGYEYDNLYVHFFVELPTARA

SEQ ID NO: 4331 - protein, 9 aa, Artificial Sequence
  Synthetic polypeptide
WRGRFSPRL

SEQ ID NO: 4332 - protein, 53 aa, Artificial Sequence
  Synthetic polypeptide
ASSSHASSPGSPQKSLSGTTTSLTPLFRQCTSWQTWGPIKSLAIRSMNMSCVL

SEQ ID NO: 4333 - protein, 84 aa, Artificial Sequence
  Synthetic polypeptide
MWKYTIDNVSPHAQPEEEERERRVFKDLYGRHKEYLSSLVGTDFEMTVPGALRLFVNGEVVSAQGYEYDNLYVHFFVELPTARA

SEQ ID NO: 4334 - protein, 287 aa, Artificial Sequence
  Synthetic polypeptide
MRGKTFRFEMQRDLVSFPLSPAVRVKLVSAGFQTAEELLEVKPSELSKEVGISKAEALETLQIIRRECLTNKPRYAGTSESHKKCTALELLEQEHTQGFIITFCSALDDILGGGVPLMKTTEICGAPGVGKTQLCMQLAVDVQIPECFGGVAGEAVFIDTEGSFMVDRVVDLATACIQHLQLIAEKHKGEEHRKALEDFTLDNILSHIYYFRCRDYTELLAQVYLLPDFLSEHSKVRLVIVDGIAFPFRHDLDDLSLRTRLLNGLAQQMISLANNHRLAARCGNSHL

SEQ ID NO: 4335 - protein, 32 aa, Artificial Sequence
  Synthetic polypeptide
RNLWCTRCWKNTIMYAVGSRCADTRMFWRSGR

SEQ ID NO: 4336 - protein, 52 aa, Artificial Sequence
  Synthetic polypeptide
VRLVIVDGIAFPFRHDLDDLSLRTRLLNGLAQQMISLANNHRLAARCGNSHL

SEQ ID NO: 4337 - protein, 68 aa, Artificial Sequence
  Synthetic polypeptide
MPKFKQRRRKLKAKAERLFKKKEASHFQSKLITPPPPPPSPERSAASLLKPVRPRTHREERITPDALP

SEQ ID NO: 4338 - protein, 95 aa, Artificial Sequence
  Synthetic polypeptide
MGHCSLKLLCSREPPASPFRVARTIEIMPKFKQRRRKLKAKAERLFKKKEASHFQSKLITPPPPPPSPERSAASLLKPVRPRTHREERITPDALP

SEQ ID NO: 4339 - protein, 367 aa, Artificial Sequence
  Synthetic polypeptide
MPKFKQRRRKLKAKAERLFKKKEASHFQSKLITPPPPPPSPERVGISSIDISQSRSWLTSSWNFNFPNIRDAIKLWTNRVWSIYSWCQNCITQSLEVLKDTIFPSRICHRELYSVKQQFCILESKLCKLQEALKTISESSSCPSCGQTCHMSGKLTNVPACVLITPGDSKAVLPPTLPQPASHFPPPPPPPPLPPPPPPLAPVLLRKPSLAKALQAGPLKKDGPMQITVKDLLTVKLKKTQSLDEKRKLIPSPKARNPLVTVSDLQHVTLKPNSKVLSTRVTNVLITPGKSQMDLRKLLRKVDVERSPGGTPLTNKENMETGTGLTPVMTQALRRKFQPGVVVHACSSSYLGSCVGGSLEPRRSRLQ

SEQ ID NO: 4340 - protein, 10 aa, Artificial Sequence
  Synthetic polypeptide
KKSDGSAETA

SEQ ID NO: 4341 - protein, 74 aa, Artificial Sequence
  Synthetic polypeptide
DLRKLLRKVDVERSPGGTPLTNKENMETGTGLTPVMTQALRRKFQPGVVVHACSSSYLGSCVGGSLEPRRSRLQ

SEQ ID NO: 4342 - protein, 636 aa, Artificial Sequence
  Synthetic polypeptide
MSRFPAVAGRAPRRQEEGERSRDLQEERLSAVCIADREEKGCTSQEGGTTPTFPIQKQRKKIIQAVRDNSFLIVTGNTGSGKTTQLPKYLYEAGFSQHGMIGVTQPRKVAAISVAQRVAEEMKCTLGSKVGYQVRFDDCSSKETAIKYMTDGCLLKHILGDPNLTKFSVIILDEAHERTLTTDILFGLLKKLFQEKSPNRKEHLKVVVMSATMELAKLSAFFGNCPIFDIPGRLYPVREKFCNLIGPRDRENTAYIQAIVKVTMDIHLNEMAGDILVFLTGQFEIEKSCELLFQMAESVDYDYDVQDTTLDGLLILPCYGSMTTDQQRRIFLPPPPGIRKCVISTNISATSLTIDGIRYVVDGGFVKQLNHNPRLGLDILEVVPISKSEALQRSGRAGRTSSGKCFRIYSKDFWNQCMPDHVIPEIKRTSLTSVVLTLKCLAIHDVIRFPYLDPPNERLILEALKQLYQCDAIDRSGHVTRLGLSMVEFPLPPHLTCAVIKAASLDCEDLLLPIAAMLSVENVFIRPVDPEYQKEAEQRHRELAAKAGGFNDFATLAVIFEQCKSSGAPASWCQKHWIHWRCLFSAFRVEAQLRELIRKLKQQSDFPKETFEGPKHEVLRRCLCAGYFKNVARRIQ

SEQ ID NO: 4343 - protein, 588 aa, Artificial Sequence
  Synthetic polypeptide
MIGVTQPRKVAAISVAQRVAEEMKCTLGSKVGYQVRFDDCSSKETAIKYMTDGCLLKHILGDPNLTKFSVIILDEAHERTLTTDILFGLLKKLFQEKSPNRKEHLKVVVMSATMELAKLSAFFGNCPIFDIPGRLYPVREKFCNLIGPRDRENTAYIQAIVKVTMDIHLNEMAGDILVFLTGQFEIEKSCELLFQMAESVDYDYDVQDTTLDGLLILPCYGSMTTVSQTSLTFVTHIQIMKQISENQHSLTGLTIAGITGVSHHARPRNMTCNEKLNQQRRIFLPPPPGIRKCVISTNISATSLTIDGIRYVVDGGFVKQLNHNPRLGLDILEVVPISKSEALQRSGRAGRTSSGKCFRIYSKDFWNQCMPDHVIPEIKRTSLTSVVLTLKCLAIHDVIRFPYLDPPNERLILEALKQLYQCDAIDRSGHVTRLGLSMVEFPLPPHLTCAVIKAASLDCEDLLLPIAAMLSVENVFIRPVDPEYQKEAEQRHRELAAKAGGFNDFATLAVIFEQCKSSGAPASWCQKHWIHWRCLFSAFRVEAQLRELIRKLKQQSDFPKETFEGPKHEVLRRCLCAGYFKNVARRIQ

SEQ ID NO: 4344 - protein, 559 aa, Artificial Sequence
  Synthetic polypeptide
MSRFPAVAGRAPRRQEEGERSRDLQEERLSAVCIADREEKGCTSQEGGTTPTFPIQKQRKKIIQAETAIKYMTDGCLLKHILGDPNLTKFSVIILDEAHERTLTTDILFGLLKKLFQEKSPNRKEHLKVVVMSATMELAKLSAFFGNCPIFDIPGRLYPVREKFCNLIGPRDRENTAYIQAIVKVTMDIHLNEMAGDILVFLTGQFEIEKSCELLFQMAESVDYDYDVQDTTLDGLLILPCYGSMTTDQQRRIFLPPPPGIRKCVISTNISATSLTIDGIRYVVDGGFVKQLNHNPRLGLDILEVVPISKSEALQRSGRAGRTSSGKCFRIYSKDFWNQCMPDHVIPEIKRTSLTSVVLTLKCLAIHDVIRFPYLDPPNERLILEALKQLYQCDAIDRSGHVTRLGLSMVEFPLPPHLTCAVIKAASLDCEDLLLPIAAMLSVENVFIRPVDPEYQKEAEQRHRELAAKAGGFNDFATLAVIFEQCKSSGAPASWCQKHWIHWRCLFSAFRVEAQLRELIRKLKQQSDFPKETFEGPKHEVLRRCLCAGYFKNVARRIQ

SEQ ID NO: 4345 - protein, 640 aa, Artificial Sequence
  Synthetic polypeptide
MSRFPAVAGRAPRRQEEGERSRDLQEERLSAVCIADREEKGCTSQEGGTTPTFPIQKQRKKIIQAVRDNSFLIVTGNTGSGKTTQLPKYLYEAGFSQHGMIGVTQPRKVAAISVAQRVAEEMKCTLGSKVGYQVRFDDCSSKETAIKYMTDGCLLKHILGDPNLTKFSVIILDEAHERTLTTDILFGLLKKLFQEKSPNRKEHLKVVVMSATMELAKLSAFFGNCPIFDIPGRLYPVREKFCNLIGPRDRENTAYIQAIVKVTMDIHLNEMAGDILVFLTGQFEIEKSCELLFQMAESVDYDYDVQDTTLDGLLILPCYGSMTTDQQRRIFLPPPPGIRKCVISTNISATSLTIDGIRYVVDGGFVKQLNHNPRLGLDILEVVPISKSEALQRSGRAGRTSSGKCFRIYSKDFWNQCMPDHVIPEIKRTSLTSVVLTLKCLAIHDVIRFPYLDPPNERLILEALKQLYQCDAIDRSGHVTRLGLSMVEFPLPPHLTCAVIKAASLDCEDLLLPIAAMLSVENVFIRPVDPEYQKEAEQRHRELAAKAGGFNDFATLAVIFEQCKSSGAPASWCQKHWIHWRCLFSAFRVEAQLRELIRKLKQQSDFPKETFEGPKHEVLRRCLCAGYFKNVARSHVGECS

SEQ ID NO: 4346 - protein, 592 aa, Artificial Sequence
  Synthetic polypeptide
MIGVTQPRKVAAISVAQRVAEEMKCTLGSKVGYQVRFDDCSSKETAIKYMTDGCLLKHILGDPNLTKFSVIILDEAHERTLTTDILFGLLKKLFQEKSPNRKEHLKVVVMSATMELAKLSAFFGNCPIFDIPGRLYPVREKFCNLIGPRDRENTAYIQAIVKVTMDIHLNEMAGDILVFLTGQFEIEKSCELLFQMAESVDYDYDVQDTTLDGLLILPCYGSMTTVSQTSLTFVTHIQIMKQISENQHSLTGLTIAGITGVSHHARPRNMTCNEKLNQQRRIFLPPPPGIRKCVISTNISATSLTIDGIRYVVDGGFVKQLNHNPRLGLDILEVVPISKSEALQRSGRAGRTSSGKCFRIYSKDFWNQCMPDHVIPEIKRTSLTSVVLTLKCLAIHDVIRFPYLDPPNERLILEALKQLYQCDAIDRSGHVTRLGLSMVEFPLPPHLTCAVIKAASLDCEDLLLPIAAMLSVENVFIRPVDPEYQKEAEQRHRELAAKAGGFNDFATLAVIFEQCKSSGAPASWCQKHWIHWRCLFSAFRVEAQLRELIRKLKQQSDFPKETFEGPKHEVLRRCLCAGYFKNVARSHVGECS

SEQ ID NO: 4347 - protein, 563 aa, Artificial Sequence
  Synthetic polypeptide
MSRFPAVAGRAPRRQEEGERSRDLQEERLSAVCIADREEKGCTSQEGGTTPTFPIQKQRKKIIQAETAIKYMTDGCLLKHILGDPNLTKFSVIILDEAHERTLTTDILFGLLKKLFQEKSPNRKEHLKVVVMSATMELAKLSAFFGNCPIFDIPGRLYPVREKFCNLIGPRDRENTAYIQAIVKVTMDIHLNEMAGDILVFLTGQFEIEKSCELLFQMAESVDYDYDVQDTTLDGLLILPCYGSMTTDQQRRIFLPPPPGIRKCVISTNISATSLTIDGIRYVVDGGFVKQLNHNPRLGLDILEVVPISKSEALQRSGRAGRTSSGKCFRIYSKDFWNQCMPDHVIPEIKRTSLTSVVLTLKCLAIHDVIRFPYLDPPNERLILEALKQLYQCDAIDRSGHVTRLGLSMVEFPLPPHLTCAVIKAASLDCEDLLLPIAAMLSVENVFIRPVDPEYQKEAEQRHRELAAKAGGFNDFATLAVIFEQCKSSGAPASWCQKHWIHWRCLFSAFRVEAQLRELIRKLKQQSDFPKETFEGPKHEVLRRCLCAGYFKNVARSHVGECS

SEQ ID NO: 4348 - protein, 198 aa, Artificial Sequence
  Synthetic polypeptide
MSIVTVQLGQCGNQIGFEVFDALLSDSHSSQGLCSMRENEAYQASCKERFFSEEENGVPIARAVLVDMEPKVINQMLSKAAQSGQWKYGQHACFCQKQGSGNNWAYGYSVHGPRHEESIMNIIRKEVEKCDSFSGFFIIMSMAGGTGSGLGAFVTQNLEDQYSNSLKMNQIIWPYGTGEVRWLMPVIPALWEAKAGGS

SEQ ID NO: 4349 - protein, 64 aa, Artificial Sequence
  Synthetic polypeptide
MSIVTVQLGQCGNQIGFEVFDALLSDSHSSQGLCSMRENEAYQASCKERFFSEEENGDSQKRTL

SEQ ID NO: 4350 - protein, 811 aa, Artificial Sequence
  Synthetic polypeptide
MNEAMATDSPRRPSRCTGGVVVRPQAVTEQSYMESVVTFLQDVVPQAYSGTPLTEEKEKIVWVRFENADLNDTSRNLEFHEIHSTGNEPPLLIMIGYSDGMQVWSIPISGEAQELFSVRHGPIRAARILPAPQFGAQKCDNFAEKRPLLGVCKSIGSSGTSPPYCCVDLYSLRTGEMVKSIQFKTPIYDLHCNKRILVVVLQEKIAAFDSCTFTKKFFVTSCYPCPGPNMNPIALGSRWLAYAENKLIRCHQSRGGACGDNIQSYTATVISAAKTLKSGLTMVGKVVTQLTGTLPSGVTEDDVAIHSNSRRSPLVPGIITVIDTETVGEGQVLVSEDSDSDGIVAHFPAHEKPVCCMAFNTSGMLLVTTDTLGHDFHVFQILTHPWSSSQCAVHHLYTLHRGETEAKVQDICFSHDCRWVVVSTLRGTSHVFPINPYGGQPCVRTHMSPRVVNRMSRFQKSAGLEEIEQELTSKQGGRCSPVPGLSSSPSGSPLHGKLNSQDSYNNFTNNNPGNPRLSPLPSLMVVMPLAQIKQPMTLGTITKRTGKVKPPPQISPSKSMGGEFCVAAIFGTSRSWFANNAGLKREKDQSKQVVVESLYIISCYGTLVEHMMEPRPLSTAPKISDDTPLEMMTSPRASWTLVRTPQWNELQPPFNANHPLLLAADAVQYYQFLLAGLVPPGSPGPITRHGSYDSLASDHSGQEDEEWLSQVEIVTHTGPHRRLWMGPQFQFKTIHPSGQTTVISSSSSVLQSHGPSDTPQPLLDFDTDDLDLNSLRIQPVRSDPVSMPGSSRPVSDRRGVSTVIDAASGVL

SEQ ID NO: 4351 - protein, 826 aa, Artificial Sequence
  Synthetic polypeptide
MNEAMATDSPRRPSRCTGGVVVRPQAVTEQSYMESVVTFLQDVVPQAYSGTPLTEEKEKIVWVRFENADLNDTSRNLEFHEIHSTGNEPPLLIMIGYSDGMQVWSIPISGEAQELFSVRHGPIRAARILPAPQFGAQKCDNFAEKRPLLGVCKSIGSSGTSPPYCCVDLYSLRTGEMVKSIQFKTPIYDLHCNKRILVVVLQEKIAAFDSCTFTKKFFVTSCYPCPGPNMNPIALGSRWLAYAENKLIRCHQSRGGACGDNIQSYTATVISAAKTLKSGLTMVGKVVTQLTGTLPSGVTEDDVAIHSNSRRSPLVPGIITVIDTETVGEGQVLVSEDSDSDGIVAHFPAHEKPVCCMAFNTSGMLLVTTDTLGHDFHVFQILTHPWSSSQCAVHHLYTLHRGETEAKVQDICFSHDCRWVVVSTLRGTSHVFPINPYGGQPCVRTHMSPRVVNRMSRFQKSAGLEEIEQELTSKQGGRCSPVPGLSSSPSGSPLHGKLNSQDSYNNFTNNNPGNPRLSPLPSLMVVMPLAQIKQPMTLGTITKRTGPYLFGAGCFSIKAPCKVKPPPQISPSKSMGGEFCVAAIFGTSRSWFANNAGLKREKDQSKQVVVESLYIISCYGTLVEHMMEPRPLSTAPKISDDTPLEMMTSPRASWTLVRTPQWNELQPPFNANHPLLLAADAVQYYQFLLAGLVPPGSPGPITRHGSYDSLASDHSGQEDEEWLSQVEIVTHTGPHRRLWMGPQFQFKTIHPSGQTTVISSSSSVLQSHGPSDTPQPLLDFDTDDLDLNSLRIQPVRSDPVSMPGSSRPVSDRRGVSTVIDAASGVL

SEQ ID NO: 4352 - protein, 597 aa, Artificial Sequence
  Synthetic polypeptide
MNPIALGSRWLAYAENKLIRCHQSRGGACGDNIQSYTATVISAAKTLKSGLTMVGKVVTQLTGTLPSGVTEDDVAIHSNSRRSPLVPGIITVIDTETVGEGQVLVSEDSDSDGIVAHFPAHEKPVCCMAFNTSGMLLVTTDTLGHDFHVFQILTHPWSSSQCAVHHLYTLHRGETEAKVQDICFSHDCRWVVVSTLRGTSHVFPINPYGGQPCVRTHMSPRVVNRMSRFQKSAGLEEIEQELTSKQGGRCSPVPGLSSSPSGSPLHGKLNSQDSYNNFTNNNPGNPRLSPLPSLMVVMPLAQIKQPMTLGTITKRTGPYLFGAGCFSIKAPCKVKPPPQISPSKSMGGEFCVAAIFGTSRSWFANNAGLKREKDQSKQVVVESLYIISCYGTLVEHMMEPRPLSTAPKISDDTPLEMMTSPRASWTLVRTPQWNELQPPFNANHPLLLAADAVQYYQFLLAGLVPPGSPGPITRHGSYDSLASDHSGQEDEEWLSQVEIVTHTGPHRRLWMGPQFQFKTIHPSGQTTVISSSSSVLQSHGPSDTPQPLLDFDTDDLDLNSLRIQPVRSDPVSMPGSSRPVSDRRGVSTVIDAASGVL

SEQ ID NO: 4353 - protein, 582 aa, Artificial Sequence
  Synthetic polypeptide
MNPIALGSRWLAYAENKLIRCHQSRGGACGDNIQSYTATVISAAKTLKSGLTMVGKVVTQLTGTLPSGVTEDDVAIHSNSRRSPLVPGIITVIDTETVGEGQVLVSEDSDSDGIVAHFPAHEKPVCCMAFNTSGMLLVTTDTLGHDFHVFQILTHPWSSSQCAVHHLYTLHRGETEAKVQDICFSHDCRWVVVSTLRGTSHVFPINPYGGQPCVRTHMSPRVVNRMSRFQKSAGLEEIEQELTSKQGGRCSPVPGLSSSPSGSPLHGKLNSQDSYNNFTNNNPGNPRLSPLPSLMVVMPLAQIKQPMTLGTITKRTGKVKPPPQISPSKSMGGEFCVAAIFGTSRSWFANNAGLKREKDQSKQVVVESLYIISCYGTLVEHMMEPRPLSTAPKISDDTPLEMMTSPRASWTLVRTPQWNELQPPFNANHPLLLAADAVQYYQFLLAGLVPPGSPGPITRHGSYDSLASDHSGQEDEEWLSQVEIVTHTGPHRRLWMGPQFQFKTIHPSGQTTVISSSSSVLQSHGPSDTPQPLLDFDTDDLDLNSLRIQPVRSDPVSMPGSSRPVSDRRGVSTVIDAASGVL

SEQ ID NO: 4354 - protein, 65 aa, Artificial Sequence
  Synthetic polypeptide
SSVLQSHGPSDTPQPLLDFDTDDLDLNSLRIQPVRSDPVSMPGSSRPVSDRRGVSTVIDAASGVL

SEQ ID NO: 4355 - protein, 363 aa, Artificial Sequence
  Synthetic polypeptide
MREPALAASAMAYHPFHAPRPADFPMSAFLAAAQPSFFPALALPPGALAKPLPDPGLAGAAAAAAAAAAAAEAGLHVSALGPHPPAAHLRSLKSLEPEDEVEDDPKVTLEAKELWDQFHKLGTEMVITKSGRRMFPPFKVRVSGLDKKAKYILLMDIVAADDCRYKFHNSRWMVAGKADPEMPKRMYIHPDSPATGEQWMAKPVAFHKLKLTNNISDKHGFTILNSMHKYQPRFHIVRANDILKLPYSTFRTYVFPETDFIAVTAYQNDKITQLKIDNNPFAKGFRDTGNGRREKRKQLTLPSLRLYEEHCKPERDGAESDASSCDPPPAREPPTSPGAAPSPLRLHRARGLGSFHCKSGVLD

SEQ ID NO: 4356 - protein, 355 aa, Artificial Sequence
  Synthetic polypeptide
MREPALAASAMAYHPFHAPRPADFPMSAFLAAAQPSFFPALALPPGALAKPLPDPGLAGAAAAAAAAAAAAEAGLHVSALGPHPPAAHLRSLKSLEPEDEVEDDPKVTLEAKELWDQFHKLGTEMVITKSGRRMFPPFKVRVSGLDKKAKYILLMDIVAADDCRYKFHNSRWMVAGKADPEMPKRMYIHPDSPATGEQWMAKPVAFHKLKLTNNISDKHGFTILNSMHKYQPRFHIVRANDILKLPYSTFRTYVFPETDFIAVTAYQNDKITQLKIDNNPFAKGFRDTGNGRREKRKQLTLPSLRLYEEHCKPERDGAESDASSCDPPPAREPPTSPGAAPSPLRLHRARAAPPT

SEQ ID NO: 4357 - protein, 354 aa, Artificial Sequence
  Synthetic polypeptide
MREPALAASAMAYHPFHAPRPADFPMSAFLAAAQPSFFPALALPPGALAKPLPDPGLAGAAAAAAAAAAAAEAGLHVSALGPHPPAAHLRSLKSLEPEDEVEDDPKVTLEAKELWDQFHKLGTEMVITKSGRRMFPPFKVRVSGLDKKAKYILLMDIVAADDCRYKFHNSRWMVAGKADPEMPKRMYIHPDSPATGEQWMAKPVAFHKLKLTNNISDKHGFTILNSMHKYQPRFHIVRANDILKLPYSTFRTYVFPETDFIAVTAYQNDKITQLKIDNNPFAKGFRDTGNGRREKRKQLTLPSLRLYEEHCKPERDGAESDASSCDPPPAREPPTSPGAAPSPLRLHRARAPPT

SEQ ID NO: 4358 - protein, 850 aa, Artificial Sequence
  Synthetic polypeptide
MSSMWSEYTIGGVKIYFPYKAYPSQLAMMNSILRGLNSKQHCLLESPTGSGKSLALLCSALAWQQSLSGKPADEGVSEKAEVQLSCCCACHSKDFTNNDMNQGTSRHFNYPSTPPSERNGTSSTCQDSPEKTTLAAKLSAKKQASIYRDENDDFQVEKKRIRPLETTQQIRKRHCFGTEVHNLDAKVDSGKTVKLNSPLEKINSFSPQKPPGHCSRCCCSTKQGNSQESSNTIKKDHTGKSKIPKIYFGTRTHKQIAQITRELRRTAYSGVPMTILSSRDHTCVHPEVVGNFNRNEKCMELLDGKNGKSCYFYHGVHKISDQHTLQTFQGMCKAWDIEELVSLGKKLKACPYYTARELIQDADIIFCPYNYLLDAQIRESMDLNLKEQVVILDEAHNIEDCARESASYSVTEVQLRFARDELDSMVNNNIRKKDHEPLRAVCCSLINWLEANAEYLVERDYESACKIWSGNEMLLTLHKMGITTATFPILQGHFSAVLQKEEKISPIYGKEEAREVPVISASTQIMLKGLFMVLDYLFRQNSRFADDYKIAIQQTYSWTNQIDISDKNGLLVLPKNKKRSRQKTAVHVLNFWCLNPAVAFSDINGKVQTIVLTSGTLSPMKSFSSELGVTFTIQLEANHIIKNSQVWVGTIGSGPKGRNLCATFQNTETFEFQDEVGALLLSVCQTVSQGILCFLPSYKLLEKLKERWLSTGLWHNLELVKTVIVEPQGGEKTNFDELLQVYYDAIKYKGEKDGALLVAVCRGKVSEGLDFSDDNARAVITIGIPFPNVKDLQVELKRQYNDHHSKLRGLLPGRQWYEIQAYRALNQALGRGPTADLRRQKKELIYLNIN

SEQ ID NO: 4359 - protein, 460 aa, Artificial Sequence
  Synthetic polypeptide
MSSMWSEYTIGGVKIYFPYKAYPSQLAMMNSILRGLNSKQHCLLESPTGSGKSLALLCSALAWQQSLSGKPADEGVSEKAEVQLSCCCACHSKDFTNNDMNQGTSRHFNYPSTPPSERNGTSSTCQDSPEKTTLAAKLSAKKQASIYRDENDDFQVEKKRIRPLETTQQIRKRHCFGTEVHNLDAKVDSGKTVKLNSPLEKINSFSPQKPPGHCSRCCCSTKQGNSQESSNTIKKDHTGKSKIPKIYFGTRTHKQIAQITRELRRTAYSGVPMTILSSRDHTCVHPEVVGNFNRNEKCMELLDGKNGKSCYFYHGVHKISDQHTLQTFQGMCKAWDIEELVSLGKKLKACPYYTARELIQDADIIFCPYNYLLDAQIRESMDLNLKEQVVILDEAHNIEDCARESASYSVTEVQLRFARDELDSMVNNNIRKKDHEPLRAVCCSLIKCHEHALRERQSLQ

SEQ ID NO: 4360 - protein, 220 aa, Artificial Sequence
  Synthetic polypeptide
MSSMWSEYTIGGVKIYFPYKAYPSQLAMMNSILRGLNSKQHCLLESPTGSGKSLALLCSALAWQQSLSGKPADEGVSEKAEVQLSCCCACHSKDFTNNDMNQGTSRHFNYPSTPPSERNGTSSTCQDSPEKTTLAAKLSAKKQASIYRDENDDFQVEKKRIRPLETTQQIRKRHCFGTEVHNLDAKVDSGKTVKLNSPLEKINSFSPQKPFRFLTFCLKK

SEQ ID NO: 4361 - protein, 705 aa, Artificial Sequence
  Synthetic polypeptide
MKDQQTVIMTECTSLQFVSPFAFEAMQKVDVVCLASLSDPELRLLLPCLVRMALCAPADQSQSWAQDKKLILRLLSGVEAVNSIVALLSVDFHALEQDASKEQQLRHKLGGGSGESILVSQLQHGLTLEFEHSDSPRRLRLVLSELLAIMNKVSESNGEFFFKSSELFESPVYLEEAADVLCILQAELPSLLPIVDVAEALLHVRNGAWFLCLLVANVPDSFNEVCRGLIKNGERQDEESLGGRRRTDALRFLCKMNPSQALKVRGMVVEECHLPGLGVALTLDHTKNEACEDGVSDLVCFVSGLLLGTNAKVRTWFGTFIRNGQQRKRETSSSVLWQMRRQLLLELMGILPTVRSTRIVEEADVDMEPNVSVYSGLKEEHVVKASALLRLYCALMGIAGLKPTEEEAEQLLQLMTSRPPATPAGVRFVSLSFCMLLAFSTLVSTPEQEQLMVVWLSWMIKEEAYFESTSGVSASFGEMLLLVAMYFHSNQLSAIIDLVCSTLGMKIVIKPSSLSRMKTIFTQEIFTEQVVTAHAVRVPVTSNLSANITGFLPIHCIYQLLRSRSFTKHKVSIKDWIYRQLCETSTPLHPQLLPLIDVYINSILTPASKSNPEATNQPVTEQEILNIFQGVIGGDNIRLNQRFSITAQLLVLYYILSYEEALLANTKTLAAMQRKPKSYSSSLMDQIPIKFLIRQAQGLQQELGG

SEQ ID NO: 4362 - protein, 697 aa, Artificial Sequence
  Synthetic polypeptide
MTECTSLQFVSPFAFEAMQKVDVVCLASLSDPELRLLLPCLVRMALCAPADQSQSWAQDKKLILRLLSGVEAVNSIVALLSVDFHALEQDASKEQQLRHKLGGGSGESILVSQLQHGLTLEFEHSDSPRRLRLVLSELLAIMNKVSESNGEFFFKSSELFESPVYLEEAADVLCILQAELPSLLPIVDVAEALLHVRNGAWFLCLLVANVPDSFNEVCRGLIKNGERQDEESLGGRRRTDALRFLCKMNPSQALKVRGMVVEECHLPGLGVALTLDHTKNEACEDGVSDLVCFVSGLLLGTNAKVRTWFGTFIRNGQQRKRETSSSVLWQMRRQLLLELMGILPTVRSTRIVEEADVDMEPNVSVYSGLKEEHVVKASALLRLYCALMGIAGLKPTEEEAEQLLQLMTSRPPATPAGVRFVSLSFCMLLAFSTLVSTPEQEQLMVVWLSWMIKEEAYFESTSGVSASFGEMLLLVAMYFHSNQLSAIIDLVCSTLGMKIVIKPSSLSRMKTIFTQEIFTEQVVTAHAVRVPVTSNLSANITGFLPIHCIYQLLRSRSFTKHKVSIKDWIYRQLCETSTPLHPQLLPLIDVYINSILTPASKSNPEATNQPVTEQEILNIFQGVIGGDNIRLNQRFSITAQLLVLYYILSYEEALLANTKTLAAMQRKPKSYSSSLMDQIPIKFLIRQAQGLQQELGG

SEQ ID NO: 4363 - protein, 323 aa, Artificial Sequence
  Synthetic polypeptide
MAKPFFRLQKFLRRTQFLLFFLTAAYLMTGSLLLLQRVRVALPQGPRAPGPLQTLPVAAVALGVGLLDSRALHDPRVSPELLLGVDMLQSPLTRPRPGPRWLRSRNSELRQLRRRWFHHFMSDSQGPPALGPEAARPAIHSRGTYIGCFSDDGHERTLKGAVFYDLRKMTVSHCQDACAERSYVYAGLEAGAECYCGNRLPAVSVGLEECNHECKGEKGSVCGAVDRLSVYRVDELQPGSRKRRTATYRGCFRLPENITHAFPSSLIQANVTVGTCSGFCSQKVYRVSWPPPDNTMCSEHHDDLHLHIKGLRWEGQVFQGLRK

SEQ ID NO: 4364 - protein, 207 aa, Artificial Sequence
  Synthetic polypeptide
MAEQGRCCDLAALGEQGGAPPWEKSLGTYIGCFSDDGHERTLKGAVFYDLRKMTVSHCQDACAERSYVYAGLEAGAECYCGNRLPAVSVGLEECNHECKGEKGSVCGAVDRLSVYRVDELQPGSRKRRTATYRGCFRLPENITHAFPSSLIQANVTVGTCSGFCSQKVYRVSWPPPDNTMCSEHHDDLHLHIKGLRWEGQVFQGLRK

SEQ ID NO: 4365 - protein, 283 aa, Artificial Sequence
  Synthetic polypeptide
MAGSYPEGAPAVLADKRQQFGSRFLRDPARVFHHNAWDNVEWSEEQAAAAERKVQENSIQRVCQEKQVDYEINAHKYWNDFYKIHENGFFKDRHWLFTEFPELAPSQNQNHLKDWFLENKSEVPECRNNEDGPGLIMEEQHKCSSKSLEHKTQTLPVEENVTQKISDLEICADEFPGSSATYRILEVGCGVGNTVFPILQTNNDPGLFVYCCDFSSTAIELVQFTLSHCIDVVSVHILKVCGNPASSKPTGAISPPPYAHLVSMCHALVILRIFQTFLLLCML

SEQ ID NO: 4366 - protein, 78 aa, Artificial Sequence
  Synthetic polypeptide
MMEEEELEFVEELEAVLQLTPEVQLAIEQVFPSQDPLDRADFNAVEYINTLFPTEQEKPGHTESGDQKTTVRTSVMPG

SEQ ID NO: 4367 - protein, 311 aa, Artificial Sequence
  Synthetic polypeptide
MNWNKGGPGTKRGFGFGGFAISAGKKEEPKLPQQSHSAFGATSSSSGFGKSAPPQLPSFYKIGSKRANFDEENAYFEDEEEDSSNVDLPYIPAENSPTRQQFHSKPVDSDSDDDPLEAFMAEVEDQAARDMKRLEEKDKERKNVKGIRDDIEEEDDQEAYFRYMAENPTAGVVQEEEEDNLEYDSDGNPIAPTKKIIDPLPPIDHSEIDYPPFEKNFYNEHEEITNLTPQQLIDLRHKLNLRARVGIWWSAFTMKTKTRGRWNKMEGGWIHGYLHELMYLVALFQHLLLDCYMKEESTTLFQPTYVRVPFV

SEQ ID NO: 4368 - protein, 192 aa, Artificial Sequence
  Synthetic polypeptide
MAEVEDQAARDMKRLEEKDKERKNVKGIRDDIEEEDDQEAYFRYMAENPTAGVVQEEEEDNLEYDSDGNPIAPTKKIIDPLPPIDHSEIDYPPFEKNFYNEHEEITNLTPQQLIDLRHKLNLRARVGIWWSAFTMKTKTRGRWNKMEGGWIHGYLHELMYLVALFQHLLLDCYMKEESTTLFQPTYVRVPFV

SEQ ID NO: 4369 - protein, 249 aa, Artificial Sequence
  Synthetic polypeptide
MSGRGAGGFPLPPLSPGGGAVAAALGAPPPPAGPGMLPGPALRGPGPAGGVGGPGAAAFRPMGPAGPAAQYQRPGMSPGNRMPMAGLQVGPPAGSPFGAAAPLRPGMPPTMMDPFRKRLLVPQAQPPMPAQRRGLKRRKMADKVLPQRIRELVPESQAYMDLLAFERKLDQTIARKRMEIQEAIKKPLTQKRKLRIYISNTFSPSKAEGDSAGTAGTPGGTPAGDKVASWELRVEGKLLDDMAVECLEE

SEQ ID NO: 4370 - protein, 201 aa, Artificial Sequence
  Synthetic polypeptide
MGRRVGVEVTPRWAPQKCQGARPQRPGMSPGNRMPMAGLQVGPPAGSPFGAAAPLRPGMPPTMMDPFRKRLLVPQAQPPMPAQRRGLKRRKMADKVLPQRIRELVPESQAYMDLLAFERKLDQTIARKRMEIQEAIKKPLTQKRKLRIYISNTFSPSKAEGDSAGTAGTPGGTPAGDKVASWELRVEGKLLDDMAVECLEE

SEQ ID NO: 4371 - protein, 174 aa, Artificial Sequence
  Synthetic polypeptide
MSPGNRMPMAGLQVGPPAGSPFGAAAPLRPGMPPTMMDPFRKRLLVPQAQPPMPAQRRGLKRRKMADKVLPQRIRELVPESQAYMDLLAFERKLDQTIARKRMEIQEAIKKPLTQKRKLRIYISNTFSPSKAEGDSAGTAGTPGGTPAGDKVASWELRVEGKLLDDMAVECLEE

SEQ ID NO: 4372 - protein, 253 aa, Artificial Sequence
  Synthetic polypeptide
MSGRGAGGFPLPPLSPGGGAVAAALGAPPPPAGPGMLPGPALRGPGPAGGVGGPGAAAFRPMGPAGPAAQYQRPGMSPGNRMPMAGLQVGPPAGSPFGAAAPLRPGMPPTMMDPFRKRLLVPQAQPPMPAQRRGLKRRKMADKVLPQRIRELVPESQAYMDLLAFERKLDQTIARKRMEIQEAIKKPLTQKRKLRIYISNTFSPSKAEGDSAGTAGTPGGTPAGDKVASWELRVEGKLLDDCSCRWQSSVSRK

SEQ ID NO: 4373 - protein, 205 aa, Artificial Sequence
  Synthetic polypeptide
MGRRVGVEVTPRWAPQKCQGARPQRPGMSPGNRMPMAGLQVGPPAGSPFGAAAPLRPGMPPTMMDPFRKRLLVPQAQPPMPAQRRGLKRRKMADKVLPQRIRELVPESQAYMDLLAFERKLDQTIARKRMEIQEAIKKPLTQKRKLRIYISNTFSPSKAEGDSAGTAGTPGGTPAGDKVASWELRVEGKLLDDCSCRWQSSVSRK

SEQ ID NO: 4374 - protein, 178 aa, Artificial Sequence
  Synthetic polypeptide
MSPGNRMPMAGLQVGPPAGSPFGAAAPLRPGMPPTMMDPFRKRLLVPQAQPPMPAQRRGLKRRKMADKVLPQRIRELVPESQAYMDLLAFERKLDQTIARKRMEIQEAIKKPLTQKRKLRIYISNTFSPSKAEGDSAGTAGTPGGTPAGDKVASWELRVEGKLLDDCSCRWQSSVSRK

SEQ ID NO: 4375 - protein, 434 aa, Artificial Sequence
  Synthetic polypeptide
MPARRLLLLLTLLLPGLGIFGSTSTVTLPETLLFVSTLDGSLHAVSKRTGSIKWTLKEDPVLQVPTHVEEPAFLPDPNDGSLYTLGSKNNEGLTKLPFTIPELVQASPCRSSDGILYMGKKQDIWYVIDLLTGEKQQTLSSAFADSLCPSTSLLYLGRTEYTITMYDTKTRELRWNATYFDYAASLPEDDVDYKMSHFVSNGDGLVVTVDSESGDVLWIQNYASPVVAFYVWQREGLRKVMHINVAVETLRYLTFMSGEVGRITKWKYPFPKETEAKSKLTPTLYVGKYSTSLYASPSMVHEGVAVVPRGSTLPLLEGPQTDGVTIGDKGECVITPSTDVKFDPGLKSKNKLNYLRNYWLLIGHHETPLSASTKMLERFPNNLPKHRENVIPADSEKKSFEETLLQMTSVFSWILNLPSKEEVFAFLRIFEKNM

SEQ ID NO: 4376 - protein, 192 aa, Artificial Sequence
  Synthetic polypeptide
MRSRVAVRACHKVCRCLLSGFGGRVDAGQPELLTERSSPKGGHVKSHAELEGNGEHPEAPGSGEGSEALLEICQRRHFLSGSKQQLSRDSLLSGCHPGFGPLGVELRKNLAAEWWTSVVVFREQVFPVDALHHKPGPLLPGDSAFRLVSAETLREILQDKELSKEQLVAFLENVLKTSGKLRENLLHDLKIF

SEQ ID NO: 4377 - protein, 78 aa, Artificial Sequence
  Synthetic polypeptide
MSNPGGRRNGPVKLRLTGLPDPFAKVVVDGSGQCHSTDTVKNTLDPKWNQHYDLASQPFHIMVHIKNMAHWTTQMKLL

SEQ ID NO: 4378 - protein, 91 aa, Artificial Sequence
  Synthetic polypeptide
MSNPGGRRNGPVKLRLTVLCAKNLVKKDFFRLPDPFAKVVVDGSGQCHSTDTVKNTLDPKWNQHYDLASQPFHIMVHIKNMAHWTTQMKLL

SEQ ID NO: 4379 - protein, 21 aa, Artificial Sequence
  Synthetic polypeptide
MSNPGGRRNGPVKLRLTDGTV

SEQ ID NO: 4380 - protein, 178 aa, Artificial Sequence
  Synthetic polypeptide
MADFLPSRSVLSVCFPGCLLTSGEAEQQRKSKEIDKCLSREKTYVKRLVKILLLGAGESGKSTFLKQMRIIHGQDFDQRAREEFRPTIYSNVIKGMRVLVDAREKLHIPWGDNSNQQHGDKMMSFDTRAPMAAQGMVETRVFLQYLPAIRALWADSGIQNAYDRRREFQLAGHGGSHL

SEQ ID NO: 4381 - protein, 83 aa, Artificial Sequence
  Synthetic polypeptide
MRVLVDAREKLHIPWGDNSNQQHGDKMMSFDTRAPMAAQGMVETRVFLQYLPAIRALWADSGIQNAYDRRREFQLAGHGGSHL

SEQ ID NO: 4382 - protein, 102 aa, Artificial Sequence
  Synthetic polypeptide
MGWLFLKVLLAGVSFSGFLYPLVDFCISGKTRGQKPNFVIILADDMGWGDLGANWAETKDTANLDKMASEGMRIDLGWVLNPVTFPYKKRRRHRDTQREMVT

SEQ ID NO: 4383 - protein, 266 aa, Artificial Sequence
  Synthetic polypeptide
MSKRRMSVGQQTWALLCKNCLKKWRMKRQTLLEWLFSFLLVLFLYLFFSNLHQVHDTPQMSSMDLGRVDSFNDTNYVIAFAPESKTTQEIMNKVASAPFLKGRTIMGWPDEKSMDELDLNYSIDAVRVIFTDTFSYHLKFSWGHRIPMMKEHRDHSAHCQAVNEKMKCEGSEFWEKGFVAFQAAINAAIIEIATNHSVMEQLMSVTGVHMKILPFVAQGGVATDFFIFFCIISFSTFIYYVSVNVTQERQYITSLMTMMGLRESAF

SEQ ID NO: 4384 - protein, 77 aa, Artificial Sequence
  Synthetic polypeptide
MVTLPSGTWAFSCPYLALVDGGMLGSAREDAHDGVSLYGPNWSASGAIKAHCNLRLPASSDSRPSASQVAGITALLG

SEQ ID NO: 4385 - protein, 235 aa, Artificial Sequence
  Synthetic polypeptide
MLQGHSSVFQALLGTFFTWGMTAAGAALVFVFSSGQRRILDGSLGFAAGVMLAASYWSLLAPAVEMATSSGGFGAFAFFPVAVGFTLGAAFVYLADLLMPHLGAAEDPQTTLALNFGSTLMKKKSDPEGPALLFPESELSIRIDKSENGEAYQRKKAAATGLPEGPAVPVPSRGNLAQPGGSSWRRIALLILAITIHNVPEGLAVGVGFGAIEKTASATFESASVAQGSQKIGHP

SEQ ID NO: 4386 - protein, 242 aa, Artificial Sequence
  Synthetic polypeptide
MLQGHSSVFQALLGTFFTWGMTAAGAALVFVFSSGQRRILDGSLGFAAGVMLAASYWSLLAPAVEMATSSGGFGAFAFFPVAVGFTLGAAFVYLADLLMPHLGAAEDPQTTLALNFGSTLMKKKSDPEGPALLFPESELSIRIGRAGLLSDKSENGEAYQRKKAAATGLPEGPAVPVPSRGNLAQPGGSSWRRIALLILAITIHNVPEGLAVGVGFGAIEKTASATFESASVAQGSQKIGHP

SEQ ID NO: 4387 - protein, 151 aa, Artificial Sequence
  Synthetic polypeptide
MTVRPPQPCGTGAAEDPQTTLALNFGSTLMKKKSDPEGPALLFPESELSIRIGRAGLLSDKSENGEAYQRKKAAATGLPEGPAVPVPSRGNLAQPGGSSWRRIALLILAITIHNVPEGLAVGVGFGAIEKTASATFESASVAQGSQKIGHP

SEQ ID NO: 4388 - protein, 59 aa, Artificial Sequence
  Synthetic polypeptide
AQPGGSSWRRIALLILAITIHNVPEGLAVGVGFGAIEKTASATFESASVAQGSQKIGHP

SEQ ID NO: 4389 - protein, 221 aa, Artificial Sequence
  Synthetic polypeptide
MLQGHSSVFQALLGTFFTWGMTAAGAALVFVFSSGQRRILDGSLGFAAGVMLAASYWSLLAPAVEMATSSGGFGAFAFFPVAVGFTLGAAFVYLADLLMPHLGAAEDPQTTLALNFGSTLMKKKSDPEGPALLFPESELSIRIDKSENGEAYQRKKAAATGLPEGPAVPVPSRGNLAQPGGSSWRRIALLILAITIHNVPEGRVCFTFCHDCKFPEASPAV

SEQ ID NO: 4390 - protein, 228 aa, Artificial Sequence
  Synthetic polypeptide
MLQGHSSVFQALLGTFFTWGMTAAGAALVFVFSSGQRRILDGSLGFAAGVMLAASYWSLLAPAVEMATSSGGFGAFAFFPVAVGFTLGAAFVYLADLLMPHLGAAEDPQTTLALNFGSTLMKKKSDPEGPALLFPESELSIRIGRAGLLSDKSENGEAYQRKKAAATGLPEGPAVPVPSRGNLAQPGGSSWRRIALLILAITIHNVPEGRVCFTFCHDCKFPEASPAV

SEQ ID NO: 4391 - protein, 137 aa, Artificial Sequence
  Synthetic polypeptide
MTVRPPQPCGTGAAEDPQTTLALNFGSTLMKKKSDPEGPALLFPESELSIRIGRAGLLSDKSENGEAYQRKKAAATGLPEGPAVPVPSRGNLAQPGGSSWRRIALLILAITIHNVPEGRVCFTFCHDCKFPEASPAV

SEQ ID NO: 4392 - protein, 45 aa, Artificial Sequence
  Synthetic polypeptide
AQPGGSSWRRIALLILAITIHNVPEGRVCFTFCHDCKFPEASPAV

SEQ ID NO: 4393 - protein, 57 aa, Artificial Sequence
  Synthetic polypeptide
EKEGGSHWPSRGSCCPCAFSRESGTARRQQLEEDRTAHLGHHYTQRSRRTCLLHLLP

SEQ ID NO: 4394 - protein, 89 aa, Artificial Sequence
  Synthetic polypeptide
TRVRMVRHIRERRRQPLAFQRVLLSLCLLEGIWHSPAAAAGGGSHCSSWPSLYTTFQKDVFASPSAMIVSFLRPPQLCETVSQLNLFFK

SEQ ID NO: 4395 - protein, 269 aa, Artificial Sequence
  Synthetic polypeptide
MLQGHSSVFQALLGTFFTWGMTAAGAALVFVFSSGQRRILDGSLGFAAGVMLAASYWSLLAPAVEMATSSGGFGAFAFFPVAVGFTLGAAFVYLADLLMPHLGAAEDPQTTLALNFGSTLMKKKSDPEGPALLFPESELSIRIDKSENGEAYQRKKAAATGLPEGPAVPVPSRGNLAQPGGSSWRRIALLILAITIHNVPGACPHLEECTLQIPLQVSKELQDRRDCHSLGLSDKNLSRLDWKLSHGSSGLTFRVKMIGPFRLDKRRHR

SEQ ID NO: 4396 - protein, 276 aa, Artificial Sequence
  Synthetic polypeptide
MLQGHSSVFQALLGTFFTWGMTAAGAALVFVFSSGQRRILDGSLGFAAGVMLAASYWSLLAPAVEMATSSGGFGAFAFFPVAVGFTLGAAFVYLADLLMPHLGAAEDPQTTLALNFGSTLMKKKSDPEGPALLFPESELSIRIGRAGLLSDKSENGEAYQRKKAAATGLPEGPAVPVPSRGNLAQPGGSSWRRIALLILAITIHNVPGACPHLEECTLQIPLQVSKELQDRRDCHSLGLSDKNLSRLDWKLSHGSSGLTFRVKMIGPFRLDKRRHR

SEQ ID NO: 4397 - protein, 185 aa, Artificial Sequence
  Synthetic polypeptide
MTVRPPQPCGTGAAEDPQTTLALNFGSTLMKKKSDPEGPALLFPESELSIRIGRAGLLSDKSENGEAYQRKKAAATGLPEGPAVPVPSRGNLAQPGGSSWRRIALLILAITIHNVPGACPHLEECTLQIPLQVSKELQDRRDCHSLGLSDKNLSRLDWKLSHGSSGLTFRVKMIGPFRLDKRRHR

SEQ ID NO: 4398 - protein, 93 aa, Artificial Sequence
  Synthetic polypeptide
AQPGGSSWRRIALLILAITIHNVPGACPHLEECTLQIPLQVSKELQDRRDCHSLGLSDKNLSRLDWKLSHGSSGLTFRVKMIGPFRLDKRRHR

SEQ ID NO: 4399 - protein, 70 aa, Artificial Sequence
  Synthetic polypeptide
EKEGGSHWPSRGSCCPCAFSRESGTARRQQLEEDRTAHLGHHYTQRSRCLSTPGGMHPPDTSPGVQGATR

SEQ ID NO: 4400 - protein, 100 aa, Artificial Sequence
  Synthetic polypeptide
TRVRMVRHIRERRRQPLAFQRVLLSLCLLEGIWHSPAAAAGGGSHCSSWPSLYTTFQVLVHTWRNAPSRYLSRCPRSYKIEETATAWGFQTRTSAGWTGN

SEQ ID NO: 4401 - protein, 206 aa, Artificial Sequence
  Synthetic polypeptide
MLQGHSSVFQALLGTFFTWGMTAAGAALVFVFSSGQRRILDGSLGFAAGVMLAASYWSLLAPAVEMATSSGGFGAFAFFPVAVGFTLGAAFVYLADLLMPHLGAAEDPQTTLALNFGSTLMKKKSDPEGPALLFPESELSIRIDKSENGEAYQRKKAAATGLPEGPAVPVPSRGNLAQPGGSSWRRIALLILAITIHNVPGDLRIK

SEQ ID NO: 4402 - protein, 213 aa, Artificial Sequence
  Synthetic polypeptide
MLQGHSSVFQALLGTFFTWGMTAAGAALVFVFSSGQRRILDGSLGFAAGVMLAASYWSLLAPAVEMATSSGGFGAFAFFPVAVGFTLGAAFVYLADLLMPHLGAAEDPQTTLALNFGSTLMKKKSDPEGPALLFPESELSIRIGRAGLLSDKSENGEAYQRKKAAATGLPEGPAVPVPSRGNLAQPGGSSWRRIALLILAITIHNVPGDLRIK

SEQ ID NO: 4403 - protein, 122 aa, Artificial Sequence
  Synthetic polypeptide
MTVRPPQPCGTGAAEDPQTTLALNFGSTLMKKKSDPEGPALLFPESELSIRIGRAGLLSDKSENGEAYQRKKAAATGLPEGPAVPVPSRGNLAQPGGSSWRRIALLILAITIHNVPGDLRIK

SEQ ID NO: 4404 - protein, 30 aa, Artificial Sequence
  Synthetic polypeptide
AQPGGSSWRRIALLILAITIHNVPGDLRIK

SEQ ID NO: 4405 - protein, 48 aa, Artificial Sequence
  Synthetic polypeptide
EKEGGSHWPSRGSCCPCAFSRESGTARRQQLEEDRTAHLGHHYTQRSR

SEQ ID NO: 4406 - protein, 59 aa, Artificial Sequence
  Synthetic polypeptide
TRVRMVRHIRERRRQPLAFQRVLLSLCLLEGIWHSPAAAAGGGSHCSSWPSLYTTFQVI

SEQ ID NO: 4407 - protein, 175 aa, Artificial Sequence
  Synthetic polypeptide
MWGLLIWTLLALHQIRAARAQDDVSPYFKTEPVRTQVHLEGNRLVLTCMAEGSWPLEFKWLHNNRELTKFSLEYRYMITSLDRTHAGFYRCIVRNRMGALLQRQTEVQVAYMGSFEEGEKHQSVSHGEAAVIRAPRIASFPQPQVTWFRDGRKIPPSSRMPDAAAHTCDPSTLGD

SEQ ID NO: 4408 - protein, 127 aa, Artificial Sequence
  Synthetic polypeptide
MSEVEAAAGATAVPAATVPATAAGVVAVVVPVPAGEPQKGGGAGGGGGAASGPAAGTPSAPGSRTPGNPATAVSGTPAPPARSQADKPVLAIQVLGTVKWFNVRNGYGFINRNDTKEDVFVHQLENH

SEQ ID NO: 4409 - protein, 129 aa, Artificial Sequence
  Synthetic polypeptide
MSEVEAAAGATAVPAATVPATAAGVVAVVVPVPAGEPQKGGGAGGGGGAASGPAAGTPSAPGSRTPGNPATAVSGTPAPPARSQADKPVLAIQVLGTVKWFNVRNGYGFINRNDTKEDVFVHQVPPQTW

SEQ ID NO: 4410 - protein, 240 aa, Artificial Sequence
  Synthetic polypeptide
MASRCWRWWGWSAWPRTRLPPAGSTPSFCHHFSTQEKTPQICVVGSGPAGFYTAQHLLKHPQAHVDIYEKQPVPFGLVRFGVAPDHPEVKNVINTFTQTAHSGRCAFWGNVEVGRDVTVPELREAYHAVVLSYGAEDHRALEIPGEELPGVCSARAFVGWYNGLPENQELEPDLSCDTAVILGQGNVALDVARILLTPPEHLEDFPELVHSPIVPPPIDLSTSVSPHIIATAILHTLMSI

SEQ ID NO: 4411 - protein, 188 aa, Artificial Sequence
  Synthetic polypeptide
MEDKDREHPQAHVDIYEKQPVPFGLVRFGVAPDHPEVKNVINTFTQTAHSGRCAFWGNVEVGRDVTVPELREAYHAVVLSYGAEDHRALEIPGEELPGVCSARAFVGWYNGLPENQELEPDLSCDTAVILGQGNVALDVARILLTPPEHLEDFPELVHSPIVPPPIDLSTSVSPHIIATAILHTLMSI

SEQ ID NO: 4412 - protein, 200 aa, Artificial Sequence
  Synthetic polypeptide
MASRCWRWWGWSAWPRTRLPPAGSTPSFCHHFSTQEKTPQICVVGSGPAGFYTAQHLLKQHPQAHVDIYEKQPVPFGLVRFGVAPDHPEVKSYGAEDHRALEIPGEELPGVCSARAFVGWYNGLPENQELEPDLSCDTAVILGQGNVALDVARILLTPPEHLEDFPELVHSPIVPPPIDLSTSVSPHIIATAILHTLMSI

SEQ ID NO: 4413 - protein, 196 aa, Artificial Sequence
  Synthetic polypeptide
MTTCKAGVVPLASQQHPQAHVDIYEKQPVPFGLVRFGVAPDHPEVKNVINTFTQTAHSGRCAFWGNVEVGRDVTVPELREAYHAVVLSYGAEDHRALEIPGEELPGVCSARAFVGWYNGLPENQELEPDLSCDTAVILGQGNVALDVARILLTPPEHLEDFPELVHSPIVPPPIDLSTSVSPHIIATAILHTLMSI

SEQ ID NO: 4414 - protein, 241 aa, Artificial Sequence
  Synthetic polypeptide
MASRCWRWWGWSAWPRTRLPPAGSTPSFCHHFSTQEKTPQICVVGSGPAGFYTAQHLLKQHPQAHVDIYEKQPVPFGLVRFGVAPDHPEVKNVINTFTQTAHSGRCAFWGNVEVGRDVTVPELREAYHAVVLSYGAEDHRALEIPGEELPGVCSARAFVGWYNGLPENQELEPDLSCDTAVILGQGNVALDVARILLTPPEHLEDFPELVHSPIVPPPIDLSTSVSPHIIATAILHTLMSI

SEQ ID NO: 4415 - protein, 283 aa, Artificial Sequence
  Synthetic polypeptide
MASRCWRWWGWSAWPRTRLPPAGSTPSFCHHFSTQEKTPQICVVGSGPAGFYTAQHLLKRVEALCSQPRVLNSPALSGEGEDLGASQPLSLDPTSCHPVPQQHPQAHVDIYEKQPVPFGLVRFGVAPDHPEVKNVINTFTQTAHSGRCAFWGNVEVGRDVTVPELREAYHAVVLSYGAEDHRALEIPGEELPGVCSARAFVGWYNGLPENQELEPDLSCDTAVILGQGNVALDVARILLTPPEHLEDFPELVHSPIVPPPIDLSTSVSPHIIATAILHTLMSI

SEQ ID NO: 4416 - protein, 232 aa, Artificial Sequence
  Synthetic polypeptide
MASRCWRWWGWSAWPRTRLPPAGSTPSFCHHFSTQEKTPQICVVGSGPAGFYTAQHLLKHPQAHVDIYEKQPVPFGLVRFGVAPDHPEVKTAHSGRCAFWGNVEVGRDVTVPELREAYHAVVLSYGAEDHRALEIPGEELPGVCSARAFVGWYNGLPENQELEPDLSCDTAVILGQGNVALDVARILLTPPEHLEDFPELVHSPIVPPPIDLSTSVSPHIIATAILHTLMSI

SEQ ID NO: 4417 - protein, 271 aa, Artificial Sequence
  Synthetic polypeptide
MASRCWRWWGWSAWPRTRLPPAGSTPTFGGSDEVRDPANAKALRNKRRRMQVRVKLGKFQLLLDIQEKTPQICVVGSGPAGFYTAQHLLKHPQAHVDIYEKQPVPFGLVRFGVAPDHPEVKNVINTFTQTAHSGRCAFWGNVEVGRDVTVPELREAYHAVVLSYGAEDHRALEIPGEELPGVCSARAFVGWYNGLPENQELEPDLSCDTAVILGQGNVALDVARILLTPPEHLEDFPELVHSPIVPPPIDLSTSVSPHIIATAILHTLMSI

SEQ ID NO: 4418 - protein, 189 aa, Artificial Sequence
  Synthetic polypeptide
MEDKDREQHPQAHVDIYEKQPVPFGLVRFGVAPDHPEVKNVINTFTQTAHSGRCAFWGNVEVGRDVTVPELREAYHAVVLSYGAEDHRALEIPGEELPGVCSARAFVGWYNGLPENQELEPDLSCDTAVILGQGNVALDVARILLTPPEHLEDFPELVHSPIVPPPIDLSTSVSPHIIATAILHTLMSI

SEQ ID NO: 4419 - protein, 203 aa, Artificial Sequence
  Synthetic polypeptide
MASRCWRWWGWSAWPRTRLPPAGSTPSFCHHFSTQEKTPQICVVGSGPAGFYTAQHLLKHPQAHVDIYEKQPVPFGLVRFGVAPDHPEVKNVINTFTQTAHSGRCAFWGNVEVGRDVTVPELREAYHAVVLSYGAEDHRALEIPGEELPGVCSARAFVGWYNGLPENQELEPDLSCDTAVILGQGNVALDVARILLTPPEHLE

SEQ ID NO: 4420 - protein, 151 aa, Artificial Sequence
  Synthetic polypeptide
MEDKDREHPQAHVDIYEKQPVPFGLVRFGVAPDHPEVKNVINTFTQTAHSGRCAFWGNVEVGRDVTVPELREAYHAVVLSYGAEDHRALEIPGEELPGVCSARAFVGWYNGLPENQELEPDLSCDTAVILGQGNVALDVARILLTPPEHLE

SEQ ID NO: 4421 - protein, 163 aa, Artificial Sequence
  Synthetic polypeptide
MASRCWRWWGWSAWPRTRLPPAGSTPSFCHHFSTQEKTPQICVVGSGPAGFYTAQHLLKQHPQAHVDIYEKQPVPFGLVRFGVAPDHPEVKSYGAEDHRALEIPGEELPGVCSARAFVGWYNGLPENQELEPDLSCDTAVILGQGNVALDVARILLTPPEHLE

SEQ ID NO: 4422 - protein, 159 aa, Artificial Sequence
  Synthetic polypeptide
MTTCKAGVVPLASQQHPQAHVDIYEKQPVPFGLVRFGVAPDHPEVKNVINTFTQTAHSGRCAFWGNVEVGRDVTVPELREAYHAVVLSYGAEDHRALEIPGEELPGVCSARAFVGWYNGLPENQELEPDLSCDTAVILGQGNVALDVARILLTPPEHLE

SEQ ID NO: 4423 - protein, 204 aa, Artificial Sequence
  Synthetic polypeptide
MASRCWRWWGWSAWPRTRLPPAGSTPSFCHHFSTQEKTPQICVVGSGPAGFYTAQHLLKQHPQAHVDIYEKQPVPFGLVRFGVAPDHPEVKNVINTFTQTAHSGRCAFWGNVEVGRDVTVPELREAYHAVVLSYGAEDHRALEIPGEELPGVCSARAFVGWYNGLPENQELEPDLSCDTAVILGQGNVALDVARILLTPPEHLE

SEQ ID NO: 4424 - protein, 246 aa, Artificial Sequence
  Synthetic polypeptide
MASRCWRWWGWSAWPRTRLPPAGSTPSFCHHFSTQEKTPQICVVGSGPAGFYTAQHLLKRVEALCSQPRVLNSPALSGEGEDLGASQPLSLDPTSCHPVPQQHPQAHVDIYEKQPVPFGLVRFGVAPDHPEVKNVINTFTQTAHSGRCAFWGNVEVGRDVTVPELREAYHAVVLSYGAEDHRALEIPGEELPGVCSARAFVGWYNGLPENQELEPDLSCDTAVILGQGNVALDVARILLTPPEHLE

SEQ ID NO: 4425 - protein, 195 aa, Artificial Sequence
  Synthetic polypeptide
MASRCWRWWGWSAWPRTRLPPAGSTPSFCHHFSTQEKTPQICVVGSGPAGFYTAQHLLKHPQAHVDIYEKQPVPFGLVRFGVAPDHPEVKTAHSGRCAFWGNVEVGRDVTVPELREAYHAVVLSYGAEDHRALEIPGEELPGVCSARAFVGWYNGLPENQELEPDLSCDTAVILGQGNVALDVARILLTPPEHLE

SEQ ID NO: 4426 - protein, 234 aa, Artificial Sequence
  Synthetic polypeptide
MASRCWRWWGWSAWPRTRLPPAGSTPTFGGSDEVRDPANAKALRNKRRRMQVRVKLGKFQLLLDIQEKTPQICVVGSGPAGFYTAQHLLKHPQAHVDIYEKQPVPFGLVRFGVAPDHPEVKNVINTFTQTAHSGRCAFWGNVEVGRDVTVPELREAYHAVVLSYGAEDHRALEIPGEELPGVCSARAFVGWYNGLPENQELEPDLSCDTAVILGQGNVALDVARILLTPPEHLE

SEQ ID NO: 4427 - protein, 152 aa, Artificial Sequence
  Synthetic polypeptide
MEDKDREQHPQAHVDIYEKQPVPFGLVRFGVAPDHPEVKNVINTFTQTAHSGRCAFWGNVEVGRDVTVPELREAYHAVVLSYGAEDHRALEIPGEELPGVCSARAFVGWYNGLPENQELEPDLSCDTAVILGQGNVALDVARILLTPPEHLE

SEQ ID NO: 4428 - protein, 76 aa, Artificial Sequence
  Synthetic polypeptide
MAATRCLRWGLSRAGVWLLPPPARCPRRALHKQKDGTEFKSIYSLDKLYPESQGSDTAWRVPPGLQSETPSQKKKK

SEQ ID NO: 4429 - protein, 20 aa, Artificial Sequence
  Synthetic polypeptide
AAPTARTVPTPGAAQAERRH

SEQ ID NO: 4430 - protein, 71 aa, Artificial Sequence
  Synthetic polypeptide
MASNIFGTPEENQASWAKSAGAKSSGGREDLESSGLQRRNSSEASSGDFLDLKGEGDIHGMATGMTLEFPS

SEQ ID NO: 4431 - protein, 117 aa, Artificial Sequence
  Synthetic polypeptide
MTTTTTFKGVDPNSRNSSRVLRPPGGGSNFSLGFDEPTEQPVRKNKMASNIFGTPEENQASWAKSAGAKSSGGREDLESSGLQRRNSSEASSGDFLDLKGEGDIHGMATGMTLEFPS

SEQ ID NO: 4432 - protein, 19 aa, Artificial Sequence
  Synthetic polypeptide
MEELDGEPTVTGGHGGSRL

SEQ ID NO: 4433 - protein, 98 aa, Artificial Sequence
  Synthetic polypeptide
MYFDWGPGEMLVCETSFNKKEKSEMVPSCPFIYIIRKDVDVYSQILRKLFNESHGIFLGLQRIDEELTGKSRKSQLLGPTSDHQNQNLRGWILKSPAH

SEQ ID NO: 4434 - protein, 120 aa, Artificial Sequence
  Synthetic polypeptide
MEELDGEPTVTLIPGVNSKKNQMYFDWGPGEMLVCETSFNKKEKSEMVPSCPFIYIIRKDVDVYSQILRKLFNESHGIFLGLQRIDEELTGKSRKSQLLGPTSDHQNQNLRGWILKSPAH

SEQ ID NO: 4435 - protein, 74 aa, Artificial Sequence
  Synthetic polypeptide
MVPSCPFIYIIRKDVDVYSQILRKLFNESHGIFLGLQRIDEELTGKSRKSQLLGPTSDHQNQNLRGWILKSPAH

SEQ ID NO: 4436 - protein, 689 aa, Artificial Sequence
  Synthetic polypeptide
MAEAEGESLESWLNKATNPSNRQEDWEYIIGFCDQINKELEGPQIAVRLLAHKIQSPQEWEALQALTYLGDRVSEKVKTKVIELLYSWTMALPEEAKIKDAYHMLKRQGIVQSDPPIPVDRTLIPSPPPRPKNPVFDDEEKSKLLAKLLKSKNPDDLQEANKLIKSMVKEDEARIQKVTKRLHTLEEVNNNVRLLSEMLLHYSQEDSSDGDRELMKELFDQCENKRRTLFKLASETEDNDNSLGDILQASDNLSRVINSYKTIIEGQVINGEVATLTLPDSEGNSQCSNQGTLIDLAELDTTNSLSSVLAPAPTPPSSGIPILPPPPQASGPPRSRSSSQAEATLGPSSTSNALSWLDEELLCLGLADPAPNVPPKESAGNSQWHLLQREQSDLDFFSPRPGTAACGASDAPLLQPSAPSSSSSQAPLPPPFPAPVVPASVPAPSAGSSLFSTGVAPALAPKVEPAVPGHHGLALGNSALHHLDALDQLLEEAKVTSGLVKPTTSPLIPTTTPARPLLPFSTGPGSPLFQPLSFQSQGSPPKGPELSLASIHVPLESIKPSSALPVTAYDKNGFRILFHFAKECPPGRPDVLVVVVSMLNTAPLPVKSIVLQAAVPKSMKVKLQPPSGTELSPFSPIQPPAAITQVMLLANPLKNTVFKVPCWKQRAALTSNIASALILDFLASRTVRK

SEQ ID NO: 4437 - protein, 722 aa, Artificial Sequence
  Synthetic polypeptide
MAEAEGESLESWLNKATNPSNRQEDWEYIIGFCDQINKELEGPQIAVRLLAHKIQSPQEWEALQALTVLEACMKNCGRRFHNEVGKFRFLNELIKVVSPKYLGDRVSEKVKTKVIELLYSWTMALPEEAKIKDAYHMLKRQGIVQSDPPIPVDRTLIPSPPPRPKNPVFDDEEKSKLLAKLLKSKNPDDLQEANKLIKSMVKEDEARIQKVTKRLHTLEEVNNNVRLLSEMLLHYSQEDSSDGDRELMKELFDQCENKRRTLFKLASETEDNDNSLGDILQASDNLSRVINSYKTIIEGQVINGEVATLTLPDSEGNSQCSNQGTLIDLAELDTTNSLSSVLAPAPTPPSSGIPILPPPPQASGPPRSRSSSQAEATLGPSSTSNALSWLDEELLCLGLADPAPNVPPKESAGNSQWHLLQREQSDLDFFSPRPGTAACGASDAPLLQPSAPSSSSSQAPLPPPFPAPVVPASVPAPSAGSSLFSTGVAPALAPKVEPAVPGHHGLALGNSALHHLDALDQLLEEAKVTSGLVKPTTSPLIPTTTPARPLLPFSTGPGSPLFQPLSFQSQGSPPKGPELSLASIHVPLESIKPSSALPVTAYDKNGFRILFHFAKECPPGRPDVLVVVVSMLNTAPLPVKSIVLQAAVPKSMKVKLQPPSGTELSPFSPIQPPAAITQVMLLANPLKNTVFKVPCWKQRAALTSNIASALILDFLASRTVRK

SEQ ID NO: 4438 - protein, 600 aa, Artificial Sequence
  Synthetic polypeptide
MALPEEAKIKDAYHMLKRQGIVQSDPPIPVDRTLIPSPPPRPKNPVFDDEEKSKLLAKLLKSKNPDDLQEANKLIKSMVKEDEARIQKVTKRLHTLEEVNNNVRLLSEMLLHYSQEDSSDGDRELMKELFDQCENKRRTLFKLASETEDNDNSLGDILQASDNLSRVINSYKTIIEGQVINGEVATLTLPDSEGNSQCSNQGTLIDLAELDTTNSLSSVLAPAPTPPSSGIPILPPPPQASGPPRSRSSSQAEATLGPSSTSNALSWLDEELLCLGLADPAPNVPPKESAGNSQWHLLQREQSDLDFFSPRPGTAACGASDAPLLQPSAPSSSSSQAPLPPPFPAPVVPASVPAPSAGSSLFSTGVAPALAPKVEPAVPGHHGLALGNSALHHLDALDQLLEEAKVTSGLVKPTTSPLIPTTTPARPLLPFSTGPGSPLFQPLSFQSQGSPPKGPELSLASIHVPLESIKPSSALPVTAYDKNGFRILFHFAKECPPGRPDVLVVVVSMLNTAPLPVKSIVLQAAVPKSMKVKLQPPSGTELSPFSPIQPPAAITQVMLLANPLKNTVFKVPCWKQRAALTSNIASALILDFLASRTVRK

SEQ ID NO: 4439 - protein, 650 aa, Artificial Sequence
  Synthetic polypeptide
MKNCGRRFHNEVGKFRFLNELIKVVSPKYLGDRVSEKVKTKVIELLYSWTMALPEEAKIKDAYHMLKRQGIVQSDPPIPVDRTLIPSPPPRPKNPVFDDEEKSKLLAKLLKSKNPDDLQEANKLIKSMVKEDEARIQKVTKRLHTLEEVNNNVRLLSEMLLHYSQEDSSDGDRELMKELFDQCENKRRTLFKLASETEDNDNSLGDILQASDNLSRVINSYKTIIEGQVINGEVATLTLPDSEGNSQCSNQGTLIDLAELDTTNSLSSVLAPAPTPPSSGIPILPPPPQASGPPRSRSSSQAEATLGPSSTSNALSWLDEELLCLGLADPAPNVPPKESAGNSQWHLLQREQSDLDFFSPRPGTAACGASDAPLLQPSAPSSSSSQAPLPPPFPAPVVPASVPAPSAGSSLFSTGVAPALAPKVEPAVPGHHGLALGNSALHHLDALDQLLEEAKVTSGLVKPTTSPLIPTTTPARPLLPFSTGPGSPLFQPLSFQSQGSPPKGPELSLASIHVPLESIKPSSALPVTAYDKNGFRILFHFAKECPPGRPDVLVVVVSMLNTAPLPVKSIVLQAAVPKSMKVKLQPPSGTELSPFSPIQPPAAITQVMLLANPLKNTVFKVPCWKQRAALTSNIASALILDFLASRTVRK

SEQ ID NO: 4440 - protein, 38 aa, Artificial Sequence
  Synthetic polypeptide
SHPHHHPSQAPPALLHGARQPALPATEFPVPGQPPEGA

SEQ ID NO: 4441 - protein, 128 aa, Artificial Sequence
  Synthetic polypeptide
SALPVTAYDKNGFRILFHFAKECPPGRPDVLVVVVSMLNTAPLPVKSIVLQAAVPKSMKVKLQPPSGTELSPFSPIQPPAAITQVMLLANPLKNTVFKVPCWKQRAALTSNIASALILDFLASRTVRK

SEQ ID NO: 4442 - protein, 96 aa, Artificial Sequence
  Synthetic polypeptide
VVVSMLNTAPLPVKSIVLQAAVPKSMKVKLQPPSGTELSPFSPIQPPAAITQVMLLANPLKNTVFKVPCWKQRAALTSNIASALILDFLASRTVRK

SEQ ID NO: 4443 - protein, 15 aa, Artificial Sequence
  Synthetic polypeptide
SAHQSCSSRENKFCV

SEQ ID NO: 4444 - protein, 10 aa, Artificial Sequence
  Synthetic polypeptide
KTQSSVNSPT

SEQ ID NO: 4445 - protein, 184 aa, Artificial Sequence
  Synthetic polypeptide
MAAPAVKVARGWSGLALGVRRAVLQLPGLTQVRWSRYSPEFKDPLIDKEYYRKPVEELTEEEKYVRELKKTQLIKAAPAGKTSSVFEDPVISKFTNMMMIGGNKVLARSLMIQTLEAVKRKQFEKYHAASAEEQATIERNPYTIFHQALKNCEPMIGLVPILKGGRFYQPGVVAHTSSPSYLGG

SEQ ID NO: 4446 - protein, 213 aa, Artificial Sequence
  Synthetic polypeptide
MSSYLGQGPELLWLRFSSRSPRRSPSSARWQSCLLLSQTYSLVESAFACLLLSPPPRLTQVRWSRYSPEFKDPLIDKEYYRKPVEELTEEEKYVRELKKTQLIKAAPAGKTSSVFEDPVISKFTNMMMIGGNKVLARSLMIQTLEAVKRKQFEKYHAASAEEQATIERNPYTIFHQALKNCEPMIGLVPILKGGRFYQPGVVAHTSSPSYLGG

SEQ ID NO: 4447 - protein, 197 aa, Artificial Sequence
  Synthetic polypeptide
MAAPAVKVARGWSGLALGVRRAVLQLPGLTQVRWSRYSPEFKDPLIDKEYYRKPVEELTEEEKYVRELKKTQLIKAAPAGKTSSVFEDPVISKFTNMMMIGGNKVLARSLMIQTLEAVKRKQFEKYHAASAEEQATIERNPYTIFHQALKNCEPMIGLVPILKGGRFYQVWWHIPVVPATWEAEAGESLEPRMQRLQ

SEQ ID NO: 4448 - protein, 226 aa, Artificial Sequence
  Synthetic polypeptide
MSSYLGQGPELLWLRFSSRSPRRSPSSARWQSCLLLSQTYSLVESAFACLLLSPPPRLTQVRWSRYSPEFKDPLIDKEYYRKPVEELTEEEKYVRELKKTQLIKAAPAGKTSSVFEDPVISKFTNMMMIGGNKVLARSLMIQTLEAVKRKQFEKYHAASAEEQATIERNPYTIFHQALKNCEPMIGLVPILKGGRFYQVWWHIPVVPATWEAEAGESLEPRMQRLQ

SEQ ID NO: 4449 - protein, 15 aa, Artificial Sequence
  Synthetic polypeptide
SAHQSCSSRENKFCV

SEQ ID NO: 4450 - protein, 10 aa, Artificial Sequence
  Synthetic polypeptide
KTQSSVNSPT

SEQ ID NO: 4451 - protein, 35 aa, Artificial Sequence
  Synthetic polypeptide
MDLKEKHLLLGRLRQENRLNPGGRGCSEQRLHYCT

SEQ ID NO: 4452 - protein, 142 aa, Artificial Sequence
  Synthetic polypeptide
MDLKEKHLGEPPSALGLSTRKALSVLKEQLEAVLEGHLRERKKCLTWKEVWRSSFLHHSNRCSCFHWPGASLMLLAVLLLLGCCGGQPAGSRGVGLVNASALFLLLLLNLVLIGRQDRLKRREVERRLRGIIDQIQGPLQCL

SEQ ID NO: 4453 - protein, 152 aa, Artificial Sequence
  Synthetic polypeptide
MLFKQAELWMPHQGKGNKGEPPSALGLSTRKALSVLKEQLEAVLEGHLRERKKCLTWKEVWRSSFLHHSNRCSCFHWPGASLMLLAVLLLLGCCGGQPAGSRGVGLVNASALFLLLLLNLVLIGRQDRLKRREVERRLRGIIDQIQGPLQCL

SEQ ID NO: 4454 - protein, 27 aa, Artificial Sequence
  Synthetic polypeptide
TASQPCAHRAARPAEASGGRAEAARDH

SEQ ID NO: 4455 - protein, 30 aa, Artificial Sequence
  Synthetic polypeptide
QHGFRQPPHPSARPSPRAAPGQRGWAGDRR

SEQ ID NO: 4456 - protein, 451 aa, Artificial Sequence
  Synthetic polypeptide
MEPEPEPAAVEVPAGRVLSARELFAARSRSQKLPQRSHGPKDFLPDGSAAQAERLRRCREELWQLLAEQRVERLGSLVAAEWRPEEGFVELKSPAGKFWQTMGFSEQGRQRLHPEEALYLLECGSIHLFHQDLPLSIQEAYQLLLTDHTVTFLQYQVFSHLKRLGYVVRRFQPSSVLSPYERQLNLDASVQHLEDGDGKRKRSSSSPRSINKKAKALDNSLQPKSLAASSPPPCSQPSQCPEEKPQESSPMKGPGGPFQLLGSLGPSPGPAREGVGCSWESGRAENGVTGAGKRRWNFEQISFPNMASDSRHTLLRAPAPELLPANVAGRETDAESWCQKLNQRKEKLSRREREHHAEAAQFQEDVNADPEVQRCSSWREYKELLQRRQVQRSQRRAPHLWGQPVTPLLSPGQASSPGWTRWLIPVIPALWEAEAGRSPEVRSSRPTWATW

SEQ ID NO: 4457 - protein, 36 aa, Artificial Sequence
  Synthetic polypeptide
MRRFLRPGHDPVRERLKRDLFQFNKSWCEDYMSSCT

SEQ ID NO: 4458 - protein, 261 aa, Artificial Sequence
  Synthetic polypeptide
MAGPRPSPWARLLLAALISVSLSGTLANRCKKAPVKSCTECVRVDKDCAYCTDEMFRDRRCNTQAELLAAGCQRESIVVMESSFQITEETQIDTTLRRSQMSPQGLRVRLRPGEERHFELEVFEPLESPVDLYILMDFSNSMSDDLDNLKKMGQNLARVLSQLTSDYTIGFGKFVDKVSVPQTDMRPEKLKEPWPNSDPPFSFKNVISLTEDVDEFRNKLQGERISGNLDAPEGGFDAILQTAVCTKTQKLAGCDARLWPQ

SEQ ID NO: 4459 - protein, 744 aa, Artificial Sequence
  Synthetic polypeptide
MAGPRPSPWARLLLAALISVSLSGTLANRCKKAPVKSCTECVRVDKDCAYCTDEMFRDRRCNTQAELLAAGCQRESIVVMESSFQITEETQIDTTLRRSQMSPQGLRVRLRPGEERHFELEVFEPLESPVDLYILMDFSNSMSDDLDNLKKMGQNLARVLSQLTSDYTIGFGKFVDKVSVPQTDMRPEKLKEPWPNSDPPFSFKNVISLTEDVDEFRNKLQGERISGNLDAPEGGFDAILQTAVCTRDIGWRPDSTHLLVFSTESAFHYEADGANVLAGIMSRNDERCHLDTTGTYTQYRTQDYPSVPTLVRLLAKHNIIPIFAVTNYSYSYYEKLHTYFPVSSLGVLQEDSSNIVELLEEAFNRIRSNLDIRALDSPRGLRTEVTSKMFQKTRTGSFHIRRGEVGIYQVQLRALEHVDGTHVCQLPEDQKGNIHLKPSFSDGLKMDAGIICDVCTCELQKEVRSARCSFNGDFVCGQCVCSEGWSGQTCNCSTGSLSDIQPCLREGEDKPCSGRGECQCGHCVCYGEGRYEGQFCEYDNFQCPRTSGFLCNDRGRCSMGQCVCEPGWTGPSCDCPLSNATCIDSNGGICNGRGHCECGRCHCHQQSLYTDTICEINYSAIHPGLCEDLRSCVQCQAWGTGEKKGRTCEECNFKVKMVDELKRAEEVVVRCSFRDEDDDCTYSYTMEGDGAPGPNSTVLVHKKKDCPPGSFWWLIPLLLLLLPLLALLLLLCWKYCACCKFPHL

SEQ ID NO: 4460 - protein, 145 aa, Artificial Sequence
  Synthetic polypeptide
MRPDCNSQKPSQALSIRDTSSKDPWPDIEPQLPATPAAVWGVFTFSWRGAGALGPRRGPRRLNNKRGAAKRQEDKTMSKGPGPGGSAASSAPPAATAQVLQAQPEKPQHYTSHACNHSILGGRGGSHEVRSEETSLPNMAKPRLY

SEQ ID NO: 4461 - protein, 69 aa, Artificial Sequence
  Synthetic polypeptide
MSKGPGPGGSAASSAPPAATAQVLQAQPEKPQHYTSHACNHSILGGRGGSHEVRSEETSLPNMAKPRLY

SEQ ID NO: 4462 - protein, 14 aa, Artificial Sequence
  Synthetic polypeptide
GRCWMPSASSARPS

SEQ ID NO: 4463 - protein, 407 aa, Artificial Sequence
  Synthetic polypeptide
MAAQLLEEKLTCAICLGLYQDPVTLPCGHNFCGACIRDWWDRCGKACPECREPFPDGAELRRNVALSGVLEVVRAGPARDPGPDPGPGPDPAARCPRHGRPLELFCRTEGRCVCSVCTVRECRLHERALLDAERLKREAQLRASLEVTQQQATQAEGQLLELRKQSSQIQNSACILASWVSGKFSSLLQALEIQHTTALRSIEVAKTQALAQARDEEQRLRVHLEAVARHGCRIRELLEQVDEQTFLQESQLLQPPGPLGPLTPLQWDEDQQLGDLKQLLSRLCGLLLEEGSHPGAPAKPVDLAPVEAPGPLAPVPSTVCPLRRKLWQNYRNLTFDPVSANRHFYLSRQDQQVKHCRQSRGPGGPGSFELWQVQCAQSFQAGHHYWEVESCSLKKTYSDPNPQDLWL

SEQ ID NO: 4464 - protein, 14 aa, Artificial Sequence
  Synthetic polypeptide
GRCWMPSASSARPS

SEQ ID NO: 4465 - protein, 424 aa, Artificial Sequence
  Synthetic polypeptide
MAAQLLEEKLTCAICLGLYQDPVTLPCGHNFCGACIRDWWDRCGKACPECREPFPDGAELRRNVALSGVLEVVRAGPARDPGPDPGPGPDPAARCPRHGRPLELFCRTEGRCVCSVCTVRECRLHERALLDAERLKREAQLRASLEVTQQQATQAEGQLLELRKQSSQIQNSACILASWVSGKFSSLLQALEIQHTTALRSIEVAKTQALAQARDEEQRLRVHLEAVARHGCRIRELLEQVDEQTFLQESQLLQPPGPLGPLTPLQWDEDQQLGDLKQLLSRLCGLLLEEGSHPGAPAKPVDLAPVEAPGPLAPVPSTVCPLRRKLWQNYRNLTFDPVSANRHFYLSRQDQQVKHCRQSRGPGGPGSFELWQVQCAQSFQAGHHYWEAQWLTLVIPALWEAEAGGSQGQEFETSLANKAKPRLY

SEQ ID NO: 4466 - protein, 6 aa, Artificial Sequence
  Synthetic polypeptide
APGAGG

SEQ ID NO: 4467 - protein, 14 aa, Artificial Sequence
  Synthetic polypeptide
GRCWMPSASSARPS

SEQ ID NO: 4468 - protein, 90 aa, Artificial Sequence
  Synthetic polypeptide
PLTPLQWDEDQQLGDLKQLLSRLCGLLLEEGSHPGAPAKPVDLAPVDYRNLTFDPVSANRHFYLSRQDQQDKLCDLWQDMVPIGIPVAIL

SEQ ID NO: 4469 - protein, 372 aa, Artificial Sequence
  Synthetic polypeptide
MAAQLLEEKLTCAICLGLYQDPVTLPCGHNFCGACIRDWWDRCGKACPECREPFPDGAELRRNVALSGVLEVVRAGPARDPGPDPGPGPDPAARCPRHGRPLELFCRTEGRCVCSVCTVRECRLHERALLDAERLKREAQLRASLEVTQQQATQAEGQLLELRKQSSQIQNSACILASWVSGKFSSLLQALEIQHTTALRSIEVAKTQALAQARDEEQRLRVHLEAVARHGCRIRELLEQVDEQTFLQESQLLQPPGPLGPLTPLQWDEDQQLGDLKQLLSRLCGLLLEEGSHPGAPAKPVDLAPVEAPGPLAPVPSTVCPLRRKLWQNYRNLTFDPVSANRHFYLSRQDQQDKLCDLWQDMVPIGIPVAIL

SEQ ID NO: 4470 - protein, 6 aa, Artificial Sequence
  Synthetic polypeptide
APGAGG

SEQ ID NO: 4471 - protein, 105 aa, Artificial Sequence
  Synthetic polypeptide
PLTPLQWDEDQQLGDLKQLLSRLCGLLLEEGSHPGAPAKPVDLAPVDYRNLTFDPVSANRHFYLSRQDQQWLTLVIPALWEAEAGGSQGQEFETSLANKAKPRLY

SEQ ID NO: 4472 - protein, 387 aa, Artificial Sequence
  Synthetic polypeptide
MAAQLLEEKLTCAICLGLYQDPVTLPCGHNFCGACIRDWWDRCGKACPECREPFPDGAELRRNVALSGVLEVVRAGPARDPGPDPGPGPDPAARCPRHGRPLELFCRTEGRCVCSVCTVRECRLHERALLDAERLKREAQLRASLEVTQQQATQAEGQLLELRKQSSQIQNSACILASWVSGKFSSLLQALEIQHTTALRSIEVAKTQALAQARDEEQRLRVHLEAVARHGCRIRELLEQVDEQTFLQESQLLQPPGPLGPLTPLQWDEDQQLGDLKQLLSRLCGLLLEEGSHPGAPAKPVDLAPVEAPGPLAPVPSTVCPLRRKLWQNYRNLTFDPVSANRHFYLSRQDQQWLTLVIPALWEAEAGGSQGQEFETSLANKAKPRLY

SEQ ID NO: 4473 - protein, 14 aa, Artificial Sequence
  Synthetic polypeptide
GRCWMPSASSARPS

SEQ ID NO: 4474 - protein, 853 aa, Artificial Sequence
  Synthetic polypeptide
MAPKTKKGCKVTLPEKPVKLASHTRDTTGVSQMFPSSKARTKSLLGDDVFSTMAGLEEADAEVSGISEADPQALLQAMKDLDGMDADILGLKKSNSAPSKKAAKDPGKGELPNHPKPAGGAIPTKKSLPSPSSSGHQNRRFSSEDLEDPLRGLLSYDEGGITKQPPVTQSKTASDKSPSTVRDQGPSIPLTPGDTPIRKKEELLFDDGDDIMATLGFGDSPKAEKRQIGDQEGPRPARSTLDELLGRGMATKLLARPGTGEHREFKLDKKYQRPQDSEDMWGDEDFTFGAYQPTVVSSEGRQSRRQSVSRFFADSGADPKGEPGSKQSPPMASSPIQPRKGGADWLGLKDEDLDLFPASPTREAHRESSVPVTPSVPPPASQHSTPAGLPPSRAKPPTEGAGSPAKASQASKLRASKEEKEDWLSHALSRKKSQGLAREQHAGTSEGLHLAGTAGHPPSGSQPLTSTQGLEHAAAGGSSGTTARERPCVRPGVSGSPVTQNHAASALPTGSPKRGTAPGDLSATEPATCFPSTQKPTEPSVPVQPLLPESLARSLLPSTEYQKQLLAAQVQLQCSPAELQAELLHSQARLAELEAQVRKLELERAQHELLLGSLQQQHQADLELIESAHRSRIKVLETSYQQREERLRRENEELSARYLSQCQEAEQARAELTAQHQRRLAAIAQEKDQEMERLRELQRASILDMRRDHEEQLQRLKLLKDREVDAATSATSHTRSLNSIIHQMEKFSSSLHELSSRVEASHLTTSQERELGIRQRDEQLRALQERLGQQQRDMEEERSRQQEVIGKMEARLNEQSRLLEQASWLMPVIPALQESKAGGSLEVRSSRPAWPTW

SEQ ID NO: 4475 - protein, 852 aa, Artificial Sequence
  Synthetic polypeptide
MAPKTKKGCKVTLPEKPVKLASHTRDTTGVSQMFPSSKARTKSLLGDDVFSTMAGLEEADAEVSGISEADPQALLQAMKDLDGMDADILGLKKSNSAPSKKAAKDPGKGELPNHPKPAGGAIPTKKSLPSPSSSGHQNRRFSSEDLEDPLRGLLSYDEGGITKQPPVTQSKTASDKSPSTVRDQGPSIPLTPGDTPIRKKEELLFDDGDDIMATLGFGDSPKAEKRQIGDQEGPRPARSTLDELLGRGMATKLLARPGTGEHREFKLDKKYQRPQDSEDMWGDEDFTFGAYQPTVVSSEGRQSRRQSVRFFADSGADPKGEPGSKQSPPMASSPIQPRKGGADWLGLKDEDLDLFPASPTREAHRESSVPVTPSVPPPASQHSTPAGLPPSRAKPPTEGAGSPAKASQASKLRASKEEKEDWLSHALSRKKSQGLAREQHAGTSEGLHLAGTAGHPPSGSQPLTSTQGLEHAAAGGSSGTTARERPCVRPGVSGSPVTQNHAASALPTGSPKRGTAPGDLSATEPATCFPSTQKPTEPSVPVQPLLPESLARSLLPSTEYQKQLLAAQVQLQCSPAELQAELLHSQARLAELEAQVRKLELERAQHELLLGSLQQQHQADLELIESAHRSRIKVLETSYQQREERLRRENEELSARYLSQCQEAEQARAELTAQHQRRLAAIAQEKDQEMERLRELQRASILDMRRDHEEQLQRLKLLKDREVDAATSATSHTRSLNSIIHQMEKFSSSLHELSSRVEASHLTTSQERELGIRQRDEQLRALQERLGQQQRDMEEERSRQQEVIGKMEARLNEQSRLLEQASWLMPVIPALQESKAGGSLEVRSSRPAWPTW

SEQ ID NO: 4476 - protein, 8 aa, Artificial Sequence
  Synthetic polypeptide
GTKNQERM

SEQ ID NO: 4477 - protein, 42 aa, Artificial Sequence
  Synthetic polypeptide
MNEQSRLLEQASWLMPVIPALQESKAGGSLEVRSSRPAWPTW

SEQ ID NO: 4478 - protein, 282 aa, Artificial Sequence
  Synthetic polypeptide
MHGGGPPSGDSACPLRTIKRVQFGVLSPDELKRMSVTEGGIKYPETTEGGRPKLGGLMDPRQGVIERTGRCQTCAGNMTECPGHFGHIELAKPVFHVGFLVKTMKVLRCVCFFCSKLLVDSNNPKIKDILAKSKGQPKKRLTHVYDLCKGKNICEGGEEMDNKFGVEQPEGDEDLTKEKGHGGCGRYQPRIRRSGLELYAEWKHVNEDSQEKKILLSPERVHEIFKRISDEECFVLGMEPRYARPEWMIVTVLPVPPLSVRPAVVMQGSARNQWAVLPPGVV

SEQ ID NO: 4479 - protein, 387 aa, Artificial Sequence
  Synthetic polypeptide
MASADKNGGSVSSVSSSRLQSRKPPNLSITIPPPEKETQAPGEQDSMLPERKNPAYLKSVSLQEPRSRWQESSEKRPGFRRQASLSQSIRKGAAQWFGVSGDWEGQRQQWQRRSLHHCSMRYGRLKASCQRDLELPSQEAPSFQGTESPKPCKMPKIVDPLARGRAFRHPEEMDRPHAPHPPLTPGVLSLTSFTSVRSGYSHLPRRKRMSVAHMSLQAAAALLKGRSVLDATGQRCRVVKRSFAFPSFLEEDVVDGADTFDSSFFSKEEMSSMPDDVFESPPLSASYFRGIPHSASPVSPDGVQIPLKEYGRAPVPGPRRGKRIASKVKHFAFDRKKRHYGLGVVGNWLNRSYRRSISSTVQRQLESFDSHRRAWWCMPVIPATREA

SEQ ID NO: 4480 - protein, 416 aa, Artificial Sequence
  Synthetic polypeptide
MASADKNGGSVSSVSSSRLQSRKPPNLSITIPPPEKETQAPGEQDSMLPEGFQNRRLKKSQPRTWAAHTTACPPSFLPKRKNPAYLKSVSLQEPRSRWQESSEKRPGFRRQASLSQSIRKGAAQWFGVSGDWEGQRQQWQRRSLHHCSMRYGRLKASCQRDLELPSQEAPSFQGTESPKPCKMPKIVDPLARGRAFRHPEEMDRPHAPHPPLTPGVLSLTSFTSVRSGYSHLPRRKRMSVAHMSLQAAAALLKGRSVLDATGQRCRVVKRSFAFPSFLEEDVVDGADTFDSSFFSKEEMSSMPDDVFESPPLSASYFRGIPHSASPVSPDGVQIPLKEYGRAPVPGPRRGKRIASKVKHFAFDRKKRHYGLGVVGNWLNRSYRRSISSTVQRQLESFDSHRRAWWCMPVIPATREA

SEQ ID NO: 4481 - protein, 127 aa, Artificial Sequence
  Synthetic polypeptide
MEPEGVIESNWNEIVDSFDDMNLSESLLRGIYAYGFEKPSAIQQRAILPCIKGYDVIAQAQSGTGKTATFAISILQQIELDLKATQALVLAPTRELAQQHDLKWILASACFSAECEFNNSACPKVVG

SEQ ID NO: 4482 - protein, 107 aa, Artificial Sequence
  Synthetic polypeptide
MNLSESLLRGIYAYGFEKPSAIQQRAILPCIKGYDVIAQAQSGTGKTATFAISILQQIELDLKATQALVLAPTRELAQQHDLKWILASACFSAECEFNNSACPKVVG

SEQ ID NO: 4483 - protein, 143 aa, Artificial Sequence
  Synthetic polypeptide
MSASQDSRSRDNGPDGMEPEGVIESNWNEIVDSFDDMNLSESLLRGIYAYGFEKPSAIQQRAILPCIKGYDVIAQAQSGTGKTATFAISILQQIELDLKATQALVLAPTRELAQQHDLKWILASACFSAECEFNNSACPKVVG

SEQ ID NO: 4484 - protein, 141 aa, Artificial Sequence
  Synthetic polypeptide
MSASQDSRDNGPDGMEPEGVIESNWNEIVDSFDDMNLSESLLRGIYAYGFEKPSAIQQRAILPCIKGYDVIAQAQSGTGKTATFAISILQQIELDLKATQALVLAPTRELAQQHDLKWILASACFSAECEFNNSACPKVVG

SEQ ID NO: 4485 - protein, 47 aa, Artificial Sequence
  Synthetic polypeptide
RLGLIVREAATARGLPHPDPETMAPMGWSPKASSRVTGMRLLTALMT

SEQ ID NO: 4486 - protein, 27 aa, Artificial Sequence
  Synthetic polypeptide
MKKSYSGGTRTSSGRLRRLGDSSGPGE

SEQ ID NO: 4487 - protein, 760 aa, Artificial Sequence
  Synthetic polypeptide
MAQPLAFILDVPETPGDQGQGPSPYDESEVHDSFQQLIQEQSQCTAQEGLELQQREREVTGSSQQTLWRPEGTQSTATLRILASMPSRTIGRSRGAIISQYYNRTVQLRCRSSRPLLGNFVRSAWPSLRLYDLELDPTALEEEEKQSLLVKELQSLAVAQRDHMLRGMPLSLAEKRSLREKSRTPRGKWRGQPGSGGVCSCCGRLRYACVLALHSLGLALLSALQALMPWRYALKRIGGQFGSSVLSYFLFLKTLLAFNALLLLLLVAFIMGPQVAFPPALPGPAPVCTGLELLTGAGCFTHTVMYYGHYSNATLNQPCGSPLDGSQCTPRVGGLPYNMPLAYLSTVGVSFFITCITLVYSMAHSFGESYRVGSTSGIHAITVFCSWDYKVTQKRASRLQQDNIRTRLKELLAEWQLRHSPRSVCGRLRQAAVLGLVWLLCLGTALGCAVAVHVFSEFMIQSPEAAGQEAVLLVLPLVVGLLNLGAPYLCRVLAALEPHDSPVLEVYVAICRNLILKLAILGTLCYHWLGRRVGVLQGQCWEDFVGQELYRFLVMDFVLMLLDTLFGELVWRIISEKKLKRRRKPEFDIARNVLELIYGQTLTWLGVLFSPLLPAVQIIKLLLVFYVKKTSLLANCQAPRRPWLASHMSTVFLTLLCFPAFLGAAVFLCYAVWQVKPSSTCGPFRTLDTMYEAGRVWVRHLEAAGPRVSWLPWVHRYLMENTFFVFLVSALLLAVIYLNIQVVRGQRKVICLLKEQISNN

SEQ ID NO: 4488 - protein, 339 aa, Artificial Sequence
  Synthetic polypeptide
MAHSFGESYRVGSTSGIHAITVFCSWDYKVTQKRASRLQQDNIRTRLKELLAEWQLRHSPRSVCGRLRQAAVLGLVWLLCLGTALGCAVAVHVFSEFMIQSPEAAGQEAVLLVLPLVVGLLNLGAPYLCRVLAALEPHDSPVLEVYVAICRIISEKKLKRRRKPEFDIARNVLELIYGQTLTWLGVLFSPLLPAVQIIKLLLVFYVKKTSLLANCQAPRRPWLASHMSTVFLTLLCFPAFLGAAVFLCYAVWQVKPSSTCGPFRTLDTMYEAGRVWVRHLEAAGPRVSWLPWVHRYLMENTFFVFLVSALLLAVIYLNIQVVRGQRKVICLLKEQISNN

SEQ ID NO: 4489 - protein, 797 aa, Artificial Sequence
  Synthetic polypeptide
MAQPLAFILDVPETPGDQGQGPSPYDESEVHDSFQQLIQEQSQCTAQEGLELQQREREVTGSSQQTLWRPEGTQSTATLRILASMPSRTIGRSRGAIISQYYNRTVQLRCRSSRPLLGNFVRSAWPSLRLYDLELDPTALEEEEKQSLLVKELQSLAVAQRDHMLRGMPLSLAEKRSLREKSRTPRGKWRGQPGSGGVCSCCGRLRYACVLALHSLGLALLSALQALMPWRYALKRIGGQFGSSVLSYFLFLKTLLAFNALLLLLLVAFIMGPQVAFPPALPGPAPVCTGLELLTGAGCFTHTVMYYGHYSNATLNQPCGSPLDGSQCTPRVGGLPYNMPLAYLSTVGVSFFITCITLVYSMAHSFGESYRVGSTSGIHAITVFCSWDYKVTQKRASRLQQDNIRTRLKELLAEWQLRHSPRSVCGRLRQAAVLGLVWLLCLGTALGCAVAVHVFSEFMIQSPEAAGQEAVLLVLPLVVGLLNLGAPYLCRVLAALEPHDSPVLEVYVAICRNLILKLAILGTLCYHWLGRRVGVLQGQCWEDFVGQELYRFLVMDFVLMLLDTLFGELVWRIISEKKLKRRRKPEFDIARNVLELIYGQTLTWLGVLFSPLLPAVQIIKLLLVFYVKKTSLLANCQAPRRPWLASHMSTVFLTLLCFPAFLGAAVFLCYAVWQVKPSSTCGPFRTLDTMYEAGRVWVRHLEAAGPRVSWLPWVHRYLMENTFFVFLVSALLLAVIYLNIQVVRGQRKVICLLKEQISNYKNQLGVVASTCTSYSGGGGRRISPDCATALQPGRQSE

SEQ ID NO: 4490 - protein, 376 aa, Artificial Sequence
  Synthetic polypeptide
MAHSFGESYRVGSTSGIHAITVFCSWDYKVTQKRASRLQQDNIRTRLKELLAEWQLRHSPRSVCGRLRQAAVLGLVWLLCLGTALGCAVAVHVFSEFMIQSPEAAGQEAVLLVLPLVVGLLNLGAPYLCRVLAALEPHDSPVLEVYVAICRIISEKKLKRRRKPEFDIARNVLELIYGQTLTWLGVLFSPLLPAVQIIKLLLVFYVKKTSLLANCQAPRRPWLASHMSTVFLTLLCFPAFLGAAVFLCYAVWQVKPSSTCGPFRTLDTMYEAGRVWVRHLEAAGPRVSWLPWVHRYLMENTFFVFLVSALLLAVIYLNIQVVRGQRKVICLLKEQISNYKNQLGVVASTCTSYSGGGGRRISPDCATALQPGRQSE

SEQ ID NO: 4491 - protein, 40 aa, Artificial Sequence
  Synthetic polypeptide
MESGAYGAAKAGGSFDLRRFLTQPQVVARAVCLGTCNPSY

SEQ ID NO: 4492 - protein, 20 aa, Artificial Sequence
  Synthetic polypeptide
WRAGPTARPRRAAPSTCGAS

SEQ ID NO: 4493 - protein, 337 aa, Artificial Sequence
  Synthetic polypeptide
MQRNKQVAMGRKKFNMDPKKGIQFLIENDLLKNTCEDIAQFLYKGEGLNKTAIGDYLGERDEFNIQVLHAFVELHEFTDLNLVQALRQFLWSFRLPGEAQKIDRMMEAFAQRYCQCNNGVFQSTDTCYVLSFAIIMLNTSLHNPNVKDKPTVERFIAMNRGINDGGDLPEELLRNLYESIKNEPFKIPEDDGNDLTHTFFNPDREGWLLKLGGGRVKTWKRRWFILTDNCLYYFEYTTDKEPRGIIPLENLSIREVEDSKKPNCFELYIPDNKDQVIKACKTEADGRVVEGNHTVYRISAPTPEEKEEWIKCINTSPSCHHVKKDMFASLQPGLQAS

SEQ ID NO: 4494 - protein, 395 aa, Artificial Sequence
  Synthetic polypeptide
MEEDDSYVPSDLTAEERQELENIRRRKQELLADIQRLKDEIAEVANEIENLGSTEERKNMQRNKQVAMGRKKFNMDPKKGIQFLIENDLLKNTCEDIAQFLYKGEGLNKTAIGDYLGERDEFNIQVLHAFVELHEFTDLNLVQALRQFLWSFRLPGEAQKIDRMMEAFAQRYCQCNNGVFQSTDTCYVLSFAIIMLNTSLHNPNVKDKPTVERFIAMNRGINDGGDLPEELLRNLYESIKNEPFKIPEDDGNDLTHTFFNPDREGWLLKLGGRVKTWKRRWFILTDNCLYYFEYTTDKEPRGIIPLENLSIREVEDSKKPNCFELYIPDNKDQVIKACKTEADGRVVEGNHTVYRISAPTPEEKEEWIKCINTSPSCHHVKKDMFASLQPGLQAS

SEQ ID NO: 4495 - protein, 396 aa, Artificial Sequence
  Synthetic polypeptide
MEEDDSYVPSDLTAEERQELENIRRRKQELLADIQRLKDEIAEVANEIENLGSTEERKNMQRNKQVAMGRKKFNMDPKKGIQFLIENDLLKNTCEDIAQFLYKGEGLNKTAIGDYLGERDEFNIQVLHAFVELHEFTDLNLVQALRQFLWSFRLPGEAQKIDRMMEAFAQRYCQCNNGVFQSTDTCYVLSFAIIMLNTSLHNPNVKDKPTVERFIAMNRGINDGGDLPEELLRNLYESIKNEPFKIPEDDGNDLTHTFFNPDREGWLLKLGGGRVKTWKRRWFILTDNCLYYFEYTTDKEPRGIIPLENLSIREVEDSKKPNCFELYIPDNKDQVIKACKTEADGRVVEGNHTVYRISAPTPEEKEEWIKCINTSPSCHHVKKDMFASLQPGLQAS

SEQ ID NO: 4496 - protein, 23 aa, Artificial Sequence
  Synthetic polypeptide
MHSGRPRRADHEVRRSRPSWLTR

SEQ ID NO: 4497 - protein, 948 aa, Artificial Sequence
  Synthetic polypeptide
MGELCRRDSALTALDEETLWEMMESHRHRIVRCICPSRLTPYLRQAKVLCQLDEEEVLHSPRLTNSAMRAGHLLDLLKTRGKNGAIAFLESLKFHNPDVYTLVTGLQPDVDFSNFSGLMETSKLTECLAGAIGSLQEELNQEKGQKEVLLRRCQQLQEHLGLAETRAEGLHQLEADHSRMKREVSAHFHEVLRLKDEMLSLSLHYSNALQEKELAASRCRSLQEELYLLKQELQRANMVSSCELELQEQSLRTASDQESGDEELNRLKEENEKLRSLTFSLAEKDILEQSLDEARGSRQELVERIHSLRERAVAAERQREQYWEEKEQTLLQFQKSKMACQLYREKVNALQAQVCELQKERDQAYSARDSAQREISQSLVEKDSLRRQVFELTDQVCELRTQLRQLQAEPPGVLKQEARTREPCPREKQRLVRMHAICPRDDSDCSLVSSTESQLLSDLSATSSRELVDSFRSSSPAPPSQQSLYKRVAEDFGEEPWSFSSCLEIPEGDPGALPGAKAGDPHLDYELLDTADLPQLESSLQPVSPGRLDVSESGVLMRRRPARRILSQVTMLAFQGDALLEQISVIGGNLTGIFIHRVTPGSAADQMALRPGTQIVMVDYEASEPLFKAVLEDTTLEEAVGLLRRVDGFCCLSVKVNTDGYKRLLQDLEAKVATSGDSFYIRVNLAMEGRAKGELQVHCNEVLHVTDTMFQGCGCWHAHRVNSYTMKDTAAHGTIPNYSRAQQQLIALIQDMTQQCTVTRKPSSGGPQKLVRIVSMDKAKASPLRLSFDRGQLDPSRMEGSSTCFWAESCLTLVPYTLVRPHRPARPRPVLLVPRAVGKILSEKLCLLQGFKKCLAEYLSQEEYEAWSQRGDIIQEGEVSGGRCWVTRHAVESLMEKNTHALLDVQLDSVCTLHRMDIFPIVIHVSVNEKMAKKLNQRVAATQVPTDG

SEQ ID NO: 4498 - protein, 2056 aa, Artificial Sequence
  Synthetic polypeptide
MECPSCQHVSKEETPKFCSQCGERLPPAAPIADSENNNSTMASASEGEMECGQELKEEGGPCLFPGSDSWQENPEEPCSKASWTVQEGATSEVLVDAAVDLISDEWEAANAIPSKRRKQDAAPLEAASVPSADCEQSKKKKRKKKKKGNKSASSELASLPLSPASPCHLTLLSNPWPQDTALPHSQAQQSGPTGQPSQPPGTATTPLEGDGLSAPTEVGDSPLQAQALGEAGVATGSEAQSSPQFQDHTEGEDQDASIPSGGRGLSQEGTGPPTSAGEGHSRTEDAAQELLLPESKGGSSEPGTELQTTEQQAGASASMAVDAVAEPANAVKGAGKEMKEKTQRMKQPPATTPPFKTHCQEAETKTKDEMAAAEEKVGKNEQGEPEDLKKPEGKNRSAAAVKNEKEQKNQEADVQEVKASTLSPGGGVTVFFHAIISLHFPFNPDLHKVFIRGGEEFGESKWDSNICELHYTRDLGHDRVLVEGIVCISKKHLDKYIPYKYVIYNGESFEYEFIYKHQQKKGEYVNRCLFIKSSLLGSGDWHQYYDIVYMKPHGRLQKVMNHITDGPRKDLVKGKQIAAALMLDSTFSILQTWDTINLNSFFTQFEQFCFVLQQPMIYEGQAQLWTDLQYREKEVKRYLWQHLKKHVVPLPDGKSTDFLPVDCPVRSKLKTGLIVLFVVEKIELLLEGSLDWLCHLLTSDASSPDEFHRDLSHILGIPQSWRLYLVNLCQRCMDTRTYTWLGALPVLHCCMELAPRHKDAWRQPEDTWAALEGLSFSPFREQMLDTSSLLQFMREKQHLLSIDEPLFRSWFSLLPLSHLVMYMENFIEHLGRFPAHILDCLSGIYYRLPGLEQVLNTQDVQDVQNVQNILEMLLRLLDTYRDKIPEEALSPSYLTVCLKLHEAICSSTKLLKFYELPALSAEIVCRMIRLLSLVDSAGQRDETGNNSVQTVFQGTLAATKRWLREVFTKNMLTSSGASFTYVKEIEVWRRLVEIQFPAEHGWKESLLGDMEWRLTKEEPLSQITAYCNSCWDTKGLEDSVAKTFEKCIIEAVSSACQSQTSILQGFSYSDLRKFGIVLSAVITKSWPRTADNFNDILKHLLTLADVKHVFRLCGTDEKILANVTEDAKRLIAVADSVLTKVVGDLLSGTILVGQLELIIKHKNQFLDIWQLREKSLSPQDEQCAVEEALDWRREELLLLKKEKRCVDSLLKMCGNVKHLIQVDFGVLAVRHSQDLSSKRLNDTVTVRLSTSSNSQRATHYHLSSQVQEMAGKIDLLRDSHIFQLFWREAAEPLSEPKEDQEAAELLSEPEEESERHILELEEVYDYLYQPSYRKFIKLHQDLKSGEVTLAEIDVIFKDFVNKYTDLDSELKIMCTVDHQDQRDWIKDRVEQIKEYHHLHQAVHAAKVILQVKESLGLNGDFSVLNTLLNFTDNFDDFRRETLDQINQELIQAKKLLQDISEARCKGLQALSLRKEFICWVREALGGINELKVFVDLASISAGENDIDVDRVACFHDAVQGYASLLFKLDPSVDFSAFMKHLKKLWKALDKDQYLPRKLCDSARNLEWLKTVNESHGSVERSSLTLATAINQRGIYVIQAPKGGQKISPDTVLHLILPESPGSHEESREYSLEEVKELLNKLMLMSGKKDRNNTEVERFSEVFCSVQRLSQAFIDLHSAGNMLFRTWIAMAYCSPKQGVSLQMDFGLDLVTELKEGGDVTELLAALCRQMEHFLDSWKRFVTQKRMEHFYLNFYTAEQLVYLSTELRKQPPSDAALTMLSFIKSNCTLRDVLRASVGCGSEAARYRMRRVMEELPLMLLSEFSLVDKLRIIMEQSMRCLPAFLPDCLDLETLGHCLAHLAGMGGSPVERCLPRGLQVGQPNLVVCGHSEVLPAALAVYMQTPSQPLPTYDEVLLCTPATTFEEVALLLRRCLTLGSLGHKVYSLLFADQLSYEVARQAEELFHNLCTQQHREDYQLVMVCDGDWEHCYLPSAFSQHKVFVTPQAPLEAIQAYLAGHYRVPKQTLSAAAVFNDRLCVGIVASERAGVERVPSAKWRGT

SEQ ID NO: 4499 - protein, 2007 aa, Artificial Sequence
  Synthetic polypeptide
MECPSCQHVSKEETPKFCSQCGERLPPAAPIADSENNNSTMASASEGEMECGQELKEEGGPCLFPGSDSWQENPEEPCSKASWTVQESKKKKRKKKKKGNKSASSELASLPLSPASPCHLTLLSNPWPQDTALPHSQAQQSGPTGQPSQPPGTATTPLEGDGLSAPTEVGDSPLQAQALGEAGVATGSEAQSSPQFQDHTEGEDQDASIPSGGRGLSQEGTGPPTSAGEGHSRTEDAAQELLLPESKGGSSEPGTELQTTEQQAGASASMAVDAVAEPANAVKGAGKEMKEKTQRMKQPPATTPPFKTHCQEAETKTKDEMAAAEEKVGKNEQGEPEDLKKPEGKNRSAAAVKNEKEQKNQEADVQEVKASTLSPGGGVTVFFHAIISLHFPFNPDLHKVFIRGGEEFGESKWDSNICELHYTRDLGHDRVLVEGIVCISKKHLDKYIPYKYVIYNGESFEYEFIYKHQQKKGEYVNRCLFIKSSLLGSGDWHQYYDIVYMKPHGRLQKVMNHITDGPRKDLVKGKQIAAALMLDSTFSILQTWDTINLNSFFTQFEQFCFVLQQPMIYEGQAQLWTDLQYREKEVKRYLWQHLKKHVVPLPDGKSTDFLPVDCPVRSKLKTGLIVLFVVEKIELLLEGSLDWLCHLLTSDASSPDEFHRDLSHILGIPQSWRLYLVNLCQRCMDTRTYTWLGALPVLHCCMELAPRHKDAWRQPEDTWAALEGLSFSPFREQMLDTSSLLQFMREKQHLLSIDEPLFRSWFSLLPLSHLVMYMENFIEHLGRFPAHILDCLSGIYYRLPGLEQVLNTQDVQDVQNVQNILEMLLRLLDTYRDKIPEEALSPSYLTVCLKLHEAICSSTKLLKFYELPALSAEIVCRMIRLLSLVDSAGQRDETGNNSVQTVFQGTLAATKRWLREVFTKNMLTSSGASFTYVKEIEVWRRLVEIQFPAEHGWKESLLGDMEWRLTKEEPLSQITAYCNSCWDTKGLEDSVAKTFEKCIIEAVSSACQSQTSILQGFSYSDLRKFGIVLSAVITKSWPRTADNFNDILKHLLTLADVKHVFRLCGTDEKILANVTEDAKRLIAVADSVLTKVVGDLLSGTILVGQLELIIKHKNQFLDIWQLREKSLSPQDEQCAVEEALDWRREELLLLKKEKRCVDSLLKMCGNVKHLIQVDFGVLAVRHSQDLSSKRLNDTVTVRLSTSSNSQRATHYHLSSQVQEMAGKIDLLRDSHIFQLFWREAAEPLSEPKEDQEAAELLSEPEEESERHILELEEVYDYLYQPSYRKFIKLHQDLKSGEVTLAEIDVIFKDFVNKYTDLDSELKIMCTVDHQDQRDWIKDRVEQIKEYHHLHQAVHAAKVILQVKESLGLNGDFSVLNTLLNFTDNFDDFRRETLDQINQELIQAKKLLQDISEARCKGLQALSLRKEFICWVREALGGINELKVFVDLASISAGENDIDVDRVACFHDAVQGYASLLFKLDPSVDFSAFMKHLKKLWKALDKDQYLPRKLCDSARNLEWLKTVNESHGSVERSSLTLATAINQRGIYVIQAPKGGQKISPDTVLHLILPESPGSHEESREYSLEEVKELLNKLMLMSGKKDRNNTEVERFSEVFCSVQRLSQAFIDLHSAGNMLFRTWIAMAYCSPKQGVSLQMDFGLDLVTELKEGGDVTELLAALCRQMEHFLDSWKRFVTQKRMEHFYLNFYTAEQLVYLSTELRKQPPSDAALTMLSFIKSNCTLRDVLRASVGCGSEAARYRMRRVMEELPLMLLSEFSLVDKLRIIMEQSMRCLPAFLPDCLDLETLGHCLAHLAGMGGSPVERCLPRGLQVGQPNLVVCGHSEVLPAALAVYMQTPSQPLPTYDEVLLCTPATTFEEVALLLRRCLTLGSLGHKVYSLLFADQLSYEVARQAEELFHNLCTQQHREDYQLVMVCDGDWEHCYLPSAFSQHKVFVTPQAPLEAIQAYLAGHYRVPKQTLSAAAVFNDRLCVGIVASERAGVERVPSAKWRGT

SEQ ID NO: 4500 - protein, 80 aa, Artificial Sequence
  Synthetic polypeptide
MVCDGDWEHCYLPSAFSQHKVFVTPQAPLEAIQAYLAGHYRVPKQTLSAAAVFNDRLCVGIVASERAGVERVPSAKWRGT

SEQ ID NO: 4501 - protein, 3454 aa, Artificial Sequence
  Synthetic polypeptide
MECPSCQHVSKEETPKFCSQCGERLPPAAPIADSENNNSTMASASEGEMECGQELKEEGGPCLFPGSDSWQENPEEPCSKASWTVQEGATSEVLVDAAVDLISDEWEAANAIPSKRRKQDAAPLEAASVPSADCEQSKKKKRKKKKKGNKSASSELASLPLSPASPCHLTLLSNPWPQDTALPHSQAQQSGPTGQPSQPPGTATTPLEGDGLSAPTEVGDSPLQAQALGEAGVATGSEAQSSPQFQDHTEGEDQDASIPSGGRGLSQEGTGPPTSAGEGHSRTEDAAQELLLPESKGGSSEPGTELQTTEQQAGASASMAVDAVAEPANAVKGAGKEMKEKTQRMKQPPATTPPFKTHCQEAETKTKDEMAAAEEKVGKNEQGEPEDLKKPEGKNRSAAAVKNEKEQKNQEADVQEVKASTLSPGGGVTVFFHAIISLHFPFNPDLHKVFIRGGEEFGESKWDSNICELHYTRDLGHDRVLVEGIVCISKKHLDKYIPYKYVIYNGESFEYEFIYKHQQKKGEYVNRCLFIKSSLLGSGDWHQYYDIVYMKPHGRLQKVMNHITDGPRKDLVKGKQIAAALMLDSTFSILQTWDTINLNSFFTQFEQFCFVLQQPMIYEGQAQLWTDLQYREKEVKRYLWQHLKKHVVPLPDGKSTDFLPVDCPVRSKLKTGLIVLFVVEKIELLLEGSLDWLCHLLTSDASSPDEFHRDLSHILGIPQSWRLYLVNLCQRCMDTRTYTWLGALPVLHCCMELAPRHKDAWRQPEDTWAALEGLSFSPFREQMLDTSSLLQFMREKQHLLSIDEPLFRSWFSLLPLSHLVMYMENFIEHLGRFPAHILDCLSGIYYRLPGLEQVLNTQDVQDVQNVQNILEMLLRLLDTYRDKIPEEALSPSYLTVCLKLHEAICSSTKLLKFYELPALSAEIVCRMIRLLSLVDSAGQRDETGNNSVQTVFQGTLAATKRWLREVFTKNMLTSSGASFTYVKEIEVWRRLVEIQFPAEHGWKESLLGDMEWRLTKEEPLSQITAYCNSCWDTKGLEDSVAKTFEKCIIEAVSSACQSQTSILQGFSYSDLRKFGIVLSAVITKSWPRTADNFNDILKHLLTLADVKHVFRLCGTDEKILANVTEDAKRLIAVADSVLTKVVGDLLSGTILVGQLELIIKHKNQFLDIWQLREKSLSPQDEQCAVEEALDWRREELLLLKKEKRCVDSLLKMCGNVKHLIQVDFGVLAVRHSQDLSSKRLNDTVTVRLSTSSNSQRATHYHLSSQVQEMAGKIDLLRDSHIFQLFWREAAEPLSEPKEDQEAAELLSEPEEESERHILELEEVYDYLYQPSYRKFIKLHQDLKSGEVTLAEIDVIFKDFVNKYTDLDSELKIMCTVDHQDQRDWIKDRVEQIKEYHHLHQAVHAAKVILQVKESLGLNGDFSVLNTLLNFTDNFDDFRRETLDQINQELIQAKKLLQDISEARCKGLQALSLRKEFICWVREALGGINELKVFVDLASISAGENDIDVDRVACFHDAVQGYASLLFKLDPSVDFSAFMKHLKKLWKALDKDQYLPRKLCDSARNLEWLKTVNESHGSVERSSLTLATAINQRGIYVIQAPKGGQKISPDTVLHLILPESPGSHEESREYSLEEVKELLNKLMLMSGKKDRNNTEVERFSEVFCSVQRLSQAFIDLHSAGNMLFRTWIAMAYCSPKQGVSLQMDFGLDLVTELKEGGDVTELLAALCRQMEHFLDSWKRFVTQKRMEHFYLNFYTAEQLVYLSTELRKQPPSDAALTMLSFIKSNCTLRDVLRASVGCGSEAARYRMRRVMEELPLMLLSEFSLVDKLRIIMEQSMRCLPAFLPDCLDLETLGHCLAHLAGMGGSPVERCLPRGLQVGQPNLVVCGHSEVLPAALAVYMQTPSQPLPTYDEVLLCTPATTFEEVALLLRRCLTLGSLGHKVYSLLFADQLSYEVARQAEELFHNLCTQQHREDYQLVMVCDGDWEHCYLPSAFSQHKVFVTPQAPLEAIQAYLAGHYRVPKQTLSAAAVFNDRLCVGIVASERAGVGKSLYVKRLHDKMKMQLNVKNVPLKTIRLIDPQVDESRVLGALLPFLDAQYQKVPVLFHLDVTSSVQTGIWVFLFKLLILQYLMDINGKMWLRNPCHLYIVEILERRTSVPSRSSSALRTRVPQFSFLDIFPKVTCRPPKEVIDMELSALRSDTEPGMDLWEFCSETFQRPYQYLRRFNQNQDLDTFQYQEGSVEGTPEECLQHFLFHCGVINPSWSELRNFARFLNYQLRDCEASLFCNPSFIGDTLRGFKKFVVTFMIFMARDFATPSLHTSDQSPGKHMVTMDGVREEDLAPFSLRKRWESEPHPYVFFNDDHTTMTFIGFHLQPNINGSVDAISHLTGKVIKRDVMTRDLYQGLLLQRVPFNVDFDKLPRHKKLERLCLTLGIPQATDPDKTYELTTDNMLKILAIEMRFRCGIPVIIMGETGCGKTRLIKFLSDLRRGGTNADTIKLVKVHGGTTADMIYSRVREAENVAFANKDQHQLDTILFFDEANTTEAISCIKEVLCDHMVDGQPLAEDSGLHIIAACNPYRKHSEEMICRLESAGLGYRVSMEETADRLGSIPLRQLVYRVHALPPSLIPLVWDFGQLSDVAEKLYIQQIVQRLVESISLDENGTRVITEVLCASQGFMRKTEDECSFVSLRDVERCVKVFRWFHEHSAMLLAQLNAFLSKSSVSKNHTERDPVLWSLMLAIGVCYHASLEKKDSYRKAIARFFPKPYDDSRLLLDEITRAQDLFLDGVPLRKTIAKNLALKENVFMMVVCIELKIPLFLVGKPGSSKSLAKTIVADAMQGPAAYSDLFRSLKQVHLVSFQCSPHSTPQGIISTFRQCARFQQGKDLQQYVSVVVLDEVGLAEDSPKMPLKTLHPLLEDGCIEDDPAPHKKVGFVGISNWALDPAKMNRGIFVSRGSPNETELIESAKGICSSDILVQDRVQGYFASFAKAYETVCKRQDKEFFGLRDYYSLIKMVFAAAKASNRKPSPQDIAQAVLRNFSGKDDIQALDIFLANLPEAKCSEEVSPMQLIKQNIFGPSQKVPGGEQEDAESRYLLVLTKNYVALQILQQTFFEGDQQPEIIFGSGFPKDQEYTQLCRNINRVKICMETGKMVLLLNLQNLYESLYDALNQYYVHLGGQKYVDLGLGTHRVKCRVHPNFRLIVIEEKDVVYKHFPIPLINRLEKHYLDINTVLEKWQKSIVEELCAWVEKFINVKAHHFQKRHKYSPSDVFIGYHSDACASVVLQVIERQGPRALTEELHQKVSEEAKSILLNCATPDAVVRLSAYSLGGFAAEWLSQEYFHRQRHNSFADFLQAHLHTADLERHAIFTEITTFSRLLTSHDCEILESEVTGRAPKPTLLWLQQFDTEYSFLKEVRNCLTNTAKCKILIFQTDFEDGIRSAQLIASANYLGSRGRRIV

SEQ ID NO: 4502 - protein, 3405 aa, Artificial Sequence
  Synthetic polypeptide
MECPSCQHVSKEETPKFCSQCGERLPPAAPIADSENNNSTMASASEGEMECGQELKEEGGPCLFPGSDSWQENPEEPCSKASWTVQESKKKKRKKKKKGNKSASSELASLPLSPASPCHLTLLSNPWPQDTALPHSQAQQSGPTGQPSQPPGTATTPLEGDGLSAPTEVGDSPLQAQALGEAGVATGSEAQSSPQFQDHTEGEDQDASIPSGGRGLSQEGTGPPTSAGEGHSRTEDAAQELLLPESKGGSSEPGTELQTTEQQAGASASMAVDAVAEPANAVKGAGKEMKEKTQRMKQPPATTPPFKTHCQEAETKTKDEMAAAEEKVGKNEQGEPEDLKKPEGKNRSAAAVKNEKEQKNQEADVQEVKASTLSPGGGVTVFFHAIISLHFPFNPDLHKVFIRGGEEFGESKWDSNICELHYTRDLGHDRVLVEGIVCISKKHLDKYIPYKYVIYNGESFEYEFIYKHQQKKGEYVNRCLFIKSSLLGSGDWHQYYDIVYMKPHGRLQKVMNHITDGPRKDLVKGKQIAAALMLDSTFSILQTWDTINLNSFFTQFEQFCFVLQQPMIYEGQAQLWTDLQYREKEVKRYLWQHLKKHVVPLPDGKSTDFLPVDCPVRSKLKTGLIVLFVVEKIELLLEGSLDWLCHLLTSDASSPDEFHRDLSHILGIPQSWRLYLVNLCQRCMDTRTYTWLGALPVLHCCMELAPRHKDAWRQPEDTWAALEGLSFSPFREQMLDTSSLLQFMREKQHLLSIDEPLFRSWFSLLPLSHLVMYMENFIEHLGRFPAHILDCLSGIYYRLPGLEQVLNTQDVQDVQNVQNILEMLLRLLDTYRDKIPEEALSPSYLTVCLKLHEAICSSTKLLKFYELPALSAEIVCRMIRLLSLVDSAGQRDETGNNSVQTVFQGTLAATKRWLREVFTKNMLTSSGASFTYVKEIEVWRRLVEIQFPAEHGWKESLLGDMEWRLTKEEPLSQITAYCNSCWDTKGLEDSVAKTFEKCIIEAVSSACQSQTSILQGFSYSDLRKFGIVLSAVITKSWPRTADNFNDILKHLLTLADVKHVFRLCGTDEKILANVTEDAKRLIAVADSVLTKVVGDLLSGTILVGQLELIIKHKNQFLDIWQLREKSLSPQDEQCAVEEALDWRREELLLLKKEKRCVDSLLKMCGNVKHLIQVDFGVLAVRHSQDLSSKRLNDTVTVRLSTSSNSQRATHYHLSSQVQEMAGKIDLLRDSHIFQLFWREAAEPLSEPKEDQEAAELLSEPEEESERHILELEEVYDYLYQPSYRKFIKLHQDLKSGEVTLAEIDVIFKDFVNKYTDLDSELKIMCTVDHQDQRDWIKDRVEQIKEYHHLHQAVHAAKVILQVKESLGLNGDFSVLNTLLNFTDNFDDFRRETLDQINQELIQAKKLLQDISEARCKGLQALSLRKEFICWVREALGGINELKVFVDLASISAGENDIDVDRVACFHDAVQGYASLLFKLDPSVDFSAFMKHLKKLWKALDKDQYLPRKLCDSARNLEWLKTVNESHGSVERSSLTLATAINQRGIYVIQAPKGGQKISPDTVLHLILPESPGSHEESREYSLEEVKELLNKLMLMSGKKDRNNTEVERFSEVFCSVQRLSQAFIDLHSAGNMLFRTWIAMAYCSPKQGVSLQMDFGLDLVTELKEGGDVTELLAALCRQMEHFLDSWKRFVTQKRMEHFYLNFYTAEQLVYLSTELRKQPPSDAALTMLSFIKSNCTLRDVLRASVGCGSEAARYRMRRVMEELPLMLLSEFSLVDKLRIIMEQSMRCLPAFLPDCLDLETLGHCLAHLAGMGGSPVERCLPRGLQVGQPNLVVCGHSEVLPAALAVYMQTPSQPLPTYDEVLLCTPATTFEEVALLLRRCLTLGSLGHKVYSLLFADQLSYEVARQAEELFHNLCTQQHREDYQLVMVCDGDWEHCYLPSAFSQHKVFVTPQAPLEAIQAYLAGHYRVPKQTLSAAAVFNDRLCVGIVASERAGVGKSLYVKRLHDKMKMQLNVKNVPLKTIRLIDPQVDESRVLGALLPFLDAQYQKVPVLFHLDVTSSVQTGIWVFLFKLLILQYLMDINGKMWLRNPCHLYIVEILERRTSVPSRSSSALRTRVPQFSFLDIFPKVTCRPPKEVIDMELSALRSDTEPGMDLWEFCSETFQRPYQYLRRFNQNQDLDTFQYQEGSVEGTPEECLQHFLFHCGVINPSWSELRNFARFLNYQLRDCEASLFCNPSFIGDTLRGFKKFVVTFMIFMARDFATPSLHTSDQSPGKHMVTMDGVREEDLAPFSLRKRWESEPHPYVFFNDDHTTMTFIGFHLQPNINGSVDAISHLTGKVIKRDVMTRDLYQGLLLQRVPFNVDFDKLPRHKKLERLCLTLGIPQATDPDKTYELTTDNMLKILAIEMRFRCGIPVIIMGETGCGKTRLIKFLSDLRRGGTNADTIKLVKVHGGTTADMIYSRVREAENVAFANKDQHQLDTILFFDEANTTEAISCIKEVLCDHMVDGQPLAEDSGLHIIAACNPYRKHSEEMICRLESAGLGYRVSMEETADRLGSIPLRQLVYRVHALPPSLIPLVWDFGQLSDVAEKLYIQQIVQRLVESISLDENGTRVITEVLCASQGFMRKTEDECSFVSLRDVERCVKVFRWFHEHSAMLLAQLNAFLSKSSVSKNHTERDPVLWSLMLAIGVCYHASLEKKDSYRKAIARFFPKPYDDSRLLLDEITRAQDLFLDGVPLRKTIAKNLALKENVFMMVVCIELKIPLFLVGKPGSSKSLAKTIVADAMQGPAAYSDLFRSLKQVHLVSFQCSPHSTPQGIISTFRQCARFQQGKDLQQYVSVVVLDEVGLAEDSPKMPLKTLHPLLEDGCIEDDPAPHKKVGFVGISNWALDPAKMNRGIFVSRGSPNETELIESAKGICSSDILVQDRVQGYFASFAKAYETVCKRQDKEFFGLRDYYSLIKMVFAAAKASNRKPSPQDIAQAVLRNFSGKDDIQALDIFLANLPEAKCSEEVSPMQLIKQNIFGPSQKVPGGEQEDAESRYLLVLTKNYVALQILQQTFFEGDQQPEIIFGSGFPKDQEYTQLCRNINRVKICMETGKMVLLLNLQNLYESLYDALNQYYVHLGGQKYVDLGLGTHRVKCRVHPNFRLIVIEEKDVVYKHFPIPLINRLEKHYLDINTVLEKWQKSIVEELCAWVEKFINVKAHHFQKRHKYSPSDVFIGYHSDACASVVLQVIERQGPRALTEELHQKVSEEAKSILLNCATPDAVVRLSAYSLGGFAAEWLSQEYFHRQRHNSFADFLQAHLHTADLERHAIFTEITTFSRLLTSHDCEILESEVTGRAPKPTLLWLQQFDTEYSFLKEVRNCLTNTAKCKILIFQTDFEDGIRSAQLIASANYLGSRGRRIV

SEQ ID NO: 4503 - protein, 1478 aa, Artificial Sequence
  Synthetic polypeptide
MVCDGDWEHCYLPSAFSQHKVFVTPQAPLEAIQAYLAGHYRVPKQTLSAAAVFNDRLCVGIVASERAGVGKSLYVKRLHDKMKMQLNVKNVPLKTIRLIDPQVDESRVLGALLPFLDAQYQKVPVLFHLDVTSSVQTGIWVFLFKLLILQYLMDINGKMWLRNPCHLYIVEILERRTSVPSRSSSALRTRVPQFSFLDIFPKVTCRPPKEVIDMELSALRSDTEPGMDLWEFCSETFQRPYQYLRRFNQNQDLDTFQYQEGSVEGTPEECLQHFLFHCGVINPSWSELRNFARFLNYQLRDCEASLFCNPSFIGDTLRGFKKFVVTFMIFMARDFATPSLHTSDQSPGKHMVTMDGVREEDLAPFSLRKRWESEPHPYVFFNDDHTTMTFIGFHLQPNINGSVDAISHLTGKVIKRDVMTRDLYQGLLLQRVPFNVDFDKLPRHKKLERLCLTLGIPQATDPDKTYELTTDNMLKILAIEMRFRCGIPVIIMGETGCGKTRLIKFLSDLRRGGTNADTIKLVKVHGGTTADMIYSRVREAENVAFANKDQHQLDTILFFDEANTTEAISCIKEVLCDHMVDGQPLAEDSGLHIIAACNPYRKHSEEMICRLESAGLGYRVSMEETADRLGSIPLRQLVYRVHALPPSLIPLVWDFGQLSDVAEKLYIQQIVQRLVESISLDENGTRVITEVLCASQGFMRKTEDECSFVSLRDVERCVKVFRWFHEHSAMLLAQLNAFLSKSSVSKNHTERDPVLWSLMLAIGVCYHASLEKKDSYRKAIARFFPKPYDDSRLLLDEITRAQDLFLDGVPLRKTIAKNLALKENVFMMVVCIELKIPLFLVGKPGSSKSLAKTIVADAMQGPAAYSDLFRSLKQVHLVSFQCSPHSTPQGIISTFRQCARFQQGKDLQQYVSVVVLDEVGLAEDSPKMPLKTLHPLLEDGCIEDDPAPHKKVGFVGISNWALDPAKMNRGIFVSRGSPNETELIESAKGICSSDILVQDRVQGYFASFAKAYETVCKRQDKEFFGLRDYYSLIKMVFAAAKASNRKPSPQDIAQAVLRNFSGKDDIQALDIFLANLPEAKCSEEVSPMQLIKQNIFGPSQKVPGGEQEDAESRYLLVLTKNYVALQILQQTFFEGDQQPEIIFGSGFPKDQEYTQLCRNINRVKICMETGKMVLLLNLQNLYESLYDALNQYYVHLGGQKYVDLGLGTHRVKCRVHPNFRLIVIEEKDVVYKHFPIPLINRLEKHYLDINTVLEKWQKSIVEELCAWVEKFINVKAHHFQKRHKYSPSDVFIGYHSDACASVVLQVIERQGPRALTEELHQKVSEEAKSILLNCATPDAVVRLSAYSLGGFAAEWLSQEYFHRQRHNSFADFLQAHLHTADLERHAIFTEITTFSRLLTSHDCEILESEVTGRAPKPTLLWLQQFDTEYSFLKEVRNCLTNTAKCKILIFQTDFEDGIRSAQLIASANYLGSRGRRIV

SEQ ID NO: 4504 - protein, 4713 aa, Artificial Sequence
  Synthetic polypeptide
MECPSCQHVSKEETPKFCSQCGERLPPAAPIADSENNNSTMASASEGEMECGQELKEEGGPCLFPGSDSWQENPEEPCSKASWTVQEGATSEVLVDAAVDLISDEWEAANAIPSKRRKQDAAPLEAASVPSADCEQSKKKKRKKKKKGNKSASSELASLPLSPASPCHLTLLSNPWPQDTALPHSQAQQSGPTGQPSQPPGTATTPLEGDGLSAPTEVGDSPLQAQALGEAGVATGSEAQSSPQFQDHTEGEDQDASIPSGGRGLSQEGTGPPTSAGEGHSRTEDAAQELLLPESKGGSSEPGTELQTTEQQAGASASMAVDAVAEPANAVKGAGKEMKEKTQRMKQPPATTPPFKTHCQEAETKTKDEMAAAEEKVGKNEQGEPEDLKKPEGKNRSAAAVKNEKEQKNQEADVQEVKASTLSPGGGVTVFFHAIISLHFPFNPDLHKVFIRGGEEFGESKWDSNICELHYTRDLGHDRVLVEGIVCISKKHLDKYIPYKYVIYNGESFEYEFIYKHQQKKGEYVNRCLFIKSSLLGSGDWHQYYDIVYMKPHGRLQKVMNHITDGPRKDLVKGKQIAAALMLDSTFSILQTWDTINLNSFFTQFEQFCFVLQQPMIYEGQAQLWTDLQYREKEVKRYLWQHLKKHVVPLPDGKSTDFLPVDCPVRSKLKTGLIVLFVVEKIELLLEGSLDWLCHLLTSDASSPDEFHRDLSHILGIPQSWRLYLVNLCQRCMDTRTYTWLGALPVLHCCMELAPRHKDAWRQPEDTWAALEGLSFSPFREQMLDTSSLLQFMREKQHLLSIDEPLFRSWFSLLPLSHLVMYMENFIEHLGRFPAHILDCLSGIYYRLPGLEQVLNTQDVQDVQNVQNILEMLLRLLDTYRDKIPEEALSPSYLTVCLKLHEAICSSTKLLKFYELPALSAEIVCRMIRLLSLVDSAGQRDETGNNSVQTVFQGTLAATKRWLREVFTKNMLTSSGASFTYVKEIEVWRRLVEIQFPAEHGWKESLLGDMEWRLTKEEPLSQITAYCNSCWDTKGLEDSVAKTFEKCIIEAVSSACQSQTSILQGFSYSDLRKFGIVLSAVITKSWPRTADNFNDILKHLLTLADVKHVFRLCGTDEKILANVTEDAKRLIAVADSVLTKVVGDLLSGTILVGQLELIIKHKNQFLDIWQLREKSLSPQDEQCAVEEALDWRREELLLLKKEKRCVDSLLKMCGNVKHLIQVDFGVLAVRHSQDLSSKRLNDTVTVRLSTSSNSQRATHYHLSSQVQEMAGKIDLLRDSHIFQLFWREAAEPLSEPKEDQEAAELLSEPEEESERHILELEEVYDYLYQPSYRKFIKLHQDLKSGEVTLAEIDVIFKDFVNKYTDLDSELKIMCTVDHQDQRDWIKDRVEQIKEYHHLHQAVHAAKVILQVKESLGLNGDFSVLNTLLNFTDNFDDFRRETLDQINQELIQAKKLLQDISEARCKGLQALSLRKEFICWVREALGGINELKVFVDLASISAGENDIDVDRVACFHDAVQGYASLLFKLDPSVDFSAFMKHLKKLWKALDKDQYLPRKLCDSARNLEWLKTVNESHGSVERSSLTLATAINQRGIYVIQAPKGGQKISPDTVLHLILPESPGSHEESREYSLEEVKELLNKLMLMSGKKDRNNTEVERFSEVFCSVQRLSQAFIDLHSAGNMLFRTWIAMAYCSPKQGVSLQMDFGLDLVTELKEGGDVTELLAALCRQMEHFLDSWKRFVTQKRMEHFYLNFYTAEQLVYLSTELRKQPPSDAALTMLSFIKSNCTLRDVLRASVGCGSEAARYRMRRVMEELPLMLLSEFSLVDKLRIIMEQSMRCLPAFLPDCLDLETLGHCLAHLAGMGGSPVERCLPRGLQVGQPNLVVCGHSEVLPAALAVYMQTPSQPLPTYDEVLLCTPATTFEEVALLLRRCLTLGSLGHKVYSLLFADQLSYEVARQAEELFHNLCTQQHREDYQLVMVCDGDWEHCYLPSAFSQHKVFVTPQAPLEAIQAYLAGHYRVPKQTLSAAAVFNDRLCVGIVASERAGVGKSLYVKRLHDKMKMQLNVKNVPLKTIRLIDPQVDESRVLGALLPFLDAQYQKVPVLFHLDVTSSVQTGIWVFLFKLLILQYLMDINGKMWLRNPCHLYIVEILERRTSVPSRSSSALRTRVPQFSFLDIFPKVTCRPPKEVIDMELSALRSDTEPGMDLWEFCSETFQRPYQYLRRFNQNQDLDTFQYQEGSVEGTPEECLQHFLFHCGVINPSWSELRNFARFLNYQLRDCEASLFCNPSFIGDTLRGFKKFVVTFMIFMARDFATPSLHTSDQSPGKHMVTMDGVREEDLAPFSLRKRWESEPHPYVFFNDDHTTMTFIGFHLQPNINGSVDAISHLTGKVIKRDVMTRDLYQGLLLQRVPFNVDFDKLPRHKKLERLCLTLGIPQATDPDKTYELTTDNMLKILAIEMRFRCGIPVIIMGETGCGKTRLIKFLSDLRRGGTNADTIKLVKVHGGTTADMIYSRVREAENVAFANKDQHQLDTILFFDEANTTEAISCIKEVLCDHMVDGQPLAEDSGLHIIAACNPYRKHSEEMICRLESAGLGYRVSMEETADRLGSIPLRQLVYRVHALPPSLIPLVWDFGQLSDVAEKLYIQQIVQRLVESISLDENGTRVITEVLCASQGFMRKTEDECSFVSLRDVERCVKVFRWFHEHSAMLLAQLNAFLSKSSVSKNHTERDPVLWSLMLAIGVCYHASLEKKDSYRKAIARFFPKPYDDSRLLLDEITRAQDLFLDGVPLRKTIAKNLALKENVFMMVVCIELKIPLFLVGKPGSSKSLAKTIVADAMQGPAAYSDLFRSLKQVHLVSFQCSPHSTPQGIISTFRQCARFQQGKDLQQYVSVVVLDEVGLAEDSPKMPLKTLHPLLEDGCIEDDPAPHKKVGFVGISNWALDPAKMNRGIFVSRGSPNETELIESAKGICSSDILVQDRVQGYFASFAKAYETVCKRQDKEFFGLRDYYSLIKMVFAAAKASNRKPSPQDIAQAVLRNFSGKDDIQALDIFLANLPEAKCSEEVSPMQLIKQNIFGPSQKVPGGEQEDAESRYLLVLTKNYVALQILQQTFFEGDQQPEIIFGSGFPKDQEYTQLCRNINRVKICMETGKMVLLLNLQNLYESLYDALNQYYVHLGGQKYVDLGLGTHRVKCRVHPNFRLIVIEEKDVVYKHFPIPLINRLEKHYLDINTVLEKWQKSIVEELCAWVEKFINVKAHHFQKRHKYSPSDVFIGYHSDACASVVLQVIERQGPRALTEELHQKVSEEAKSILLNCATPDAVVRLSAYSLGGFAAEWLSQEYFHRQRHNSFADFLQAHLHTADLERHAIFTEITTFSRLLTSHDCEILESEVTGRAPKPTLLWLQQFDTEYSFLKEVRNCLTNTAKCKILIFQTDFEDGIRSAQLIASAKYSVINEINKIRENEDRIFVYFITKLSRVGRGTAYVGFHGGLWQSVHIDDLRRSTLMVSDVTRLQHVTISQLFAPGDLPELGLEHRAEDGHEEAMETEASTSGEVAEVAEEAMETESSEKVGKETSELGGSDVSILDTTRLLRSCVQSAVGMLRDQNESCTRNMRRVVLLLGLLNEDDACHASFLRVSKMRLSVFLKKQEESQFHPLEWLAREACNQDALQEAGTFRHTLWKRVQGAVTPLLASMISFIDRDGNLELLTRPDTPPWARDLWMFIFSDTMLLNIPLVMNNERHKGEMAYIVVQNHMNLSENASNNVPFSWKIKDYLEELWVQAQYITDAEGLPKKFVDIFQQTPLGRFLAQLHGEPQQELLQCYLKDFILLTMRVSTEEELKFLQMALWSCTRKLKAASEAPEEEVSLPWVHLAYQRFRSRLQNFSRILTIYPQVLHSLMEARWNHELAGCEMTLDAFAAMACTEMLTRNTLKPSPQAWLQLVKNLSMPLELICSDEHMQGSGSLAQAVIREVRAQWSRIFSTALFVEHVLLGTESRVPELQGLVTEHVFLLDKCLRENSDVKTHGPFEAVMRTLCECKETASKTLSRFGIQPCSICLGDAKDPVCLPCDHVHCLRCLRAWFASEQMICPYCLTALPDEFSPAVSQAHREAIEKHARFRQMCNSFFVDLVSTICFKDNAPPEKEVIESLLSLLFVQKGRLRDAAQRHCEHTKSLSPFNDVVDKTPVIRSVILKLLLKYSFHDVKDYIQEYLTLLKKKAFITEDKTELYMLFINCLEDSILEKTSAYSRNDELNHLEEEGRFLKAYSPASRGREPANEASVEYLQEVARIRLCLDRAADFLSEPEGGPEMAKEKQCYLQQVKQFCIRVENDWHRVYLVRKLSSQRGMEFVQGLSKPGRPHQWVFPKDVVKQQGLRQDHPGQMDRYLVYGDEYKALRDAVAKAVLECKPLGIKTALKACKTPQSQQSAYFLLTLFREVAILYRSHNASLHPTPEQCEAVSKFIGECKILSPPDISRFATSLVDNSVPLLRAGPSDSNLDGTVTEMAIHAAAVLLCGQNELLEPLKNLAFSPATMAHAFLPTMPEDLLAQARRWKGLERVHWYTCPNGHPCSVGECGRPMEQSICIDCHAPIGGIDHKPRDGFHLVKDKADRTQTGHVLGNPQRRDVVTCDRGLPPVVFLLIRLLTHLALLLGASQSSQALINIIKPPVRDPKGFLQQHILKDLEQLAKMLGHSADETIGVVHLVLRRLLQEQHQLSSRKRKGL

SEQ ID NO: 4505 - protein, 4664 aa, Artificial Sequence
  Synthetic polypeptide
MECPSCQHVSKEETPKFCSQCGERLPPAAPIADSENNNSTMASASEGEMECGQELKEEGGPCLFPGSDSWQENPEEPCSKASWTVQESKKKKRKKKKKGNKSASSELASLPLSPASPCHLTLLSNPWPQDTALPHSQAQQSGPTGQPSQPPGTATTPLEGDGLSAPTEVGDSPLQAQALGEAGVATGSEAQSSPQFQDHTEGEDQDASIPSGGRGLSQEGTGPPTSAGEGHSRTEDAAQELLLPESKGGSSEPGTELQTTEQQAGASASMAVDAVAEPANAVKGAGKEMKEKTQRMKQPPATTPPFKTHCQEAETKTKDEMAAAEEKVGKNEQGEPEDLKKPEGKNRSAAAVKNEKEQKNQEADVQEVKASTLSPGGGVTVFFHAIISLHFPFNPDLHKVFIRGGEEFGESKWDSNICELHYTRDLGHDRVLVEGIVCISKKHLDKYIPYKYVIYNGESFEYEFIYKHQQKKGEYVNRCLFIKSSLLGSGDWHQYYDIVYMKPHGRLQKVMNHITDGPRKDLVKGKQIAAALMLDSTFSILQTWDTINLNSFFTQFEQFCFVLQQPMIYEGQAQLWTDLQYREKEVKRYLWQHLKKHVVPLPDGKSTDFLPVDCPVRSKLKTGLIVLFVVEKIELLLEGSLDWLCHLLTSDASSPDEFHRDLSHILGIPQSWRLYLVNLCQRCMDTRTYTWLGALPVLHCCMELAPRHKDAWRQPEDTWAALEGLSFSPFREQMLDTSSLLQFMREKQHLLSIDEPLFRSWFSLLPLSHLVMYMENFIEHLGRFPAHILDCLSGIYYRLPGLEQVLNTQDVQDVQNVQNILEMLLRLLDTYRDKIPEEALSPSYLTVCLKLHEAICSSTKLLKFYELPALSAEIVCRMIRLLSLVDSAGQRDETGNNSVQTVFQGTLAATKRWLREVFTKNMLTSSGASFTYVKEIEVWRRLVEIQFPAEHGWKESLLGDMEWRLTKEEPLSQITAYCNSCWDTKGLEDSVAKTFEKCIIEAVSSACQSQTSILQGFSYSDLRKFGIVLSAVITKSWPRTADNFNDILKHLLTLADVKHVFRLCGTDEKILANVTEDAKRLIAVADSVLTKVVGDLLSGTILVGQLELIIKHKNQFLDIWQLREKSLSPQDEQCAVEEALDWRREELLLLKKEKRCVDSLLKMCGNVKHLIQVDFGVLAVRHSQDLSSKRLNDTVTVRLSTSSNSQRATHYHLSSQVQEMAGKIDLLRDSHIFQLFWREAAEPLSEPKEDQEAAELLSEPEEESERHILELEEVYDYLYQPSYRKFIKLHQDLKSGEVTLAEIDVIFKDFVNKYTDLDSELKIMCTVDHQDQRDWIKDRVEQIKEYHHLHQAVHAAKVILQVKESLGLNGDFSVLNTLLNFTDNFDDFRRETLDQINQELIQAKKLLQDISEARCKGLQALSLRKEFICWVREALGGINELKVFVDLASISAGENDIDVDRVACFHDAVQGYASLLFKLDPSVDFSAFMKHLKKLWKALDKDQYLPRKLCDSARNLEWLKTVNESHGSVERSSLTLATAINQRGIYVIQAPKGGQKISPDTVLHLILPESPGSHEESREYSLEEVKELLNKLMLMSGKKDRNNTEVERFSEVFCSVQRLSQAFIDLHSAGNMLFRTWIAMAYCSPKQGVSLQMDFGLDLVTELKEGGDVTELLAALCRQMEHFLDSWKRFVTQKRMEHFYLNFYTAEQLVYLSTELRKQPPSDAALTMLSFIKSNCTLRDVLRASVGCGSEAARYRMRRVMEELPLMLLSEFSLVDKLRIIMEQSMRCLPAFLPDCLDLETLGHCLAHLAGMGGSPVERCLPRGLQVGQPNLVVCGHSEVLPAALAVYMQTPSQPLPTYDEVLLCTPATTFEEVALLLRRCLTLGSLGHKVYSLLFADQLSYEVARQAEELFHNLCTQQHREDYQLVMVCDGDWEHCYLPSAFSQHKVFVTPQAPLEAIQAYLAGHYRVPKQTLSAAAVFNDRLCVGIVASERAGVGKSLYVKRLHDKMKMQLNVKNVPLKTIRLIDPQVDESRVLGALLPFLDAQYQKVPVLFHLDVTSSVQTGIWVFLFKLLILQYLMDINGKMWLRNPCHLYIVEILERRTSVPSRSSSALRTRVPQFSFLDIFPKVTCRPPKEVIDMELSALRSDTEPGMDLWEFCSETFQRPYQYLRRFNQNQDLDTFQYQEGSVEGTPEECLQHFLFHCGVINPSWSELRNFARFLNYQLRDCEASLFCNPSFIGDTLRGFKKFVVTFMIFMARDFATPSLHTSDQSPGKHMVTMDGVREEDLAPFSLRKRWESEPHPYVFFNDDHTTMTFIGFHLQPNINGSVDAISHLTGKVIKRDVMTRDLYQGLLLQRVPFNVDFDKLPRHKKLERLCLTLGIPQATDPDKTYELTTDNMLKILAIEMRFRCGIPVIIMGETGCGKTRLIKFLSDLRRGGTNADTIKLVKVHGGTTADMIYSRVREAENVAFANKDQHQLDTILFFDEANTTEAISCIKEVLCDHMVDGQPLAEDSGLHIIAACNPYRKHSEEMICRLESAGLGYRVSMEETADRLGSIPLRQLVYRVHALPPSLIPLVWDFGQLSDVAEKLYIQQIVQRLVESISLDENGTRVITEVLCASQGFMRKTEDECSFVSLRDVERCVKVFRWFHEHSAMLLAQLNAFLSKSSVSKNHTERDPVLWSLMLAIGVCYHASLEKKDSYRKAIARFFPKPYDDSRLLLDEITRAQDLFLDGVPLRKTIAKNLALKENVFMMVVCIELKIPLFLVGKPGSSKSLAKTIVADAMQGPAAYSDLFRSLKQVHLVSFQCSPHSTPQGIISTFRQCARFQQGKDLQQYVSVVVLDEVGLAEDSPKMPLKTLHPLLEDGCIEDDPAPHKKVGFVGISNWALDPAKMNRGIFVSRGSPNETELIESAKGICSSDILVQDRVQGYFASFAKAYETVCKRQDKEFFGLRDYYSLIKMVFAAAKASNRKPSPQDIAQAVLRNFSGKDDIQALDIFLANLPEAKCSEEVSPMQLIKQNIFGPSQKVPGGEQEDAESRYLLVLTKNYVALQILQQTFFEGDQQPEIIFGSGFPKDQEYTQLCRNINRVKICMETGKMVLLLNLQNLYESLYDALNQYYVHLGGQKYVDLGLGTHRVKCRVHPNFRLIVIEEKDVVYKHFPIPLINRLEKHYLDINTVLEKWQKSIVEELCAWVEKFINVKAHHFQKRHKYSPSDVFIGYHSDACASVVLQVIERQGPRALTEELHQKVSEEAKSILLNCATPDAVVRLSAYSLGGFAAEWLSQEYFHRQRHNSFADFLQAHLHTADLERHAIFTEITTFSRLLTSHDCEILESEVTGRAPKPTLLWLQQFDTEYSFLKEVRNCLTNTAKCKILIFQTDFEDGIRSAQLIASAKYSVINEINKIRENEDRIFVYFITKLSRVGRGTAYVGFHGGLWQSVHIDDLRRSTLMVSDVTRLQHVTISQLFAPGDLPELGLEHRAEDGHEEAMETEASTSGEVAEVAEEAMETESSEKVGKETSELGGSDVSILDTTRLLRSCVQSAVGMLRDQNESCTRNMRRVVLLLGLLNEDDACHASFLRVSKMRLSVFLKKQEESQFHPLEWLAREACNQDALQEAGTFRHTLWKRVQGAVTPLLASMISFIDRDGNLELLTRPDTPPWARDLWMFIFSDTMLLNIPLVMNNERHKGEMAYIVVQNHMNLSENASNNVPFSWKIKDYLEELWVQAQYITDAEGLPKKFVDIFQQTPLGRFLAQLHGEPQQELLQCYLKDFILLTMRVSTEEELKFLQMALWSCTRKLKAASEAPEEEVSLPWVHLAYQRFRSRLQNFSRILTIYPQVLHSLMEARWNHELAGCEMTLDAFAAMACTEMLTRNTLKPSPQAWLQLVKNLSMPLELICSDEHMQGSGSLAQAVIREVRAQWSRIFSTALFVEHVLLGTESRVPELQGLVTEHVFLLDKCLRENSDVKTHGPFEAVMRTLCECKETASKTLSRFGIQPCSICLGDAKDPVCLPCDHVHCLRCLRAWFASEQMICPYCLTALPDEFSPAVSQAHREAIEKHARFRQMCNSFFVDLVSTICFKDNAPPEKEVIESLLSLLFVQKGRLRDAAQRHCEHTKSLSPFNDVVDKTPVIRSVILKLLLKYSFHDVKDYIQEYLTLLKKKAFITEDKTELYMLFINCLEDSILEKTSAYSRNDELNHLEEEGRFLKAYSPASRGREPANEASVEYLQEVARIRLCLDRAADFLSEPEGGPEMAKEKQCYLQQVKQFCIRVENDWHRVYLVRKLSSQRGMEFVQGLSKPGRPHQWVFPKDVVKQQGLRQDHPGQMDRYLVYGDEYKALRDAVAKAVLECKPLGIKTALKACKTPQSQQSAYFLLTLFREVAILYRSHNASLHPTPEQCEAVSKFIGECKILSPPDISRFATSLVDNSVPLLRAGPSDSNLDGTVTEMAIHAAAVLLCGQNELLEPLKNLAFSPATMAHAFLPTMPEDLLAQARRWKGLERVHWYTCPNGHPCSVGECGRPMEQSICIDCHAPIGGIDHKPRDGFHLVKDKADRTQTGHVLGNPQRRDVVTCDRGLPPVVFLLIRLLTHLALLLGASQSSQALINIIKPPVRDPKGFLQQHILKDLEQLAKMLGHSADETIGVVHLVLRRLLQEQHQLSSRKRKGL

SEQ ID NO: 4506 - protein, 2737 aa, Artificial Sequence
  Synthetic polypeptide
MVCDGDWEHCYLPSAFSQHKVFVTPQAPLEAIQAYLAGHYRVPKQTLSAAAVFNDRLCVGIVASERAGVGKSLYVKRLHDKMKMQLNVKNVPLKTIRLIDPQVDESRVLGALLPFLDAQYQKVPVLFHLDVTSSVQTGIWVFLFKLLILQYLMDINGKMWLRNPCHLYIVEILERRTSVPSRSSSALRTRVPQFSFLDIFPKVTCRPPKEVIDMELSALRSDTEPGMDLWEFCSETFQRPYQYLRRFNQNQDLDTFQYQEGSVEGTPEECLQHFLFHCGVINPSWSELRNFARFLNYQLRDCEASLFCNPSFIGDTLRGFKKFVVTFMIFMARDFATPSLHTSDQSPGKHMVTMDGVREEDLAPFSLRKRWESEPHPYVFFNDDHTTMTFIGFHLQPNINGSVDAISHLTGKVIKRDVMTRDLYQGLLLQRVPFNVDFDKLPRHKKLERLCLTLGIPQATDPDKTYELTTDNMLKILAIEMRFRCGIPVIIMGETGCGKTRLIKFLSDLRRGGTNADTIKLVKVHGGTTADMIYSRVREAENVAFANKDQHQLDTILFFDEANTTEAISCIKEVLCDHMVDGQPLAEDSGLHIIAACNPYRKHSEEMICRLESAGLGYRVSMEETADRLGSIPLRQLVYRVHALPPSLIPLVWDFGQLSDVAEKLYIQQIVQRLVESISLDENGTRVITEVLCASQGFMRKTEDECSFVSLRDVERCVKVFRWFHEHSAMLLAQLNAFLSKSSVSKNHTERDPVLWSLMLAIGVCYHASLEKKDSYRKAIARFFPKPYDDSRLLLDEITRAQDLFLDGVPLRKTIAKNLALKENVFMMVVCIELKIPLFLVGKPGSSKSLAKTIVADAMQGPAAYSDLFRSLKQVHLVSFQCSPHSTPQGIISTFRQCARFQQGKDLQQYVSVVVLDEVGLAEDSPKMPLKTLHPLLEDGCIEDDPAPHKKVGFVGISNWALDPAKMNRGIFVSRGSPNETELIESAKGICSSDILVQDRVQGYFASFAKAYETVCKRQDKEFFGLRDYYSLIKMVFAAAKASNRKPSPQDIAQAVLRNFSGKDDIQALDIFLANLPEAKCSEEVSPMQLIKQNIFGPSQKVPGGEQEDAESRYLLVLTKNYVALQILQQTFFEGDQQPEIIFGSGFPKDQEYTQLCRNINRVKICMETGKMVLLLNLQNLYESLYDALNQYYVHLGGQKYVDLGLGTHRVKCRVHPNFRLIVIEEKDVVYKHFPIPLINRLEKHYLDINTVLEKWQKSIVEELCAWVEKFINVKAHHFQKRHKYSPSDVFIGYHSDACASVVLQVIERQGPRALTEELHQKVSEEAKSILLNCATPDAVVRLSAYSLGGFAAEWLSQEYFHRQRHNSFADFLQAHLHTADLERHAIFTEITTFSRLLTSHDCEILESEVTGRAPKPTLLWLQQFDTEYSFLKEVRNCLTNTAKCKILIFQTDFEDGIRSAQLIASAKYSVINEINKIRENEDRIFVYFITKLSRVGRGTAYVGFHGGLWQSVHIDDLRRSTLMVSDVTRLQHVTISQLFAPGDLPELGLEHRAEDGHEEAMETEASTSGEVAEVAEEAMETESSEKVGKETSELGGSDVSILDTTRLLRSCVQSAVGMLRDQNESCTRNMRRVVLLLGLLNEDDACHASFLRVSKMRLSVFLKKQEESQFHPLEWLAREACNQDALQEAGTFRHTLWKRVQGAVTPLLASMISFIDRDGNLELLTRPDTPPWARDLWMFIFSDTMLLNIPLVMNNERHKGEMAYIVVQNHMNLSENASNNVPFSWKIKDYLEELWVQAQYITDAEGLPKKFVDIFQQTPLGRFLAQLHGEPQQELLQCYLKDFILLTMRVSTEEELKFLQMALWSCTRKLKAASEAPEEEVSLPWVHLAYQRFRSRLQNFSRILTIYPQVLHSLMEARWNHELAGCEMTLDAFAAMACTEMLTRNTLKPSPQAWLQLVKNLSMPLELICSDEHMQGSGSLAQAVIREVRAQWSRIFSTALFVEHVLLGTESRVPELQGLVTEHVFLLDKCLRENSDVKTHGPFEAVMRTLCECKETASKTLSRFGIQPCSICLGDAKDPVCLPCDHVHCLRCLRAWFASEQMICPYCLTALPDEFSPAVSQAHREAIEKHARFRQMCNSFFVDLVSTICFKDNAPPEKEVIESLLSLLFVQKGRLRDAAQRHCEHTKSLSPFNDVVDKTPVIRSVILKLLLKYSFHDVKDYIQEYLTLLKKKAFITEDKTELYMLFINCLEDSILEKTSAYSRNDELNHLEEEGRFLKAYSPASRGREPANEASVEYLQEVARIRLCLDRAADFLSEPEGGPEMAKEKQCYLQQVKQFCIRVENDWHRVYLVRKLSSQRGMEFVQGLSKPGRPHQWVFPKDVVKQQGLRQDHPGQMDRYLVYGDEYKALRDAVAKAVLECKPLGIKTALKACKTPQSQQSAYFLLTLFREVAILYRSHNASLHPTPEQCEAVSKFIGECKILSPPDISRFATSLVDNSVPLLRAGPSDSNLDGTVTEMAIHAAAVLLCGQNELLEPLKNLAFSPATMAHAFLPTMPEDLLAQARRWKGLERVHWYTCPNGHPCSVGECGRPMEQSICIDCHAPIGGIDHKPRDGFHLVKDKADRTQTGHVLGNPQRRDVVTCDRGLPPVVFLLIRLLTHLALLLGASQSSQALINIIKPPVRDPKGFLQQHILKDLEQLAKMLGHSADETIGVVHLVLRRLLQEQHQLSSRKRKGL

SEQ ID NO: 4507 - protein, 447 aa, Artificial Sequence
  Synthetic polypeptide
MATSADSPSSPLGAEDLLSDSSEPPGLNQVSSEVTSQLYASLRLSRQAEATARAQLYLPSTSPPHEGLDGFAQELSRSLSVGLEKNLKKKDGSKHIFEMESVRGQLQTMLQTSRDTAYRDPLIPGAGSERREEDSFDSDSTATLLNTRPLQDLSPSSSAQALEELFPRYTSLRPGPPLNPPDFQGLRDALDSEHTRRKHCERHIQSLQTRVLELQQQLAVAVAADRKKDTMIEQLDKTLARVVEGWNRHEAERTEVLRGLQEEHQAAELTRSKQQETVTRLEQSLSEAMEALNREQESARLQQRERETLEEERQALTLRLEAEQQRCCVLQEERDAARAGQLSEHRELETLRAALEEERQTWAQQEHQLKEHYQALQEESQAQLEREKEKSQREAQAAWETQHQLALVQSEVRRLEGELDTARRERDALQLEMSLVQVQASLRGYVP

SEQ ID NO: 4508 - protein, 483 aa, Artificial Sequence
  Synthetic polypeptide
MATSADSPSSPLGAEDLLSDSSEPPGLNQVSSEVTSQLYASLRLSRQAEATARAQLYLPSTSPPHEGLDGFAQELSRSLSVGLEKNLKKKDGSKHIFEMESVRGQLQTMLQTSRDTAYRDPLIPGAGSERREEDSFDSDSTATLLNTRPLQDLSPSSSAQALEELFPRYTSLRPGPPLNPPDFQGLRDALDSEHTRRKHCERHIQSLQTRVLELQQQLAVAVAADRKKDTMIEQLDKTLARVVEGWNRHEAERTEVLRGLQEEHQAAELTRSKQQETVTRLEQSLSEAMEALNREQESARLQQRERETLEEERQALTLRLEAEQQRCCVLQEERDAARAGQLSEHRELETLRAALEEERQTWAQQEHQLKEHYQALQEESQAQLEREKEKSQREAQAAWETQHQLALVQSEVRRLEGELDTARRERDALQLEMSLVQARYESQRIQLESELAVQLEQRVTERLAQAQESSLRQAASLREHHRE

SEQ ID NO: 4509 - protein, 130 aa, Artificial Sequence
  Synthetic polypeptide
MESEMLQSPLLGLGEEDEADLTDWNLPLAFMKKRHCEKIEGSKSLAQSWRMKDRNFKKPVSSTVNLSGYQPVLRPVLMRPRRPCWVCLMLQKSSAQLGEPIFPHDQCVLLQHHVWVKSHFKHQLGQRVSM

SEQ ID NO: 4510 - protein, 62 aa, Artificial Sequence
  Synthetic polypeptide
MESEMLQSPLLGLGEEDEADLTDWNLPLAFMKKRHCEKIEGSKSLAQSWRMKDRLIWWQRLA

SEQ ID NO: 4511 - protein, 1130 aa, Artificial Sequence
  Synthetic polypeptide
MESEMLQSPLLGLGEEDEADLTDWNLPLAFMKKRHCEKIEGSKSLAQSWRMKDRMKTVSVALVLCLNVGVDPPDVVKTTPCARLECWIDPLSMGPQKALETIGANLQKQYENWQPRARYKQSLDPTVDEVKKLCTSLRRNAKEERVLFHYNGHGVPRPTVNGEVWVFNKNYTQYIPLSIYDLQTWMGSPSIFVYDCSNAGLIVKSFKQFALQREQELEVAAINPNHPLAQMPLPPSMKNCIQLAACEATELLPMIPDLPADLFTSCLTTPIKIALRWFCMQKCVSLVPGVTLDLIEKIPGRLNDRRTPLGELNWIFTAITDTIAWNVLPRDLFQKLFRQDLLVASLFRNFLLAERIMRSYNCTPVSSPRLPPTYMHAMWQAWDLAVDICLSQLPTIIEEGTAFRHSPFFAEQLTAFQVWLTMGVENRNPPEQLPIVLQVLLSQVHRLRALDLLGRFLDLGPWAVSLALSVGIFPYVLKLLQSSARELRPLLVFIWAKILAVDSSCQADLVKDNGHKYFLSVLADPYMPAEHRTMTAFILAVIVNSYHTGQEACLQGNLIAICLEQLNDPHPLLRQWVAICLGRIWQNFDSARWCGVRDSAHEKLYSLLSDPIPEVRCAAVFALGTFVGNSAERTDHSTTIDHNVAMMLAQLVSDGSPMVRKELVVALSHLVVQYESNFCTVALQFIEEEKNYALPSPATTEGGSLTPVRDSPCTPRLRSVSSYGNIRAVATARSLNKSLQNLSLTEESGGAVAFSPGNLSTSSSASSTLGSPENEEHILSFETIDKMRRASSYSSLNSLIGVSFNSVYTQIWRVLLHLAADPYPEVSDVAMKVLNSIAYKATVNARPQRVLDTSSLTQSAPASPTNKGVHIHQAGGSPPASSTSSSSLTNDVAKQPVSRDLPSGRPGTTGPAGAQYTPHSHQFPRTRKMFDKGPEQTADDADDAAGHKSFISATVQTGFCDWSARYFAQPVMKIPEEHDLESQIRKEREWRFLRNSRVRRQAQQVIQKGITRLDDQIFLNRNPGVPSVVKFHPFTPCIAVADKDSICFWDWEKGEKLDYFHNGNPRYTRVTAMEYLNGQDCSLLLTATDDGAIRVWKNFADLEKNPEMVTAWQGLSDMLPTTRDQSINSN

SEQ ID NO: 4512 - protein, 972 aa, Artificial Sequence
  Synthetic polypeptide
MESEMLQSPLLGLGEEDEADLTDWNLPLAFMKKRHCEKIEGSKSLAQSWRMKDRMKTVSVALVLCLNVGVDPPDVVKTTPCARLECWIDPLSMGPQKALETIGANLQKQYENWQPRARYKQSLDPTVDEVKKLCTSLRRNAKEERVLFHYNGHGVPRPTVNGEVWVFNKNYTQYIPLSIYDLQTWMGSPSIFVYDCSNAGLIVKSFKQFALQREQELEVAAINPNHPLAQMPLPPSMKNCIQLAACEATELLPMIPDLPADLFTSCLTTPIKIALRWFCMQKCVSLVPGVTLDLIEKIPGRLNDRRTPLGELNWIFTAITDTIAWNVLPRDLFQKLFRQDLLVASLFRNFLLAERIMRSYNCTPVSSPRLPPTYMHAMWQAWDLAVDICLSQLPTIIEEGTAFRHSPFFAEQLTAFQVWLTMGVENRNPPEQLPIVLQVLLSQVHRLRALDLLGRFLDLGPWAVSLALSVGIFPYVLKLLQSSARELRPLLVFIWAKILAVDSELVVALSHLVVQYESNFCTVALQFIEEEKNYALPSPATTEGGSLTPVRDSPCTPRLRSVSSYGNIRAVATARSLNKSLQNLSLTEESGGAVAFSPGNLSTSSSASSTLGSPENEEHILSFETIDKMRRASSYSSLNSLIGVSFNSVYTQIWRVLLHLAADPYPEVSDVAMKVLNSIAYKATVNARPQRVLDTSSLTQSAPASPTNKGVHIHQAGGSPPASSTSSSSLTNDVAKQPVSRDLPSGRPGTTGPAGAQYTPHSHQFPRTRKMFDKGPEQTADDADDAAGHKSFISATVQTGFCDWSARYFAQPVMKIPEEHDLESQIRKEREWRFLRNSRVRRQAQQVIQKGITRLDDQIFLNRNPGVPSVVKFHPFTPCIAVADKDSICFWDWEKGEKLDYFHNGNPRYTRVTAMEYLNGQDCSLLLTATDDGAIRVWKNFADLEKNPEMVTAWQGLSDMLPTTRDQSINSN

SEQ ID NO: 4513 - protein, 83 aa, Artificial Sequence
  Synthetic polypeptide
MVQSIEFTQIEMKVMEGLQFGNECLNKMHQAWWQAPVNPATQEAEAGESLEPGGRGCSEMRLRHCTPAWMIRAKLRLRKKKKE

SEQ ID NO: 4514 - protein, 169 aa, Artificial Sequence
  Synthetic polypeptide
MGNLFGRKKQSRVTEQDKAILQLKQQRDKLRQYQKRIAQQLERERALARQLLRDGRKERAKLLLKKKRYQEQLLDRTENQISSLEAMVQSIEFTQIEMKVMEGLQFGNECLNKMHQAWWQAPVNPATQEAEAGESLEPGGRGCSEMRLRHCTPAWMIRAKLRLRKKKKE

SEQ ID NO: 4515 - protein, 148 aa, Artificial Sequence
  Synthetic polypeptide
QLKQQRDKLRQYQKRIAQQLERERALARQLLRDGRKERAKLLLKKKRYQEQLLDRTENQISSLEAMVQSIEFTQIEMKVMEGLQFGNECLNKMHQAWWQAPVNPATQEAEAGESLEPGGRGCSEMRLRHCTPAWMIRAKLRLRKKKKE

SEQ ID NO: 4516 - protein, 127 aa, Artificial Sequence
  Synthetic polypeptide
RERALARQLLRDGRKERAKLLLKKKRYQEQLLDRTENQISSLEAMVQSIEFTQIEMKVMEGLQFGNECLNKMHQAWWQAPVNPATQEAEAGESLEPGGRGCSEMRLRHCTPAWMIRAKLRLRKKKKE

SEQ ID NO: 4517 - protein, 6 aa, Artificial Sequence
  Synthetic polypeptide
AKSISY

SEQ ID NO: 4518 - protein, 6 aa, Artificial Sequence
  Synthetic polypeptide
AKSISY

SEQ ID NO: 4519 - protein, 57 aa, Artificial Sequence
  Synthetic polypeptide
FTLFLFRKIHFLLKTGMYWVRHRQSLTLSPRLECSGAILAHYNLHLLGSSDSSASAS

SEQ ID NO: 4520 - protein, 561 aa, Artificial Sequence
  Synthetic polypeptide
MAESIIIRVQSPDGVKRITATKRETAATFLKKVAKEFGFQNNGFSVYINRNKTGEITASSNKSLNLLKIKHGDLLFLFPSSLAGPSSEMETSVPPGFKVFGAPNVVEDEIDQYLSKQDGKIYRSRDPQLCRHGPLGKCVHCVPLEPFDEDYLNHLEPPVKHMSFHAYIRKLTGGADKGKFVALENISCKIKSGCEGHLPWPNGICTKCQPSAITLNRQKYRHVDNIMFENHTVADRFLDFWRKTGNQHFGYLYGRYTEHKDIPLGIRAEVAAIYEPPQIGTQNSLELLEDPKAEVVDEIAAKLGLRKVGWIFTDLVSEDTRKGTVRYSRNKDTYFLSSEECITAGDFQNKHPNMCRLSPDGHFGSKFVTAVATGGPDNQVHFEGYQVSNQCMALVRDECLLPCKDAPELGYAKESSSEQYVPDVFYKDVDKFGNEITQLARPLPVEYLIIDITTTFPKDPVYTFSISQNPFPIENRDVLGETQDFHSLATYLSQNTSSVFLDTISDFHLLLFLVTNEVMPLQDSISLLLEAVRTRNEELAQTWKRSEQWATIEQLCSFLLL

SEQ ID NO: 4521 - protein, 25 aa, Artificial Sequence
  Synthetic polypeptide
MRSSPRHGRGLSSGPPSSSCAVFCC

SEQ ID NO: 4522 - protein, 129 aa, Artificial Sequence
  Synthetic polypeptide
GNEITQLARPLPVEYLIIDITTTFPKDPVYTFSISQNPFPIENRDVLGETQDFHSLATYLSQNTSSVFLDTISDFHLLLFLVTNEVMPLQDSISLLLEAVRTRNEELAQTWKRSEQWATIEQLCSFLLL

SEQ ID NO: 4523 - protein, 107 aa, Artificial Sequence
  Synthetic polypeptide
TFPKDPVYTFSISQNPFPIENRDVLGETQDFHSLATYLSQNTSSVFLDTISDFHLLLFLVTNEVMPLQDSISLLLEAVRTRNEELAQTWKRSEQWATIEQLCSFLLL

SEQ ID NO: 4524 - protein, 400 aa, Artificial Sequence
  Synthetic polypeptide
MSFHAYIRKLTGGADKGKFVALENISCKIKSGCEGHLPWPNGICTKCQPSAITLNRQKYRHVDNIMFENHTVADRFLDFWRKTGNQHFGYLYGRYTEHKDIPLGIRAEVAAIYEPPQIGTQNSLELLEDPKAEVVDEIAAKLGLRKVGWIFTDLVSEDTRKGTVRYSRNKDTYFLSSEECITAGDFQNKHPNMCRLSPDGHFGSKFVTAVATGGPDNQVHFEGYQVSNQCMALVRDECLLPCKDAPELGYAKESSSEQYVPDVFYKDVDKFGNEITQLARPLPVEYLIIDITTTFPKDPVYTFSISQNPFPIENRDVLGETQDFHSLATYLSQNTSSVFLDTISDFHLLLFLVTNEVMPLQDSISLLLEAVRTRNEELAQTWKRSEQWATIEQLCSFLLL

SEQ ID NO: 4525 - protein, 2412 aa, Artificial Sequence
  Synthetic polypeptide
MEEVVIAGMSGKLPESENLQEFWDNLIGGVDMVTDDDRRWKAGLYGLPRRSGKLKDLSRFDASFFGVHPKQAHTMDPQLRLLLEVTYEAIVDGGINPDSLRGTHTGVWVGVSGSETSEALSRDPETLVGYSMVGCQRAMMANRLSFFFDFRGPSIALDTACSSSLMALQNAYQAIHSGQCPAAIVGGINVLLKPNTSVQFLRLGMLSPEGTCKAFDTAGNGYCRSEGVVAVLLTKKSLARRVYATILNAGTNTDGFKEQGVTFPSGDIQEQLIRSLYQSAGVAPESFEYIEAHGTGTKVGDPQELNGITRALCATRQEPLLIGSTKSNMGHPEPASGLAALAKVLLSLEHGLWAPNLHFHSPNPEIPALLDGRLQVVDQPLPVRGGNVGINSFGFGGSNVHIILRPNTQPPPAPAPHATLPRLLRASGRTPEAVQKLLEQGLRHSQDLAFLSMLNDIAAVPATAMPFRGYAVLGGERGGPEVQQVPAGERPLWFICSGMGTQWRGMGLSLMRLDRFRDSILRSDEAVKPFGLKVSQLLLSTDESTFDDIVHSFVSLTAIQIGLIDLLSCMGLRPDGIVGHSLGEVACGYADGCLSQEEAVLAAYWRGQCIKEAHLPPGAMAAVGLSWEECKQRCPPGVVPACHNSKDTVTISGPQAPVFEFVEQLRKEGVFAKEVRTGGMAFHSYFMEAIAPPLLQELKKVIREPKPRSARWLSTSIPEAQWHSSLARTSSAEYNVNNLVSPVLFQEALWHVPEHAVVLEIAPHALLQAVLKRGLKPSCTIIPLMKKDHRDNLEFFLAGIGRLHLSGIDANPNALFPPVEFPAPRGTPLISPLIKWDHSLAWDVPAAEDFPNGSGSPSAAIYNIDTSSESPDHYLVDHTLDGRVLFPATGYLSIVWKTLARALGLGVEQLPVVFEDVVLHQATILPKTGTVSLEVRLLEASRAFEVSENGNLVVSGKVYQWDDPDPRLFDHPESPTPNPTEPLFLAQAEVYKELRLRGYDYGPHFQGILEASLEGDSGRLLWKDNWVSFMDTMLQMSILGSAKHGLYLPTRVTAIHIDPATHRQKLYTLQDKAQVADVVVSRWLRVTVAGGVHISGLHTESAPRRQQEQQVPILEKFCFTPHTEEGCLSERAALQEELQLCKGLVQALQTKVTQQGLKMVVPGLDGAQIPRDPSQQELPRLLSAACRLQLNGNLQLELAQVLAQERPKLPEDPLLSGLLDSPALKACLDTAVENMPSLKMKVVEVLAGHGHLYSRIPGLLSPHPLLQLSYTATDRHPQALEAAQAELQQHDVAQGQWDPADPAPSALGSADLLVCNCAVAALGDPASALSNMVAALREGGFLLLHTLLRGHPLGDIVAFLTSTEPQYGQGILSQDAWESLFSRVSLRLVGLKKSFYGSTLFLCRRPTPQDSPIFLPVDDTSFRWVESLKGILADEDSSRPVWLKAINCATSGVVGLVNCLRREPGGNRLRCVLLSNLSSTSHVPEVDPGSAELQKVLQGDLVMNVYRDGAWGAFRHFLLEEDKPEEPTAHAFVSTLTRGDLSSIRWVCSSLRHAQPTCPGAQLCTVYYASLNFRDIMLATGKLSPDAIPGKWTSQDSLLGMEFSGRDASGKRVMGLVPAKGLATSVLLSPDFLWDVPSNWTLEEAASVPVVYSTAYYALVVRGRVRPGETLLIHSGSGGVGQAAIAIALSLGCRVFTTVGSAEKRAYLQARFPQLDSTSFANSRDTSFEQHVLWHTGGKGVDLVLNSLAEEKLQASVRCLATHGRFLEIGKFDLSQNHPLGMAIFLKNVTFHGVLLDAFFNESSADWREVWALVQAGIRDGVVRPLKCTVFHGAQVEDAFRYMAQGKHIGKVVVQVLAEEPEAVLKGAKPKLMSAISKTFCPAHKSYIIAGGLGGFGLELAQWLIQRGVQKLVLTSRSGIRTGYQAKQVRRWRRQGVQVQVSTSNISSLEGARGLIAEAAQLGPVGGVFNLAVVLRDGLLENQTPEFFQDVCKPKYSGTLNLDRVTREACPELDYFVVFSSVSCGRGNAGQSNYGFANSAMERICEKRRHEGLPGLAVQWGAIGDVGILVETMSTNDTIVSGTLPQRMASCLEVLDLFLNQPHMVLSSFVLAEKAAAYRDRDSQRDLVEAVAHILGIRDLAAVNLDSSLADLGLDSLMSVEVRQTLERELNLVLSVREVRQLTLRKLQELSSKADEASELACPTPKEDGLAQQQTQLNLRSLLVNPEGPTLMRLNSVQSSERPLFLVHPIEGSTTVFHSLASRLSIPTYGLQCTRAAPLDSIHSLAAYYIDCIRQVQPEGPYRVAGYSYGACVAFEMCSQLQAQQSPAPTHNSLFLFDGSPTYVLAYTQSYRAKLTPGCEAEAETEAICFFVQQFTDMEHNRAWWHSPIVPPTREENRLNRVGGGCGGRRIA

SEQ ID NO: 4526 - protein, 76 aa, Artificial Sequence
  Synthetic polypeptide
AQRPHLDRDDWRVCPSWSSRRVCPSWSSRRICPSWPSILWTGTQEARGQSAAPKPAGDTTQTEGAAGTPGAGRSPA

SEQ ID NO: 4527 - protein, 789 aa, Artificial Sequence
  Synthetic polypeptide
MLPLGSEPALNELLLRKEEEWRALQAHRTQLQEAALQDTRSQLEEAQGKLRCLQEDFVYNLQVLEERDLELERYDAAFAQAREWEEARRAEVSELKIEAAKLRQALAREARKVEELQQQQQLAFQEHRLELERVHSDKNGEIDHHREQYENLKWTLERKLEELDGELALQRQELLLEFESKMRKREHEFRLQADNMSNTALSRELKVKLLHKELEALKEAGAKAAESLQRAEATNAELERKLQSRAGELQDLEAMSRARVKDLEDKLHSVQLTRKKEEETFKRKHEELDRLAREKDAVLVAVKGAHVEQLQELQTRVLELQAHCETLEAQLRRAEWRQADTAKEKDAAIDQLREDASTVKSAWDAQIAQLSKEMVSRDLQIQTLQEEEVKLKAQVARSQQDIERYKQQLSLAVERERSLERDQVQLGLDWQRRCDDIERDQIQKSEALIQGLSMAKSQVAAKLQETEQALQEQEVVLKAVTLERDQAVQALRMHGLPRPGAQMLLRQHEEEISKDFPSSEIQRLREQNTSLRNAIAQMRKEMEALSHQIPPPIQTAAESTDANQPDPEAGGDAATPDYVLALEAEIRTLKHKFKTLEKHLEDVLDPLKMSSPHAESQPSVRTSTETTGGSAQAGQAGGSVQAGQAGGSVQAGPVSSGLALRKLGDRVQLLNLLVTRLRQKVLREPLEPAALQRELPREVDQVHLEVLELRKQVAELGKHLRIAQHGGAEPSGRKQPPASDAVALGREAHGSHLYSQHFGRPRRADHLRSGIRDQPDQHGETPSLLKIQN

SEQ ID NO: 4528 - protein, 76 aa, Artificial Sequence; identical to SEQ ID NO: 4526
  Synthetic polypeptide

SEQ ID NO: 4529 - protein, 758 aa, Artificial Sequence
  Synthetic polypeptide
MLPLGSEPALNELLLRKEEEWRALQAHRTQLQEAALQDTRSQLEEAQGKLRCLQEDFVYNLQVLEERDLELERYDAAFAQAREWEEARRAEVSELKIEAAKLRQALAREARKVEELQQQQQLAFQEHRLELERVHSDKNGEIDHHREQYENLKWTLERKLEELDGELALQRQELLLEFESKMRKREHEFRLQADNMSNTALSRELKVKLLHKELEALKEAGAKAAESLQRAEATNAELERKLQSRAGELQDLEAMSRARVKDLEDKLHSVQLTRKKEEETFKRKHEELDRLAREKDAVLVAVKGAHVEQLQELQTRVLELQAHCETLEAQLRRAEWRQADTAKEKDAAIDQLREDASTVKSAWDAQIAQLSKEMVSRDLQIQTLQEEEVKLKAQVARSQQDIERYKQQLSLAVERERSLERDQVQLGLDWQRRCDDIERDQIQKSEALIQGLSMAKSQVAAKLQETEQALQEQEVVLKAVTLERDQAVQALRMHGLPRPGAQMLLRQHEEEISKDFPSSEIQRLREQNTSLRNAIAQMRKEMEALSHQIPPPIQTAAESTDANQPDPEAGGDAATPDYVLALEAEIRTLKHKFKTLEKHLEDVLDPLKMSSPHAESQPSVRTSTETTGGSAQAGQAGGSVQAGQAGGSVQAGPVSSGLALRKLGDRVQLLNLLVTRLRQKVLREPLEPAALQRELPREVDQVHLEVLELRKQVAELGKHLRIAQHGGAEPSGRKQPPASDAVALGREGNAGFPVEQPV

SEQ ID NO: 4530 - protein, 65 aa, Artificial Sequence
  Synthetic polypeptide
MELRVGNRYRLGRKIGSGSFGDIYLGTDIAAGEEVAIKLECVKTKHPQLHIESKIYKMMQGGEES

SEQ ID NO: 4531 - protein, 16 aa, Artificial Sequence
  Synthetic polypeptide
EPVSREDFPRHCGPLL

SEQ ID NO: 4532 - protein, 239 aa, Artificial Sequence
  Synthetic polypeptide
MTAEEGVQLSQQNAKDFFRVLNLNKKCDTSKHKVLVVSVCPQSLPYFAAKFNLSVTDASRRLCGFLKSLGVHYVFDTTIAADFSILESQKEFVRRYRQHSEEERTLPMLTSACPGWVRYAERVLGRPITAHLCTAKSPQQVMGSLVKDYFARQQNLSPEKIFHVIVAPCYDKKLEALQESLPPALHGSRGADCVLTSATQEAAARESLEPGRQRLQRDKIAPLDSSLGGGGETPSQKKK

SEQ ID NO: 4533 - protein, 298 aa, Artificial Sequence
  Synthetic polypeptide
MKCEHCTRKECSKKTKTDDQENVSADAPSPAQENGEKGEFHKLADAKIFLSDCLACDSCMTAEEGVQLSQQNAKDFFRVLNLNKKCDTSKHKVLVVSVCPQSLPYFAAKFNLSVTDASRRLCGFLKSLGVHYVFDTTIAADFSILESQKEFVRRYRQHSEEERTLPMLTSACPGWVRYAERVLGRPITAHLCTAKSPQQVMGSLVKDYFARQQNLSPEKIFHVIVAPCYDKKLEALQESLPPALHGSRGADCVLTSATQEAAARESLEPGRQRLQRDKIAPLDSSLGGGGETPSQKKK

SEQ ID NO: 4534 - protein, 250 aa, Artificial Sequence
  Synthetic polypeptide
MKCEHCTRKECSKKTKTDDQENVSADAPSPAQENGEKCDTSKHKVLVVSVCPQSLPYFAAKFNLSVTDASRRLCGFLKSLGVHYVFDTTIAADFSILESQKEFVRRYRQHSEEERTLPMLTSACPGWVRYAERVLGRPITAHLCTAKSPQQVMGSLVKDYFARQQNLSPEKIFHVIVAPCYDKKLEALQESLPPALHGSRGADCVLTSATQEAAARESLEPGRQRLQRDKIAPLDSSLGGGGETPSQKKK

SEQ ID NO: 4535 - protein, 253 aa, Artificial Sequence
  Synthetic polypeptide
MKCEHCTRKECSKKTKTDDQENVSADAPSPAQENGEKGEFHKLADAKIFLSDCLACDSCMTAEEGVQLSQQNAKDFFRVLNLNKKCDTSKHKVLVVSVCPQSLPYFAAKFNLSVTDASRRLCGFLKSLGWVRYAERVLGRPITAHLCTAKSPQQVMGSLVKDYFARQQNLSPEKIFHVIVAPCYDKKLEALQESLPPALHGSRGADCVLTSATQEAAARESLEPGRQRLQRDKIAPLDSSLGGGGETPSQKKK

SEQ ID NO: 4536 - protein, 344 aa, Artificial Sequence
  Synthetic polypeptide
MKCEHCTRKECSKKTKTDDQENVSADAPSPAQENGEKGEFHKLADAKIFLSDCLACDSCMTAEEGVQLSQQNAKDFFRVLNLNKKCDTSKHKVLVVSVCPQSLPYFAAKFNLSVTDASRRLCGFLKSLGVHYVFDTTIAADFSILESQKEFVRRYRQHSEEERTLPMLTSACPGWVRYAERVLGRPITAHLCTAKSPQQVMGSLVKDYFARQQVQEEMGSAFPVLPGGSTGWGALQMFGRTTPSPEGGSRQTWMECWCSNLSPEKIFHVIVAPCYDKKLEALQESLPPALHGSRGADCVLTSATQEAAARESLEPGRQRLQRDKIAPLDSSLGGGGETPSQKKK

SEQ ID NO: 4537 - protein, 170 aa, Artificial Sequence
  Synthetic polypeptide
MHPEDSVVSSKVLGCSHFPVASRPAGSHDPQPGHRGRVLGPARAPGWVRYAERVLGRPITAHLCTAKSPQQVMGSLVKDYFARQQNLSPEKIFHVIVAPCYDKKLEALQESLPPALHGSRGADCVLTSATQEAAARESLEPGRQRLQRDKIAPLDSSLGGGGETPSQKKK

SEQ ID NO: 4538 - protein, 539 aa, Artificial Sequence
  Synthetic polypeptide
MAAAAAALSGAGTPPAGGGAGGGGAGGGGSPPGGWAVARLEGREFEYLMKKRSVTIGRNSSQGSVDVSMGHSSFISRRHLEIFTPPGGGGHGGAAPELPPAQPRPDAGGDFYLRCLGKNGVFVDGVFQRRGAPPLQLPRVCTFRFPSTNIKITFTALSSEKREKQEASESPVKAVQPHISPLTINIPDTMAHLISPLPSPTGTISAANSCPSSPRGAGSSGYKVGRVMPSDLNLMADNSQPENEKEASGGDSPKDDSKPPYSYAQLIVQAITMAPDKQLTLNGIYTHITKNYPYYRTADKGWQNSIRHNLSLNRYFIKVPRSQEEPGKGSFWRIDPASESKLIEQAFRKRRPRGVPCFRTPLGPLSSRSAPASPNHAGVLSAHSSGAQTPESLSREGSPAPLEPEPGAAQPKLAVIQEARFAQSAPGSPLSSQPVLITVQRQLPQAIKPVTYTVATPVTTSTSQPPVVQTVHVVHQIPAVSVTSVAGLAPANTYTVSGQAVVTPAAVLAPPKAEAQENGDHREVKGTVAHTCNPSTMGG

SEQ ID NO: 4539 - protein, 9 aa, Artificial Sequence
  Synthetic polypeptide
HPGSRAGPS

SEQ ID NO: 4540 - protein, 26 aa, Artificial Sequence
  Synthetic polypeptide
MNLLPCNPHGNGLLYAGFNQDHATAS

SEQ ID NO: 4541 - protein, 32 aa, Artificial Sequence
  Synthetic polypeptide
LTATGCSTPASTRTTPQLHRANSWTWHLRRWM

SEQ ID NO: 4542 - protein, 61 aa, Artificial Sequence
  Synthetic polypeptide
MSALGSPVRAYDFLLKFLLVGDSDVGKGEILASLQDGAAESPYGHPADHKNPRLRATRTSG

SEQ ID NO: 4543 - protein, 230 aa, Artificial Sequence
  Synthetic polypeptide
MEQLLRAELRTATLRAFGGPGAGCISEGRAYDTDAGPVFVKVNRRTQARQMFEGEVASLEALRSTGLVRVPRPMKVIDLPGGGAAFVMEHLKMKSLSSQASKLGEQMADLHLYNQKLREKLKEEENTVGRRGEGAEPQYVDKFGFHTVTCCGFIPQVNEWQDDWPTFFARHRLQAQLDLIEKDYADREARELWSRLQLLRRLRQENHLNPGGGGCSEGRLHHCTPAWTTE

SEQ ID NO: 4544 - protein, 188 aa, Artificial Sequence
  Synthetic polypeptide
MPTWFCSRAWFSHVGPFNEGGQGVPEDLLFFYEHLRKGGGVIRVDQSLLLYRHHPQAATHCVLETTIWTHRVRFLEEQALPRWAAFTIWNAGKQGRRLYRSLTAGSQRKVVAFCDVDENKIRKGFYCHEDSQERPKPRIPILHFRAARPPFVICVKLACGSPTRATPSVPLFQQHAHSTSPRLPISTC

SEQ ID NO: 4545 - protein, 255 aa, Artificial Sequence
  Synthetic polypeptide
MEQVQTGGLRTGSGFLTSTLHVIQEIIGCRVRRDPPNSTERYTRWINQLTPEQLLTQVFTSNGPTVIMPTWFCSRAWFSHVGPFNEGGQGVPEDLLFFYEHLRKGGGVIRVDQSLLLYRHHPQAATHCVLETTIWTHRVRFLEEQALPRWAAFTIWNAGKQGRRLYRSLTAGSQRKVVAFCDVDENKIRKGFYCHEDSQERPKPRIPILHFRAARPPFVICVKLACGSPTRATPSVPLFQQHAHSTSPRLPISTC

SEQ ID NO: 4546 - protein, 366 aa, Artificial Sequence
  Synthetic polypeptide
MSGAGVGGASEESQAMQAHVSIILPVHNAEPWLDECLRSVLQQDFEGTMELSVFNDASKDKSGAIIEKWRVKLEDSGVHVIIGGHDSPSPRGVGYAKNQAVAQSSGSYLCFLDSDDVMMPQRVRLQHEAAVQHPSSIIGCRVRRDPPNSTERYTRWINQLTPEQLLTQVFTSNGPTVIMPTWFCSRAWFSHVGPFNEGGQGVPEDLLFFYEHLRKGGGVIRVDQSLLLYRHHPQAATHCVLETTIWTHRVRFLEEQALPRWAAFTIWNAGKQGRRLYRSLTAGSQRKVVAFCDVDENKIRKGFYCHEDSQERPKPRIPILHFRAARPPFVICVKLACGSPTRATPSVPLFQQHAHSTSPRLPISTC

SEQ ID NO: 4547 - protein, 611 aa, Artificial Sequence
  Synthetic polypeptide
MEPLSHRGLPRLSWIDTLYSNFSYGTDEYDGEGNEEQKGPPEGSETMPYIDESPTMSPQLSARSQGGGDGVSPTPPEGLAPGVEAGKGLEMRKLVLSGFLASEEIYINQLEALLLPMKPLKATATTSQPVLTIQQIETIFYKIQDIYEIHKEFYDNLCPKVQQWDSQVTMGHLFQKLASQLGVYKAFVDNYKVALETAEKCSQSNNQFQKISEELKVKGPKDSKDSHTSVTMEALLYKPIDRVTRSTLVLHDLLKHTPVDHPDYPLLQDALRISQNFLSSINEDIDPRRTAVTTPKGETRQLVKDGFLVEVSESSRKLRHVFLFTDVLLCAKLKKTSAGKHQQYDCKWYIPLADLVFPSPEESEASPQVHPFPDHELEDMKMKISALKSEIQKEKANKGQSRAIERLKKKMFENEFLLLLNSPTIPFRIHNRNGKSYLFLLSSDYERSEWREAIQKLQKKDLQAFVLSSVELQVLTGSCFKLRTVHNIPVTSNKDDDESPGLYGFLHVIVHSAKGFKQSANLYCTLEVDSFGYFVSKAKTRVFRDTAEPKWDEEFEIELEGSQSLRILCYEKCYDKTKVNKDNNEIVDKIMGKGQIQVVVAGACNPSYSVG

SEQ ID NO: 4548 - protein, 565 aa, Artificial Sequence
  Synthetic polypeptide
MPYIDESPTMSPQLSARSQGGGDGVSPTPPEGLAPGVEAGKGLEMRKLVLSGFLASEEIYINQLEALLLPMKPLKATATTSQPVLTIQQIETIFYKIQDIYEIHKEFYDNLCPKVQQWDSQVTMGHLFQKLASQLGVYKAFVDNYKVALETAEKCSQSNNQFQKISEELKVKGPKDSKDSHTSVTMEALLYKPIDRVTRSTLVLHDLLKHTPVDHPDYPLLQDALRISQNFLSSINEDIDPRRTAVTTPKGETRQLVKDGFLVEVSESSRKLRHVFLFTDVLLCAKLKKTSAGKHQQYDCKWYIPLADLVFPSPEESEASPQVHPFPDHELEDMKMKISALKSEIQKEKANKGQSRAIERLKKKMFENEFLLLLNSPTIPFRIHNRNGKSYLFLLSSDYERSEWREAIQKLQKKDLQAFVLSSVELQVLTGSCFKLRTVHNIPVTSNKDDDESPGLYGFLHVIVHSAKGFKQSANLYCTLEVDSFGYFVSKAKTRVFRDTAEPKWDEEFEIELEGSQSLRILCYEKCYDKTKVNKDNNEIVDKIMGKGQIQVVVAGACNPSYSVG

SEQ ID NO: 4549 - protein, 574 aa, Artificial Sequence
  Synthetic polypeptide
MEEEEEAIGLLDKVLEDEDVFLLEECELGTPTSPGSGSPFLVAVKVEAGKGLEMRKLVLSGFLASEEIYINQLEALLLPMKPLKATATTSQPVLTIQQIETIFYKIQDIYEIHKEFYDNLCPKVQQWDSQVTMGHLFQKLASQLGVYKAFVDNYKVALETAEKCSQSNNQFQKISEELKVKGPKDSKDSHTSVTMEALLYKPIDRVTRSTLVLHDLLKHTPVDHPDYPLLQDALRISQNFLSSINEDIDPRRTAVTTPKGETRQLVKDGFLVEVSESSRKLRHVFLFTDVLLCAKLKKTSAGKHQQYDCKWYIPLADLVFPSPEESEASPQVHPFPDHELEDMKMKISALKSEIQKEKANKGQSRAIERLKKKMFENEFLLLLNSPTIPFRIHNRNGKSYLFLLSSDYERSEWREAIQKLQKKDLQAFVLSSVELQVLTGSCFKLRTVHNIPVTSNKDDDESPGLYGFLHVIVHSAKGFKQSANLYCTLEVDSFGYFVSKAKTRVFRDTAEPKWDEEFEIELEGSQSLRILCYEKCYDKTKVNKDNNEIVDKIMGKGQIQVVVAGACNPSYSVG

SEQ ID NO: 4550 - protein, 393 aa, Artificial Sequence
  Synthetic polypeptide
MEILLIIRFCCNCTYALLYKPIDRVTRSTLVLHDLLKHTPVDHPDYPLLQDALRISQNFLSSINEDIDPRRTAVTTPKGETRQLVKDGFLVEVSESSRKLRHVFLFTDVLLCAKLKKTSAGKHQQYDCKWYIPLADLVFPSPEESEASPQVHPFPDHELEDMKMKISALKSEIQKEKANKGQSRAIERLKKKMFENEFLLLLNSPTIPFRIHNRNGKSYLFLLSSDYERSEWREAIQKLQKKDLQAFVLSSVELQVLTGSCFKLRTVHNIPVTSNKDDDESPGLYGFLHVIVHSAKGFKQSANLYCTLEVDSFGYFVSKAKTRVFRDTAEPKWDEEFEIELEGSQSLRILCYEKCYDKTKVNKDNNEIVDKIMGKGQIQVVVAGACNPSYSVG

SEQ ID NO: 4551 - protein, 22 aa, Artificial Sequence
  Synthetic polypeptide
SGTQRSPSGMRSLRSSWRAPSP

SEQ ID NO: 4552 - protein, 210 aa, Artificial Sequence
  Synthetic polypeptide
MADTIFGSGNDQWVCPNDRQLALRAKLQTGWSVHTYQTEKQRRKQHLSPAEVEAILQVIQRAERLDVLEQQRIGRLVERLETMRRNVMGNGLSQCLLCGEVLGFLGSSSVFCKDCRKKVCTKCGIEASPGQKRPLWLCKICSEQREVWKRSGAWFYKGLPKYILPLKTPGRADDPHFRPLPTEPAEREPRSSETSRIYTWARGRVIGRKC

SEQ ID NO: 4553 - protein, 181 aa, Artificial Sequence
  Synthetic polypeptide
MADTIFGSGNDQWVCPNDRQLALRAKLQTGWSVHTYQTEKQRRKQHLSPAEVEAILQVIQRAERLDVLEQQRIGRLVERLETMRRNVMGNGLSQCLLCGEVLGFLGSSSVFCKDCRKVWKRSGAWFYKGLPKYILPLKTPGRADDPHFRPLPTEPAEREPRSSETSRIYTWARGRVIGRKC

SEQ ID NO: 4554 - protein, 266 aa, Artificial Sequence
  Synthetic polypeptide
MYTVGYSFSLISLFLALTLLLFLRKLHCTRNYIHMNLFASFILRTLAVLVKDVVFYNSYSKRPDNENGWMSYLSEMSTSCRSVQVLLHYFVGANYLWLLVEGLYLHTLLEPTVLPERRLWPRYLLLGWAFPVLFVVPWGFARAHLENTGCWTTNGNKKIWWIIRGPMMLCVTVNFFIFLKILKLLISKLKAHQMCFRDYKYRLAKSTLVLIPLLGVHEILFSFITDDQVEGFAKLIRLFIQLTLSSFHGFLVALQYGFANGEPISS

SEQ ID NO: 4555 - protein, 446 aa, Artificial Sequence
  Synthetic polypeptide
MKLGSSRAGPGRGSAGLLPGVHELPMGIPAPWGTSPLSFHRKCSLWAPGRPFLTLVLLVSIKQVTGSLLEETTRKWAQYKQACLRDLLKEPSGIFCNGTFDQYVCWPHSSPGNVSVPCPSYLPWWSEESSGRAYRHCLAQGTWQTIENATDIWQDDSECSENHSFKQNVDRYALLSTLQLMYTVGYSFSLISLFLALTLLLFLRKLHCTRNYIHMNLFASFILRTLAVLVKDVVFYNSYSKRPDNENGWMSYLSEMSTSCRSVQVLLHYFVGANYLWLLVEGLYLHTLLEPTVLPERRLWPRYLLLGWAFPVLFVVPWGFARAHLENTGCWTTNGNKKIWWIIRGPMMLCVTVNFFIFLKILKLLISKLKAHQMCFRDYKYRLAKSTLVLIPLLGVHEILFSFITDDQVEGFAKLIRLFIQLTLSSFHGFLVALQYGFANGEPISS

SEQ ID NO: 4556 - protein, 1621 aa, Artificial Sequence
  Synthetic polypeptide
MASEVVCGLIFRLLLPICLAVACAFRYNGLSFVYLIYLLLIPLFSEPTKTTMQGHTGRLLKSLCFISLSFLLLHIIFHITLVSLEAQHRIAPGYNCSTWEKTFRQIGFESLKGADAGNGIRVFVPDIGMFIASLTIWLLCRNIVQKPVTDEAAQSNPEFENEELAEGEKIDSEEALIYEEDFNGGDGVEGELEESTKLKMFRRLASVASKLKEFIGNMITTAGKVVVTILLGSSGMMLPSLTSSVYFFVFLGLCTWWSWCRTFDPLLFSCLCVLLAIFTAGHLIGLYLYQFQFFQEAVPPNDYYARLFGIKSVIQTDCSSTWKIIVNPDLSWYHHANPILLLVMYYTLATLIRIWLQEPLVQDEGTKEEDKALACSPIQITAGRRRSLWYATHYPTDERKLLSMTQDDYKPSDGLLVTVNGNPVDYHTIHPSLPMENGPGKADLYSTPQYRWEPSDESSEKREEEEEEKEEFEEERSREEKRSIKVHAMVSVFQFIMKQSYICALIAMMAWSITYHSWLTFVLLIWSCTLWMIRNRRKYAMISSPFMVVYGNLLLILQYIWSFELPEIKKVPGFLEKKEPGELASKILFTITFWLLLRQHLTEQKALQEKEALLSEVKIGSQENEEKDEELQDIQVEGEPKEEEEEEAKEEKQERKKVEQEEAEEEDEQDIMKVLGNLVVAMFIKYWIYVCGGMFFFVSFEGKIVMYKIIYMVLFLFCVALYQVHYEWWRKILKYFWMSVVIYTMLVLIFIYTYQFENFPGLWQNMTGLKKEKLEDLGLKQFTVAELFTRIFIPTSFLLVCILHLHYFHDRFLELTDLKSIPSKEDNTIYRLAHPEGSLPDLTMMHLTASLEKPEVRKLAEPGEEKLEGYSEKAQKGDLGKDSEESEEDGEEEEESEEEEETSDLRNKWHLVIDRLTVLFLKFLEYFHKLQVFMWWILELHIIKIVSSYIIWVSVKEVSLFNYVFLISWAFALPYAKLRRLASSVCTVWTCVIIVCKMLYQLQTIKPENFSVNCSLPNENQTNIPFNELNKSLLYSAPIDPTEWVGLRKSSPLLVYLRNNLLMLAILAFEVTIYRHQEYYRGRNNLTAPVSRTIFHDITRLHLDDGLINCAKYFINYFFYKFGLETCFLMSVNVIGQRMDFYAMIHACWLIAVLYRRRRKAIAEIWPKYCCFLACIITFQYFICIGIPPAPCRDYPWRFKGASFNDNIIKWLYFPDFIVRPNPVFLVYDFMLLLCASLQRQIFEDENKAAVRIMAGDNVEICMNLDAASFSQHNPVPDFIHCRSYLDMSKVIIFSYLFWFVLTIIFITGTTRISIFCMGYLVACFYFLLFGGDLLLKPIKSILRYWDWLIAYNVFVITMKNILSIGACGYIGTLVHNSCWLIQAFSLACTVKGYQMPAANSPCTLPSGEAGIIWDSICFAFLLLQRRVFMSYYFLHVVADIKASQILASRGAELFQATIVKAVKARIEEEKKSMDQLKRQMDRIKARQQKYKKGKERMLSLTQEPGEGQDMQKLSEEDDEREADKQKAKGKKKQWWRPWVDHASMVRSGDYYLFETDSEEEEEEELKKEDEEPPRRSAFQFVYQAWITDPKTALRQRHKEKKRSAREERKRRRKGSKEEKA

SEQ ID NO: 4557 - protein, 1646 aa, Artificial Sequence
  Synthetic polypeptide
MASEVVCGLIFRLLLPICLAVACAFRYNGLSFVYLIYLLLIPLFSEPTKTTMQGHTGRLLKSLCFISLSFLLLHIIFHITLVSLEAQHRIAPGYNCSTWEKTFRQIGFESLKGADAGNGIRVFVPDIGMFIASLTIWLLCRNIVQKPVTDEAAQSNPEFENEELAEGEKIDSEEALIYEEDFNGGDGVEGELEESTKLKMFRRLASVASKLKEFIGNMITTAGKVVVTILLGSSGMMLPSLTSSVYFFVFLGLCTWWSWCRTFDPLLFSCLCVLLAIFTAGHLIGLYLYQFQFFQEAVPPNDYYARLFGIKSVIQTDCSSTWKIIVNPDLSWYHHANPILLLVMYYTLATLIRIWLQEPLVQDEGTKEEDKALACSPIQITAGRRRSLWYATHYPTDERKLLSMTQDDYKPSDGLLVTVNGNPVDYHTIHPSLPMENGPGKADLYSTPQYRWEPSDESSEKREEEEEEKEEFEEERSREEKRSIKVHAMVSVFQFIMKQSYICALIAMMAWSITYHSWLTFVLLIWSCTLWMIRNRRKYAMISSPFMVVYGNLLLILQYIWSFELPEIKKVPGFLEKKEPGELASKILFTITFWLLLRQHLTEQKALQEKEALLSEVKIGSQENEEKDEELQDIQVEGEPKEEEEEEAKEEKQERKKVEQEEAEEEDEQDIMKVLGNLVVAMFIKYWIYVCGGMFFFVSFEGKIVMYKIIYMVLFLFCVALYQVHYEWWRKILKYFWMSVVIYTMLVLIFIYTYQFENFPGLWQNMTGLKKEKLEDLGLKQFTVAELFTRIFIPTSFLLVCILHLHYFHDRFLELTDLKSIPSKEDNTIYSHAKVNGRVYLIINSIKKKLPIHQNELAHPEGSLPDLTMMHLTASLEKPEVRKLAEPGEEKLEGYSEKAQKGDLGKDSEESEEDGEEEEESEEEEETSDLRNKWHLVIDRLTVLFLKFLEYFHKLQVFMWWILELHIIKIVSSYIIWVSVKEVSLFNYVFLISWAFALPYAKLRRLASSVCTVWTCVIIVCKMLYQLQTIKPENFSVNCSLPNENQTNIPFNELNKSLLYSAPIDPTEWVGLRKSSPLLVYLRNNLLMLAILAFEVTIYRHQEYYRGRNNLTAPVSRTIFHDITRLHLDDGLINCAKYFINYFFYKFGLETCFLMSVNVIGQRMDFYAMIHACWLIAVLYRRRRKAIAEIWPKYCCFLACIITFQYFICIGIPPAPCRDYPWRFKGASFNDNIIKWLYFPDFIVRPNPVFLVYDFMLLLCASLQRQIFEDENKAAVRIMAGDNVEICMNLDAASFSQHNPVPDFIHCRSYLDMSKVIIFSYLFWFVLTIIFITGTTRISIFCMGYLVACFYFLLFGGDLLLKPIKSILRYWDWLIAYNVFVITMKNILSIGACGYIGTLVHNSCWLIQAFSLACTVKGYQMPAANSPCTLPSGEAGIIWDSICFAFLLLQRRVFMSYYFLHVVADIKASQILASRGAELFQATIVKAVKARIEEEKKSMDQLKRQMDRIKARQQKYKKGKERMLSLTQEPGEGQDMQKLSEEDDEREADKQKAKGKKKQWWRPWVDHASMVRSGDYYLFETDSEEEEEEELKKEDEEPPRRSAFQFVYQAWITDPKTALRQRHKEKKRSAREERKRRRKGSKEEKA

SEQ ID NO: 4558 - protein, 74 aa, Artificial Sequence
  Synthetic polypeptide
MASEVVCGLIFRLLLPICLAVACAFRYNGLSFVYLIYLLLIPLFSEPTKTTMQARHGGSTCNPCTFGGQGRWIT

SEQ ID NO: 4559 - protein, 4 aa, Artificial Sequence
  Synthetic polypeptide
PWWT

SEQ ID NO: 4560 - protein, 111 aa, Artificial Sequence
  Synthetic polypeptide
MREIVHIQAGQCGNQIGTKFWEVISDEHGIDPAGGYVGDSALQLERINVYYNESSSQKYVPRAALVDLEPGTMDSVRSGPFGQLFRPDNFIFDWPVFQKLLRPSVGEGVWE

SEQ ID NO: 4561 - protein, 39 aa, Artificial Sequence
  Synthetic polypeptide
MDSVRSGPFGQLFRPDNFIFDWPVFQKLLRPSVGEGVWE

SEQ ID NO: 4562 - protein, 604 aa, Artificial Sequence
  Synthetic polypeptide
MAHRCLRLWGRGGCWPRGLQQLLVPGGVGPGEQPCLRTLYRFVTTQARASRNSLLTDIIAAYQRFCSRPPKGFEKYFPNGKNGKKASEPKEVMGEKKESKPAATTRSSGGGGGGGGKRGGKKDDSHWWSRFQKGDIPWDDKDFRMFFLWTALFWGGVMFYLLLKRSGREITWKDFVNNYLSKGVVDRLEVVNKRFVRVTFTPGKTPVDGQYVWFNIGSVDTFERNLETLQQELGIEGENRVPVVYIAESDGSFLLSMLPTVLIIAFLLYTIRRGPAGIGRTGRGMGGLFSVGETTAKVLKDEIDVKFKDVAGCEEAKLEIMEFVNFLKNPKQYQDLGAKIPKGAILTGPPGTGKTLLAKATAGEANVPFITVSGSEFLEMFVGVGPARVRDLFALARKNAPCILFIDEIDAVGRKRGRGNFGGQSEQENTLNQLLVEMDGFNTTTNVVILAGTNRPDILDPALLRPGRFDRQIFIGPPDIKGRASIFKVHLRPLKLDSTLEKDKLARKLASLTPGFSGADVANVCNEAALIAARHLSDSINQKHFEQAIERVIGGLEKKTQVLQPEEKKTVAYHEAGHAVAGWYLEHADPLLKENPRSKKTTKW

SEQ ID NO: 4563 - protein, 1 aa, Artificial Sequence
  Synthetic polypeptide
G

SEQ ID NO: 4564 - protein, 428 aa, Artificial Sequence
  Synthetic polypeptide
MAQAAGPAGGGEPRTEAVGGEGPREPGAAGGAAGGSRDALSLEEILRLYNQPINEEQAWAVCYQCCGSLRAAARRRQPRHRVRSAAQIRVWRDGAVTLAPAADDAGEPPPVAGKLGYSQCMETEVIESLGIIIYKALDYGLKENEERELSPPLEQLIDHMANTVEADGSNDEGYEAAEEGLGDEDEKRKISAIRSYRDVMKLCAAHLPTESDAPNHYQAVCRALFAETMELHTFLTKIKSAKENLKKIQEMEKSDESSTDLEELKNADWARFWVQVMRDLRNGVKLKKVQERQYNPLPIEYQLTPYEMLMDDIRCKRYTLRKVMVNGDIPPRLKKSAHEIILDFIRSRPPLNPVSARKLKPTPPRPRSLHERILEEIKAERKLRPVSPEEIRRSRLAQQPLSQPRLSSVAAALIVLLLPVLNSSTIPY

SEQ ID NO: 4565 - protein, 231 aa, Artificial Sequence
  Synthetic polypeptide
METELCAAHLPTESDAPNHYQAVCRALFAETMELHTFLTKIKSAKENLKKIQEMEKSDESSTDLEELKNADWARFWVQVMRDLRNGVKLKKVQERQYNPLPIEYQLTPYEMLMDDIRCKRYTLRKVMVNGDIPPRLKKSAHEIILDFIRSRPPLNPVSARKLKPTPPRPRSLHERILEEIKAERKLRPVSPEEIRRSRLAQQPLSQPRLSSVAAALIVLLLPVLNSSTIPY

SEQ ID NO: 4566 - protein, 269 aa, Artificial Sequence
  Synthetic polypeptide
MANTVEADGSNDEGYEAAEEGLGDEDEKRKISAIRSYRDVMKLCAAHLPTESDAPNHYQAVCRALFAETMELHTFLTKIKSAKENLKKIQEMEKSDESSTDLEELKNADWARFWVQVMRDLRNGVKLKKVQERQYNPLPIEYQLTPYEMLMDDIRCKRYTLRKVMVNGDIPPRLKKSAHEIILDFIRSRPPLNPVSARKLKPTPPRPRSLHERILEEIKAERKLRPVSPEEIRRSRLAQQPLSQPRLSSVAAALIVLLLPVLNSSTIPY

SEQ ID NO: 4567 - protein, 308 aa, Artificial Sequence
  Synthetic polypeptide
METEVIESLGIIIYKALDYGLKENEERELSPPLEQLIDHMANTVEADGSNDEGYEAAEEGLGDEDEKRKISAIRSYRDVMKLCAAHLPTESDAPNHYQAVCRALFAETMELHTFLTKIKSAKENLKKIQEMEKSDESSTDLEELKNADWARFWVQVMRDLRNGVKLKKVQERQYNPLPIEYQLTPYEMLMDDIRCKRYTLRKVMVNGDIPPRLKKSAHEIILDFIRSRPPLNPVSARKLKPTPPRPRSLHERILEEIKAERKLRPVSPEEIRRSRLAQQPLSQPRLSSVAAALIVLLLPVLNSSTIPY

SEQ ID NO: 4568 - protein, 141 aa, Artificial Sequence
  Synthetic polypeptide
MAQAAGPAGGGEPRTEAVGGEGPREPGAAGGAAGGSRDALSLEEILRLYNQPINEEQAWAVCYQCCGSLRAAARRRQPRHRVRSAAQIRVWRDGAVTLAPAADDAGEPPPVAGKLGYSQCMETETESQIMSELPFILLQRE

SEQ ID NO: 4569 - protein, 21 aa, Artificial Sequence
  Synthetic polypeptide
METETESQIMSELPFILLQRE

SEQ ID NO: 4570 - protein, 39 aa, Artificial Sequence
  Synthetic polypeptide
MSSGKTCCIAGKLGYSQCMETETESQIMSELPFILLQRE

SEQ ID NO: 4571 - protein, 241 aa, Artificial Sequence
  Synthetic polypeptide
MDLIISTLNMSKIGYFYTDCLVPMVGNNPYATTEGNSTELSINAEVYSLPSRKLVALQLRSIFIKYKSKPFCEKLLSWVKSSGCARVIVLSSSHSYQRNDLQLRSTPFRYLLTPSMQKSVQNKIKSLNWEEMEKSRCIPEIDDSEFCIRIPGGGITKTLYDESCSKEIQMAVLLKFVSEGDNIPDALGLVEYLNEWLQILKPLLLHSKTNSRVSRQPTEWEKFANYASDKGIISRIYKELK

SEQ ID NO: 4572 - protein, 272 aa, Artificial Sequence
  Synthetic polypeptide
MFVPCGESAPDLAGFTLLMPAVSVGNVGQLAMDLIISTLNMSKIGYFYTDCLVPMVGNNPYATTEGNSTELSINAEVYSLPSRKLVALQLRSIFIKYKSKPFCEKLLSWVKSSGCARVIVLSSSHSYQRNDLQLRSTPFRYLLTPSMQKSVQNKIKSLNWEEMEKSRCIPEIDDSEFCIRIPGGGITKTLYDESCSKEIQMAVLLKFVSEGDNIPDALGLVEYLNEWLQILKPLLLHSKTNSRVSRQPTEWEKFANYASDKGIISRIYKELK

SEQ ID NO: 4573 - protein, 899 aa, Artificial Sequence
  Synthetic polypeptide
MKRLLAAAGKGVRGPEPPNPFSERVYTEKDYGTIYFGDLGKIHTAASRGQVQKLEKMTVGKKPVNLNKRDMKKRTALHWACVNGHAEVVTFLVDRKCQLNVLDGEGRTPLMKALQCEREACANILIDAGADLNYVDVYGNTALHYAVYSENLLMVATLLSYGAVIEVQNKASLTPLLLAIQKRSKQTVEFLLTKNANANAFNESKCTALMLAICEGSSEIVGMLLQQNVDVFAEDIHGITAERYAAACGVNYIHQQLLEHIRKLPKNPQNTNPEGTSTGTPDEAAPLAERTPDTAESLLEKTPDEAARLVEGTSAKIQCLGKATSGKFEQSTEETPRKILRPTKETSEKFSWPAKERSRKITWEEKETSVKTECVAGVTPNKTEVLEKGTSNMIACPTKETSTKASTNVDVSSVEPIFSLFGTRTIENSQCTKVEEDFNLATKIISKSAAQNYTCLPDATYQKDIKTINHKIEDQMFPSESKREEDEEYSWDSGSLFESSAKTQVCIPESMYQKVMEINREVEELPEKPSAFKPAVEMQKTVPNKAFELKNEQTLRAAQMFPSESKQKDDEENSWDSESPCETVSQKDVYLPKATHQKEFDTLSGKLEESPVKDGLLKPTCGRKVSLPNKALELKDRETFKAESPDKDGLLKPTCGRKVSLPNKALELKDRETLKAESPDNDGLLKPTCGRKVSLPNKALELKDRETFKAAQMFPSESKQKDDEENSWDFESFLETLLQNDVCLPKATHQKEFDTLSGKLEESPDKDGLLKPTCGMKISLPNKALELKDRETFKAEDVSSVESTFSLFGKPTTENSQSTKVEEDFNLTTKEGATKTVTGQQERDIGIIERAPQDQTNKMPTSELGRKEDTKSTSDSEAGGSRGQEIETILANMVKSRLY

SEQ ID NO: 4574 - protein, 1366 aa, Artificial Sequence [sequence omitted]

SEQ ID NO: 4575 - protein, 111 aa, Artificial Sequence
  Synthetic polypeptide
PPALECRRCHVKCHRDHLDKKEDLICPCKVSYDVTSARDMLLLACSQDEQKKWVTHLVKKIPKNPPSGFVRASPRTLSTRSTANQSFRKVVKNTSGKTRIHETVTGSMQTG

SEQ ID NO: 4576 - protein, 245 aa, Artificial Sequence
  Synthetic polypeptide
MSNSRNNRVMVEGVGARVVRGPDWKWGKQDGGEGHVGTVRSFESPEEVVVVWDNGTAANYRCSGAYDLRILDSAPTGIKHDGTMCDTCRQQPIIGIRWKCAECTNYDLCTVCYHGDKHHLRHRFYRITTPGSERVLLESRRKSKKITARGIFAGARVVRGVDWQWEDQDGGNGRRGKVTEIQDWSASSPHSAAYVLWDNGAKNLYRVGFEGMLFGRLRHENHLNHEGRGAELSMSRDHAIVLQPR

SEQ ID NO: 4577 - protein, 310 aa, Artificial Sequence
  Synthetic polypeptide
MSNSRNNRVMVEGVGARVVRGPDWKWGKQDGGEGHVGTVRSFESPEEVVVVWDNGTAANYRCSGAYDLRILDSAPTGIKHDGTMCDTCRQQPIIGIRWKCAECTNYDLCTVCYHGDKHHLRHRFYRITTPGSERVLLESRRKSKKITARGIFAGARVVRGVDWQWEDQDGGNGRRGKVTEIQDWSASSPHSAAYVLWDNGAKNLYRVGFEGMSDLKCVQDAKGGSFYRDHCPVLGEQNGNRNPGGLQIGDLVNIDLDLEIVQSLQHGHGGWTDGMFETLTTTGTVCGIDEDHDIVVQYPSGNRKDQAIQI

SEQ ID NO: 4578 - protein, 84 aa, Artificial Sequence
  Synthetic polypeptide
MNISGSSCGSPNSADTSSDFKDLWTKLKECHDREVQGLQVKVTKLKQERILDAQRLEEFFTKNQQLREQQKVLHETIKVLEDRL

SEQ ID NO: 4579 - protein, 770 aa, Artificial Sequence
  Synthetic polypeptide
MNISGSSCGSPNSADTSSDFKDLWTKLKECHDREVQGLQVKVTKLKQERILDAQRLEEFFTKNQQLREQQKVLHETIKVLEDRLRAGLCDRCAVTEEHMRKKQQEFENIRQQNLKLITELMNERNTLQEENKKLSEQLQQKIENDQQHQAAELECEEDVIPDSPITAFSFSGVNRLRRKENPHVRYIEQTHTKLEHSVCANEMRKVSKSSTHPQHNPNENEILVADTYDQSQSPMAKAHGTSSYTPDKSSFNLATVVAETLGLGVQEESETQGPMSPLGDELYHCLEGNHKKQPFEESTRNTEDSLRFSDSTSKTPPQEELPTRVSSPVFGATSSIKSGLDLNTSLSPSLLQPGKKKHLKTLPFSNTCISRLEKTRSKSEDSALFTHHSLGSEVNKIIIQSSNKQILINKNISESLGEQNRTEYGKDSNTDKHLEPLKSLGGRTSKRKKTEEESEHEVSCPQASFDKENAFPFPMDNQFSMNGDCVMDKPLDLSDRFSAIQRQEKSQGSETSKNKFRQVTLYEALKTIPKGFSSSRKASDGNCTLPKDSPGEPCSQECIILQPLNKCSPDNKPSLQIKEENAVFKIPLRPRESLETENVLDDIKSAGSHEPIKIQTRSDHGGCELASVLQLNPCRTGKIKSLQNNQDVSFENIQWSIDPGADLSQYKMDVTVIDTKDGSQSKLGGETVDMDCTLVSETVLLKMKKQEQKGEKSSNEERKMNDSLEDMFDRTTHEEYESCLADSFSQAADEEEELSTATKKLHTRHDGTYL

SEQ ID NO: 4580 - protein, 775 aa, Artificial Sequence
  Synthetic polypeptide
MNISGSSCGSPNSADTSSDFKDLWTKLKECHDREVQGLQVKVTKLKQERILDAQRLEEFFTKNQQLREQQKVLHETIKVLEDRLRAGLCDRCAVTEEHMRKKQQEFENIRQQNLKLITELMNERNTLQEENKKLSEQLQQKIENDQQHQAAELECEEDVIPDSPITAFSFSGVNRLRRKENPHVRYIEQTHTKLEHSVCANEMRKVSKSSTHPQHNPNENEILVADTYDQSQSPMAKAHGTSSYTPDKSSFNLATVVAETLGLGVQEESETQGPMSPLGDELYHCLEGNHKKQPFEESTRNTEDSLRFSDSTSKTPPQEELPTRVSSPVFGATSSIKSGLDLNTSLSPSLLQPGKKKHLKTLPFSNTCISRLEKTRSKSEDSALFTHHSLGSEVNKIIIQSSNKQILINKNISESLGEQNRTEYGKDSNTDKHLEPLKSLGGRTSKRKKTEEESEHEVSCPQASFDKENAFPFPMDNQFSMNGDCVMDKPLDLSDRFSAIQRQEKSQGSETSKNKFRQVTLYEALKTIPKGFSSSRKASDGNCTLPKDSPGEPCSQECIILQPLNKCSPDNKPSLQIKEENAVFKIPLRPRESLETENVLDDIKSAGSHEPIKIQTRSDHGGCELASVLQLNPCRTGKIKSLQNNQDVSFENIQWSIDPGADLSQYKMDVTVIDTKDGSQSKLGGETVDMDCTLVSETVLLKMKKQEQKGEKSSMLFYIDEERKMNDSLEDMFDRTTHEEYESCLADSFSQAADEEEELSTATKKLHTRHDGTYL

SEQ ID NO: 4581 - protein, 218 aa, Artificial Sequence
  Synthetic polypeptide
PCSQECIILQPLNKCSPDNKPSLQIKEENAVFKIPLRPRESLETENVLDDIKSAGSHEPIKIQTRSDHGGCELASVLQLNPCRTGKIKSLQNNQDVSFENIQWSIDPGADLSQYKMDVTVIDTKDGSQSKLGGETVDMDCTLVSETVLLKMKKQEQKGEKSSNEERKMNDSLEDMFDRTTHEEYESCLADSFSQAADEEEELSTATKKLHTRHDGTYL

SEQ ID NO: 4582 - protein, 152 aa, Artificial Sequence
  Synthetic polypeptide
MGEEDYYLELCERPVQFEKANPVNCVFFDEANKQVFAVRSGGATGVVVKGPDDRNPISFRMDDKGEVKCIKFSLENKILAVQRTSKTVDFCNFIPDNSQLEYTQECKTKNANILGFCWTSSTEIVFITDQGIEFYQHCSQWQRHGIILNAHQ

SEQ ID NO: 4583 - protein, 22 aa, Artificial Sequence
  Synthetic polypeptide
MTARGLALGLLLLLLCPAQLHS

SEQ ID NO: 4584 - protein, 20 aa, Artificial Sequence
  Synthetic polypeptide
MTARGLALGLLLLLLCPAQL

SEQ ID NO: 4585 - protein, 1384 aa, Artificial Sequence
  Synthetic polypeptide
MAAAARPRGRALGPVLPPTPLLLLVLRVLPACGATARDPGAAAGLSLHPTYFNLAEAARIWATATCGERGPGEGRPQPELYCKLVGGPTAPGSGHTIQGQFCDYCNSEDPRKAHPVTNAIDGSERWWQSPPLSSGTQYNRVNLTLDLGQLFHVAYILIKFANSPRPDLWVLERSVDFGSTYSPWQYFAHSKVDCLKEFGREANMAVTRDDDVLCVTEYSRIVPLENGEVVVSLINGRPGAKNFTFSHTLREFTKATNIRLRFLRTNTLLGHLISKAQRDPTVTRRYYYSIKDISIGGQCVCNGHAEVCNINNPEKLFRCECQHHTCGETCDRCCTGYNQRRWRPAAWEQSHECEACNCHGHASNCYYDPDVERQQASLNTQGIYAGGGVCINCQHNTAGVNCEQCAKGYYRPYGVPVDAPDGCIPCSCDPEHADGCEQGSGRCHCKPNFHGDNCEKCAIGYYNFPFCLRIPIFPVSTPSSEDPVAGDIKGCDCNLEGVLPEICDAHGRCLCRPGVEGPRCDTCRSGFYSFPICQACWCSALGSYQMPCSSVTGQCECRPGVTGQRCDRCLSGAYDFPHCQGSSSACDPAGTINSNLGYCQCKLHVEGPTCSRCKLLYWNLDKENPSGCSECKCHKAGTVSGTGECRQGDGDCHCKSHVGGDSCDTCEDGYFALEKSNYFGCQGCQCDIGGALSSMCSGPSGVCQCREHVVGKVCQRPENNYYFPDLHHMKYEIEDGSTPNGRDLRFGFDPLAFPEFSWRGYAQMTSVQNDVRITLNVGKSSGSLFRVILRYVNPGTEAVSGHITIYPSWGAAQSKEIIFLPSKEPAFVTVPGNGFADPFSITPGIWVACIKAEGVLLDYLVLLPRDYYEASVLQLPVTEPCAYAGPPQENCLLYQHLPVTRFPCTLACEARHFLLDGEPRPVAVRQPTPAHPVMVDLSGREVELHLRLRIPQVGHYVVVVEYSTEAAQLFVVDVNVKSSGSVLAGQVNIYSCNYSVLCRSAVIDHMSRIAMYELLADADIQLKGHMARFLLHQVCIIPIEEFSAEYVRPQVHCIASYGRFVNQSATCVSLAHETPPTALILDVLSGRPFPHLPQQSSPSVDVLPGVTLKAPQNQVTLRGRVPHLGRYVFVIHFYQAAHPTFPAQVSVDGGWPRAGSFHASFCPHVLGCRDQVIAEGQIEFDISEPEVAATVKVPEGKSLVLVRVLVVPAENYDYQILHKKSMDKSLEFITNCGKNSFYLDPQTASRFCKNSARSLVAFYHKGALPCECHPTGATGPHCSPEGGQCPCQPNVIGRQCTRCATGHYGFPRCKPCSCGRRLCEEMTGQCRCPPRTVRPQCEVCETHSFSFHPMAGCEGCNCSRRGTIEAAMPECDRDSGQCRSSSVK

SEQ ID NO: 4586 - protein, 549 aa, Artificial Sequence
  Synthetic polypeptide
MSPTPPLFSLPEARTRFTKSTREALNNKNIKPLLSTFSQVPGSENEKKCTLDQAFRGILEEEIINHSSCENVLAIISLAIGGVTEGICTASTPFVLLGDVLDCLPLDQCDTIFTFVEKNVATWKSNTFYSAGKNYLLRMCNDLLRRLSKSQNTVFCGRIQLFLARLFPLSEKSGLNLQSQFNLENVTVFNTNEQESTLGQKHTEDREEGMDVEEGEMGDEEAPTTCSIPIDYNLYRKFWSLQDYFRNPVQCYEKISWKTFLKYSEEVLAVFKSYKLDDTQASRKKMEELKTGGEHVYFAKFLTSEKLMDLQLSDSNFRRHILLQYLILFQYLKGQVKFKSSNYVLTDEQSLWIEDTTKSVYQLLSENPPDGERFSKMVEHILNTEENWNSWKNEGCPSFVKERTSDTKPTRIIRKRTAPEDFLGKGPTKKILMGNEELTRLWNLCPDNMEACKSETREHMPTLEEFFEEAIEQADPENMVENEYKAVNNSNYGWRALRLLARRSPHFFQPTNQQFKSLPEYLENMVIKLAKELPPGVVARACSPSYSRG

SEQ ID NO: 4587 - protein, 6 aa, Artificial Sequence
  Synthetic polypeptide
FLRVIN

SEQ ID NO: 4588 - protein, 101 aa, Artificial Sequence
  Synthetic polypeptide
MNTEAEQQLLHHARNGNAEEVRQLLETMARNEVIADINCKGRSKSNLGWTPLHLACYFGHRQVVQDLLKAGAEVNVLNDMGDTPLHRAAFTGRKKLQERGL

SEQ ID NO: 4589 - protein, 439 aa, Artificial Sequence
  Synthetic polypeptide
MSVVHQLSAGWLLDHLSFINKINYQLHQHHEPCCRKKEFTTSVHFESLQMDSVSSSGVCAAFIASDSSTKPENDDGGNYEMFTRKFVFRPELFDVTKPYITPAVHKECQQSNEKEDLMNGVKKEISISIIGKKRKRCVVFNQGELDAMEYHTKIRELILDGSLQLIQEGLKSGFLYPLFEKQDKGSKPITLPLDACSLSELCEMAKHLPSLNEMEHQTLQLVEEDTSVTEQDLFLRVVENNSSFTKVITLMGQKYLLPPKSSFLLSDISCMQPLLNYRKTFDVIVIDPPWQNKSVKRSNRYSYLSPLQIQQIPIPKLAAPNCLLVTWVTNRQKHLRFIKEELYPSWSVEVVAEWHWVKITNSGEFVFPLDSPHKKPYEGLILGRVQEKTALPLRNADVNVLPIPDHKLIVSVPCTLHSHKPPLAAKQLTQNCGQRKKIF

SEQ ID NO: 4590 - protein, 614 aa, Artificial Sequence
  Synthetic polypeptide
MKRSSVSSGGAGRLSMQELRSQDVNKQGLYTPQTKEKPTFGKLSINKPTSERKVSLFGKRTSGHGSRNSQLGIFSSSEKIKDPRPLNDKAFIQQCIRQLCEFLTENGYAHNVSMKSLQAPSVKDFLKIFTFLYGFLCPSYELPDTKFEEEVPRIFKDLGYPFALSKSSMYTVGAPHTWPHIVAALVWLIDCIKIHTAMKESSPLFDDGQPWGEETEDGIMHNKLFLDYTIKCYESFMSGADSFDEMNAELQSKLKDLFNVDAFKLESLEAKNRALNEQIARLEQEREKEPNRLESLRKLKASLQGDVQKYQAYMSNLESHSAILDQKLNGLNEEIARVELECETIKQENTRLQNIIDNQKYSVADIERINHERNELQQTINKLTKDLEAEQQKLWNEELKYARGKEAIETQLAEYHKLARKLKLIPKGAENSKGYDFEIKFNPEAGANCLVKYRAQVYVPLKELLNETEEEINKALNKKMGLEDTLEQLNAMITESKRSVRTLKEEVQKLDDLYQQKIKEAEEEDEKCASELESLEKHKHLLESTVNQGLSEAMNELDAVQREYQLVVQTTTEERRKVGNNLQRLLEMVATHVGSVELQIKLLVLLFPSSHYYT

SEQ ID NO: 4591 - protein, 44 aa, Artificial Sequence
  Synthetic polypeptide
TTEERRKVGNNLQRLLEMVATHVGSVELQIKLLVLLFPSSHYYT

SEQ ID NO: 4592 - protein, 158 aa, Artificial Sequence
  Synthetic polypeptide
MAAADGGGPGGASVGTEEDGGGVGHRTVYLFDRREKESELGDRPLQVGERSDYAGFRACVCQTLGISPEEKFVITTTSRKEITCDNFDETVKDGVTLYLLQSVNQLLLTATKERIDFLPHYDTLVKSGMYEYYASEGQNPLHYKLLEARNHGWLTHAV

SEQ ID NO: 4593 - protein, 88 aa, Artificial Sequence
  Synthetic polypeptide
MSVLRRMMRVSNRSLLAFIFFFSLSSSCLYFIYVAPGIGLISRIYKELEFTRKKPHQKIGEGYEQTLLKRRYLCSQQTYEKMLIITGH

SEQ ID NO: 4594 - protein, 191 aa, Artificial Sequence
  Synthetic polypeptide
MGSVLSTDSGKSAPASATARALERRRDPELPVTSFDCAVCLEVLHQPVRTRCGHVFCRSCIATSLKNNKWTCPYCRAYLPSEGVPATDVAKRMKSEYKNCAECDTLVCLSEMRAHIRTCQKYIDKYGPLQELEETAARCVCPFCQRELYEDSLLDHCITHHRSERRPVDNNTKIHLSCCCPRPHFHPQVPQ

SEQ ID NO: 4595 - protein, 227 aa, Artificial Sequence
  Synthetic polypeptide
MGSVLSTDSGKSAPASATARALERRRDPELPVTSFDCAVCLEVLHQPVRTRCGHVFCRSCIATSLKNNKWTCPYCRAYLPSEGVPATDVAKRMKSEYKNCAECDTLVCLSEMRAHIRTCQKYIDKYGPLQELEETAARCVCPFCQRELYEDSLLDHCITHHRSERRPVFCPLCRLIPDENPSSFSGSLIRHLQVSHTLFYDDFIDNNTKIHLSCCCPRPHFHPQVPQ

SEQ ID NO: 4596 - protein, 102 aa, Artificial Sequence
  Synthetic polypeptide
MLCQLQRRMHTLWQEHFKLVVLFSQMRLANFQTDSQESIQKILAVQNWKKTALNFIWHQKIARRDKTILSKKNKTGGIMLLDFKLYYKATITKAAWYWYQNR

SEQ ID NO: 4597 - protein, 897 aa, Artificial Sequence
  Synthetic polypeptide
MTENKTVSSSSTRDDQTNIGLTCQEVKALREKAWSRTNEGNAMSQSLVLYGASKENSEGFHESKMTNTEGVNKGIYFSYPCRRHSCAVVNIPAPCVNKMISHIQDVESKIQEHLKRFETSFEEWSRTSSTKDLKEDWSVTTPVKEVKPGEKRDEKCPELKQEMETLLSEAIRLIKSLETDRADAEEALKQQRSRKNMINMKIDSWSVWKLQELPLAVQKEHEAYLSDVIELQWHLEDKANQLQHFEKQKTELEEANAKIQADIDYMNEHGPLLDSKQNQELQDLKNHYKKKMEVMDLHRKVNEELEEALEACENARLKAQQIKEEIDKDIYQDEKTIEAYKREIYQLNSLFDHYSSSVINVNTNIEEKEEEVTEAIRETKSSKNELHSLSKMLEDLRRVYDQLTWKQKSHENQYLEAVNDFYAAKKTWDIELSDVAKDFSAISLACTKLTEDNKKLEIDINKITVKTNESIRKKSKYESEIKYLTIMKLKNDKHLKNIYKEAYRIGTLFHLTKHKTDEMEDKIAEVRRKFKGREEFLKKLTQGEVAAGMVLQKKLYSIYEVQALERKELIKNRAICAMSLAELQEPLLQLEDEAERIRSLDKEHSVMLNNIIDQKDLIRRKVGKVKKKLRKKGKKTLDALIETESKRSAIFKDLEATKSKTMIFYAKINELNEELKAKEEEKKSFDQTLEILKNKFITMRFKREHAQTVFDHYMQEKKDCEERIFEEDQRFRVLLAVRQKTLQDTQKIIADSLEENLRLAQEYQQLQITFLKEKDNYFNIYDKQLSLDTSIRDKKQLCQLQRRMHTLWQEHFKLVVLFSQMRLANFQTDSQESIQKILAVQNWKKTALNFIWHQKIARRDKTILSKKNKTGGIMLLDFKLYYKATITKAAWYWYQNR

SEQ ID NO: 4598 - protein, 394 aa, Artificial Sequence
  Synthetic polypeptide
KKLEIDINKITVKTNESIRKKSKYESEIKYLTIMKLKNDKHLKNIYKEAYRIGTLFHLTKHKTDEMEDKIAEVRRKFKGREEFLKKLTQGEVAAGMVLQKKLYSIYEVQALERKELIKNRAICAMSLAELQEPLLQLEDEAERIRSLDKEHSVMLNNIIDQKDLIRRKVGKVKKKLRKKGKKTLDALIETESKRSAIFKDLEATKSKTMIFYAKINELNEELKAKEEEKKSFDQTLEILKNKFITMRFKREHAQTVFDHYMQEKKDCEERIFEEDQRFRVLLAVRQKTLQDTQLCQLQRRMHTLWQEHFKLVVLFSQMRLANFQTDSQESIQKILAVQNWKKTALNFIWHQKIARRDKTILSKKNKTGGIMLLDFKLYYKATITKAAWYWYQNR

SEQ ID NO: 4599 - protein, 859 aa, Artificial Sequence
  Synthetic polypeptide
MTENKTVSSSSTRDDQTNIGLTCQEVKALREKAWSRTNEGNAMSQSLVLYGASKENSEGFHESKMTNTEGVNKGIYFSYPCRRHSCAVVNIPAPCVNKMISHIQDVESKIQEHLKRFETSFEEWSRTSSTKDLKEDWSVTTPVKEVKPGEKRDEKCPELKQEMETLLSEAIRLIKSLETDRADAEEALKQQRSRKNMINMKIDSWSVWKLQELPLAVQKEHEAYLSDVIELQWHLEDKANQLQHFEKQKTELEEANAKIQADIDYMNEHGPLLDSKQNQELQDLKNHYKKKMEVMDLHRKVNEELEEALEACENARLKAQQIKEEIDKDIYQDEKTIEAYKREIYQLNSLFDHYSSSVINVNTNIEEKEEEVTEAIRETKSSKNELHSLSKMLEDLRRVYDQLTWKQKSHENQYLEAVNDFYAAKKTWDIELSDVAKDFSAISLACTKLTEDNKKLEIDINKITVKTNESIRKKSKYESEIKYLTIMKLKNDKHLKNIYKEAYRIGTLFHLTKHKTDEMEDKIAEVRRKFKGREEFLKKLTQGEVAAGMVLQKKLYSIYEVQALERKELIKNRAICAMSLAELQEPLLQLEDEAERIRSLDKEHSVSKRSAIFKDLEATKSKTMIFYAKINELNEELKAKEEEKKSFDQTLEILKNKFITMRFKREHAQTVFDHYMQEKKDCEERIFEEDQRFRVLLAVRQKTLQDTQKIIADSLEENLRLAQEYQQLQITFLKEKDNYFNIYDKQLSLDTSIRDKKQLCQLQRRMHTLWQEHFKLVVLFSQMRLANFQTDSQESIQKILAVQNWKKTALNFIWHQKIARRDKTILSKKNKTGGIMLLDFKLYYKATITKAAWYWYQNR

SEQ ID NO: 4600 - protein, 217 aa, Artificial Sequence
  Synthetic polypeptide
MTENKTVSSSSTRDDQTNIGLTCQEVKALREKAWSRTNEGNAMSQSLVLYGASKENSEGFHESKMTNTEGVNKGIYFSYPCRRHSCAVVNIPAPCVNKMISHIQDVESKIQEHLKRLCQLQRRMHTLWQEHFKLVVLFSQMRLANFQTDSQESIQKILAVQNWKKTALNFIWHQKIARRDKTILSKKNKTGGIMLLDFKLYYKATITKAAWYWYQNR

SEQ ID NO: 4601 - protein, 921 aa, Artificial Sequence
  Synthetic polypeptide
MTENKTVSSSSTRDDQTNIGLTCQEVKALREKAWSRTNEGNAMSQSLVLYGASKENSEGFHESKMTNTEGVNKGIYFSYPCRRHSCAVVNIPAPCVNKMISHIQDVESKIQEHLKRFETSFEEWSRTSSTKDLKEDWSVTTPVKEVKPGEKRDEKCPELKQEMETLLSEAIRLIKSLETDRADAEEALKQQRSRKNMINMKIDSWSVWKLQELPLAVQKEHEAYLSDVIELQWHLEDKANQLQHFEKQKTELEEANAKIQADIDYMNEHGPLLDSKQNQELQDLKNHYKKKMEVMDLHRKVNEELEEALEACENARLKAQQIKEEIDKDIYQDEKTIEAYKREIYQLNSLFDHYSSSVINVNTNIEEKEEEVTEAIRETKSSKNELHSLSKMLEDLRRVYDQLTWKQKSHENQYLEAVNDFYAAKKTWDIELSDVAKDFSAISLACTKLTEDNKKLEIDINKITVKTNESIRKKSKYESEIKYLTIMKLKNDKHLKNIYKEAYRIGTLFHLTKHKTDEMEDKIAEVRRKFKGREEFLKKLTQGEVAAGMVLQKKLYSIYEVQALERKELIKNRAICAMSLAELQEPLLQLEDEAERIRSLDKEHSVMLNNIIDQKDLIRRKVGKVKKKLRKKGKKTLDALIETESKRSAIFKDLEATKSKTMIFYAKINELNEELKAKEEEKKSFDQTLEILKNKFITMRFKREHAQTVFDHYMQEKKDCEERIFEEDQRFRVLLAVRQKTLQDTQKIIADSLEENLRLAQEYQQLQITFLKEKDNYFNIYDKQLSLDTSIRDKKQVAGFLPKKLPNSLPIISDELSNFQLCQLQRRMHTLWQEHFKLVVLFSQMRLANFQTDSQESIQKILAVQNWKKTALNFIWHQKIARRDKTILSKKNKTGGIMLLDFKLYYKATITKAAWYWYQNR

SEQ ID NO: 4602 - protein, 847 aa, Artificial Sequence
  Synthetic polypeptide
MTENKTVSSSSTRDDQTNIGLTCQEVKALREKAWSRTNEGNAMSQSLVLYGASKENSEGFHESKMTNTEGVNKGIYFSYPCRRHSCAVVNIPAPCVNKMISHIQDVESKIQEHLKRFETSFEEWSRTSSTKDLKEDWSVTTPVKEVKPGEKRDEKCPELKQEMETLLSEAIRLIKSLETDRADAEEALKQQRSRKNMINMKIDSWSVWKLQELPLAVQKEHEAYLSDVIELQWHLEDKANQLQHFEKQKTELEEANAKIQADIDYMNEHGPLLDSKQNQELQDLKNHYKKKMEVMDLHRKVNEELEEALEACENARLKAQQIKEEIDKDIYQDEKTIEAYKREIYQLNSLFDHYSSSVINVNTNIEEKEEEVTEAIRETKSSKNELHSLSKMLEDLRRVYDQLTWKQKSHENQYLEAVNDFYAAKKTWDIELSDVAKDFSAISLACTKLTEDNKKLEIDINKITVKTNESIRKKSKYESEIKYLTIMKLKNDKHLKNIYKEAYRIGTLFHLTKHKTDEMEDKIAEVRRKFKGREEFLKKLTQGEVAAGMVLQKKLYSIYEVQALERKELIKNRAICAMSLAELQEPLLQLEDEAERIRSLDKEHSVMLNNIIDQKDLIRRKVGKVKKKLRKKGKKTLDALIETESKRSAIFKDLEATKSKTMIFYAKINELNEELKAKEEEKKSFDQTLEILKNKFITMRFKREHAQTVFDHYMQEKKDCEERIFEEDQRFRVLLAVRQKTLQDTQLCQLQRRMHTLWQEHFKLVVLFSQMRLANFQTDSQESIQKILAVQNWKKTALNFIWHQKIARRDKTILSKKNKTGGIMLLDFKLYYKATITKAAWYWYQNR

SEQ ID NO: 4603 - protein, 194 aa, Artificial Sequence
  Synthetic polypeptide
MAVESGVISTLIPQDPPEQELILVKVEDNFSWDEKFKQNGSTQSCQELFRQQFRKFCYQETPGPREALSRLQELCYQWLMPELHTKEQILELLVLEQFLSILPEELQIWVQQHNPESGEEAVTLLEDLEREFDDPGQQVPASPQGPAVPWKDLTCLRASQESTDIHLQPLKTQLKSWKPCLSPKSDKDLNKLKR

SEQ ID NO: 4604 - protein, 373 aa, Artificial Sequence
  Synthetic polypeptide
MAVESGVISTLIPQDPPEQELILVKVEDNFSWDEKFKQNGSTQSCQELFRQQFRKFCYQETPGPREALSRLQELCYQWLMPELHTKEQILELLVLEQFLSILPEELQIWVQQHNPESGEEAVTLLEDLEREFDDPGQQVPASPQGPAVPWKDLTCLRASQESTDIHLQPLKTQLKSWKPCLSPKSDCENSETATKEGISEEKSQGLPQEPSFRGISEHESNLVWKQGSATGEKLRSPSQGGSFSQVIFTNKSLGKRDLYDEAERCLILTTDSIMCQKVPPEERPYRCDVCGHSFKQHSSLTQHQRIHTGEKPYKCNQCGKAFSLRSYLIIHQRIHSGEKAYECSECGKAFNQSSALIRHRKIHTDKDLNKLKR

SEQ ID NO: 4605 - protein, 160 aa, Artificial Sequence
  Synthetic polypeptide
MAAQIPIVATTSTPGIVRNSKKRPASPSHNGSSGGGYGASKKKKASASSFAQGISMEAMSENKMVPSEFSTGPVEKAAKPLPFKDPNFVHSGHGGAVAGKKNRTWKNLKQILASERALPWQLNDPNYFSIDAPPSFKPAKKYSDVSGLLNKSNDKNKTPG

SEQ ID NO: 4606 - protein, 196 aa, Artificial Sequence
  Synthetic polypeptide
MAAQIPIVATTSTPGIVRNSKKRPASPSHNGSSGGGYGASKKKKASASSFAQTCLSPSTMIVRPPQPRGTTCLLPSAMIVRPPQPRGNGISMEAMSENKMVPSEFSTGPVEKAAKPLPFKDPNFVHSGHGGAVAGKKNRTWKNLKQILASERALPWQLNDPNYFSIDAPPSFKPAKKYSDVSGLLNKSNDKNKTPG

SEQ ID NO: 4607 - protein, 105 aa, Artificial Sequence
  Synthetic polypeptide
MEAMSENKMVPSEFSTGPVEKAAKPLPFKDPNFVHSGHGGAVAGKKNRTWKNLKQILASERALPWQLNDPNYFSIDAPPSFKPAKKYSDVSGLLNKSNDKNKTPG

SEQ ID NO: 4608 - protein, 111 aa, Artificial Sequence
  Synthetic polypeptide
MAAQIPIVATTSTPGIVRNSKKRPASPSHNGSSGGGYGASKKKKASASSFAQTSVLMLLHPLSQLRSILMFQVCLTSQMTKTKHQAEIIGFYKQVCFRVCPGASVHITLYF

SEQ ID NO: 4609 - protein, 9 aa, Artificial Sequence
  Synthetic polypeptide
SFSLLPAAT

SEQ ID NO: 4610 - protein, 152 aa, Artificial Sequence
  Synthetic polypeptide
MAAQIPIVATTSTPGIVRNSKKRPASPSHNGSSGGGYGASKKKKASASSFAQGISMEAMSENKMVPSEFSTGPVEKAAKPLPFKDPNFVHSGHGGAVAGKKNRTWKNLKQILASERALPWQLNDPNYFSIDAPPSFKPAKKYSDVSGLLAAP

SEQ ID NO: 4611 - protein, 188 aa, Artificial Sequence
  Synthetic polypeptide
MAAQIPIVATTSTPGIVRNSKKRPASPSHNGSSGGGYGASKKKKASASSFAQTCLSPSTMIVRPPQPRGTTCLLPSAMIVRPPQPRGNGISMEAMSENKMVPSEFSTGPVEKAAKPLPFKDPNFVHSGHGGAVAGKKNRTWKNLKQILASERALPWQLNDPNYFSIDAPPSFKPAKKYSDVSGLLAAP

SEQ ID NO: 4612 - protein, 97 aa, Artificial Sequence
  Synthetic polypeptide
MEAMSENKMVPSEFSTGPVEKAAKPLPFKDPNFVHSGHGGAVAGKKNRTWKNLKQILASERALPWQLNDPNYFSIDAPPSFKPAKKYSDVSGLLAAP

SEQ ID NO: 4613 - protein, 84 aa, Artificial Sequence
  Synthetic polypeptide
MAAQIPIVATTSTPGIVRNSKKRPASPSHNGSSGGGYGASKKKKASASSFAQTSVLMLLHPLSQLRSILMFQVCLQLPREIVCT

SEQ ID NO: 4614 - protein, 9 aa, Artificial Sequence
  Synthetic polypeptide
SFSLLPAAT

SEQ ID NO: 4615 - protein, 43 aa, Artificial Sequence
  Synthetic polypeptide
MRQKHYLEAAARGLHDSCPGQARYLLWAYTSSHGQYASKSCWL

SEQ ID NO: 4616 - protein, 72 aa, Artificial Sequence
  Synthetic polypeptide
MVAPVLETSHVFCCPNRVRGVLNWSSGPRGLLAFGTSCSVVLYDPLKRVVVTNLNGHTARVNCIQWICKQDG

SEQ ID NO: 4617 - protein, 75 aa, Artificial Sequence
  Synthetic polypeptide
MAGAAAESGRELWTFAGSRDPSAPRLAYGYGPGSLRELRAREFSRLADVLASLSTKIVKFPEASPAMTPIQPVQL

SEQ ID NO: 4618 - protein, 138 aa, Artificial Sequence
  Synthetic polypeptide
MATLACRVQFLDDTDPFNSTNFPEPSRPPLFTFREDLALGTQLAGVHRLLQAPHKLDDCTLQLSHNGAYLDLEATLAEQRDELEGFQDDAGRGKKHSIILRTQLSVRVHACIEKLYNSSGRDLRRALFSLKQIFQGPG

SEQ ID NO: 4619 - protein, 114 aa, Artificial Sequence
  Synthetic polypeptide
MADVAGPSRPSAAAFWSRDFSDEEQSVVYVPGISAEGNVRSRHKLMSPKADVKLKTSRVTDASISMESLKGTGDSVDEQNSCRGEIKSASLKDLCLEDKRRIANLIKELARLKE

SEQ ID NO: 4620 - protein, 32 aa, Artificial Sequence
  Synthetic polypeptide
GRRGASRRVAVRERRRSSELTPGMGTCCSAPV

SEQ ID NO: 4621 - protein, 110 aa, Artificial Sequence
  Synthetic polypeptide
MPDNIIVFSFMFSCVVSDEEQSVVYVPGISAEGNVRSRHKLMSPKADVKLKTSRVTDASISMESLKGTGDSVDEQNSCRGEIKSASLKDLCLEDKRRIANLIKELARLKE

SEQ ID NO: 4622 - protein, 32 aa, Artificial Sequence; identical to SEQ ID NO: 4620
  Synthetic polypeptide

SEQ ID NO: 4623 - protein, 153 aa, Artificial Sequence
  Synthetic polypeptide
MNRVSEEKEVTEERLKAEQESFEKKIRQLEEQNELIIKEREALQLQYRECQELLSLYQKYLSEQQEKLTMSLSELGAARMQEQQTWNQHKCPSVIDWIKKMWHIYTMEYYAAIKKDEFMSFMGTWMKLETIILSKLSQGQKTKLRMFSLIGGN

SEQ ID NO: 4624 - protein, 261 aa, Artificial Sequence
  Synthetic polypeptide
MADVAGPSRPSAAAFWSRDFSDEEQSVVYVPGISAEGNVRSRHKLMSPKADVKLKTSRVTDASISMESLKGTGDSVDEQNSCRGEIKSASLKDLCLEDKRRIANLIKELARVSEEKEVTEERLKAEQESFEKKIRQLEEQNELIIKEREALQLQYRECQELLSLYQKYLSEQQEKLTMSLSELGAARMQEQQTWNQHKCPSVIDWIKKMWHIYTMEYYAAIKKDEFMSFMGTWMKLETIILSKLSQGQKTKLRMFSLIGGN

SEQ ID NO: 4625 - protein, 257 aa, Artificial Sequence
  Synthetic polypeptide
MPDNIIVFSFMFSCVVSDEEQSVVYVPGISAEGNVRSRHKLMSPKADVKLKTSRVTDASISMESLKGTGDSVDEQNSCRGEIKSASLKDLCLEDKRRIANLIKELARVSEEKEVTEERLKAEQESFEKKIRQLEEQNELIIKEREALQLQYRECQELLSLYQKYLSEQQEKLTMSLSELGAARMQEQQTWNQHKCPSVIDWIKKMWHIYTMEYYAAIKKDEFMSFMGTWMKLETIILSKLSQGQKTKLRMFSLIGGN

SEQ ID NO: 4626 - protein, 39 aa, Artificial Sequence
  Synthetic polypeptide
MNLIFHKDILFGIPANKEAEGDYVAVEAERDLKMLCSWL

SEQ ID NO: 4627 - protein, 40 aa, Artificial Sequence
  Synthetic polypeptide
MNLIFHKDILFGIPANKKEAEGDYVAVEAERDLKMLCSWL

SEQ ID NO: 4628 - protein, 179 aa, Artificial Sequence
  Synthetic polypeptide
MGEAEKFHYIYSCDLDINVQLKIGSLEGKREQKSYKAVLEDPMLKFSGLYQETCSDLYVTCQVFAEGKPLALPVRTSYKAFSTRWNWNEWLKLPVKYPDLPRNAQVALTIWDVYGPGKAVPVGGTTVSLFGKYGMFRQGMHDLKVWPNVEADGSEPTKTPGRTSSTLSEDQMSRLAKEH

SEQ ID NO: 4629 - protein, 116 aa, Artificial Sequence
  Synthetic polypeptide
MGEAEKFHYIYSCDLDINVQLKIWNEWLKLPVKYPDLPRNAQVALTIWDVYGPGKAVPVGGTTVSLFGKYGMFRQGMHDLKVWPNVEADGSEPTKTPGRTSSTLSEDQMSRLAKEH

SEQ ID NO: 4630 - protein, 21 aa, Artificial Sequence
  Synthetic polypeptide
GPVGSERQKRKLGREERTKEL

SEQ ID NO: 4631 - protein, 9 aa, Artificial Sequence
  Synthetic polypeptide
LRTISRDML

SEQ ID NO: 4632 - protein, 779 aa, Artificial Sequence
  Synthetic polypeptide
MGEAEKFHYIYSCDLDINVQLKIGSLEGKREQKSYKAVLEDPMLKFSGLYQETCSDLYVTCQVFAEGKPLALPVRTSYKAFSTRWNWNEWLKLPVKYPDLPRNAQVALTIWDVYGPGKAVPVGGTTVSLFGKYGMFRQGMHDLKVWPNVEADGSEPTKTPGRTSSTLSEDQMSRLAKLTKAHRQGHMVKVDWLDRLTFREIEMINESEKRSSNFMYLMVEFRCVKCDDKEYGIVYYEKDGDESSPILTSFELVKVPDPQMSMENLVESKHHKLARSLRSGPSDHDLKPNAATRDQLNIIVSYPPTKQLTYEEQDLVWKFRYYLTNQEKALTKFLKCVNWDLPQEAKQALELLGKWKPMDVEDSLELLSSHYTNPTVRRYAVARLRQADDEDLLMYLLQLVQALKYENFDDIKNGLEPTKKDSQSSVSENVSNSGINSAEIDSSQIITSPLPSVSSPPPASKTKEVPDGENLEQDLCTFLISRACKNSTLANYLYWYVIVECEDQDTQQRDPKTHEMYLNVMRRFSQALLKGDKSVRVMRSLLAAQQTFVDRLVHLMKAVQRESGNRKKKNERLQALLGDNEKMNLSDVELIPLPLEPQVKIRGIIPETATLFKSALMPAQLFFKTEDGGKYPVIFKHGDDLRQDQLILQIISLMDKLLRKENLDLKLTPYKVLATSTKHGFMQFIQSVPVAEVLDTEGSIQNFFRKYAPSENGPNGISAEVMDTYVKSCAGYCVITYILGVGDRHLDNLLLTKTGCKFHESRNLCPLGLPPCLWTLNTT

SEQ ID NO: 4633 - protein, 716 aa, Artificial Sequence
  Synthetic polypeptide
MGEAEKFHYIYSCDLDINVQLKIWNEWLKLPVKYPDLPRNAQVALTIWDVYGPGKAVPVGGTTVSLFGKYGMFRQGMHDLKVWPNVEADGSEPTKTPGRTSSTLSEDQMSRLAKLTKAHRQGHMVKVDWLDRLTFREIEMINESEKRSSNFMYLMVEFRCVKCDDKEYGIVYYEKDGDESSPILTSFELVKVPDPQMSMENLVESKHHKLARSLRSGPSDHDLKPNAATRDQLNIIVSYPPTKQLTYEEQDLVWKFRYYLTNQEKALTKFLKCVNWDLPQEAKQALELLGKWKPMDVEDSLELLSSHYTNPTVRRYAVARLRQADDEDLLMYLLQLVQALKYENFDDIKNGLEPTKKDSQSSVSENVSNSGINSAEIDSSQIITSPLPSVSSPPPASKTKEVPDGENLEQDLCTFLISRACKNSTLANYLYWYVIVECEDQDTQQRDPKTHEMYLNVMRRFSQALLKGDKSVRVMRSLLAAQQTFVDRLVHLMKAVQRESGNRKKKNERLQALLGDNEKMNLSDVELIPLPLEPQVKIRGIIPETATLFKSALMPAQLFFKTEDGGKYPVIFKHGDDLRQDQLILQIISLMDKLLRKENLDLKLTPYKVLATSTKHGFMQFIQSVPVAEVLDTEGSIQNFFRKYAPSENGPNGISAEVMDTYVKSCAGYCVITYILGVGDRHLDNLLLTKTGCKFHESRNLCPLGLPPCLWTLNTT

SEQ ID NO: 4634 - protein, 264 aa, Artificial Sequence
  Synthetic polypeptide
MYLNVMRRFSQALLKGDKSVRVMRSLLAAQQTFVDRLVHLMKAVQRESGNRKKKNERLQALLGDNEKMNLSDVELIPLPLEPQVKIRGIIPETATLFKSALMPAQLFFKTEDGGKYPVIFKHGDDLRQDQLILQIISLMDKLLRKENLDLKLTPYKVLATSTKHGFMQFIQSVPVAEVLDTEGSIQNFFRKYAPSENGPNGISAEVMDTYVKSCAGYCVITYILGVGDRHLDNLLLTKTGCKFHESRNLCPLGLPPCLWTLNTT

SEQ ID NO: 4635 - protein, 8 aa, Artificial Sequence
  Synthetic polypeptide
HCLEIMKR

SEQ ID NO: 4636 - protein, 126 aa, Artificial Sequence
  Synthetic polypeptide
MDKLLRKENLDLKLTPYKVLATSTKHGFMQFIQSVPVAEVLDTEGSIQNFFRKYAPSENGPNGISAEVMDTYVKSCAGYCVITYILGVGDRHLDNLLLTKTGCKFHESRNLCPLGLPPCLWTLNTT

SEQ ID NO: 4637 - protein, 86 aa, Artificial Sequence
  Synthetic polypeptide
MTRSLFKGNFWSADILSTIGYDNIIQHLNNGRKNCKEFEDFLKERAAIEERYGKDLLNLSRKKPCGQSEINHQMRMQHGQYLDCSL

SEQ ID NO: 4638 - protein, 871 aa, Artificial Sequence
  Synthetic polypeptide
MNNEITYYFPCQRWLAVEEDDGQLSRELLPVDESYVLPQSEEGRGGGDNNPLDNLALEQKDKSTTFSVTIKTGVKKNAGTDANVFITLFGTQDDTGMTLLKSSKTNSDKFERDSIEIFTVETLDLGDLWKVRLGHDNTGKAPGWFVDWVEVDAPSLGKCMTFPCGRWLAKNEDDGSIIRDLFHAELQTRLYTPFVPYEITLYTSDVFAAGTDANIFIIIYGCDAVCTQQKYLCTNKREQKQFFERKSASRFIVELEDVGEIIEKIRIGHNNTGMNPGWHCSHVDIRRLLPDKDGAETLTFPCDRWLATSEDDKKTIRELVPYDIFTEKYMKDGSLRQVYKEVEEPLDIVLYSVQIFTGNIPGAGTDAKVYITIYGDLGDTGERYLGKSENRTNKFERGTADTFIIEAADLGVIYKIKLRHDNSKWCADWYVEKVEIWNDTNEDEFLFLCGRWLSLKKEDGRLERLFYEKEYTGDRSSNCSSPADFWEIALSSKMADVDISTVTGPMADYVQEGPIIPYYVSVTTGKHKDAATDSRAFIFLIGEDDERSKRIWLDYPRGKRGFSRGSVEEFYVAGLDVGIIKKIELGHDGASPESCWLVEELCLAVPTQGTKYMLNCNCWLAKDRGDGITSRVFDLLDAMVVNIGVKVLYEMTVWTGDVVGGGTDSNIFMTLYGINGSTEEMQLDKKKARFEREQNDTFIMEILDIAPFTKMRIRIDGLGSRPEWFLERILLKNMNTGDLTMFYYGDWLSQRKGKKTLVCEMCAVIDEEEMMEWTSYTVAVKTSDILGAGTDANVFIIIFGENGDSGTLALKQSANWNKFERNNTDTFNFPDMLSLGHLCKLRVWHDNKDERTWKDAETRACEDGGRDWSWR

SEQ ID NO: 4639 - protein, 221 aa, Artificial Sequence
  Synthetic polypeptide
MTVWTGDVVGGGTDSNIFMTLYGINGSTEEMQLDKKKARFEREQNDTFIMEILDIAPFTKMRIRIDGLGSRPEWFLERILLKNMNTGDLTMFYYGDWLSQRKGKKTLVCEMCAVIDEEEMMEWTSYTVAVKTSDILGAGTDANVFIIIFGENGDSGTLALKQSANWNKFERNNTDTFNFPDMLSLGHLCKLRVWHDNKDERTWKDAETRACEDGGRDWSWR

SEQ ID NO: 4640 - protein, 775 aa, Artificial Sequence
  Synthetic polypeptide
MTLLKSSKTNSDKFERDSIEIFTVETLDLGDLWKVRLGHDNTGKAPGWFVDWVEVDAPSLGKCMTFPCGRWLAKNEDDGSIIRDLFHAELQTRLYTPFVPYEITLYTSDVFAAGTDANIFIIIYGCDAVCTQQKYLCTNKREQKQFFERKSASRFIVELEDVGEIIEKIRIGHNNTGMNPGWHCSHVDIRRLLPDKDGAETLTFPCDRWLATSEDDKKTIRELVPYDIFTEKYMKDGSLRQVYKEVEEPLDIVLYSVQIFTGNIPGAGTDAKVYITIYGDLGDTGERYLGKSENRTNKFERGTADTFIIEAADLGVIYKIKLRHDNSKWCADWYVEKVEIWNDTNEDEFLFLCGRWLSLKKEDGRLERLFYEKEYTGDRSSNCSSPADFWEIALSSKMADVDISTVTGPMADYVQEGPIIPYYVSVTTGKHKDAATDSRAFIFLIGEDDERSKRIWLDYPRGKRGFSRGSVEEFYVAGLDVGIIKKIELGHDGASPESCWLVEELCLAVPTQGTKYMLNCNCWLAKDRGDGITSRVFDLLDAMVVNIGVKVLYEMTVWTGDVVGGGTDSNIFMTLYGINGSTEEMQLDKKKARFEREQNDTFIMEILDIAPFTKMRIRIDGLGSRPEWFLERILLKNMNTGDLTMFYYGDWLSQRKGKKTLVCEMCAVIDEEEMMEWTSYTVAVKTSDILGAGTDANVFIIIFGENGDSGTLALKQSANWNKFERNNTDTFNFPDMLSLGHLCKLRVWHDNKDERTWKDAETRACEDGGRDWSWR

SEQ ID NO: 4641 - protein, 1704 aa, Artificial Sequence
  Synthetic polypeptide
MMQLTLNTLFPVVSTPAITYIVTVFTGDVRGAGTKSKIYLVMYGARGNKNSGKIFLEGGVFDRGRTDIFHIELAVLLSPLSRVSVGHGNVGVNRGWFCEKVVILCPFTGIQQTFPCSNWLDEKKADGLIERQLYEMVSLRKKRLKKFPWSLWVWTTDLKKAGTNSPIFIQIYGQKGRTDEILLNPNNKWFKPGIIEKFRIELPDLGRFYKIRVWHDKRSSGSGWHLERMTLMNTLNKDKYNFNCNRWLDANEDDNEIVREMTAEGPTVRRIMGMARYHVTVCTGELEGAGTDANVYLCLFGDVGDTGERLLYNCRNNTDLFEKGNADEFTIESVTMRNVRRVRIRHDGKGSGSGWYLDRVLVREEGQPESDNVEFPCLRWLDKDKDDGQLVRELLPSDSSATLKNFRYHISLKTGDVSGASTDSRVYIKLYGDKSDTIKQVLLVSDNNLKDYFERGRVDEFTLETLNIGNINRLVIGHDSTGMHASWFLGSVQIRVPRQGKQYTFPANRWLDKNQADGRLEVELYPSEVVEIQKLVHYEVEIWTGDVGGAGTSARVYMQIYGEKGKTEVLFLSSRSKVFERASKDTFQLEAADVGEVYKLRLGHTGEGFGPSWFVDTVWLRHLVVREVDLTPEEEARKKKEKDKLRQLLKKERLKAKLQRKKKKRKGSDEEDEGEEEESSSSEESSSEEEEMEEEEEEEEFGPGMQEVIEQHKFEAHRWLARGKEDNELVVELVPAGKPGPERNTYEVQVVTGNVPKAGTDANVYLTIYGEEYGDTGERPLKKSDKSNKFEQGQTDTFTIYAIDLGALTKIRIRHDNTGNRAGWFLDRIDITDMNNEITYYFPCQRWLAVEEDDGQLSRELLPVDESYVLPQSEEGRGGGDNNPLDNLALEQKDKSTTFSVTIKTGVKKNAGTDANVFITLFGTQDDTGMTLLKSSKTNSDKFERDSIEIFTVETLDLGDLWKVRLGHDNTGKAPGWFVDWVEVDAPSLGKCMTFPCGRWLAKNEDDGSIIRDLFHAELQTRLYTPFVPYEITLYTSDVFAAGTDANIFIIIYGCDAVCTQQKYLCTNKREQKQFFERKSASRFIVELEDVGEIIEKIRIGHNNTGMNPGWHCSHVDIRRLLPDKDGAETLTFPCDRWLATSEDDKKTIRELVPYDIFTEKYMKDGSLRQVYKEVEEPLDIVLYSVQIFTGNIPGAGTDAKVYITIYGDLGDTGERYLGKSENRTNKFERGTADTFIIEAADLGVIYKIKLRHDNSKWCADWYVEKVEIWNDTNEDEFLFLCGRWLSLKKEDGRLERLFYEKEYTGDRSSNCSSPADFWEIALSSKMADVDISTVTGPMADYVQEGPIIPYYVSVTTGKHKDAATDSRAFIFLIGEDDERSKRIWLDYPRGKRGFSRGSVEEFYVAGLDVGIIKKIELGHDGASPESCWLVEELCLAVPTQGTKYMLNCNCWLAKDRGDGITSRVFDLLDAMVVNIGVKVLYEMTVWTGDVVGGGTDSNIFMTLYGINGSTEEMQLDKKKARFEREQNDTFIMEILDIAPFTKMRIRIDGLGSRPEWFLERILLKNMNTGDLTMFYYGDWLSQRKGKKTLVCEMCAVIDEEEMMEWTSYTVAVKTSDILGAGTDANVFIIIFGENGDSGTLALKQSANWNKFERNNTDTFNFPDMLSLGHLCKLRVWHDNKDERTWKDAETRACEDGGRDWSWR

SEQ ID NO: 4642 - protein, 853 aa, Artificial Sequence
  Synthetic polypeptide
MLRHLTDTFTIYAIDLGALTKIRIRHDNTGNRAGWFLDRIDITDMNNEITYYFPCQRWLAVEEDDGQLSRELLPVDESYVLPQSEEGRGGGDNNPLDNLALEQKDKSTTFSVTIKTGVKKNAGTDANVFITLFGTQDDTGMTLLKSSKTNSDKFERDSIEIFTVETLDLGDLWKVRLGHDNTGKAPGWFVDWVEVDAPSLGKCMTFPCGRWLAKNEDDGSIIRDLFHAELQTRLYTPFVPYEITLYTSDVFAAGTDANIFIIIYGCDAVCTQQKYLCTNKREQKQFFERKSASRFIVELEDVGEIIEKIRIGHNNTGMNPGWHCSHVDIRRLLPDKDGAETLTFPCDRWLATSEDDKKTIRELVPYDIFTEKYMKDGSLRQVYKEVEEPLDIVLYSVQIFTGNIPGAGTDAKVYITIYGDLGDTGERYLGKSENRTNKFERGTADTFIIEAADLGVIYKIKLRHDNSKWCADWYVEKVEIWNDTNEDEFLFLCGRWLSLKKEDGRLERLFYEKEYTGDRSSNCSSPADFWEIALSSKMADVDISTVTGPMADYVQEGPIIPYYVSVTTGKHKDAATDSRAFIFLIGEDDERSKRIWLDYPRGKRGFSRGSVEEFYVAGLDVGIIKKIEVLYEMTVWTGDVVGGGTDSNIFMTLYGINGSTEEMQLDKKKARFEREQNDTFIMEILDIAPFTKMRIRIDGLGSRPEWFLERILLKNMNTGDLTMFYYGDWLSQRKGKKTLVCEMCAVIDEEEMMEWTSYTVAVKTSDILGAGTDANVFIIIFGENGDSGTLALKQSANWNKFERNNTDTFNFPDMLSLGHLCKLRVWHDNKDERTWKDAETRACEDGGRDWSWR

SEQ ID NO: 4643 - protein, 809 aa, Artificial Sequence
  Synthetic polypeptide
MNNEITYYFPCQRWLAVEEDDGQLSRELLPVDESYVLPQSEEGRGGGDNNPLDNLALEQKDKSTTFSVTIKTGVKKNAGTDANVFITLFGTQDDTGMTLLKSSKTNSDKFERDSIEIFTVETLDLGDLWKVRLGHDNTGKAPGWFVDWVEVDAPSLGKCMTFPCGRWLAKNEDDGSIIRDLFHAELQTRLYTPFVPYEITLYTSDVFAAGTDANIFIIIYGCDAVCTQQKYLCTNKREQKQFFERKSASRFIVELEDVGEIIEKIRIGHNNTGMNPGWHCSHVDIRRLLPDKDGAETLTFPCDRWLATSEDDKKTIRELVPYDIFTEKYMKDGSLRQVYKEVEEPLDIVLYSVQIFTGNIPGAGTDAKVYITIYGDLGDTGERYLGKSENRTNKFERGTADTFIIEAADLGVIYKIKLRHDNSKWCADWYVEKVEIWNDTNEDEFLFLCGRWLSLKKEDGRLERLFYEKEYTGDRSSNCSSPADFWEIALSSKMADVDISTVTGPMADYVQEGPIIPYYVSVTTGKHKDAATDSRAFIFLIGEDDERSKRIWLDYPRGKRGFSRGSVEEFYVAGLDVGIIKKIEVLYEMTVWTGDVVGGGTDSNIFMTLYGINGSTEEMQLDKKKARFEREQNDTFIMEILDIAPFTKMRIRIDGLGSRPEWFLERILLKNMNTGDLTMFYYGDWLSQRKGKKTLVCEMCAVIDEEEMMEWTSYTVAVKTSDILGAGTDANVFIIIFGENGDSGTLALKQSANWNKFERNNTDTFNFPDMLSLGHLCKLRVWHDNKDERTWKDAETRACEDGGRDWSWR

SEQ ID NO: 4644 - protein, 1920 aa, Artificial Sequence
  Synthetic polypeptide
MMPQKKRRRKKDIDFLALYEAELLNYASEDDEGELEHEYYKARVYEVVTATGDVRGAGTDANVFITLFGENGLSPKLQLTSKSKSAFEKGNVDVFRVRTNNVGLIYKVRIEHDNTGLNASWYLDHVIVTDMKRPHLRYYFNCNNWLSKVEGDRQWCRDLLASFNPMDMPRGNKYEVKVYTGDVIGAGTDADVFINIFGEYGDTGERRLENEKDNFEKGAEDRFILDAPDLGQLMKINVGHNNKGGSAGWFLSQIVIEDIGNKRKYDFPLNRWLALDEDDGKIQRDILVGGAETTAITYIVTVFTGDVRGAGTKSKIYLVMYGARGNKNSGKIFLEGGVFDRGRTDIFHIELAVLLSPLSRVSVGHGNVGVNRGWFCEKVVILCPFTGIQQTFPCSNWLDEKKADGLIERQLYEMVSLRKKRLKKFPWSLWVWTTDLKKAGTNSPIFIQIYGQKGRTDEILLNPNNKWFKPGIIEKFRIELPDLGRFYKIRVWHDKRSSGSGWHLERMTLMNTLNKDKYNFNCNRWLDANEDDNEIVREMTAEGPTVRRIMGMARYHVTVCTGELEGAGTDANVYLCLFGDVGDTGERLLYNCRNNTDLFEKGNADEFTIESVTMRNVRRVRIRHDGKGSGSGWYLDRVLVREEGQPESDNVEFPCLRWLDKDKDDGQLVRELLPSDSSATLKNFRYHISLKTGDVSGASTDSRVYIKLYGDKSDTIKQVLLVSDNNLKDYFERGRVDEFTLETLNIGNINRLVIGHDSTGMHASWFLGSVQIRVPRQGKQYTFPANRWLDKNQADGRLEVELYPSEVVEIQKLVHYEVEIWTGDVGGAGTSARVYMQIYGEKGKTEVLFLSSRSKVFERASKDTFQLEAADVGEVYKLRLGHTGEGFGPSWFVDTVWLRHLVVREVDLTPEEEARKKKEKDKLRQLLKKERLKAKLQRKKKKRKGSDEEDEGEEEESSSSEESSSEEEEMEEEEEEEEFGPGMQEVIEQHKFEAHRWLARGKEDNELVVELVPAGKPGPERNTYEVQVVTGNVPKAGTDANVYLTIYGEEYGDTGERPLKKSDKSNKFEQGQTDTFTIYAIDLGALTKIRIRHDNTGNRAGWFLDRIDITDMNNEITYYFPCQRWLAVEEDDGQLSRELLPVDESYVLPQSEEGRGGGDNNPLDNLALEQKDKSTTFSVTIKTGVKKNAGTDANVFITLFGTQDDTGMTLLKSSKTNSDKFERDSIEIFTVETLDLGDLWKVRLGHDNTGKAPGWFVDWVEVDAPSLGKCMTFPCGRWLAKNEDDGSIIRDLFHAELQTRLYTPFVPYEITLYTSDVFAAGTDANIFIIIYGCDAVCTQQKYLCTNKREQKQFFERKSASRFIVELEDVGEIIEKIRIGHNNTGMNPGWHCSHVDIRRLLPDKDGAETLTFPCDRWLATSEDDKKTIRELVPYDIFTEKYMKDGSLRQVYKEVEEPLDIVLYSVQIFTGNIPGAGTDAKVYITIYGDLGDTGERYLGKSENRTNKFERGTADTFIIEAADLGVIYKIKLRHDNSKWCADWYVEKVEIWNDTNEDEFLFLCGRWLSLKKEDGRLERLFYEKEYTGDRSSNCSSPADFWEIALSSKMADVDISTVTGPMADYVQEGPIIPYYVSVTTGKHKDAATDSRAFIFLIGEDDERSKRIWLDYPRGKRGFSRGSVEEFYVAGLDVGIIKKIEVLYEMTVWTGDVVGGGTDSNIFMTLYGINGSTEEMQLDKKKARFEREQNDTFIMEILDIAPFTKMRIRIDGLGSRPEWFLERILLKNMNTGDLTMFYYGDWLSQRKGKKTLVCEMCAVIDEEEMMEWTSYTVAVKTSDILGAGTDANVFIIIFGENGDSGTLALKQSANWNKFERNNTDTFNFPDMLSLGHLCKLRVWHDNKDERTWKDAETRACEDGGRDWSWR

SEQ ID NO: 4645 - protein, 1776 aa, Artificial Sequence
  Synthetic polypeptide
MMPQKKRRRKKDIDFLALYEAELLNYASEDDEGELEHEYYKARVYEVVTATGDVRGAGTDANVFITLFGENGLSPKLQLTSKSKSAFEKGNVDVFRVRTNNVGLIYKVRIEHDNTGLNASWYLDHVIVTDMKRPHLRYYFNCNNWLSKVEGDRQWCRDLLASFNPMDMPRGNKYEVKVYTGDVIGAGTDADVFINIFGEYGDTGERRLENEKDNFEKGAEDRFILDAPDLGQLMKINVGHNNKGGSAGWFLSQIVIEDIGNKRKYDFPLNRWLALDEDDGKIQRDILVGGAETTAITYIVTVFTGDVRGAGTKSKIYLVMYGARGNKNSGKIFLEGGVFDRGRTDIFHIELAVLLSPLSRVSVGHGNVGVNRGWFCEKVVILCPFTGIQQTFPCSNWLDEKKADGLIERQLYEMVSLRKKRLKKFPWSLWVWTTDLKKAGTNSPIFIQIYGQKGRTDEILLNPNNKWFKPGIIEKFRIELPDLGRFYKIRVWHDKRSSGSGWHLERMTLMNTLNKDKYNFNCNRWLDANEDDNEIVREMTAEGPTVRRIMGMARYHVTVCTGELEGAGTDANVYLCLFGDVGDTGERLLYNCRNNTDLFEKGNADEFTIESVTMRNVRRVRIRHDGKGSGSGWYLDRVLVREEGQPESDNVEFPCLRWLDKDKDDGQLVRELLPSDSSATLKNFRYHISLKTGDVSGASTDSRVYIKLYGDKSDTIKQVLLVSDNNLKDYFERGRVDEFTLETLNIGNINRLVIGHDSTGMHASWFLGSVQIRVPRQGKQYTFPANRWLDKNQADGRLEVELYPSEVVEIQKLVHYEVEIWTGDVGGAGTSARVYMQIYGEKGKTEVLFLSSRSKVFERASKDTFQTDTFTIYAIDLGALTKIRIRHDNTGNRAGWFLDRIDITDMNNEITYYFPCQRWLAVEEDDGQLSRELLPVDESYVLPQSEEGRGGGDNNPLDNLALEQKDKSTTFSVTIKTGVKKNAGTDANVFITLFGTQDDTGMTLLKSSKTNSDKFERDSIEIFTVETLDLGDLWKVRLGHDNTGKAPGWFVDWVEVDAPSLGKCMTFPCGRWLAKNEDDGSIIRDLFHAELQTRLYTPFVPYEITLYTSDVFAAGTDANIFIIIYGCDAVCTQQKYLCTNKREQKQFFERKSASRFIVELEDVGEIIEKIRIGHNNTGMNPGWHCSHVDIRRLLPDKDGAETLTFPCDRWLATSEDDKKTIRELVPYDIFTEKYMKDGSLRQVYKEVEEPLDIVLYSVQIFTGNIPGAGTDAKVYITIYGDLGDTGERYLGKSENRTNKFERGTADTFIIEAADLGVIYKIKLRHDNSKWCADWYVEKVEIWNDTNEDEFLFLCGRWLSLKKEDGRLERLFYEKEYTGDRSSNCSSPADFWEIALSSKMADVDISTVTGPMADYVQEGPIIPYYVSVTTGKHKDAATDSRAFIFLIGEDDERSKRIWLDYPRGKRGFSRGSVEEFYVAGLDVGIIKKIELGHDGASPESCWLVEELCLAVPTQGTKYMLNCNCWLAKDRGDGITSRVFDLLDAMVVNIGVKVLYEMTVWTGDVVGGGTDSNIFMTLYGINGSTEEMQLDKKKARFEREQNDTFIMEILDIAPFTKMRIRIDGLGSRPEWFLERILLKNMNTGDLTMFYYGDWLSQRKGKKTLVCEMCAVIDEEEMMEWTSYTVAVKTSDILGAGTDANVFIIIFGENGDSGTLALKQSANWNKFERNNTDTFNFPDMLSLGHLCKLRVWHDNKDERTWKDAETRACEDGGRDWSWR

SEQ ID NO: 4646 - protein, 416 aa, Artificial Sequence
  Synthetic polypeptide
MMQLTLNTLFPVVSTPAITYIVTVFTGDVRGAGTKSKIYLVMYGARGNKNSGKIFLEGGVFDRGRTDIFHIELAVLLSPLSRVSVGHGNVGVNRGWFCEKVVILCPFTGIQQTFPCSNWLDEKKADGLIERQLYEMVSLRKKRLKKFPWSLWVWTTDLKKAGTNSPIFIQIYGQKGRTDEILLNPNNKWFKPGIIEKFRIELPDLGRFYKIRVWHDKRSSGSGWHLERMTLMNTLNKDKYNFNCNRWLDANEDDNEIVREMTAEGPTVRRIMGMARYHVTVCTGELEGAGTDANVYLCLFGDVGDTGERLLYNCRNNTDLFEKGNADEFTIESVTMRNVRRVRIRHDGKGSGSGWYLDRVLVREEGQPESDNVEFPCLRWLDKDKDDGQLVRELLPSDSSATLKMWPRETKRLNTP

SEQ ID NO: 4647 - protein, 694 aa, Artificial Sequence
  Synthetic polypeptide
MMPQKKRRRKKDIDFLALYEAELLNYASEDDEGELEHEYYKARVYEVVTATGDVRGAGTDANVFITLFGENGLSPKLQLTSKSKSAFEKGNVDVFRVRTNNVGLIYKVRIEHDNTGLNASWYLDHVIVTDMKRPHLRYYFNCNNWLSKVEGDRQWCRDLLASFNPMDMPRGNKYEVKVYTGDVIGAGTDADVFINIFGEYGDTGERRLENEKDNFEKGAEDRFILDAPDLGQLMKINVGHNNKGGSAGWFLSQIVIEDIGNKRKYDFPLNRWLALDEDDGKIQRDILVGGAETTAITYIVTVFTGDVRGAGTKSKIYLVMYGARGNKNSGKIFLEGGVFDRGRTDIFHIELAVLLSPLSRVSVGHGNVGVNRGWFCEKVVILCPFTGIQQTFPCSNWLDEKKADGLIERQLYEMVSLRKKRLKKFPWSLWVWTTDLKKAGTNSPIFIQIYGQKGRTDEILLNPNNKWFKPGIIEKFRIELPDLGRFYKIRVWHDKRSSGSGWHLERMTLMNTLNKDKYNFNCNRWLDANEDDNEIVREMTAEGPTVRRIMGMARYHVTVCTGELEGAGTDANVYLCLFGDVGDTGERLLYNCRNNTDLFEKGNADEFTIESVTMRNVRRVRIRHDGKGSGSGWYLDRVLVREEGQPESDNVEFPCLRWLDKDKDDGQLVRELLPSDSSATLKMWPRETKRLNTP

SEQ ID NO: 4648 - protein, 255 aa, Artificial Sequence
  Synthetic polypeptide
MASSDLEQLCSHVNEKIGNIKKTLSLRNCGQEPTLKTVLNKIGDEIIVINELLNKLELEIQYQEQTNNSLKELCESLEEDYKDIEHLKENVPSHLPQVTVTQSCVKGSDLDPEEPIKVEEPEPVKKPPKEQRSIKEMPFITCDEFNGVPSYMKSRLTYNQINDVIKEINKAVISKYKILHQPKKSMNSVTRNLYHRFIDEETKDTKGRYFIVEADIKEFTTLKADKKFHVLLNILRHCRRLSEVLNLPAAEESDD

SEQ ID NO: 4649 - protein, 209 aa, Artificial Sequence
  Synthetic polypeptide
MASSDLEQLCSHVNEKIGNIKKTLSLRNCGQEPTLKTVLNKIGDEIIVINELLNKLELEIQYQEQTNNSLKELCESLEEDYKDIEHLKENVPSHLPQVTVTQSWYMKSRLTYNQINDVIKEINKAVISKYKILHQPKKSMNSVTRNLYHRFIDEETKDTKGRYFIVEADIKEFTTLKADKKFHVLLNILRHCRRLSEVLNLPAAEESDD

SEQ ID NO: 4650 - protein, 104 aa, Artificial Sequence
  Synthetic polypeptide
MKSRLTYNQINDVIKEINKAVISKYKILHQPKKSMNSVTRNLYHRFIDEETKDTKGRYFIVEADIKEFTTLKADKKFHVLLNILRHCRRLSEVLNLPAAEESDD

SEQ ID NO: 4651 - protein, 87 aa, Artificial Sequence
  Synthetic polypeptide
MSMDVTFLGTGAAYPSPTRGASAVVLRCEGECWLFDCGEGTQTQLMKSQLKAGCLLPLLLPLDIRLQVLQPLDSGTCTGSLLEALGP

SEQ ID NO: 4652 - protein, 184 aa, Artificial Sequence
  Synthetic polypeptide
MSMDVTFLGTGAAYPSPTRGASAVVLRCEGECWLFDCGEGTQTQLMKSQLKAEFPHLGFQSWKRNAQVNSMHRNLKTLDACFLSSCPWTSDSRFFSLWTLGPAPAASWRLSGRRPQPEGCTVGFPGFEAFKLGPSHAPGFCFSSLQTASHGTSLYNPVSQFFLINSFIYTHIYPIGSVPVENLI

SEQ ID NO: 4653 - protein, 243 aa, Artificial Sequence
  Synthetic polypeptide
MSMDVTFLGTGAAYPSPTRGASAVVLRCEGECWLFDCGEGTQTQLMKSQLKAGRITKIFITHLHGDHFFGLPGLLCTISLQSGSMVSKQPIEIYGPVGLRDFIWRTMELSHTELVFHYVVHELVPTADQCPAEELKEFAHVNRADSPPKEEQGRTILLDSEENSYLLFDDEQFVVKAFRLFHRIPSFGFSVVEKKRPGKLNAQKLKDLGCLLPLLLPLDIRLQVLQPLDSGTCTGSLLEALGP

SEQ ID NO: 4654 - protein, 193 aa, Artificial Sequence
  Synthetic polypeptide
MAGSRQRGLRARVRPLFCALLLSLGRFVRGDGVGGDPAVALPHRRFEYKYSFKGPHLVQSDGTVPFWAHAGNAIPSSDQIRVAPSLKSQRGSVWTKTKAAFENWEVEVTFRVTGRGRIGADGLAIWYAENQGLEGPVFGSADLWNGVGIFFDSFDNDGKKNNPAIVIIGNNGQIHYDHQKGPGTNVLWMLKDD

SEQ ID NO: 4655 - protein, 101 aa, Artificial Sequence
  Synthetic polypeptide
MVPPPPSRGGAARGQLGRSLGPLLLLLALGHTWTYREEPEDGDREICSESKIATTKYPCLKSSGELTTCYRKKCCKGYKFVLGQCIPEGSQWRIFSTKMRE

SEQ ID NO: 4656 - protein, 115 aa, Artificial Sequence
  Synthetic polypeptide
MVPPPPSRGGAARGQLGRSLGPLLLLLALGHTWTYREEPEDGDREICSESKIATTKYPCLKSSGELTTCYRKKCCKGYKFVLGQCIPEDRILPFPQPDRRQKIYFLREYTRGSRI

SEQ ID NO: 4657 - protein, 917 aa, Artificial Sequence
  Synthetic polypeptide
MLLFFTLGLLIHFVFFASIFDIYFTSPLVHGMTPQFTPLPPPARRLVLFVADGLRADALYELDENGNSRAPFIRNIIMHEGSWGISHTRVPTESRPGHVALIAGFYEDVSAVAKGWKENPVEFDSLFNESKYTWSWGSPDILPMFAKGASGDHVYTYSYDAKREDFGAQDATKLDTWVFDNVKDFFHHARNNQSLFSKINEEKIVFFLHLLGIDTNGHAHRPSSRDYKHNIKKVDDGVKEIVSMFNHFYGNDGKTTFIFTSDHGMTDWGSHGAGHPSETLTPLVTWGAGIKYPQRVSAQQFDDAFLKEWRLENWKRLDVNQADIAPLMTSLIGVPFPLNSVGILPVDYLNNTDLFKAESMFTNAVQILEQFKVKMTQKKEVTLPFLFTPFKLLSDSKQFNILRKARSYIKHRKFDEVVSLCKELIHLALKGLSYYHTYDRFFLGVNVVIGFVGWISYASLLIIKSHSNLIKGVSKEVKKPSHLLPCSFVAIGILVAFFLLIQACPWTYYVYGLLPLPIWYAVLREFQVIQDLVVSVLTYPLSHFVGYLLAFTLGIEVLVLSFFYRYMLTAGLTAFAAWPFLTRLWTRAKMTSLSWTFFSLLLAVFPLMPVVGRKPDISLVMGAGLLVLLLSLCVVTSLMKRKDSFIKEELLVHLLQVLSTVLSMYVVYSTQSSLLRKQGLPLMNQIISWATLASSLVVPLLSSPVLFQRLFSILLSLMSTYLLLSTGYEALFPLVLSCLMFVWINIEQETLQQSGVCCKQKLTSIQFSYNTDITQFRQLYLDDIRRAFFLVFFLVTAFFGTGNIASINSFDLASVYCFLTVFSPFMMGALMMWKILIPFVLVMCAFEAVQLTTQLSSKSLFLIVLVISDIMALHFFFLVKDYGSWLDIGTRLWMLSDPGLDLNLLHAIRAWYVKGTP

SEQ ID NO: 4658 - protein, 523 aa, Artificial Sequence
  Synthetic polypeptide
MAPRARRRRPLFALLLLCALLARLQVALQIAPPCTSEKHYEHLGRCCNKCEPGKYMSSKCTTTSDSVCLPCGPDEYLDSWNEEDKCLLHKVCDTGKALVAVVAGNSTTPRRCACTAGYHWSQDCECCRRNTECAPGLGAQHPLQLNKDTVCKPCLAGYFSDAFSSTDKCRPWTNCTFLGKRVEHHGTEKSDAVCSSSLPARKPPNEPHVYLPGLIILLLFASVALVAAIIFGVCYRKKGKALTANLWHWINEACGRLSGDKESSGDSCVSTHTANFGQQGACEGVLLLTLEEKTFPEDMCYPDQGGVCQGTCVGGGPYAQGEDARMLSLVSKTEIEEDSFRQMPTEDEYMDRPSQPTDQLLFLTEPGSKSTPPFSEPLEVGENDSLSQCFTGTQSTVGSESCNCTEPLCRTDWTPMSSENYLQKEVDSGHCPHWAASPSPNWADVCTGCRNPPGEDCEPLVGSPKRGPLPQCAYGMGLPPEEEASRTEARDQPEDGADGRLPSSARAGAGSGSSPGGQSPASD

SEQ ID NO: 4659 - protein, 485 aa, Artificial Sequence
  Synthetic polypeptide
MKQPNRKRKLNMDSKERLDQDGRLEQAEEEKKPKDSTTPLSHVPSAAAQGAWSWEWYLKEQKAVAAPVELFSKDQSFPEHENGFQIGMRLEGIDPRHPSVFCVLSVAEVCGYRLRLHFDGYLSCYDFWTNAGSPDIHPVGWCEKTKHELHIPKGYRKDKFVWMDYLKACKLQNAPKKLFRNRSPNGPMSKEFQVGMKLEAVDRKNPSLVCVATIADIVEDRLLVHFDNWDDSYDYWCDVNSPYVQPVGWCQENGRTLIAPQGYPNPENFSWTEYLEATQTNAVPAKVFKMRLPHGFLPNMKLEVVDKRNPRLIRVATIVDVDDQRVKVHFDGWDHKYDYWVEADSPDIHPIGWCDVTGHPLEVPQRTNDLKILPGQAVCPTPGCRGIGHIRGPRYSGHHSAFGCPYSDMNLKKEATLHDRLREQTQANLESDSSHSKSKSLCSLNFNGKHEKVNSQPRLVQQAKCLKIKGKEDIDLDNLFRDGTV

SEQ ID NO: 4660 - protein, 298 aa, Artificial Sequence
  Synthetic polypeptide
MSKEFQVGMKLEAVDRKNPSLVCVATIADIVEDRLLVHFDNWDDSYDYWCDVNSPYVQPVGWCQENGRTLIAPQGYPNPENFSWTEYLEATQTNAVPAKVFKMRLPHGFLPNMKLEVVDKRNPRLIRVATIVDVDDQRVKVHFDGWDHKYDYWVEADSPDIHPIGWCDVTGHPLEVPQRTNDLKILPGQAVCPTPGCRGIGHIRGPRYSGHHSAFGCPYSDMNLKKEATLHDRLREQTQANLESDSSHSKSKSLCSLNFNGKHEKVNSQPRLVQQAKCLKIKGKEDIDLDNLFRDGTV

SEQ ID NO: 4661 - protein, 114 aa, Artificial Sequence
  Synthetic polypeptide
MVPAPPFLGVLENPVPQWDLSILGSIRIRVSHTEVQGSGSSRSPEALRKESLEVEWTLVLLAIPPRIQPSQQDGGPPKCCDLLRAALLGRHCPLCVPAGEVFSQGFHRNLANKR

SEQ ID NO: 4662 - protein, 69 aa, Artificial Sequence
  Synthetic polypeptide
MAAWKSWTALRLCATVVVLDMVVCKGFVEDLDESASRCATSCLRDPQEMAHGNSDRIPDWARMHGLRQL

SEQ ID NO: 4663 - protein, 49 aa, Artificial Sequence
  Synthetic polypeptide
MVVCKGFVEDLDESASRCATSCLRDPQEMAHGNSDRIPDWARMHGLRQL

SEQ ID NO: 4664 - protein, 2751 aa, Artificial Sequence
  Synthetic polypeptide
MRGGVLLVLLLCVAAQCRQRGLFPAILNLASNAHISTNATCGEKGPEMFCKLVEHVPGRPVRNPQCRICDGNSANPRERHPISHAIDGTNNWWQSPSIQNGREYHWVTITLDLRQVFQVAYVIIKAANAPRPGNWILERSLDGTTFSPWQYYAVSDSECLSRYNITPRRGPPTYRADDEVICTSYYSRLVPLEHGEIHTSLINGRPSADDLSPKLLEFTSARYIRLRLQRIRTLNADLMTLSHREPKELDPIVTRRYYYSIKDISVGGMCICYGHASSCPWDETTKKLQCQCEHNTCGESCNRCCPGYHQQPWRPGTVSSGNTCEACNCHNKAKDCYYDESVAKQKKSLNTAGQFRGGGVCINCLQNTMGINCETCIDGYYRPHKVSPYEDEPCRPCNCDPVGSLSSVCIKDDLHSDLHNGKQPGQCPCKEGYTGEKCDRCQLGYKDYPTCVSCGCNPVGSASDEPCTGPCVCKENVEGKACDRCKPGFYNLKEKNPRGCSECFCFGVSDVCSSLSWPVGQVNSMSGWLVTDLISPRKIPSQQDALGGRHQVSINNTAVMQRLAPKYYWAAPEAYLGNKLTAFGGFLKYTVSYDIPVETVDSNLMSHADVIIKGNGLTLSTQAEGLSLQPYEEYLNVVRLVPENFQDFHSKRQIDRDQLMTVLANVTHLLIRANYNSAKMALYRLESVSLDIASSNAIDLVVAADVEHCECPQGYTGTSCESCLSGYYRVDGILFGGICQPCECHGHAAECNVHGVCIACAHNTTGVHCEQCLPGFYGEPSRGTPGDCQPCACPLTIASNNFSPTCHLNDGDEVVCDWCAPGYSGAWCERCADGYYGNPTVPGESCVPCDCSGNVDPSEAGHCDSVTGECLKCLGNTDGAHCERCADGFYGDAVTAKNCRACECHVKGSHSAVCHLETGLCDCKPNVTGQQCDQCLHGYYGLDSGHGCRPCNCSVAGSVSDGCTDEGQCHCVPGVAGKRCDRCAHGFYAYQDGSCTPCDCPHTQNTCDPETGECVCPPHTQGVKCEECEDGHWGYDAEVGCQACNCSLVGSTHHRCDVVTGHCQCKSKFGGRACDQCSLGYRDFPDCVPCDCDLRGTSGDACNLEQGLCGCVEETGACPCKENVFGPQCNECREGTFALRADNPLGCSPCFCSGLSHLCSELEDYVRTPVTLGSDQPLLRVVSQSNLRGTTEGVYYQAPDFLLDAATVRQHIRAEPFYWRLPQQFQGDQLMAYGGKLKYSVAFYSLDGVGTSNFEPQVLIKGGRIRKQVIYMDAPAPENGVRQEQEVAMRENFWKYFNSVSEKPVTREDFMSVLSDIEYILIKASYGQGLQQSRISDISMEVGRKAEKLHPEEEVASLLENCVCPPGTVGFSCQDCAPGYHRGKLPAGSDRGPRPLVAPCVPCSCNNHSDTCDPNTGKCLNCGDNTAGDHCDVCTSGYYGKVTGSASDCALCACPHSPPASFSPTCVLEGDHDFRCDACLLGYEGKHCERCSSSYYGNPQTPGGSCQKCDCNPHGSVHGDCDRTSGQCVCRLGASGLRCDECEPRHILMETDCVSCDDECVGVLLNDLDEIGDAVLSLNLTGIIPVPYGILSNLENTTKYLQESLLKENMQKDLGKIKLEGVAEETDNLQKKLTRMLASTQKVNRATERIFKESQDLAIAIERLQMSITEIMEKTTLNQTLDEDFLLPNSTLQNMQQNGTSLLEIMQIRDFTQLHQNATLELKAAEDLLSQIQENYQKPLEELEVLKEAASHVLSKHNNELKAAEALVREAEAKMQESNHLLLMVNANLREFSDKKLHVQEEQNLTSELIVQGRGLIDAAAAQTDAVQDALEHLEDHQDKLLLWSAKIRHHIDDLVMHMSQRNAVDLVYRAEDHAAEFQRLADVLYSGLENIRNVSLNATSAAYVHYNIQSLIEESEELARDAHRTVTETSLLSESLVSNGKAAVQRSSRFLKEGNNLSRKLPGIALELSELRNKTNRFQENAVEITRQTNESLLILRAIPKGIRDKGAKTKELATSASQSAVSTLRDVAGLSQELLNTSASLSRVNTTLRETHQLLQDSTMATLLAGRKVKDVEIQANLLFDRLKPLKMLEENLSRNLSEIKLLISQARKQAASIKVAVSADRDCIRAYQPQISSTNYNTLTLNVKTQEPDNLLFYLGSSTASDFLAVEMRRGRVAFLWDLGSGSTRLEFPDFPIDDNRWHSIHVARFGNIGSLSVKEMSSNQKSPTKTSKSPGTANVLDVNNSTLMFVGGLGGQIKKSPAVKVTHFKGCLGEAFLNGKSIGLWNYIEREGKCRGCFGSSQNEDPSFHFDGSGYSVVEKSLPATVTQIIMLFNTFSPNGLLLYLGSYGTKDFLSIELFRGRVKVMTDLGSGPITLLTDRRYNNGTWYKIAFQRNRKQGVLAVIDAYNTSNKETKQGETPGASSDLNRLDKDPIYVGGLPRSRVVRRGVTTKSFVGCIKNLEISRSTFDLLRNSYGVRKGCLLEPIRSVSFLKGGYIELPPKSLSPESEWLVTFATTNSSGIILAALGGDVEKRGDREEAHVPFFSVMLIGGNIEVHVNPGDGTGLRKALLHAPTGTCSDGQAHSISLVRNRRIITVQLDENNPVEMKLGTLVESRTINVSNLYVGGIPEGEGTSLLTMRRSFHGCIKNLIFNLELLDFNSAVGHEQVDLDTCWLSERPKLAPDAEDSKLLPEPRAFPEQCVVDAALEYVPGAHQFGLTQNSHFILPFNQSAVRKNFILILKQFPADRGRH

SEQ ID NO: 4665 - protein, 2736 aa, Artificial Sequence
  Synthetic polypeptide
MRGGVLLVLLLCVAAQCRQRGLFPAILNLASNAHISTNATCGEKGPEMFCKLVEHVPGRPVRNPQCRICDGNSANPRERHPISHAIDGTNNWWQSPSIQNGREYHWVTITLDLRQVFQVAYVIIKAANAPRPGNWILERSLDGTTFSPWQYYAVSDSECLSRYNITPRRGPPTYRADDEVICTSYYSRLVPLEHGEIHTSLINGRPSADDLSPKLLEFTSARYIRLRLQRIRTLNADLMTLSHREPKELDPIVTRRYYYSIKDISVGGMCICYGHASSCPWDETTKKLQCQCEHNTCGESCNRCCPGYHQQPWRPGTVSSGNTCEACNCHNKAKDCYYDESVAKQKKSLNTAGQFRGGGVCINCLQNTMGINCETCIDGYYRPHKVSPYEDEPCRPCNCDPVGSLSSVCIKDDLHSDLHNGKQPGQCPCKEGYTGEKCDRCQLGYKDYPTCVSCGCNPVGSASDEPCTGPCVCKENVEGKACDRCKPGFYNLKEKNPRGCSECFCFGVSDVCSSLSWPVGQVNSMSGWLVTDLISPRKIPSQQDALGGRHQVSINNTAVMQRLAPKYYWAAPEAYLGNKLTAFGGFLKYTVSYDIPVETVDSNLMSHADVIIKGNGLTLSTQAEGLSLQPYEEYLNVVRLVPENFQDFHSKRQIDRDQLMTVLANVTHLLIRANYNSAKMALYRLESVSLDIASSNAIDLVVAADVEHCECPQGYTGTSCESCLSGYYRVDGILFGGICQPCECHGHAAECNVHGVCIACAHNTTGVHCEQCLPGFYGEPSRGTPGDCQPCACPLTIASNNFSPTCHLNDGDEVVCDWCAPGYSGAWCERCADGYYGNPTVPGESCVPCDCSGNVDPSEAGHCDSVTGECLKCLGNTDGAHCERCADGFYGDAVTAKNCRACECHVKGSHSAVCHLETGLCDCKPNVTGQQCDQCLHGYYGLDSGHGCRPCNCSVAGSVSDGCTDEGQCHCVPGVAGKRCDRCAHGFYAYQDGSCTPCDCPHTQNTCDPETGECVCPPHTQGVKCEECEDGHWGYDAEVGCQACNCSLVGSTHHRCDVVTGHCQCKSKFGGRACDQCSLGYRDFPDCVPCDCDLRGTSGDACNLEQGLCGCVEETGACPCKENVFGPQCNECREGTFALRADNPLGCSPCFCSGLSHLCSELEDYVRTPVTLGSDQPLLRVVSQSNLRGTTEGVYYQAPDFLLDAATVRQHIRAEPFYWRLPQQFQGDQLMAYGGKLKYSVAFYSLDGVGTSNFEPQVLIKGGRIRKQVIYMDAPAPENGVRQEQEVAMRENFWKYFNSVSEKPVTREDFMSVLSDIEYILIKASYGQGLQQSRISDISMEVGRKAEKLHPEEEVASLLENCVCPPGTVGFSCQDCAPGYHRGKLPAGSDRGPRPLVAPCVPCSCNNHSDTCDPNTGKCLNCGDNTAGDHCDVCTSGYYGKVTGSASDCALCACPHSPPASFSPTCVLEGDHDFRCDACLLGYEGKHCERCSSSYYGNPQTPGGSCQKCDCNPHGSVHGDCDRTSGQCVCRLGASGLRCDECEPRHILMETDCVSCDDECVGVLLNDLDEIGDAVLSLNLTGIIPVPYGILSNLENTTKYLQESLLKENMQKDLGKIKLEGVAEETDNLQKKLTRMLASTQKVNRATERIFKESQDLAIAIERLQMSITEIMEKTTLNQTLDEDFLLPNSTLQNMQQNGTSLLEIMQIRDFTQLHQNATLELKAAEDLLSQIQENYQKPLEELEVLKEAASHVLSKHNNELKAAEALVREAEAKMQESNHLLLMVNANLREFSDKKLHVQEEQNLTSELIVQGRGLIDAAAAQTDAVQDALEHLEDHQDKLLLWSAKIRHHIDDLVMHMSQRNAVDLVYRAEDHAAEFQRLADVLYSGLENIRNVSLNATSAAYVHYNIQSLIEESEELARDAHRTVTETSLLSESLVSNGKAAVQRSSRFLKEGNNLSRKLPGIALELSELRNKTNRFQENAVEITRQTNESLLILRAIPKGIRDKGAKTKELATSASQSAVSTLRDVAGLSQELLNTSASLSRVNTTLRETHQLLQDSTMATLLAGRKVKDVEIQANLLFDRLKPLKMLEENLSRNLSEIKLLISQARKQAASIKVAVSADRDCIRAYQPQISSTNYNTLTLNVKTQEPDNLLFYLGSSTASDFLAVEMRRGRVAFLWDLGSGSTRLEFPDFPIDDNRWHSIHVARFGNIGSLSVKEMSSNQKSPTKTSKSPGTANVLDVNNSTLMFVGGLGGQIKKSPAVKVTHFKGCLGEAFLNGKSIGLWNYIEREGKCRGCFGSSQNEDPSFHFDGSGYSVVEKSLPATVTQIIMLFNTFSPNGLLLYLGSYGTKDFLSIELFRGRVKVMTDLGSGPITLLTDRRYNNGTWYKIAFQRNRKQGVLAVIDAYNTSNKETKQGETPGASSDLNRLDKDPIYVGGLPRSRVVRRGVTTKSFVGCIKNLEISRSTFDLLRNSYGVRKGCLLEPIRSVSFLKGGYIELPPKSLSPESEWLVTFATTNSSGIILAALGGDVEKRGDREEAHVPFFSVMLIGGNIEVHVNPGDGTGLRKALLHAPTGTCSDGQAHSISLVRNRRIITVQLDENNPVEMKLGTLVESRTINVSNLYVGGIPEGEGTSLLTMRRSFHGCIKNLIFNLELLDFNSAVGHEQVDLDTCWLSERPKLAPDAEDSKLLPEPRAFPEQCVVDAALEYVPGAHQFGLTQNSHFILPFNQSAVRKK

SEQ ID NO: 4666 - protein, 2303 aa, Artificial Sequence
  Synthetic polypeptide
MRGGVLLVLLLCVAAQCRQRGLFPAILNLASNAHISTNATCGEKGPEMFCKLVEHVPGRPVRNPQCRICDGNSANPRERHPISHAIDGTNNWWQSPSIQNGREYHWVTITLDLRQVFQVAYVIIKAANAPRPGNWILERSLDGTTFSPWQYYAVSDSECLSRYNITPRRGPPTYRADDEVICTSYYSRLVPLEHGEIHTSLINGRPSADDLSPKLLEFTSARYIRLRLQRIRTLNADLMTLSHREPKELDPIVTRRYYYSIKDISVGGMCICYGHASSCPWDETTKKLQCQCEHNTCGESCNRCCPGYHQQPWRPGTVSSGNTCEACNCHNKAKDCYYDESVAKQKKSLNTAGQFRGGGVCINCLQNTMGINCETCIDGYYRPHKVSPYEDEPCRPCNCDPVGSLSSVCIKDDLHSDLHNGKQPGQCPCKEGYTGEKCDRCQLGYKDYPTCVSCGCNPVGSASDEPCTGPCVCKENVEGKACDRCKPGFYNLKEKNPRGCSECFCFGVSDVCSSLSWPVGQVNSMSGWLVTDLISPRKIPSQQDALGGRHQVSINNTAVMQRLAPKYYWAAPEAYLGNKLTAFGGFLKYTVSYDIPVETVDSNLMSHADVIIKGNGLTLSTQAEGLSLQPYEEYLNVVRLVPENFQDFHSKRQIDRDQLMTVLANVTHLLIRANYNSAKMALYRLESVSLDIASSNAIDLVVAADVEHCECPQGYTGTSCESCLSGYYRVDGILFGGICQPCECHGHAAECNVHGVCIACAHNTTGVHCEQCLPGFYGEPSRGTPGDCQPCACPLTIASNNFSPTCHLNDGDEVVCDWCAPGYSGAWCERCADGYYGNPTVPGESCVPCDCSGNVDPSEAGHCDSVTGECLKCLGNTDGAHCERCADGFYGDAVTAKNCRACECHVKGSHSAVCHLETGLCDCKPNVTGQQCDQCLHGYYGLDSGHGCRPCNCSVAGSVSDGCTDEGQCHCVPGVAGKRCDRCAHGFYAYQDGSCTPCDCPHTQNTCDPETGECVCPPHTQGVKCEECEDGHWGYDAEVGCQACNCSLVGSTHHRCDVVTGHCQCKSKFGGRACDQCSLGYRDFPDCVPCDCDLRGTSGDACNLEQGLCGCVEETGACPCKENVFGPQCNECREGTFALRADNPLGCSPCFCSGLSHLCSELEDYVRTPVTLGSDQPLLRVVSQSNLRGTTEGVYYQAPDFLLDAATVRQHIRAEPFYWRLPQQFQGDQLMAYGGKLKYSVAFYSLDGVGTSNFEPQVLIKGGRIRKQVIYMDAPAPENGVRQEQEVAMRENFWKYFNSVSEKPVTREDFMSVLSDIEYILIKASYGQGLQQSRISDISMEVGRKAEKLHPEEEVASLLENCVCPPGTVGFSCQDCAPGYHRGKLPAGSDRGPRPLVAPCVPCSCNNHSDTCDPNTGKCLNCGDNTAGDHCDVCTSGYYGKVTGSASDCALCACPHSPPASFSPTCVLEGDHDFRCDACLLGYEGKHCERCSSSYYGNPQTPGGSCQKCDCNPHGSVHGDCDRTSGQCVCRLGASGLRCDECEPRHILMETDCVSCDDECVGVLLNDLDEIGDAVLSLNLTGIIPVPYGILSNLENTTKYLQESLLKENMQKDLGKIKLEGVAEETDNLQKKLTRMLASTQKVNRATERIFKESQDLAIAIERLQMSITEIMEKTTLNQTLDEDFLLPNSTLQNMQQNGTSLLEIMQIRDFTQLHQNATLELKAAEDLLSQIQENYQKPLEELEVLKEAASHVLSKHNNELKAAEALVREAEAKMQESNHLLLMVNANLREFSDKKLHVQEEQNLTSELIVQGRGLIDAAAAQTDAVQDALEHLEDHQDKLLLWSAKIRHHIDDLVMHMSQRNAVDLVYRAEDHAAEFQRLADVLYSGLENIRNVSLNATSAAYVHYNIQSLIEESEELARDAHRTVTETSLLSESLVSNGKAAVQRSSRFLKEGNNLSRKLPGIALELSELRNKTNRFQENAVEITRQTNESLLILRAIPKGIRDKGAKTKELATSASQSAVSTLRDVAGLSQELLNTSASLSRVNTTLRETHQLLQDSTMATLLAGRKVKDVEIQANLLFDRLKPLKMLEENLSRNLSEIKLLISQARKQAASIKVAVSADRDCIRAYQPQISSTNYNTLTLNVKTQEPDNLLFYLGSSTASDFLAVEMRRGRVAFLWDLGSGSTRLEFPDFPIDDNRWHSIHVARFGNIGSLSVKEMSSNQKSPTKTSKSPGTANVLDVNNSTLMFVGGLGGQIKKSPAVKVTHFKGCLGEAFLNGKSIGLWNYIEREGKCRGCFGRKEK

SEQ ID NO: 4667 - protein, 113 aa, Artificial Sequence
  Synthetic polypeptide
MLRLVPTGARAIVDMSYARHFLDFQGSAIPQAMQKLVVTRLSPNFREAVTLSRDCPVPLPGDGDLLVRNREGSVPGTILEAESSSHQTLNCSPLALDFPASRMVRNKFMFFIL

SEQ ID NO: 4668 - protein, 64 aa, Artificial Sequence
  Synthetic polypeptide
MGNHAGKRELNAEKASTNSETNRGESEKKRNLGELSRTTSEDNEVFGVPRSLDTGARLAYLPNE

SEQ ID NO: 4669 - protein, 835 aa, Artificial Sequence
  Synthetic polypeptide
MEVPAAGRVPAEGAPTAAVAEVRCPGPAPLRLLEWRVAAGAAVRIGSVLAVFEAAASAQSSGASQSRVASGGCVRPARPERRLRSERAGVVRELCAQPGQVVAPGAVLVRLEGCSHPVVMKGLCAECGQDLTQLQSKNGKQQVPLSTATVSMVHSVPELMVSSEQAEQLGREDQQRLHRNRKLVLMVDLDQTLIHTTEQHCQQMSNKGIFHFQLGRGEPMLHTRLRPHCKDFLEKIAKLYELHVFTFGSRLYAHTIAGFLDPEKKLFSHRILSRDECIDPFSKTGNLRNLFPCGDSMVCIIDDREDVWKFAPNLITVKKYVYFQGTGDMNAPPGSRESQTRKKVNHSRGTEVSEPSPPVRDPEGVTQAPGVEPSNGLEKPARELNGSEAATPRDSPRPGKPDERDIWPPAQAPTSSQELAGAPEPQGSCAQGGRVAPGQRPAQGATGTDLDFDLSSDSESSSESEGTKSSSSASDGESEGKRGRQKPKAAPEGAGALAQGSSLEPGRPAAPSLPGEAEPGAHAPDKEPELGGQEEGERDGLCGLGNGCADRKEAETESQNSELSGVTAGESLDQSMEEEEEEDTDEDDHLIYLEEILVRVHTDYYAKYDRYLNKEIEEAPDIRKIVPELKSKVLADVAIIFSGLHPTNFPIEKTREHYHATALGAKILTRLVLSPDAPDRATHLIAARAGTEKVLQAQECGHLHVVNPDWLWSCLERWDKVEEQLFPLRDDHTKAQRENSPAAFPDREGVPPTALFHPMPVLPKAQPGPEVRIYDSNTGKLIRTGARGPPAPSSSLPIRQEPSSFRLSLSSENPKLGMLQGSHLSEHEDSHLSEH

SEQ ID NO: 4670 - protein, 767 aa, Artificial Sequence
  Synthetic polypeptide
ASGGCVRPARPERRLRSERAGVVRELCAQPGQVVAPGAVLVRLEGCSHPVVMKGLCAECGQDLTQLQSKNGKQQVPLSTATVSMVHSVPELMVSSEQAEQLGREDQQRLHRNRKLVLMVDLDQTLIHTTEQHCQQMSNKGIFHFQLGRGEPMLHTRLRPHCKDFLEKIAKLYELHVFTFGSRLYAHTIAGFLDPEKKLFSHRILSRDECIDPFSKTGNLRNLFPCGDSMVCIIDDREDVWKFAPNLITVKKYVYFQGTGDMNAPPGSRESQTRKKVNHSRGTEVSEPSPPVRDPEGVTQAPGVEPSNGLEKPARELNGSEAATPRDSPRPGKPDERDIWPPAQAPTSSQELAGAPEPQGSCAQGGRVAPGQRPAQGATGTDLDFDLSSDSESSSESEGTKSSSSASDGESEGKRGRQKPKAAPEGAGALAQGSSLEPGRPAAPSLPGEAEPGAHAPDKEPELGGQEEGERDGLCGLGNGCADRKEAETESQNSELSGVTAGESLDQSMEEEEEEDTDEDDHLIYLEEILVRVHTDYYAKYDRYLNKEIEEAPDIRKIVPELKSKVLADVAIIFSGLHPTNFPIEKTREHYHATALGAKILTRLVLSPDAPDRATHLIAARAGTEKVLQAQECGHLHVVNPDWLWSCLERWDKVEEQLFPLRDDHTKAQRENSPAAFPDREGVPPTALFHPMPVLPKAQPGPEVRIYDSNTGKLIRTGARGPPAPSSSLPIRQEPSSFRLSLSSENPKLGMLQGSHLSEHEDSHLSEH

SEQ ID NO: 4671 - protein, 105 aa, Artificial Sequence
  Synthetic polypeptide
MSYMLPHLHNGWQVDQAILSEEDRVVVIRFGHDWDPTCMKMDEVLYSIAEKVKNFAVIYLVDITEVPDFNKMYELYDPCTVMFFFRAGETDGQEAHEETLSITAC

SEQ ID NO: 4672 - protein, 34 aa, Artificial Sequence
  Synthetic polypeptide
MYELYDPCTVMFFFRAGETDGQEAHEETLSITAC

SEQ ID NO: 4673 - protein, 220 aa, Artificial Sequence
  Synthetic polypeptide
MWAAAGGLWRSRAGLRALFRSRDAALFPGCERGLHCSAVSCKNWLKKFASKTKKKVWYESPSLGSHSTYKPSKLEFLMRSTSKKTRKEDHARLRALNGLLYKALTDLLCTPEVSQELYDLNVELSKVSLTPDFSACRAYWKTTLSAEQNAHMEAVLQRSAAHMRHLLMSQQTLRNVPPIVFVQDKGNAALAEVWWRAPVVSAAREAEAEESVEPGRRRLQ

SEQ ID NO: 4674 - protein, 385 aa, Artificial Sequence
  Synthetic polypeptide
MRGLGTCLATLAGLLLTAAGETFSGGCLFDEPYSTCGYSQSEGDDFNWEQVNTLTKPTSDPWMPSGSFMLVNASGRPEGQRAHLLLPQLKENDTHCIDFHYFVSSKSNSPPGLLNVYVKVNNGPLGNPIWNISGDPTRTWNRAELAISTFWPNFYQVIFEVITSGHQGYLAIDEVKVLGHPCTRTPHFLRIQNVEVNAGQFATFQCSAIGRTVAGDRLWLQGIDVRDAPLKEIKVTSSRRFIASFNVVNTTKRDAGKYRCMIRTEGGVGISNYAELVVKEPPVPIAPPQLASVGATYLWIQLNANSINGDGPIVAREVEYCTASGSWNDRQPVDSTSYKIGHLDPDTEYEISVLLTRPGEGGTGSPGPALRTRTKCAEGGAKMAE

SEQ ID NO: 4675 - protein, 323 aa, Artificial Sequence
  Synthetic polypeptide
MPSGSFMLVNASGRPEGQRAHLLLPQLKENDTHCIDFHYFVSSKSNSPPGLLNVYVKVNNGPLGNPIWNISGDPTRTWNRAELAISTFWPNFYQVIFEVITSGHQGYLAIDEVKVLGHPCTRTPHFLRIQNVEVNAGQFATFQCSAIGRTVAGDRLWLQGIDVRDAPLKEIKVTSSRRFIASFNVVNTTKRDAGKYRCMIRTEGGVGISNYAELVVKEPPVPIAPPQLASVGATYLWIQLNANSINGDGPIVAREVEYCTASGSWNDRQPVDSTSYKIGHLDPDTEYEISVLLTRPGEGGTGSPGPALRTRTKCAEGGAKMAE

SEQ ID NO: 4676 - protein, 172 aa, Artificial Sequence
  Synthetic polypeptide
MGTLSLHPGIDVRDAPLKEIKVTSSRRFIASFNVVNTTKRDAGKYRCMIRTEGGVGISNYAELVVKEPPVPIAPPQLASVGATYLWIQLNANSINGDGPIVAREVEYCTASGSWNDRQPVDSTSYKIGHLDPDTEYEISVLLTRPGEGGTGSPGPALRTRTKCAEGGAKMAE

SEQ ID NO: 4677 - protein, 925 aa, Artificial Sequence
  Synthetic polypeptide
MRGLGTCLATLAGLLLTAAGETFSGGCLFDEPYSTCGYSQSEGDDFNWEQVNTLTKPTSDPWMPSGSFMLVNASGRPEGQRAHLLLPQLKENDTHCIDFHYFVSSKSNSPPGLLNVYVKVNNGPLGNPIWNISGDPTRTWNRAELAISTFWPNFYQVIFEVITSGHQGYLAIDEVKVLGHPCTRTPHFLRIQNVEVNAGQFATFQCSAIGRTVAGDRLWLQGIDVRDAPLKEIKVTSSRRFIASFNVVNTTKRDAGKYRCMIRTEGGVGISNYAELVVKEPPVPIAPPQLASVGATYLWIQLNANSINGDGPIVAREVEYCTASGSWNDRQPVDSTSYKIGHLDPDTEYEISVLLTRPGEGGTGSPGPALRTRTKCADPMRGPRKLEVVEVKSRQITIRWEPFGYNVTRCHSYNLTVHYCYQVGGQEQVREEVSWDTENSHPQHTITNLSPYTNVSVKLILMNPEGRKESQELIVQTDEDLPGAVPTESIQGSTFEEKIFLQWREPTQTYGVITLYEITYKAVSSFDPEIDLSNQSGRVSKLGNETHFLFFGLYPGTTYSFTIRASTAKGFGPPATNQFTTKISAPSMPAYELETPLNQTDNTVTVMLKPAHSRGAPVSVYQIVVEEERPRRTKKTTEILKCYPVPIHFQNASLLNSQYYFAAEFPADSLQAAQPFTIGDNKTYNGYWNTPLLPYKSYRIYFQAASRANGETKIDCVQVATKGAATPKPVPEPEKQTDHTVKIAGVIAGILLFVIIFLGVVLVMKKRKLAKKRKETMSSTRQEMTVMVNSMDKSYAEQGTNCDEAFSFMDTHNLNGRSVSSPSSFTMKTNTLSTSVPNSYYPDPFVPTAILVPINDETHTMASDTSSLVQSHTYKKREPADVPYQTGQLHPAIRVADLLQHITQMKCAEGYGFKEEYEDPLQSSQ

SEQ ID NO: 4678 - protein, 912 aa, Artificial Sequence
  Synthetic polypeptide
MRGLGTCLATLAGLLLTAAGETFSGGCLFDEPYSTCGYSQSEGDDFNWEQVNTLTKPTSDPWMPSGSFMLVNASGRPEGQRAHLLLPQLKENDTHCIDFHYFVSSKSNSPPGLLNVYVKVNNGPLGNPIWNISGDPTRTWNRAELAISTFWPNFYQVIFEVITSGHQGYLAIDEVKVLGHPCTRTPHFLRIQNVEVNAGQFATFQCSAIGRTVAGDRLWLQGIDVRDAPLKEIKVTSSRRFIASFNVVNTTKRDAGKYRCMIRTEGGVGISNYAELVVKEPPVPIAPPQLASVGATYLWIQLNANSINGDGPIVAREVEYCTASGSWNDRQPVDSTSYKIGHLDPDTEYEISVLLTRPGEGGTGSPGPALRTRTKCADPMRGPRKLEVVEVKSRQITIRWEPFGYNVTRCHSYNLTVHYCYQVGGQEQVREEVSWDTENSHPQHTITNLSPYTNVSVKLILMNPEGRKESQELIVQTDEDLPGAVPTESIQGSTFEEKIFLQWREPTQTYGVITLYEITYKAVSSFDPEIDLSNQSGRVSKLGNETHFLFFGLYPGTTYSFTIRASTAKGFGPPATNQFTTKISAPSMPAYELETPLNQTDNTVTVMLKPAHSRGAPVSVYQIVVEEERPRRTKKTTEILKCYPVPIHFQNASLLNSQYYFAAEFPADSLQAAQPFTIGDNKTYNGYWNTPLLPYKSYRIYFQAASRANGETKIDCVQVATKGAATPKPVPEPEKQTDHTVKIAGVIAGILLFVIIFLGVVLVMKKRKLAKKRKETMSSTRQEMTVMVNSMDKSYAEQGTNCDEAFSFMDTHNLNGRSVSSPSSFTMKTNTLSTSVPNSYYPDETHTMASDTSSLVQSHTYKKREPADVPYQTGQLHPAIRVADLLQHITQMKCAEGYGFKEEYEDPLQSSQ

SEQ ID NO: 4679 - protein, 926 aa, Artificial Sequence
  Synthetic polypeptide
MRGLGTCLATLAGLLLTAAGETFSGGCLFDEPYSTCGYSQSEGDDFNWEQVNTLTKPTSDPWMPSGSFMLVNASGRPEGQRAHLLLPQLKENDTHCIDFHYFVSSKSNSPPGLLNVYVKVNNGPLGNPIWNISGDPTRTWNRAELAISTFWPNFYQVIFEVITSGHQGYLAIDEVKVLGHPCTRTPHFLRIQNVEVNAGQFATFQCSAIGRTVAGDRLWLQGIDVRDAPLKEIKVTSSRRFIASFNVVNTTKRDAGKYRCMIRTEGGVGISNYAELVVKEPPVPIAPPQLASVGATYLWIQLNANSINGDGPIVAREVEYCTASGSWNDRQPVDSTSYKIGHLDPDTEYEISVLLTRPGEGGTGSPGPALRTRTKCADPMRGPRKLEVVEVKSRQITIRWEPFGYNVTRCHSYNLTVHYCYQVGGQEQVREEVSWDTENSHPQHTITNLSPYTNVSVKLILMNPEGRKESQELIVQTDEDLPGAVPTESIQGSTFEEKIFLQWREPTQTYGVITLYEITYKAVSSFDPEIDLSNQSGRVSKLGNETHFLFFGLYPGTTYSFTIRASTAKGFGPPATNQFTTKISAPSMPAYELETPLNQTDNTVTVMLKPAHSRGAPVSVYQIVVEEERPRRTKKTTEILKCYPVPIHFQNASLLNSQYYFAAEFPADSLQAAQPFTIGDNKTYNGYWNTPLLPYKSYRIYFQAASRANGETKIDCVQVATKGAATPKPVPEPEKQTDHTVKIAGVIAGILLFVIIFLGVVLVMKKRKLAKKRKETMSSTRQEMTVMVNSMDKSYAEQGTNCDEAFSFMDTHNLNGRSVSSPSSFTMKTNTLSTSVPNSYYPDPFVPTAILDFSLNNETHTMASDTSSLVQSHTYKKREPADVPYQTGQLHPAIRVADLLQHITQMKCAEGYGFKEEYEDPLQSSQ

SEQ ID NO: 4680 - protein, 850 aa, Artificial Sequence
  Synthetic polypeptide
MPSGSFMLVNASGRPEGQRAHLLLPQLKENDTHCIDFHYFVSSKSNSPPGLLNVYVKVNNGPLGNPIWNISGDPTRTWNRAELAISTFWPNFYQVIFEVITSGHQGYLAIDEVKVLGHPCTRTPHFLRIQNVEVNAGQFATFQCSAIGRTVAGDRLWLQGIDVRDAPLKEIKVTSSRRFIASFNVVNTTKRDAGKYRCMIRTEGGVGISNYAELVVKEPPVPIAPPQLASVGATYLWIQLNANSINGDGPIVAREVEYCTASGSWNDRQPVDSTSYKIGHLDPDTEYEISVLLTRPGEGGTGSPGPALRTRTKCADPMRGPRKLEVVEVKSRQITIRWEPFGYNVTRCHSYNLTVHYCYQVGGQEQVREEVSWDTENSHPQHTITNLSPYTNVSVKLILMNPEGRKESQELIVQTDEDLPGAVPTESIQGSTFEEKIFLQWREPTQTYGVITLYEITYKAVSSFDPEIDLSNQSGRVSKLGNETHFLFFGLYPGTTYSFTIRASTAKGFGPPATNQFTTKISAPSMPAYELETPLNQTDNTVTVMLKPAHSRGAPVSVYQIVVEEERPRRTKKTTEILKCYPVPIHFQNASLLNSQYYFAAEFPADSLQAAQPFTIGDNKTYNGYWNTPLLPYKSYRIYFQAASRANGETKIDCVQVATKGAATPKPVPEPEKQTDHTVKIAGVIAGILLFVIIFLGVVLVMKKRKLAKKRKETMSSTRQEMTVMVNSMDKSYAEQGTNCDEAFSFMDTHNLNGRSVSSPSSFTMKTNTLSTSVPNSYYPDETHTMASDTSSLVQSHTYKKREPADVPYQTGQLHPAIRVADLLQHITQMKCAEGYGFKEEYEDPLQSSQ

SEQ ID NO: 4681 - protein, 699 aa, Artificial Sequence
  Synthetic polypeptide
MGTLSLHPGIDVRDAPLKEIKVTSSRRFIASFNVVNTTKRDAGKYRCMIRTEGGVGISNYAELVVKEPPVPIAPPQLASVGATYLWIQLNANSINGDGPIVAREVEYCTASGSWNDRQPVDSTSYKIGHLDPDTEYEISVLLTRPGEGGTGSPGPALRTRTKCADPMRGPRKLEVVEVKSRQITIRWEPFGYNVTRCHSYNLTVHYCYQVGGQEQVREEVSWDTENSHPQHTITNLSPYTNVSVKLILMNPEGRKESQELIVQTDEDLPGAVPTESIQGSTFEEKIFLQWREPTQTYGVITLYEITYKAVSSFDPEIDLSNQSGRVSKLGNETHFLFFGLYPGTTYSFTIRASTAKGFGPPATNQFTTKISAPSMPAYELETPLNQTDNTVTVMLKPAHSRGAPVSVYQIVVEEERPRRTKKTTEILKCYPVPIHFQNASLLNSQYYFAAEFPADSLQAAQPFTIGDNKTYNGYWNTPLLPYKSYRIYFQAASRANGETKIDCVQVATKGAATPKPVPEPEKQTDHTVKIAGVIAGILLFVIIFLGVVLVMKKRKLAKKRKETMSSTRQEMTVMVNSMDKSYAEQGTNCDEAFSFMDTHNLNGRSVSSPSSFTMKTNTLSTSVPNSYYPDETHTMASDTSSLVQSHTYKKREPADVPYQTGQLHPAIRVADLLQHITQMKCAEGYGFKEEYEDPLQSSQ

SEQ ID NO: 4682 - protein, 354 aa, Artificial Sequence
  Synthetic polypeptide
METLNGPAGGGAPDAKLQPPGQHHRHHHLHPVAERRRLHRAPSPARPFLKDLHARPAAPGPAVPSSGRAPAPAAPRSPNLAGKAPPSPGSLAAPGRLSRRSGGVPGAKDKPPPGAGARAAGGAKAALGSRRAARVAPAEPLSRAGKPPGAEPPSAAAKGRKAKRGSRAPPARTVGPPTPAARIPAVTLAVTSVAGSPARCSRISHTDSSSDLSDCPSEPLSDEQRLLPAASSDAESGTGSSDREPPRGAPTPSPAARGAPPGSPEPPALLAAPLAAGACPGGRSIPSGVSGGFAGPGVAEDVRGRSPPERPVPGTPKEPSLGEQSRLVPAAEEEELLREMEELRSENDYLKHNP

SEQ ID NO: 4683 - protein, 507 aa, Artificial Sequence
  Synthetic polypeptide
METLNGPAGGGAPDAKLQPPGQHHRHHHLHPVAERRRLHRAPSPARPFLKDLHARPAAPGPAVPSSGRAPAPAAPRSPNLAGKAPPSPGSLAAPGRLSRRSGGVPGAKDKPPPGAGARAAGGAKAALGSRRAARVAPAEPLSRAGKPPGAEPPSAAAKGRKAKRGSRAPPARTVGPPTPAARIPAVTLAVTSVAGSPARCSRISHTDSSSDLSDCPSEPLSDEQRLLPAASSDAESGTGSSDREPPRGAPTPSPAARGAPPGSPEPPALLAAPLAAGACPGGRSIPSGVSGGFAGPGVAEDVRGRSPPERPVPGTPKEPSLGEQSRLVPAAEEEELLREMEELRSENDYLKDELDELRAEMEEMRDSYLEEDVYQLQELRRELDRANKNCRILQYRLRKAEQKSLKVAETGQVDGELIRSLEQDLKVAKDVSVRLHHELKTVEEKRAKAEDENETLRQQMIEVEISKQALQNELERLKERGKQTSKQAKLTGKKAPKSKEDYGFNTV

SEQ ID NO: 4684 - protein, 147 aa, Artificial Sequence
  Synthetic polypeptide
MEEMRDSYLEEDVYQLQELRRELDRANKNCRILQYRLRKAEQKSLKVAETGQVDGELIRSLEQDLKVAKDVSVRLHHELKTVEEKRAKAEDENETLRQQMIEVEISKQALQNELERLKERGKQTSKQAKLTGKKAPKSKEDYGFNTV

SEQ ID NO: 4685 - protein, 1190 aa, Artificial Sequence
  Synthetic polypeptide
METLNGPAGGGAPDAKLQPPGQHHRHHHLHPVAERRRLHRAPSPARPFLKDLHARPAAPGPAVPSSGRAPAPAAPRSPNLAGKAPPSPGSLAAPGRLSRRSGGVPGAKDKPPPGAGARAAGGAKAALGSRRAARVAPAEPLSRAGKPPGAEPPSAAAKGRKAKRGSRAPPARTVGPPTPAARIPAVTLAVTSVAGSPARCSRISHTDSSSDLSDCPSEPLSDEQRLLPAASSDAESGTGSSDREPPRGAPTPSPAARGAPPGSPEPPALLAAPLAAGACPGGRSIPSGVSGGFAGPGVAEDVRGRSPPERPVPGTPKEPSLGEQSRLVPAAEEEELLREMEELRSENDYLKDELDELRAEMEEMRDSYLEEDVYQLQELRRELDRANKNCRILQYRLRKAEQKSLKVAETGQVDGELIRSLEQDLKVAKDVSVRLHHELKTVEEKRAKAEDENETLRQQMIEVEISKQALQNELERLKESSLKRRSTREMYKEKKTFNQDDSADLRCQLQFAKEEAFLMRKKMAKLGREKDELEQELQKYKSLYGDVDSPLPTGEAGGPPSTREAELKLRLKLVEEEANILGRKIVELEVENRGLKAEMEDMRGQQEREGPGRDHAPSIPTSPFGDSLESSTELRRHLQFVEEEAELLRRSISEIEDHNRQLTHELSKFKFEPPREPGWLGEGASPGAGGGAPLQEELKSARLQISELSGKVLKLQHENHALLSNIQRCDLAAHLGLRAPSPRDSDAESDAGKKESDGEESRLPQPKREGPVGGESDSEEMFEKTSGFGSGKPSEASEPCPTELLKAREDSEYLVTLKHEAQRLERTVERLITDTDSFLHDAGLRGGAPLPGPGLQGEEEQGEGDQQEPQLLGTINAKMKAFKKELQAFLEQVNRIGDGLSPLPHLTESSSFLSTVTSVSRDSPIGNLGKELGPDLQSRLKEQLEWQLGPARGDERESLRLRAARELHRRADGDTGSHGLGGQTCFSLEMEEEHLYALRWKELEMHSLALQNTLHERTWSDEKNLMQQELRSLKQNIFLFYVKLRWLLKHWRQGKQMEEEGEEFTEGEHPETLSRLGELGVQGGHQADGPDHDSDRGCGFPVGEHSPHSRVQIGDHSLRLQTADRGQPHKQVVENQQLFSAFKALLEDFRAELREDERARLRLQQQYASDKAAWDVEWAVLKCRLEQATS

SEQ ID NO: 4686 - protein, 830 aa, Artificial Sequence
  Synthetic polypeptide
MEEMRDSYLEEDVYQLQELRRELDRANKNCRILQYRLRKAEQKSLKVAETGQVDGELIRSLEQDLKVAKDVSVRLHHELKTVEEKRAKAEDENETLRQQMIEVEISKQALQNELERLKESSLKRRSTREMYKEKKTFNQDDSADLRCQLQFAKEEAFLMRKKMAKLGREKDELEQELQKYKSLYGDVDSPLPTGEAGGPPSTREAELKLRLKLVEEEANILGRKIVELEVENRGLKAEMEDMRGQQEREGPGRDHAPSIPTSPFGDSLESSTELRRHLQFVEEEAELLRRSISEIEDHNRQLTHELSKFKFEPPREPGWLGEGASPGAGGGAPLQEELKSARLQISELSGKVLKLQHENHALLSNIQRCDLAAHLGLRAPSPRDSDAESDAGKKESDGEESRLPQPKREGPVGGESDSEEMFEKTSGFGSGKPSEASEPCPTELLKAREDSEYLVTLKHEAQRLERTVERLITDTDSFLHDAGLRGGAPLPGPGLQGEEEQGEGDQQEPQLLGTINAKMKAFKKELQAFLEQVNRIGDGLSPLPHLTESSSFLSTVTSVSRDSPIGNLGKELGPDLQSRLKEQLEWQLGPARGDERESLRLRAARELHRRADGDTGSHGLGGQTCFSLEMEEEHLYALRWKELEMHSLALQNTLHERTWSDEKNLMQQELRSLKQNIFLFYVKLRWLLKHWRQGKQMEEEGEEFTEGEHPETLSRLGELGVQGGHQADGPDHDSDRGCGFPVGEHSPHSRVQIGDHSLRLQTADRGQPHKQVVENQQLFSAFKALLEDFRAELREDERARLRLQQQYASDKAAWDVEWAVLKCRLEQATS

SEQ ID NO: 4687 - protein, 186 aa, Artificial Sequence
  Synthetic polypeptide
MHSLALQNTLHERTWSDEKNLMQQELRSLKQNIFLFYVKLRWLLKHWRQGKQMEEEGEEFTEGEHPETLSRLGELGVQGGHQADGPDHDSDRGCGFPVGEHSPHSRVQIGDHSLRLQTADRGQPHKQVVENQQLFSAFKALLEDFRAELREDERARLRLQQQYASDKAAWDVEWAVLKCRLEQATS

SEQ ID NO: 4688 - protein, 871 aa, Artificial Sequence
  Synthetic polypeptide
MEEMRDSYLEEDVYQLQELRRELDRANKNCRILQYRLRKAEQKSLKVAETGQVDGELIRSLEQDLKVAKDVSVRLHHELKTVEEKRAKAEDENETLRQQMIEVEISKQALQNELERLKESSLKRRSTREMYKEKKTFNQDDSADLRCQLQFAKEEAFLMRKKMAKLGREKDELEQELQKYKSLYGDVDSPLPTGEAGGPPSTREAELKLRLKLVEEEANILGRKIVELEVENRGLKAEMEDMRGQQEREGPGRDHAPSIPTSPFGDSLESSTELRRHLQFVEEEAELLRRSISEIEDHNRQLTHELSKFKFEPPREPGWLGEGASPGAGGGAPLQEELKSARLQISELSGKVLKLQHENHALLSNIQRCDLAAHLGLRAPSPRDSDAESDAGKKESDGEESRLPQPKREGPVGGESDSEEMFEKTSGFGSGKPSEASEPCPTELLKAREDSEYLVTLKHEAQRLERTVERLITDTDSFLHDAGLRGGAPLPGPGLQGEEEQGEGDQQEPQLLGTINAKMKAFKKELQAFLEQVNRIGDGLSPLPHLTESSSFLSTVTSVSRDSPIGNLGKELGPDLQSRLKEQLEWQLGPARGDERESLRLRAARELHRRADGDTGSHGLGGQTCFSLELRGPPVLPEQSVSIEELQGQLVQAARLHQEETETFTNKIHKMEEEHLYALRWKELEMHSLALQNTLHERTWSDEKNLMQQELRSLKQNIFLFYVKLRWLLKHWRQGKQMEEEGEEFTEGEHPETLSRLGELGVQGGHQADGPDHDSDRGCGFPVGEHSPHSRVQIGDHSLRLQTADRGQPHKQVVENQQLFSAFKALLEDFRAELREDERARLRLQQQYASDKAAWDVEWAVLKCRLEQATS

SEQ ID NO: 4689 - protein, 30 aa, Artificial Sequence
  Synthetic polypeptide
MFFSAALRARAAGLTAHWCLRGFVCGLSCY

SEQ ID NO: 4690 - protein, 46 aa, Artificial Sequence
  Synthetic polypeptide
MKLHYVAVLTLAILMFLTWLPESLSCNKALCASDVSKCLIQLHSCI

SEQ ID NO: 4691 - protein, 93 aa, Artificial Sequence
  Synthetic polypeptide
MKLHYVAVLTLAILMFLTWLPESLSCNKALCASDVSKCLIQELCQCRPGEGNCSCCKECMLCLGALWDECCDCVARWEATEGGSLEPRSSRPA

SEQ ID NO: 4692 - protein, 168 aa, Artificial Sequence
  Synthetic polypeptide
MKLHYVAVLTLAILMFLTWLPESLSCNKALCASDVSKCLIQELCQCRPGEGNCSCCKECMLCLGALWDECCDCVALFTIAKTWNQPKCPSMVDWMKKEWYIHTMEYSAARKKNAIMSFAGTWMELEAIIITLSKLSQKQKTKDRYVLIELNNENTWTEGGEQQTLRPT

SEQ ID NO: 4693 - protein, 91 aa, Artificial Sequence
  Synthetic polypeptide
MMAIRELKVCLLGDTGVGKSSIVCRFVQDHFDHNISPTIGASFMTKTVPCGNELHKFLIWDTAGQERRSNTGMENAWNLESRPVFKVFSTI

SEQ ID NO: 4694 - protein, 30 aa, Artificial Sequence
  Synthetic polypeptide
MASASGAMAKHEQILVLDPPTDLKFKENKY

SEQ ID NO: 4695 - protein, 49 aa, Artificial Sequence
  Synthetic polypeptide
MASASGAMAKHEQILVLDPPTDLKFKGIQAVIFPSPLAAFLVESVSCFG

SEQ ID NO: 4696 - protein, 166 aa, Artificial Sequence
  Synthetic polypeptide
MWPLTVPPPLLLLLCSGLAGQNASWNRTRIFHLPPLWPPPIITCLDLCSHPCPGLPPSFPRAARGHCEHPSKVTSRLCTEPSMAPTFLRAEPRALTASHKALPHHLPSLICLHLPLTQSAPATWASSLFHKHTRHGPASAFLLAVLSAWNPFPRHPNGSSLTSFRS

SEQ ID NO: 4697 - protein, 137 aa, Artificial Sequence
  Synthetic polypeptide
MSQEGVELEKSVRRLREKFHGKVSSKKAGALMRKFGSDHTGVGRSIVYGVKQKDGQELSNDLDAQTKKLRPKSLASKQGQLRFEPWPPGVRAWALTCLRAQRGLKGAICHNINKHVAFAGRKAAMRTTEATHLALNK

SEQ ID NO: 4698 - protein, 32 aa, Artificial Sequence
  Synthetic polypeptide
MPPSTTWPQRGDMSQHQQACGICRQEGCYEDN

SEQ ID NO: 4699 - protein, 20 aa, Artificial Sequence
  Synthetic polypeptide
MSQHQQACGICRQEGCYEDN

SEQ ID NO: 4700 - protein, 4 aa, Artificial Sequence
  Synthetic polypeptide
SCTG

SEQ ID NO: 4701 - protein, 1182 aa, Artificial Sequence
  Synthetic polypeptide
MPARTAPARVPTLAVPAISLPDDVRRRLKDLERDSLTEKECVKEKLNLLHEFLQTEIKNQLCDLETKLRKEELSEEGYLAKVKSLLNKDLSLENGAHAYNREVNGRLENGNQARSEARRVGMADANSPPKPLSKPRTPRRSKSDGEAKPEPSPSPRITRKSTRQTTITSHFAKGPAKRKPQEESERAKSDESIKEEDKDQDEKRRRVTSRERVARPLPAEEPERAKSGTRTEKEEERDEKEEKRLRSQTKEPTPKQKLKEEPDREARAGVQADEDEDGDEKDEKKHRSQPKDLAAKRRPEEKEPEKVNPQISDEKDEDEKEEKRRKTTPKEPTEKKMARAKTVMNSKTHPPKCIQCGQYLDDPDLKYGQHPPDAVDEPQMLTNEKLSIFDANESGFESYEALPQHKLTCFSVYCKHGHLCPIDTGLIEKNIELFFSGSAKPIYDDDPSLEGGVNGKNLGPINEWWITGFDGGEKALIGFSTSFAEYILMDPSPEYAPIFGLMQEKIYISKIVVEFLQSNSDSTYEDLINKIETTVPPSGLNLNRFTEDSLLRHAQFVVEQVESYDEAGDSDEQPIFLTPCMRDLIKLAGVTLGQRRAQARRQTIRHSTREKDRGPTKATTTKLVYQIFDTFFAEQIEKDDREDKENAFKRRRCGVCEVCQQPECGKCKACKDMVKFGGSGRSKQACQERRCPNMAMKEADDDEEVDDNIPEMPSPKKMHQGKKKKQNKNRISWVGEAVKTDGKKSYYKKVCIDAETLEVGDCVSVIPDDSSKPLYLARVTALWEDSSNGQMFHAHWFCAGTDTVLGATSDPLELFLVDECEDMQLSYIHSKVKVIYKAPSENWAMEGGMDPESLLEGDDGKTYFYQLWYDQDYARFESPPKTQPTEDNKFKFCVSCARLAEMRQKEIPRVLEQLEDLDSRVLYYSATKNGILYRVGDGVYLPPEAFTFNIKLSSPVKRPRKEPVDEDLYPEHYRKYSDYIKGSNLDAPEPYRIGRIKEIFCPKKSNGRPNETDIKIRVNKFYRPENTHKSTPASYHADINLLYWSDEEAVVDFKAVQGRCTVEYGEDLPECVQVYSMGGPNRFYFLEAYNAKSKSFEDPPNHARSPGNKGKGKGKGKGKPKSQACEPSEPEIEIKLPKLRTLDVFSGCGGLSEGFHQAGTVAHACNPSTLGGRGGWIMRSGV

SEQ ID NO: 4702 - protein, 1198 aa, Artificial Sequence
  Synthetic polypeptide
MPARTAPARVPTLAVPAISLPDDVRRRLKDLERDSLTEKECVKEKLNLLHEFLQTEIKNQLCDLETKLRKEELSEEGYLAKVKSLLNKDLSLENGAHAYNREVNGRLENGNQARSEARRVGMADANSPPKPLSKPRTPRRSKSDGEAKRSRDPPASASQVTGIRAEPSPSPRITRKSTRQTTITSHFAKGPAKRKPQEESERAKSDESIKEEDKDQDEKRRRVTSRERVARPLPAEEPERAKSGTRTEKEEERDEKEEKRLRSQTKEPTPKQKLKEEPDREARAGVQADEDEDGDEKDEKKHRSQPKDLAAKRRPEEKEPEKVNPQISDEKDEDEKEEKRRKTTPKEPTEKKMARAKTVMNSKTHPPKCIQCGQYLDDPDLKYGQHPPDAVDEPQMLTNEKLSIFDANESGFESYEALPQHKLTCFSVYCKHGHLCPIDTGLIEKNIELFFSGSAKPIYDDDPSLEGGVNGKNLGPINEWWITGFDGGEKALIGFSTSFAEYILMDPSPEYAPIFGLMQEKIYISKIVVEFLQSNSDSTYEDLINKIETTVPPSGLNLNRFTEDSLLRHAQFVVEQVESYDEAGDSDEQPIFLTPCMRDLIKLAGVTLGQRRAQARRQTIRHSTREKDRGPTKATTTKLVYQIFDTFFAEQIEKDDREDKENAFKRRRCGVCEVCQQPECGKCKACKDMVKFGGSGRSKQACQERRCPNMAMKEADDDEEVDDNIPEMPSPKKMHQGKKKKQNKNRISWVGEAVKTDGKKSYYKKVCIDAETLEVGDCVSVIPDDSSKPLYLARVTALWEDSSNGQMFHAHWFCAGTDTVLGATSDPLELFLVDECEDMQLSYIHSKVKVIYKAPSENWAMEGGMDPESLLEGDDGKTYFYQLWYDQDYARFESPPKTQPTEDNKFKFCVSCARLAEMRQKEIPRVLEQLEDLDSRVLYYSATKNGILYRVGDGVYLPPEAFTFNIKLSSPVKRPRKEPVDEDLYPEHYRKYSDYIKGSNLDAPEPYRIGRIKEIFCPKKSNGRPNETDIKIRVNKFYRPENTHKSTPASYHADINLLYWSDEEAVVDFKAVQGRCTVEYGEDLPECVQVYSMGGPNRFYFLEAYNAKSKSFEDPPNHARSPGNKGKGKGKGKGKPKSQACEPSEPEIEIKLPKLRTLDVFSGCGGLSEGFHQAGTVAHACNPSTLGGRGGWIMRSGV

SEQ ID NO: 4703 - protein, 41 aa, Artificial Sequence
  Synthetic polypeptide
MATMVPSVLWPRACWTLLVCCLLTPAFSFGLQWSPLPGSLP

SEQ ID NO: 4704 - protein, 227 aa, Artificial Sequence
  Synthetic polypeptide
MAGAATQASLESAPRIMRLVAECSRSRARAGELWLPHGTVATPVFMPVGTQATMKGITTEQLDALGCRICLGNTYHLGLRPGPELIQKANGLHGFMNWPHNLLTDSGGFQMVSLVSLSEVTEEGVRFRSPYDGNETLLSPEKSVQIQNALGSDIIMQLDDVVSSTVTGPRVEEAMYRSIRWLDRCIAAHQRPDKQNLFAIIQGGLDADLRATCLEGKLNNSTILQPL

SEQ ID NO: 4705 - protein, 10 aa, Artificial Sequence
  Synthetic polypeptide
GHHHAAGRRG

SEQ ID NO: 4706 - protein, 1423 aa, Artificial Sequence
  Synthetic polypeptide
MSTPDPPLGGTPRPGPSPGPGPSPGAMLGPSPGPSPGSAHSMMGPSPGPPSAGHPIPTQGPGGYPQDNMHQMHKPMESMHEKGMSDDPRYNQMKGMGMRSGGHAGMGPPPSPMDQHSQGYPSPLGGSEHASSPVPASGPSSGPQMSSGPGGAPLDGADPQALGQQNRGPTPFNQNQLHQLRAQIMAYKMLARGQPLPDHLQMAVQGKRPMPGMQQQMPTLPPPSVSATGPGPGPGPGPGPGPGPAPPNYSRPHGMGGPNMPPPGPSGVPPGMPGQPPGGPPKPWPEGPMANAAAPTSTPQKLIPPQPTGRPSPAPPAVPPAASPVMPPQTQSPGQPAQPAPMVPLHQKQSRITPIQKPRGLDPVEILQEREYRLQARIAHRIQELENLPGSLAGDLRTKATIELKALRLLNFQRQLRQEVVVCMRRDTALETALNAKAYKRSKRQSLREARITEKLEKQQKIEQERKRRQKHQEYLNSILQHAKDFKEYHRSVTGKIQKLTKAVATYHANTEREQKKENERIEKERMRRLMAEDEEGYRKLIDQKKDKRLAYLLQQTDEYVANLTELVRQHKAAQVAKEKKKKKKKKKAENAEGQTPAIGPDGEPLDETSQMSDLPVKVIHVESGKILTGTDAPKAGQLEAWLEMNPGYEVAPRSDSEESGSEEEEEEEEEEQPQAAQPPTLPVEEKKKIPDPDSDDVSEVDARHIIENAKQDVDDEYGVSQALARGLQSYYAVAHAVTERVDKQSALMVNGVLKQYQIKGLEWLVSLYNNNLNGILADEMGLGKTIQTIALITYLMEHKRINGPFLIIVPLSTLSNWAYEFDKWAPSVVKVSYKGSPAARRAFVPQLRSGKFNVLLTTYEYIIKDKHILAKIRWKYMIVDEGHRMKNHHCKLTQVLNTHYVAPRRLLLTGTPLQNKLPELWALLNFLLPTIFKSCSTFEQWFNAPFAMTGEKVDLNEEETILIIRRLHKVLRPFLLRRLKKEVEAQLPEKVEYVIKCDMSALQRVLYRHMQAKGVLLTDGSEKDKKGKGGTKTLMNTIMQLRKICNHPYMFQHIEESFSEHLGFTGGIVQGLDLYRASGKFELLDRILPKLRATNHKVLLFCQMTSLMTIMEDYFAYRGFKYLRLDGTTKAEDRGMLLKTFNEPGSEYFIFLLSTRAGGLGLNLQSADTVIIFDSDWNPHQDLQAQDRAHRIGQQNEVRVLRLCTVNSVEEKILAAAKYKLNVDQKVIQAGMFDQKSSSHERRAFLQAILEHEEQDESRHCSTGSGSASFAHTAPPPAGVNPDLEEPPLKEEDEVPDDETVNQMIARHEEEFDLFMRMDLDRRREEARNPKRKPRLMEEDELPSWIIKDDAEVERLTCEEEEEKMFGRGSRHRKEVDYSDSLTEKQWLKLLRRLRWEDHLSPGVKVQPGQCSKTTCLRKFKN

SEQ ID NO: 4707 - protein, 1390 aa, Artificial Sequence
  Synthetic polypeptide
MSTPDPPLGGTPRPGPSPGPGPSPGAMLGPSPGPSPGSAHSMMGPSPGPPSAGHPIPTQGPGGYPQDNMHQMHKPMESMHEKGMSDDPRYNQMKGMGMRSGGHAGMGPPPSPMDQHSQGYPSPLGGSEHASSPVPASGPSSGPQMSSGPGGAPLDGADPQALGQQNRGPTPFNQNQLHQLRAQIMAYKMLARGQPLPDHLQMAVQGKRPMPGMQQQMPTLPPPSVSATGPGPGPGPGPGPGPGPAPPNYSRPHGMGGPNMPPPGPSGVPPGMPGQPPGGPPKPWPEGPMANAAAPTSTPQKLIPPQPTGRPSPAPPAVPPAASPVMPPQTQSPGQPAQPAPMVPLHQKQSRITPIQKPRGLDPVEILQEREYRLQARIAHRIQELENLPGSLAGDLRTKATIELKALRLLNFQRQLRQEVVVCMRRDTALETALNAKAYKRSKRQSLREARITEKLEKQQKIEQERKRRQKHQEYLNSILQHAKDFKEYHRSVTGKIQKLTKAVATYHANTEREQKKENERIEKERMRRLMAEDEEGYRKLIDQKKDKRLAYLLQQTDEYVANLTELVRQHKAAQVAKEKKKKKKKKKAENAEGQTPAIGPDGEPLDETSQMSDLPVKVIHVESGKILTGTDAPKAGQLEAWLEMNPGYEVAPRSDSEESGSEEEEEEEEEEQPQAAQPPTLPVEEKKKIPDPDSDDVSEVDARHIIENAKQDVDDEYGVSQALARGLQSYYAVAHAVTERVDKQSALMVNGVLKQYQIKGLEWLVSLYNNNLNGILADEMGLGKTIQTIALITYLMEHKRINGPFLIIVPLSTLSNWAYEFDKWAPSVVKVSYKGSPAARRAFVPQLRSGKFNVLLTTYEYIIKDKHILAKIRWKYMIVDEGHRMKNHHCKLTQVLNTHYVAPRRLLLTGTPLQNKLPELWALLNFLLPTIFKSCSTFEQWFNAPFAMTGEKVDLNEEETILIIRRLHKVLRPFLLRRLKKEVEAQLPEKVEYVIKCDMSALQRVLYRHMQAKGVLLTDGSEKDKKGKGGTKTLMNTIMQLRKICNHPYMFQHIEESFSEHLGFTGGIVQGLDLYRASGKFELLDRILPKLRATNHKVLLFCQMTSLMTIMEDYFAYRGFKYLRLDGTTKAEDRGMLLKTFNEPGSEYFIFLLSTRAGGLGLNLQSADTVIIFDSDWNPHQDLQAQDRAHRIGQQNEVRVLRLCTVNSVEEKILAAAKYKLNVDQKVIQAGMFDQKSSSHERRAFLQAILEHEEQDEEEDEVPDDETVNQMIARHEEEFDLFMRMDLDRRREEARNPKRKPRLMEEDELPSWIIKDDAEVERLTCEEEEEKMFGRGSRHRKEVDYSDSLTEKQWLKLLRRLRWEDHLSPGVKVQPGQCSKTTCLRKFKN

SEQ ID NO: 4708 - protein, 113 aa, Artificial Sequence
  Synthetic polypeptide
TRAGGLGLNLQSADTVIIFDSDWNPHQDLQAQDRAHRIGQQNEVERLTCEEEEEKMFGRGSRHRKEVDYSDSLTEKQWLKLLRRLRWEDHLSPGVKVQPGQCSKTTCLRKFKN

SEQ ID NO: 4709 - protein, 1455 aa, Artificial Sequence
  Synthetic polypeptide
MSTPDPPLGGTPRPGPSPGPGPSPGAMLGPSPGPSPGSAHSMMGPSPGPPSAGHPIPTQGPGGYPQDNMHQMHKPMESMHEKGMSDDPRYNQMKGMGMRSGGHAGMGPPPSPMDQHSQGYPSPLGGSEHASSPVPASGPSSGPQMSSGPGGAPLDGADPQALGQQNRGPTPFNQNQLHQLRAQIMAYKMLARGQPLPDHLQMAVQGKRPMPGMQQQMPTLPPPSVSATGPGPGPGPGPGPGPGPAPPNYSRPHGMGGPNMPPPGPSGVPPGMPGQPPGGPPKPWPEGPMANAAAPTSTPQKLIPPQPTGRPSPAPPAVPPAASPVMPPQTQSPGQPAQPAPMVPLHQKQSRITPIQKPRGLDPVEILQEREYRLQARIAHRIQELENLPGSLAGDLRTKATIELKALRLLNFQRQLRQEVVVCMRRDTALETALNAKAYKRSKRQSLREARITEKLEKQQKIEQERKRRQKHQEYLNSILQHAKDFKEYHRSVTGKIQKLTKAVATYHANTEREQKKENERIEKERMRRLMAEDEEGYRKLIDQKKDKRLAYLLQQTDEYVANLTELVRQHKAAQVAKEKKKKKKKKKAENAEGQTPAIGPDGEPLDETSQMSDLPVKVIHVESGKILTGTDAPKAGQLEAWLEMNPGYEVAPRSDSEESGSEEEEEEEEEEQPQAAQPPTLPVEEKKKIPDPDSDDVSEVDARHIIENAKQDVDDEYGVSQALARGLQSYYAVAHAVTERVDKQSALMVNGVLKQYQIKGLEWLVSLYNNNLNGILADEMGLGKTIQTIALITYLMEHKRINGPFLIIVPLSTLSNWAYEFDKWAPSVVKVSYKGSPAARRAFVPQLRSGKFNVLLTTYEYIIKDKHILAKIRWKYMIVDEGHRMKNHHCKLTQVLNTHYVAPRRLLLTGTPLQNKLPELWALLNFLLPTIFKSCSTFEQWFNAPFAMTGEKVDLNEEETILIIRRLHKVLRPFLLRRLKKEVEAQLPEKVEYVIKCDMSALQRVLYRHMQAKGVLLTDGSEKDKKGKGGTKTLMNTIMQLRKICNHPYMFQHIEESFSEHLGFTGGIVQGLDLYRASGKFELLDRILPKLRATNHKVLLFCQMTSLMTIMEDYFAYRGFKYLRLDGTTKAEDRGMLLKTFNEPGSEYFIFLLSTRAGGLGLNLQSADTVIIFDSDWNPHQDLQAQDRAHRIGQQNEVRVLRLCTVNSVEEKILAAAKYKLNVDQKVIQAGMFDQKSSSHERRAFLQAILEHEEQDESRHCSTGSGSASFAHTAPPPAGVNPDLEEPPLKEEDEVPDDETVNQMIARHEEEFDLFMRMDLDRRREEARNPKRKPRLMEEDELPSWIIKDDAEVERLTCEEEEEKMFGRGSRHRKEVDYSDSLTEKQWLKKITGKDIHDTASSVARGLQFQRGLQFCTRASKLLRRLRWEDHLSPGVKVQPGQCSKTTCLRKFKN

SEQ ID NO: 4710 - protein, 629 aa, Artificial Sequence
  Synthetic polypeptide
MLAVGPAMDRDYPQHEPPPAGSLLYSPPPLQSAMLHCPYWNTFSLPPYPAFSSDSRPFMSSASFLGSQPCPDTSYAPVATASSLPPKTCDFAQDSSYFEDFSNISIFSSSVDSLSDIVDTPDFLPADSLNQVSTIWDDNPAPSTHDKLFQLSRPFAGFEDFLPSHSTPLLVSYQEQSVQSQPEEEDEAEEEEAEELGHTETYADYVPSKSKIGKQHPDRVVETSTLSSVPPPDITYTLALPSDSGALSALQLEAITYACQQHEVLLPSGQRAGFLIGDGAGVGKGRTVAGVILENHLRGRKKALWFSVSNDLKYDAERDLRDIEATGIAVHALSKIKYGDTTTSEGVLFATYSALIGESQAGGQHRTRLRQILDWCGEAFEGVIVFDECHKAKNAGSTKMGKAVLDLQNKLPLARVVYASATGASEPRNMIYMSRLGIWGEGTPFRNFEEFLHAIEKRGVGAMEIVAMDMKVSGMYIARQLSFSGVTFRIEEIPLAPAFECVYNRAALLWAEALNVFQQAADWIGLESRKSLWGQFWSAHQRFFKYLCIAAKVRRLVELAREELARDKCVVIGLQSTGEARTREVLGENDGHLNCFVSAAEGVFLSLIQKHFPSTKRKRDRGAGSKRKH

SEQ ID NO: 4711 - protein, 619 aa, Artificial Sequence
  Synthetic polypeptide
MLAVGPAMDRDYPQHEPPPAGSLLYSPPPLQSAMLHCPYWNTFSLPPYPAFSSDSRPFMSSASFLGSQPCPDTSYAPVATASSLPPKTCDFAQDSSYFEDFSNISIFSSSVDSLSDIVDTPDFLPADSLNQVSTIWDDNPAPSTHDKLFQLSRPFAGFEDFLPSHSTPLLVSYQEQSVQSQPEEEDEAEEEEAEELGHTETYADYVPSKSKIGKQHPDRVVETSTLSSVPPPDITYTLALPSDSGALSALQLEAITYACQQHEVLLPSGQRAGFLIGDGAGVGKGRTVAGVILENHLRGRKKALWFSVSNDLKYDAERDLRDIEATGIAVHALSKIKYGDTTTSEGVLFATYSALIGESQAGGQHRTRLRQILDWCGEAFEGVIVFDECHKAKNAGSTKMGKAVLDLQNKLPLARVVYASATGASEPRNMIYMSRLGIWGEGTPFRNFEEFLHAIEKRGVGAMEIVAMDMKVSGMYIARQLSFSGVTFRIEEIPLAPAFECVYNRAALLAADWIGLESRKSLWGQFWSAHQRFFKYLCIAAKVRRLVELAREELARDKCVVIGLQSTGEARTREVLGENDGHLNCFVSAAEGVFLSLIQKHFPSTKRKRDRGAGSKRKH

SEQ ID NO: 4712 - protein, 572 aa, Artificial Sequence
  Synthetic polypeptide
MREPLPGSASWGTPGPPSAGTMSQLQLWLQFEALNKDSSYFEDFSNISIFSSSVDSLSDIVDTPDFLPADSLNQVSTIWDDNPAPSTHDKLFQLSRPFAGFEDFLPSHSTPLLVSYQEQSVQSQPEEEDEAEEEEAEELGHTETYADYVPSKSKIGKQHPDRVVETSTLSSVPPPDITYTLALPSDSGALSALQLEAITYACQQHEVLLPSGQRAGFLIGDGAGVGKGRTVAGVILENHLRGRKKALWFSVSNDLKYDAERDLRDIEATGIAVHALSKIKYGDTTTSEGVLFATYSALIGESQAGGQHRTRLRQILDWCGEAFEGVIVFDECHKAKNAGSTKMGKAVLDLQNKLPLARVVYASATGASEPRNMIYMSRLGIWGEGTPFRNFEEFLHAIEKRGVGAMEIVAMDMKVSGMYIARQLSFSGVTFRIEEIPLAPAFECVYNRAALLWAEALNVFQQAADWIGLESRKSLWGQFWSAHQRFFKYLCIAAKVRRLVELAREELARDKCVVIGLQSTGEARTREVLGENDGHLNCFVSAAEGVFLSLIQKHFPSTKRKRDRGAGSKRKH

SEQ ID NO: 4713 - protein, 111 aa, Artificial Sequence
  Synthetic polypeptide
MGPWGWKLRWTVALLLAAAGTAVGDRCERNEFQCQDGKCISYKWVCDGSAECQDGSDESQETCLSVTCKSGDFSCGGRVNRCIPQFWRCDGQVDCDNGSDEQGCPIIRHLG

SEQ ID NO: 4714 - protein, 226 aa, Artificial Sequence
  Synthetic polypeptide
RGGLAFLRGSCHKGDDKSRVPGAASATYTSRPPLSWALLAKSPVSAVLCGDTSVPTLSWGAPSPHQPRSSSQRGPRPPSRPRFLTRLKRCLRISPPLLGLQPRSSATWATDAKETSSSAKTGNASPTSGSAMAALSARMALMSPRRRACLSPANPGTSAVGAVSTAAFLSSGGAMAKWTATTAQTSKAVLSSDTSADRKLQVSSLQPRHYKYCTKPSSAHSTSTIL

SEQ ID NO: 4715 - protein, 146 aa, Artificial Sequence
  Synthetic polypeptide
MAAFRDIEEVSQGLLSLLGANRAEAQQRRLLGRHEQVVERLLETQDGAEKQLREILTMEKEVAQSLLNAKEQVHQGGVELQQLEAGLQEAGEEDTRLKASLLQLTRELEELKEIEADLERQEKEVDEDTTVTIPSAVYVAQLYHQG

SEQ ID NO: 4716 - protein, 142 aa, Artificial Sequence
  Synthetic polypeptide
RDIEEVSQGLLSLLGANRAEAQQRRLLGRHEQVVERLLETQDGAEKQLREILTMEKEVAQSLLNAKEQVHQGGVELQQLEAGLQEAGEEDTRLKASLLQLTRELEELKEIEADLERQEKEVDEDTTVTIPSAVYVAQLYHQG

SEQ ID NO: 4717 - protein, 110 aa, Artificial Sequence
  Synthetic polypeptide
PRHRGGEPGAAQPAGRQPRGGAAATAAGAPRAGGGAAAGNARRCREAAARDPHHGEGSGPEPSQCEGAGAPGRRGAAAAGSWASGGWGGGHPSEGQPPSAHQRAGRAQGD

SEQ ID NO: 4718 - protein, 64 aa, Artificial Sequence
  Synthetic polypeptide
DIEEVSQGLLSLLGANRAEAQQRRLLGRHEQVVERLLETQDGAEKQLRGTWLNFTTKDDRSLVP

SEQ ID NO: 4719 - protein, 4 aa, Artificial Sequence
  Synthetic polypeptide
PSAT

SEQ ID NO: 4720 - protein, 860 aa, Artificial Sequence
  Synthetic polypeptide
MAQVLHVPAPFPGTPGPASPPAFPAKDPDPPYSVETPYGYRLDLDFLKYVDDIEKGHTLRRVAVQRRPRLSSLPRGPGSWWTSTESLCSNASGDSRHSAYSYCGRGFYPQYGALETRGGFNPRVERTLLDARRRLEDQAATPTGLGSLTPSAAGSTASLVGVGLPPPTPRSSGLSTPVPPSAGHLAHVREQMAGALRKLRQLEEQVKLIPVLQVKLSVLQEEKRQLTVQLKSQKFLGHPTAGRGRSELCLDLPDPPEDPVALETRSVGTWVRERDLGMPDGEAALAAKVAVLETQLKKALQELQAAQARQADPQPQAWPPPDSPVRVDTVRVVEGPREVEVVASTAAGAPAQRAQSLEPYGTGLRALAMPGRPESPPVFRSQEVVETMCPVPAAATSNVHMVKKISITERSCDGAAGLPEVPAESSSSPPGSEVASLTQPEKSTGRVPTQEPTHREPTRQAASQESEEAGGTGGPPAGVRSIMKRKEEVADPTAHRRSLQFVGVNGGYESSSEDSSTAENISDNDSTENEAPEPRERVPSVAEAPQLRPAGTAAAKTSRQECQLSRESQHIPTAEGASGSNTEEEIRMELSPDLISACLALEKYLDNPNALTERELKVAYTTVLQEWLRLACRSDAHPELVRRHLVTFRAMSARLLDYVVNIADSNGNTALHYSVSHANFPVVQQLLDSGVCKVDKQNRAGYSPIMLTALATLKTQDDIETVLQLFRLGNINAKASQAGQTALMLAVSHGRVDVVKALLACEADVNVQDDDGSTALMCACEHGHKEIAGLLLAVPSCDISLTDRDGSTALMVALDAGQSEIASMLYSRMNIKCSGLCTCCFRCLECSSLLAGSLMPFTVS

SEQ ID NO: 4721 - protein, 868 aa, Artificial Sequence
  Synthetic polypeptide
MAQVLHVPAPFPGTPGPASPPAFPAKDPDPPYSVETPYGYRLDLDFLKYVDDIEKGHTLRRVAVQRRPRLSSLPRGPGSWWTSTESLCSNASGDSRHSAYSYCGRGFYPQYGALETRGGFNPRVERTLLDARRRLEDQAATPTGLGSLTPSAAGSTASLVGVGLPPPTPRSSGLSTPVPPSAGHLAHVREQMAGALRKLRQLEEQVKLIPVLQVKLSVLQEEKRQLTVQLKSQKFLGHPTAGRGRSELCLDLPDPPEDPVALETRSVGTWVRERDLGMPDGEAALAAKVAVLETQLKKALQELQAAQARQADPQPQAWPPPDSPVRVDTVRVVEGPREVEVVASTAAGAPAQRAQSLEPYGTGLRALAMPGRPESPPVFRSQEVVETMCPVPAAATSNVHMVKKISITERSCDGAAGLPEVPAESSSSPPGSEVASLTQPEKSTGRVPTQEPTHREPTRQAASQESEEAGGTAPPLSSPPGGPPAGVRSIMKRKEEVADPTAHRRSLQFVGVNGGYESSSEDSSTAENISDNDSTENEAPEPRERVPSVAEAPQLRPAGTAAAKTSRQECQLSRESQHIPTAEGASGSNTEEEIRMELSPDLISACLALEKYLDNPNALTERELKVAYTTVLQEWLRLACRSDAHPELVRRHLVTFRAMSARLLDYVVNIADSNGNTALHYSVSHANFPVVQQLLDSGVCKVDKQNRAGYSPIMLTALATLKTQDDIETVLQLFRLGNINAKASQAGQTALMLAVSHGRVDVVKALLACEADVNVQDDDGSTALMCACEHGHKEIAGLLLAVPSCDISLTDRDGSTALMVALDAGQSEIASMLYSRMNIKCSGLCTCCFRCLECSSLLAGSLMPFTVS

SEQ ID NO: 4722 - protein, 418 aa, Artificial Sequence
  Synthetic polypeptide
MAQVLHVPAPFPGTPGPASPPAFPAKDPDPPYSVETPYGYRLDLDFLKYVDDIEKGHTLRRVAVQRRPRLSSLPRGPGSWWTSTESLCSNASGDSRHSAYSYCGRGFYPQYGALETRGGFNPRVERTLLDARRRLEDQAATPTGLGSLTPSAAGSTASLVGVGLPPPTPRSSGLSTPVPPSAGHLAHVREQMAGALRKLRQLEEQVKLIPVLQVKLSVLQEEKRQLTVQLKSQKFLGHPTAGRGRSELCLDLPDPPEDPVALETRSVGTWVRERDLGMPDGEAALAAKVAVLETQLKKALQELQAAQARQADPQPQAWPPPDSPVRVDTVRVVEGPREVEVVASTAAGAPAQRAQSLEPYGTGLRALAMPGRPESPPVFRSQEVVETMCPVPAAATSNVHMVKKISITERSCDGAAEN

SEQ ID NO: 4723 - protein, 73 aa, Artificial Sequence
  Synthetic polypeptide
MGCAFINLCILASQHAWAQLTFWEASQLLRRLRQENCLNRGGRGCSEPRSCHCTPARATKQDSISKKKKKRKG

SEQ ID NO: 4724 - protein, 134 aa, Artificial Sequence
  Synthetic polypeptide
MEEGGNLGGLIKMVHLLVLSGAWGMQMWVTFVSGFLLFRSLPRHTFGLVQSKLFPFYFHISMGCAFINLCILASQHAWAQLTFWEASQLLRRLRQENCLNRGGRGCSEPRSCHCTPARATKQDSISKKKKKRKG

SEQ ID NO: 4725 - protein, 332 aa, Artificial Sequence
  Synthetic polypeptide
MERTAGKELALAPLQDWGEETEDGAVYSVSLRRQRSQRRSPAEGPGGSQAPSPIANTFLHYRTSKVRVLRAARLERLVGELVFGDREQDPSFMPAFLATYRTFVPTACLLGFLLPPMPPPPPPGVEIKKTAVQDLSFNKNLRAVVSVLGSWLQDHPQDFRDPPAHSDLGSVRTFLGWAAPGSAEAQKAEKLLEDFLEEAEREQEEEPPQVWTGPPRVAQTSDPDSSEACAEEEEGLMPQGPQLLDFSVDEVAEQLTLIDLELFSKVRLYECLGSVWSQRDRPGAAGASPTVRATVAQFNTVTGCVLGSVLGAPGLAAPQRAQRLEKWIRIAQ

SEQ ID NO: 4726 - protein, 61 aa, Artificial Sequence
  Synthetic polypeptide
LGLRVVAEGPAGGCRRLPHCARHRGPVQHRDRLCAGFRARSTGLGRPAEGAAAGEVDPHRP

SEQ ID NO: 4727 - protein, 16 aa, Artificial Sequence
  Synthetic polypeptide
AHSRQRAGPGTAAGLG

SEQ ID NO: 4728 - protein, 151 aa, Artificial Sequence
  Synthetic polypeptide
MERTAGKELALAPLQDWGEETEDGAVYSVSLRRQRSQRRSPAEGPGGSQAPSPIANTFLHYRTSKVRVLRAARLERLVGELVFGDREQDPSFMPAFLATYRTFVPTACLLGFLLPPMPPPPPPGDQEDSGTRSELQQEPEVLWHMPIVPAT

SEQ ID NO: 4729 - protein, 148 aa, Artificial Sequence
  Synthetic polypeptide
MERTAGKELALAPLQDWGEETEDGAVYSVSLRRQRSQRRSPAEGPGGSQAPSPIANTFLHYRTSKVRVLRAARLERLVGELVFGDREQDPSFMPAFLATYRTFVPTACLLGFLLPPMPPPPPPGVEIKKTAVQDLSFNKNLRCCGTCL

SEQ ID NO: 4730 - protein, 112 aa, Artificial Sequence
  Synthetic polypeptide
MRRPGRKGTGGGQAPSPIANTFLHYRTSKVRVLRAARLERLVGELVFGDREQDPSFMPAFLATYRTFVPTACLLGFLLPPMPPPPPPGVEIKKTAVQDLSFNKNLRCCGTCL

SEQ ID NO: 4731 - protein, 16 aa, Artificial Sequence
  Synthetic polypeptide
AHSRQRAGPGTAAGLG

SEQ ID NO: 4732 - protein, 130 aa, Artificial Sequence
  Synthetic polypeptide
MERTAGKELALAPLQDWGEETEDGAVYSVSLRRQRSQRRSPAEGPGGSQAPSPIANTFLHYRTSKVRVLRAARLERLVGELVFGDREQDPSFMPAFLATYRTFVPTACLLGFLLPPMPPPPPPGCCGTCL

SEQ ID NO: 4733 - protein, 94 aa, Artificial Sequence
  Synthetic polypeptide
MRRPGRKGTGGGQAPSPIANTFLHYRTSKVRVLRAARLERLVGELVFGDREQDPSFMPAFLATYRTFVPTACLLGFLLPPMPPPPPPGCCGTCL

SEQ ID NO: 4734 - protein, 8 aa, Artificial Sequence
  Synthetic polypeptide
MDTTPGRH

SEQ ID NO: 4735 - protein, 72 aa, Artificial Sequence
  Synthetic polypeptide
MDSVVFEDVDVNFTQEEWALLDPSQKNLYRDVMQETFRNLASVGKKWKDQKIEDEYKNPRRNLRAGCGGSRL

SEQ ID NO: 4736 - protein, 71 aa, Artificial Sequence
  Synthetic polypeptide
DSVVFEDVDVNFTQEEWALLDPSQKNLYRDVMQETFRNLASVGKKWKDQKIEDEYKNPRRNLRAGCGGSRL

SEQ ID NO: 4737 - protein, 1 aa, Artificial Sequence
  Synthetic polypeptide
M

SEQ ID NO: 4738 - protein, 148 aa, Artificial Sequence
  Synthetic polypeptide
MEPQPGGARSCRRGAPGGACELGPAAEAAPMSLAIHSTTGTRYDLAVPPDETVEGLRKRLSQRLKVPKERLALLHKDTRLSSGKLQEFGVGDGSKLTLVPTVEAGLMSQASRPEQSVMQALESLTETQAAMASDEGKLFVGGLSFDTN

SEQ ID NO: 4739 - protein, 36 aa, Artificial Sequence
  Synthetic polypeptide
GTHRGSGPHVSGLKAGTVRDASSRESHGDAGRHGIR

SEQ ID NO: 4740 - protein, 377 aa, Artificial Sequence
  Synthetic polypeptide
MGAYARASGVCARGCLDSAGPWTMSRALRPPLPPLCFFLLLLAAAGARAGGYETCPTVQPNMLNVHLLPHTHDDVGWLKTVDQYFYGIKNDIQHAGVQYILDSVISALLADPTRRFIYVEIAFFSRWWHQQTNATQEVVRDLVRQGRLEFANGGWVMNDEAATHYGAIVDQMTLGLRFLEDTFGNDGRPRVAWHIDPFGHSREQASLFAQMGFDGFFFGRLDYQDKWVRMQKLEMEQVWRASTSLKPPTADLFTGVLPNGYNPPRNLCWDVLCVDQPLVEDPRSPEYNAKELVDYFLNVATAQGRYYRTNHTVMTMGSDFQYENANMWFKNLDKLIRLVNAQSQVLMRLRLENGVNPRGGACSELRLSHCTTAWATK

SEQ ID NO: 4741 - protein, 131 aa, Artificial Sequence
  Synthetic polypeptide
MAAGVAGWGVEAEEFEDAPDVEPLEPTLSNIIEQRSLKWIFVGGKGGVGKTTCSCSLAVQLSKGRESVLIISTDPAHNISDAFDQKFSKVPTKVKGYDNLFAMVWWRAPVVPATPEAEAGEWRERGKWTLQ

SEQ ID NO: 4742 - protein, 464 aa, Artificial Sequence
  Synthetic polypeptide
MSVDKAELCGSLLTWLQTFHVPSPCASPQDLSSGLAVAYVLNQIDPSWFNEAWLQGISEDPGPNWKLKVSNLKMVLRSLVEYSQDVLAHPVSEEHLPDVSLIGEFSDPAELGKLLQLVLGCAISCEKKQDHIQRIMTLEESVQHVVMEAIQELMTKDTPDSLSPETYGNFDSQSRRYYFLSEEAEEGDELQQRCLDLERQLMLLSEEKQSLAQENAGLRERMGRPEGEGTPGLTAKKLLLLQSQLEQLQEENFRLESGREDERLRCAELEREVAELQHRNQALTSLAQEAQALKDEMDELRQSSERAGQLEATLTSCRRRLGELRELRRQVRQLEERNAGHAERTRQLEDELRRAGSLRAQLEAQRRQVQELQGQRQEEAMKAEKWLFECRNLEEKYESVTKEKERLLAERDSLREANEELRCAQLQPRGLTQADPSLDPTSTPVDNLAAEILPAELRHGGSCL

SEQ ID NO: 4743 - protein, 151 aa, Artificial Sequence
  Synthetic polypeptide
MDLSELERDNTGRCRLSSPVPAVCRKEPCVLGVDEAGRGPVLGPMVYAICYCPLPRLADLEALKVADSKTLLESERERLFAKMEDTDFVGWALDVLSPNLISTSMLGRVKYNLNSLSHDTATGLIQYALDQGVNVTQHSILGDKGSPPTQK

SEQ ID NO: 4744 - protein, 251 aa, Artificial Sequence
  Synthetic polypeptide
MDLSELERDNTGRCRLSSPVPAVCRKEPCVLGVDEAGRGPVLGPMVYAICYCPLPRLADLEALKVADSKTLLESERERLFAKMEDTDFVGWALDVLSPNLISTSMLGRVKYNLNSLSHDTATGLIQYALDQGVNVTQVFVDTVGMPETYQARLQQSFPGIEVTVKAKADALYPVVSAASICAKVARDQAVKKWQFVEKLQDLDTDYGSGYPNDRSCHVERKPKPQRGHVQIFWPTAPAEVQGNSQHQLPDM

SEQ ID NO: 4745 - protein, 374 aa, Artificial Sequence
  Synthetic polypeptide
MDDSGLIRRRRLQKDLPLPRKSSSCRTSNRKSLILTSTSPTLPRPHSPLPGHLGSSPLDSPRNFSPNTPAHFSFASSRRADGRRWSLASLPSSGYGTNTPSSTVSSSCSSQERLHQLPYQPTVDELHFLSKHFGSTESITDEDGGRRSPAVRPRSRSLSPGRSPSSYDNEIVMMNHVYKERFPKATAQMEEKLRDFTRAYEPDSVLPLADGVLSFIHHQIIELARDCLTKSRDGLITTVYFYELQENLEKLLQDAYERSESLEVAFVTQLVKKLLIIISRPARLLECLEFNPEEFYHLLEAAEGHAKEGHLVKTDIPRYIIRQLGLTRDPFPDVVHLEEQDSGGSNTPEQDDLSEALWISWSYTLSLSFPIHKM

SEQ ID NO: 4746 - protein, 378 aa, Artificial Sequence
  Synthetic polypeptide
MSDSLWTALSNFSMPSFPGGSMFRRTKSCRTSNRKSLILTSTSPTLPRPHSPLPGHLGSSPLDSPRNFSPNTPAHFSFASSRRADGRRWSLASLPSSGYGTNTPSSTVSSSCSSQERLHQLPYQPTVDELHFLSKHFGSTESITDEDGGRRSPAVRPRSRSLSPGRSPSSYDNEIVMMNHVYKERFPKATAQMEEKLRDFTRAYEPDSVLPLADGVLSFIHHQIIELARDCLTKSRDGLITTVYFYELQENLEKLLQDAYERSESLEVAFVTQLVKKLLIIISRPARLLECLEFNPEEFYHLLEAAEGHAKEGHLVKTDIPRYIIRQLGLTRDPFPDVVHLEEQDSGGSNTPEQDDLSEALWISWSYTLSLSFPIHKM

SEQ ID NO: 4747 - protein, 189 aa, Artificial Sequence
  Synthetic polypeptide
ETPLPAARSPRQQSPGQPPKLLPQHPRPLLVCLLPKGGRTPVVSGLAPFIWLWHQHAQFHRLVLLLLPGAPSPAALPAHGGRAPLPLQTLREHREHHRRGWWPSLPSRAAPLTEPQPRALPLLLRQRDRDDESRLQGEVPEGHCADGGEAARLYPRLRTRQRSASGRWRAQLHPPPDHRAGPGLPDQVP

SEQ ID NO: 4748 - protein, 29 aa, Artificial Sequence
  Synthetic polypeptide
QPIPQQPPASGAGSEAVTGHPHHPIRNAI

SEQ ID NO: 4749 - protein, 224 aa, Artificial Sequence
  Synthetic polypeptide
MGERKGVNKYYPPDFNPEKHGSLNRYHNSHPLRERARKLSQGILIIRFEMPYNIWCDGCKNHIGMGVRYNAEKKKVGNYYTTPIYRFRMKCHLCVNYIEMQTDPANCDYVIVSGAQRKEERWDMADNEQVLTTEHEKKQKLETDAMFRLEHGEADRSTLKKALPTLSHIQEAQSAWKDDFALNSMLRRRGQLHQGKGFSLPATVCRVSRTKPSTRWVSQKYLWD

SEQ ID NO: 4750 - protein, 175 aa, Artificial Sequence
  Synthetic polypeptide
MPYNIWCDGCKNHIGMGVRYNAEKKKVGNYYTTPIYRFRMKCHLCVNYIEMQTDPANCDYVIVSGAQRKEERWDMADNEQVLTTEHEKKQKLETDAMFRLEHGEADRSTLKKALPTLSHIQEAQSAWKDDFALNSMLRRRGQLHQGKGFSLPATVCRVSRTKPSTRWVSQKYLWD

SEQ ID NO: 4751 - protein, 87 aa, Artificial Sequence
  Synthetic polypeptide
KQKLETDAMFRLEHGEADRSTLKKALPTLSHIQEAQSAWKDDFALNSMLRRRGQLHQGKGFSLPATVCRVSRTKPSTRWVSQKYLWD

SEQ ID NO: 4752 - protein, 270 aa, Artificial Sequence
  Synthetic polypeptide
MTLEAIRYSRGSLQILDQLLLPKQSRYEAVGSVHQAWEAIRAMKVRGAPAIALVGCLSLAVELQAGAGGPGLAALVAFVRDKLSFLVTARPTAVNMARAARDLADVAAREAEREGATEEAVRERRETELCEHWEEHTRQRELPLRGPLGGTVLETRPYNQGARLTAFELVYEQIPATLITDSMVAAAMAHRGVSAVVVGADRVVANGDTANKVGTYQLAIVAKHHGIPFYVAAPSSSCDLRLETGKEIIIEERPGQELTDVNGVRIAAPA

SEQ ID NO: 4753 - protein, 317 aa, Artificial Sequence
  Synthetic polypeptide
MTLEAIRYSRGSLQILDQLLLPKQSRYEAVGSVHQAWEAIRAMKVRGAPAIALVGCLSLAVELQAGAGGPGLAALVAFVRDKLSFLVTARPTAVNMARAARDLADVAAREAEREGATEEAVRERVICCTEDMLEKDLRDNRSIGDLGARHLLERVAPSGGKVTVLTHCNTGALATAGYGTALGVIRSLHSLGRLEHAFCTETRPYNQGARLTAFELVYEQIPATLITDSMVAAAMAHRGVSAVVVGADRVVANGDTANKVGTYQLAIVAKHHGIPFYVAAPSSSCDLRLETGKEIIIEERPGQELTDVNGVRIAAPA

SEQ ID NO: 4754 - protein, 722 aa, Artificial Sequence
  Synthetic polypeptide
MEPPAAKRSRGCPAGPEERDAGAGAARGRGRPEALLDLSAKRVAESWAFEQVEERFSRVPEPVQKRIVFWSFPRSEREICMYSSLGYPPPEGEHDARVPFTRGLHLLQSGAVDRVLQVGFHLSGNIREPGSPGEPERLYHVSISFDRCKITSVSCGCDNRDLFYCAHVVALSLYRIRHAHQVELRLPISETLSQMNRDQLQKFVQYLISAHHTEVLPTAQRLADEILLLGSEINLVNGAPDPTAGAGIEDANCWHLDEEQIQEQVKQLLSNGGYYGASQQLRSMFSKVREMLRMRDSNGARMLILMTEQFLQDTRLALWRQQGAGMTDKCRQLWDELGALWVCVVLSPHCKPEERAGWLQLLSRWDKLDVCPLEEGNYSFDGPSLQPTMAPAPELLQKGSTCITNTEGWVGHPLDPIGCLCRALLEACRLEEETLTLYPDSGPEKRKVAYQHVPVPGSPGESYLVLALEVALLGLGQQRALPEGLYAQDKVVRNEEQLLALLEEVELDERLVQVLRKQAGLLLEGGPFSGFGEVLFRESVPMHTCARYLFTALLPHDPDLAYRLALRAMRLPILETAFPAGEPHPSPLDSIMSNRFPRWFILGHLETRQCELASTMLTAAKGDPKWLHTVLGSIQQNIHSPALLFKLAQDACKTATPVSAPPDTTLLGIALELGLQVMRMTLNVMTWRRREMVRWLVSCATEIATREAEAGELLEPGRQRLQ

SEQ ID NO: 4755 - protein, 556 aa, Artificial Sequence
  Synthetic polypeptide
MFSKVREMLRMRDSNGARMLILMTEQFLQDTRLALWRQQGAGMTDKCRQLWDELGALWVCVVLSPHCKPEERAGWLQLLSRWDKLDVCPLEEGNYSFDGPSLQPTMAPAPGSEEEEEVAATSPRHTVFGRALLAGELHWNDAYLQRILASDSYGPSLTGSVGGDKPTFDPQGRPLWLGEPFPTACARVDTLRAHGYPRQALRLASAIINTLRLQQRHQLESYKQQKKELLQKGSTCITNTEGWVGHPLDPIGCLCRALLEACRLEEETLTLYPDSGPEKRKVAYQHVPVPGSPGESYLVLALEVALLGLGQQRALPEGLYAQDKVVRNEEQLLALLEEVELDERLVQVLRKQAGLLLEGGPFSGFGEVLFRESVPMHTCARYLFTALLPHDPDLAYRLALRAMRLPILETAFPAGEPHPSPLDSIMSNRFPRWFILGHLETRQCELASTMLTAAKGDPKWLHTVLGSIQQNIHSPALLFKLAQDACKTATPVSAPPDTTLLGIALELGLQVMRMTLNVMTWRRREMVRWLVSCATEIATREAEAGELLEPGRQRLQ

SEQ ID NO: 4756 - protein, 631 aa, Artificial Sequence
  Synthetic polypeptide
SAHHTEVLPTAQRLADEILLLGSEINLVNGAPDPTAGAGIEDANCWHLDEEQIQEQVKQLLSNGGYYGASQQLRSMFSKVREMLRMRDSNGARMLILMTEQFLQDTRLALWRQQGAGMTDKCRQLWDELGALWVCVVLSPHCKPEERAGWLQLLSRWDKLDVCPLEEGNYSFDGPSLQPTMAPAPGSEEEEEVAATSPRHTVFGRALLAGELHWNDAYLQRILASDSYGPSLTGSVGGDKPTFDPQGRPLWLGEPFPTACARVDTLRAHGYPRQALRLASAIINTLRLQQRHQLESYKQQKKELLQKGSTCITNTEGWVGHPLDPIGCLCRALLEACRLEEETLTLYPDSGPEKRKVAYQHVPVPGSPGESYLVLALEVALLGLGQQRALPEGLYAQDKVVRNEEQLLALLEEVELDERLVQVLRKQAGLLLEGGPFSGFGEVLFRESVPMHTCARYLFTALLPHDPDLAYRLALRAMRLPILETAFPAGEPHPSPLDSIMSNRFPRWFILGHLETRQCELASTMLTAAKGDPKWLHTVLGSIQQNIHSPALLFKLAQDACKTATPVSAPPDTTLLGIALELGLQVMRMTLNVMTWRRREMVRWLVSCATEIATREAEAGELLEPGRQRLQ

SEQ ID NO: 4757 - protein, 71 aa, Artificial Sequence
  Synthetic polypeptide
SPGPVSPRLRPREAEGGLPARACAREPWGVLLGAGAGGGTAGAGAAAGPAGGAVRPGQGGAQRGAAADPPV

SEQ ID NO: 4758 - protein, 78 aa, Artificial Sequence
  Synthetic polypeptide
MRGGRGAPFWLWPLPKLALLPLLWVLFQRTRPQGSAGPLQCYGVGPLGDLNCSWEPLGDLGAPSELHLQSQKYGSSRL

SEQ ID NO: 4759 - protein, 176 aa, Artificial Sequence
  Synthetic polypeptide
MAKVSVLNVAVLENPSPFHSPFRFEISFECSEALADDLEWKIIYVGSAESEEFDQILDSVLVGPVPAGRHMFVFQADAPNPSLIPETDAVGVTVVLITCTYHGQEFIRVGYYVNNEYLNPELRENPPMKPDFSQSQLHRRLRQENRLNPEGRGCSETRSQHCTPAWATKAKLRLKK

SEQ ID NO: 4760 - protein, 136 aa, Artificial Sequence
  Synthetic polypeptide
MAKVSVLNVAVLENPSPFHSPFRFEISFECSEALADDLEWKIIYVGSAESEEFDQILDSVLVGPVPAGRHMFVFQESKTGGSPEVRSSRPAWPTWRNPISTKNTKISRAWWWAPVIPATREAEAGESLEPVRRRLQ

SEQ ID NO: 4761 - protein, 80 aa, Artificial Sequence
  Synthetic polypeptide
MAKVSVLNVAVLENPSPFHSPFRFEISFECSEALADDLEWKIIYVGSAESEEFDQILDSVLVGPVPAGRHMFVFQTPGRL

SEQ ID NO: 4762 - protein, 41 aa, Artificial Sequence
  Synthetic polypeptide
MAKVSVLNVAVLENPSPFHSPFRFEISFECSEALADETSKN

SEQ ID NO: 4763 - protein, 594 aa, Artificial Sequence
  Synthetic polypeptide
MASDAVQSEPRSWSLLEQLGLAGADLAAPGVQQQLELERERLRREIRKELKLKEGAENLRRATTDLGRSLGPVELLLRGSSRRLDLLHQQLQELHAHVVLPDPAATHDGPQSPGAGGPTCSATNLSRVAGLEKQLAIELKVKQGAENMIQTYSNGSTKDRKLLLTAQQMLQDSKTKIDIIRMQLRRALQAGQLENQAAPDDTQGSPDLGAVELRIEELRHHFRVEHAVAEGAKNVLRLLSAAKAPDRKAVSEAQEKLTESNQKLGLLREALERRLGELPADHPKGRLLREELAAASSAAFSTRLAGPFPATHYSTLCKPAPLTGTLEVRVVGCRDLPETIPWNPTPSMGGPGTPDSRPPFLSRPARGLYSRSGSLSGRSSLKAEAENTSEVSTVLKLDNTVVGQTSWKPCGPNAWDQSFTLELERARELELAVFWRDQRGLCALKFLKLEDFLDNERHEVQLDMEPQGCLVAEVTFRNPVIERIPRLRRQKKIFSKQQGKAFQRARQMNIDVATWVRLLRRLIPNATGTGTFSPGASPGSEARTTGDISVEKLNLGTDSDSSPQKSSRDPPSSPSSLSQLLRKLNEEDRLRPEV

SEQ ID NO: 4764 - protein, 600 aa, Artificial Sequence
  Synthetic polypeptide
MAEANNPSEQELESEPRSWSLLEQLGLAGADLAAPGVQQQLELERERLRREIRKELKLKEGAENLRRATTDLGRSLGPVELLLRGSSRRLDLLHQQLQELHAHVVLPDPAATHDGPQSPGAGGPTCSATNLSRVAGLEKQLAIELKVKQGAENMIQTYSNGSTKDRKLLLTAQQMLQDSKTKIDIIRMQLRRALQAGQLENQAAPDDTQGSPDLGAVELRIEELRHHFRVEHAVAEGAKNVLRLLSAAKAPDRKAVSEAQEKLTESNQKLGLLREALERRLGELPADHPKGRLLREELAAASSAAFSTRLAGPFPATHYSTLCKPAPLTGTLEVRVVGCRDLPETIPWNPTPSMGGPGTPDSRPPFLSRPARGLYSRSGSLSGRSSLKAEAENTSEVSTVLKLDNTVVGQTSWKPCGPNAWDQSFTLELERARELELAVFWRDQRGLCALKFLKLEDFLDNERHEVQLDMEPQGCLVAEVTFRNPVIERIPRLRRQKKIFSKQQGKAFQRARQMNIDVATWVRLLRRLIPNATGTGTFSPGASPGSEARTTGDISVEKLNLGTDSDSSPQKSSRDPPSSPSSLSQLLRKLNEEDRLRPEV

SEQ ID NO: 4765 - protein, 80 aa, Artificial Sequence
  Synthetic polypeptide
WVRLLRRLIPNATGTGTFSPGASPGSEARTTGDISVEKLNLGTDSDSSPQKSSRDPPSSPSSLSQLLRKLNEEDRLRPEV

SEQ ID NO: 4766 - protein, 42 aa, Artificial Sequence
  Synthetic polypeptide
MGAHLVRRYLGDASVEPDPLQMPTFPPDYGFPERKERAWVTE

SEQ ID NO: 4767 - protein, 90 aa, Artificial Sequence
  Synthetic polypeptide
MHNLYSITGYPDPPGTMEEEEEDDDYENSTPPYKDLPPKPGTMEEEEEDDDYENSTPPYKDLPPKPVSSHNDSELVHVINRILYSGDHPL

SEQ ID NO: 4768 - protein, 63 aa, Artificial Sequence
  Synthetic polypeptide
MQLVPSIEERETPLTREDRPALQEPPWSLGCTGLKAAMQIQRVVIPVPTLGHRNPWVARDSAM

SEQ ID NO: 4769 - protein, 172 aa, Artificial Sequence
  Synthetic polypeptide
MESVTFEDVAVEFIQEWALLDSARRSLCKYRMLDQCRTLASRGTPPCKPSCVSQLGQRAEPKATERGILRATGVAWESQLKPEELPSMQDLLEEASSRDMQMGPGLFLRMQLVPSIEERETPLTREDRPALQEPPWSLGCTGLKAAMQIQRVVIPVPTLGHRNPWVARDSAM

SEQ ID NO: 4770 - protein, 146 aa, Artificial Sequence
  Synthetic polypeptide
MESVTFEDVAVEFIQEWALLDSARRSLCKYRMLDQCRTLASRGAGAVPEDAAGALHRREGDTIDSRGPASSPGAALVSGMHGTEGRYADSEGGDTSAYSGPPQPMGGQGFCHVARACFPFAFRHDCKFLESSPAMRPVQPVEPGAN

SEQ ID NO: 4771 - protein, 76 aa, Artificial Sequence
  Synthetic polypeptide
MQLVPSIEERETPLTREDRPALQEPPWSLGCTGLKAAMQIQRVVIPVPTLGHRNPWVARDSGAIGNGTSKEVIKVK

SEQ ID NO: 4772 - protein, 185 aa, Artificial Sequence
  Synthetic polypeptide
MESVTFEDVAVEFIQEWALLDSARRSLCKYRMLDQCRTLASRGTPPCKPSCVSQLGQRAEPKATERGILRATGVAWESQLKPEELPSMQDLLEEASSRDMQMGPGLFLRMQLVPSIEERETPLTREDRPALQEPPWSLGCTGLKAAMQIQRVVIPVPTLGHRNPWVARDSGAIGNGTSKEVIKVK

SEQ ID NO: 4773 - protein, 118 aa, Artificial Sequence
  Synthetic polypeptide
MESVTFEDVAVEFIQEWALLDSARRSLCKYRMLDQCRTLASRGAGAVPEDAAGALHRREGDTIDSRGPASSPGAALVSGMHGTEGRYADSEGGDTSAYSGPPQPMGGQGFWCHWKWDL

SEQ ID NO: 4774 - protein, 66 aa, Artificial Sequence
  Synthetic polypeptide
MQLVPSIEERETPLTREDRPALQEPPWSLGCTGLKAAMQIQRVVIPVPTLGHRNPWVARDSGSLQL

SEQ ID NO: 4775 - protein, 175 aa, Artificial Sequence
  Synthetic polypeptide
MESVTFEDVAVEFIQEWALLDSARRSLCKYRMLDQCRTLASRGTPPCKPSCVSQLGQRAEPKATERGILRATGVAWESQLKPEELPSMQDLLEEASSRDMQMGPGLFLRMQLVPSIEERETPLTREDRPALQEPPWSLGCTGLKAAMQIQRVVIPVPTLGHRNPWVARDSGSLQL

SEQ ID NO: 4776 - protein, 134 aa, Artificial Sequence
  Synthetic polypeptide
MESVTFEDVAVEFIQEWALLDSARRSLCKYRMLDQCRTLASRGAGAVPEDAAGALHRREGDTIDSRGPASSPGAALVSGMHGTEGRYADSEGGDTSAYSGPPQPMGGQGFWVFAAVTKLGGHKVGPQSNMTVSL

SEQ ID NO: 4777 - protein, 370 aa, Artificial Sequence
  Synthetic polypeptide
MGGRVFLVFLAFCVWLTLPGAETQDSRGCARWCPQDSSCVNATACRCNPGFSSFSEIITTPMETCDDINECATLSKVSCGKFSDCWNTEGSYDCVCSPGYEPVSGAKTFKNESENTCQDVDECQQNPRLCKSYGTCVNTLGSYTCQCLPGFKLKPEDPKLCTDVNECTSGQNPCHSSTHCLNNVGSYQCRCRPGWQPIPGSPNGPNNTVCEDVDECSSGQHQCDSSTVCFNTVGSYSCRCRPGWKPRHGIPNNQKDTVCEDMTFSTWTPPPGVHSQTLSRFFDKVQDLGRDYKPGLANNTIQSILQALDELLEAPGDLETLPRLQQHCVASHLLDGLEDVLRGLSKNLSNGLLNFSYPAGTGQDPISKKR

SEQ ID NO: 4778 - protein, 321 aa, Artificial Sequence
  Synthetic polypeptide
MGGRVFLVFLAFCVWLTLPGAETQDSRGCARWCPQDSSCVNATACRCNPGFSSFSEIITTPMETCDDINECATLSKVSCGKFSDCWNTEGSYDCVCSPGYEPVSGAKTFKNESENTCQDVDECQQNPRLCKSYGTCVNTLGSYTCQCLPGFKLKPEDPKLCTDVDECSSGQHQCDSSTVCFNTVGSYSCRCRPGWKPRHGIPNNQKDTVCEDMTFSTWTPPPGVHSQTLSRFFDKVQDLGRDYKPGLANNTIQSILQALDELLEAPGDLETLPRLQQHCVASHLLDGLEDVLRGLSKNLSNGLLNFSYPAGTGQDPISKKR

SEQ ID NO: 4779 - protein, 228 aa, Artificial Sequence
  Synthetic polypeptide
MGGRVFLVFLAFCVWLTLPGAETQDSRGCARWCPQDSSCVNATACRCNPGFSSFSEIITTPMETCDDINECATLSKVSCGKFSDCWNTEGSYDCVCSPGYEPVSGAKTFKNESENTCQDMTFSTWTPPPGVHSQTLSRFFDKVQDLGRDYKPGLANNTIQSILQALDELLEAPGDLETLPRLQQHCVASHLLDGLEDVLRGLSKNLSNGLLNFSYPAGTGQDPISKKR

SEQ ID NO: 4780 - protein, 277 aa, Artificial Sequence
  Synthetic polypeptide
MGGRVFLVFLAFCVWLTLPGAETQDSRGCARWCPQDSSCVNATACRCNPGFSSFSEIITTPMETCDDINECATLSKVSCGKFSDCWNTEGSYDCVCSPGYEPVSGAKTFKNESENTCQDVDECSSGQHQCDSSTVCFNTVGSYSCRCRPGWKPRHGIPNNQKDTVCEDMTFSTWTPPPGVHSQTLSRFFDKVQDLGRDYKPGLANNTIQSILQALDELLEAPGDLETLPRLQQHCVASHLLDGLEDVLRGLSKNLSNGLLNFSYPAGTGQDPISKKR

SEQ ID NO: 4781 - protein, 109 aa, Artificial Sequence
  Synthetic polypeptide
MTFSTWTPPPGVHSQTLSRFFDKVQDLGRDYKPGLANNTIQSILQALDELLEAPGDLETLPRLQQHCVASHLLDGLEDVLRGLSKNLSNGLLNFSYPAGTGQDPISKKR

SEQ ID NO: 4782 - protein, 105 aa, Artificial Sequence
  Synthetic polypeptide
HSRMRARTRVKMWTNVSRTQGSVKATAPASTPSAATRASACLASSSNLRTRSSAQMWTSAAPGSISVTAPPSASTPWVHTAAAAAQAGSPDTESRITKRTLSVKI

SEQ ID NO: 4783 - protein, 174 aa, Artificial Sequence
  Synthetic polypeptide
MNQPQRMAPVGTDKELSDLLDFSMMFPLPVTNGKGRPASLAGAQFGGSGLEDRPSSGSWGSGDQSSSSFDPSRTFSEGTHFTESHSSLSSSTFLGPGLGGKSGERGAYASFGRDAGVGGLTQAGFLSGELALNSPGPLSPSGMKGTSQYYPSYSGSSRRRAADGSLGEFANSSP

SEQ ID NO: 4784 - protein, 90 aa, Artificial Sequence
  Synthetic polypeptide
MCRRGPWHGQCTHSARQSGERGAYASFGRDAGVGGLTQAGFLSGELALNSPGPLSPSGMKGTSQYYPSYSGSSRRRAADGSLGEFANSSP

SEQ ID NO: 4785 - protein, 123 aa, Artificial Sequence
  Synthetic polypeptide
MNQPQRMAPVGTDKELSDLLDFSMMFPLPVTNGKGRPASLAGAQFGGSGKSGERGAYASFGRDAGVGGLTQAGFLSGELALNSPGPLSPSGMKGTSQYYPSYSGSSRRRAADGSLGEFANSSP

SEQ ID NO: 4786 - protein, 203 aa, Artificial Sequence
  Synthetic polypeptide
MNQPQRMAPVGTDKELSDLLDFSMMFPLPVTNGKGRPASLAGAQFGGSGLEDRPSSGSWGSGDQSSSSFDPSRTFSEGTHFTESHSSLSSSTFLGPGLGGECLAWCGPSAVHRCADVGLGMVSARTAPGKSGERGAYASFGRDAGVGGLTQAGFLSGELALNSPGPLSPSGMKGTSQYYPSYSGSSRRRAADGSLGEFANSSP

SEQ ID NO: 4787 - protein, 187 aa, Artificial Sequence
  Synthetic polypeptide
MTEAGKLPLPLPPRLDWFVHTQMGQLAQDGVPEWFHGAISREDAENLLESQPLGSFLIRVSHSHVGYTLSYKAQSSCCHFMVKLLDDGTFMIPGEKVAHTSLDALVTFHQQKPIEPRRELLTQPCRQKDPANVDYEDLFLYSNAVAEEAACPVSAPEERTSQKCSSKSYLLMGLHAPWLPFQSDCEL

SEQ ID NO: 4788 - protein, 98 aa, Artificial Sequence
  Synthetic polypeptide
HSYSEGLGHPRVSQALVTFHQQKPIEPRRELLTQPCRQKDPANVDYEDLFLYSNAVAEEAACPVSAPEERTSQKCSSKSYLLMGLHAPWLPFQSDCEL

SEQ ID NO: 4789 - protein, 162 aa, Artificial Sequence
  Synthetic polypeptide
MTEAGKLPLPLPPRLDWDAENLLESQPLGSFLIRVSHSHVGYTLSYKAQSSCCHFMVKLLDDGTFMIPGEKVAHTSLDALVTFHQQKPIEPRRELLTQPCRQKDPANVDYEDLFLYSNAVAEEAACPVSAPEERTSQKCSSKSYLLMGLHAPWLPFQSDCEL

SEQ ID NO: 4790 - protein, 160 aa, Artificial Sequence
  Synthetic polypeptide
MTEAGKLPLPLPPRLDWFVHTQMGQLAQDGVPEWFHGAISREDAENLLESQPLGSFLIRVSHSHVGYTLSYKAQSSCCHFMVKLLDDGTFMIPGEKVAHTSLDALVTFHQQKPIEPRRELLTQPCRQKDPANVDYEDLFLYSNAVAEEAACPVSAPEELY

SEQ ID NO: 4791 - protein, 71 aa, Artificial Sequence
  Synthetic polypeptide
HSYSEGLGHPRVSQALVTFHQQKPIEPRRELLTQPCRQKDPANVDYEDLFLYSNAVAEEAACPVSAPEELY

SEQ ID NO: 4792 - protein, 135 aa, Artificial Sequence
  Synthetic polypeptide
MTEAGKLPLPLPPRLDWDAENLLESQPLGSFLIRVSHSHVGYTLSYKAQSSCCHFMVKLLDDGTFMIPGEKVAHTSLDALVTFHQQKPIEPRRELLTQPCRQKDPANVDYEDLFLYSNAVAEEAACPVSAPEELY

SEQ ID NO: 4793 - protein, 162 aa, Artificial Sequence
  Synthetic polypeptide
MTEAGKLPLPLPPRLDWFVHTQMGQLAQDGVPEWFHGAISREDAENLLESQPLGSFLIRVSHSHVGYTLSYKAQSSCCHFMVKLLDDGTFMIPGEKVAHTSLDALVTFHQQKPIEPRRELLTQPCRQKDPANVDYEDLFLYSNAVAEEAACPVSAPEEEEEQ

SEQ ID NO: 4794 - protein, 73 aa, Artificial Sequence
  Synthetic polypeptide
HSYSEGLGHPRVSQALVTFHQQKPIEPRRELLTQPCRQKDPANVDYEDLFLYSNAVAEEAACPVSAPEEEEEQ

SEQ ID NO: 4795 - protein, 137 aa, Artificial Sequence
  Synthetic polypeptide
MTEAGKLPLPLPPRLDWDAENLLESQPLGSFLIRVSHSHVGYTLSYKAQSSCCHFMVKLLDDGTFMIPGEKVAHTSLDALVTFHQQKPIEPRRELLTQPCRQKDPANVDYEDLFLYSNAVAEEAACPVSAPEEEEEQ

SEQ ID NO: 4796 - protein, 284 aa, Artificial Sequence
  Synthetic polypeptide
MAAAAVGAGHGAGGPGAASSSGGAREGARVAALCLLWYALSAGGNVVNKVILSAFPFPVTVSLCHILALCAGLPPLLRAWRVPPAPPVSGPGPSPHPSSGPLLPPRFYPRYVLPLAFGKYFASVSAHVSIWKVPVSYAHTVKATMPIWVVLLSRIIMKEKQSTKVYLSLIPIISGVLLATVTELSFDMWGLVSALAATLCFSLQNIFSKKVLRDSRIHHLRLLNILGCHAVFFMIPTWVLVDLSAFLVSSDLAQWLQPVIPALWEAEVGRSLEVRSSRPAWPTW

SEQ ID NO: 4797 - protein, 30 aa, Artificial Sequence
  Synthetic polypeptide
YEGEAEHQGILVTHPHHQRCPAGHRHRVVF

SEQ ID NO: 4798 - protein, 218 aa, Artificial Sequence
  Synthetic polypeptide
SGGAREGARVAALCLLWYALSAGGNVVNKVILSAFPFPVTVSLCHILALCAGLPPLLRAWRVPPAPPVSGPGPSPHPSSGPLLPPRFYPRYVLPLAFGKYFASVSAHVSIWKVPVSYAHTVKATMPIWVVLLSRIIMKEKQSTKVLRDSRIHHLRLLNILGCHAVFFMIPTWVLVDLSAFLVSSDLAQWLQPVIPALWEAEVGRSLEVRSSRPAWPTW

SEQ ID NO: 4799 - protein, 128 aa, Artificial Sequence
  Synthetic polypeptide
MKEKQSTKVYLSLIPIISGVLLATVTELSFDMWGLVSALAATLCFSLQNIFSKKVLRDSRIHHLRLLNILGCHAVFFMIPTWVLVDLSAFLVSSDLAQWLQPVIPALWEAEVGRSLEVRSSRPAWPTW

SEQ ID NO: 4800 - protein, 922 aa, Artificial Sequence
  Synthetic polypeptide
MQRGKPCRALPTLKCQTFCQRHGLMFEVVDLRWGIRNIEATDHLTTELCLEEVDRCWKTSIGPAFVALIGDQYGPCLIPSRIDEKEWEVLRDHLTARPSDLELVARYFQRDENAFPPTYVLQAPGTGEACEPEEATLTSVLRSGAQEARRLGLITQEQWQHYHRSVIEWEIERSLLSSEDREQGATVFLREIQDLHKHILEDCALRMVDRLADGCLDADAQNLLSSLKSHITDMHPGVLKTHRLPWSRDLVNPKNKTHACYLKELGEQFVVRANHQVLTRLRELDTAGQELAWLYQEIRHHLWQSSEVIQTFCGRQELLARLGQQLRHDDSKQHTPLVLFGPPGIGKTALMCKLAEQMPRLLGHKTVTVLRLLGTSQMSSDARGLLKSICFQVCLAYGLPLPPAQVLDAHTRVVQFFHTLLHTVSCRNFESLVLLLDAMDDLDSVRHARRVPWLPLNCPPRVHLILSACSGALGVLDTLQRVLLDPEAYWEVKPLSGNQGQQMIQLLLAAARRTLSPVHTDLLWASLPECGNPGRLRLAFEEARKWASFTVPVPLATTAEEATHQLCTRLEQTHGQLLVAHVLGYIVSSRHGLSEAELKDVLSLDDEVLQDVYRDWTPPSKELLRFPPLLWVRLRRDLGYYLARRPVDGFTLLAIAHRQLVEVVRERYLSGSERAKRHGVLADFFSGTWSQGTKKLITLPLVGKPLNLDRKVAPQPLWFSHTVANLRKLKELPYHLLHSGRLEELKQEVLGSMSWISCRGISGGIEDLLDDFDLCAPHLDSPEVGLVREALQLCRPAVELRGMERSLLYTELLARLHFFATSHPALVGQLCQQAQSWFQLCAHPVLVPLGGFLQPPGGPLRATLSGCHKGITAMAWGVEEKLLVIGTQDGIMAVWDMEEQHVIHMLTGHTDSTDCGLKIFGK

SEQ ID NO: 4801 - protein, 716 aa, Artificial Sequence
  Synthetic polypeptide
MVDRLADGCLDADAQNLLSSLKSHITDMHPGVLKTHRLPWSRDLVNPKNKTHACYLKELGEQFVVRANHQVLTRLRELDTAGQELAWLYQEIRHHLWQSSEVIQTFCGRQELLARLGQQLRHDDSKQHTPLVLFGPPGIGKTALMCKLAEQMPRLLGHKTVTVLRLLGTSQMSSDARGLLKSICFQVCLAYGLPLPPAQVLDAHTRVVQFFHTLLHTVSCRNFESLVLLLDAMDDLDSVRHARRVPWLPLNCPPRVHLILSACSGALGVLDTLQRVLLDPEAYWEVKPLSGNQGQQMIQLLLAAARRTLSPVHTDLLWASLPECGNPGRLRLAFEEARKWASFTVPVPLATTAEEATHQLCTRLEQTHGQLLVAHVLGYIVSSRHGLSEAELKDVLSLDDEVLQDVYRDWTPPSKELLRFPPLLWVRLRRDLGYYLARRPVDGFTLLAIAHRQLVEVVRERYLSGSERAKRHGVLADFFSGTWSQGTKKLITLPLVGKPLNLDRKVAPQPLWFSHTVANLRKLKELPYHLLHSGRLEELKQEVLGSMSWISCRGISGGIEDLLDDFDLCAPHLDSPEVGLVREALQLCRPAVELRGMERSLLYTELLARLHFFATSHPALVGQLCQQAQSWFQLCAHPVLVPLGGFLQPPGGPLRATLSGCHKGITAMAWGVEEKLLVIGTQDGIMAVWDMEEQHVIHMLTGHTDSTDCGLKIFGK

SEQ ID NO: 4802 - protein, 787 aa, Artificial Sequence
  Synthetic polypeptide
MDSQFHMAGEASQSWLKAKEKQRGTSYMVAVIEWEIERSLLSSEDREQGATVFLREIQDLHKHILEDCALRMVDRLADGCLDADAQNLLSSLKSHITDMHPGVLKTHRLPWSRDLVNPKNKTHACYLKELGEQFVVRANHQVLTRLRELDTAGQELAWLYQEIRHHLWQSSEVIQTFCGRQELLARLGQQLRHDDSKQHTPLVLFGPPGIGKTALMCKLAEQMPRLLGHKTVTVLRLLGTSQMSSDARGLLKSICFQVCLAYGLPLPPAQVLDAHTRVVQFFHTLLHTVSCRNFESLVLLLDAMDDLDSVRHARRVPWLPLNCPPRVHLILSACSGALGVLDTLQRVLLDPEAYWEVKPLSGNQGQQMIQLLLAAARRTLSPVHTDLLWASLPECGNPGRLRLAFEEARKWASFTVPVPLATTAEEATHQLCTRLEQTHGQLLVAHVLGYIVSSRHGLSEAELKDVLSLDDEVLQDVYRDWTPPSKELLRFPPLLWVRLRRDLGYYLARRPVDGFTLLAIAHRQLVEVVRERYLSGSERAKRHGVLADFFSGTWSQGTKKLITLPLVGKPLNLDRKVAPQPLWFSHTVANLRKLKELPYHLLHSGRLEELKQEVLGSMSWISCRGISGGIEDLLDDFDLCAPHLDSPEVGLVREALQLCRPAVELRGMERSLLYTELLARLHFFATSHPALVGQLCQQAQSWFQLCAHPVLVPLGGFLQPPGGPLRATLSGCHKGITAMAWGVEEKLLVIGTQDGIMAVWDMEEQHVIHMLTGHTDSTDCGLKIFGK

SEQ ID NO: 4803 - protein, 428 aa, Artificial Sequence
  Synthetic polypeptide
MAHAGGGSGGSGAGGPAGRGLSGARWGRSGSAGHEKLPVHVEDALTYLDQVKIRFGSDPATYNGFLEIMKEFKSQSIDTPGVIRRVSQLFHEHPDLIVGFNAFLPLGYRIDIPKNGKLNIQSPLTSQENSHNHGDGAEDFKQQVPYKEDKPQVPLESDSVEFNNAISYVNKIKTRFLDHPEIYRSFLEILHTYQKEQLNTRGRPFRGMSEEEVFTEVANLFRGQEDLLSEFGQFLPEAKRSLFTGNGPCEMHSVQKNEHDKTPEHSRKRSRPSLLRPVSAPAKKKMKLRGTKDLSIAAVGKYGTLQEFSFFDKVRRVLKSQEVYENFLRCIALFNQELVSGSELLQLVSPFLGKFPELFAQFKSFLGVKELSFAPPMSDRSGDGISREIDYASCKRIGSSYRALPKTYQQPKCSGRTAICKEREFTNV

SEQ ID NO: 4804 - protein, 9 aa, Artificial Sequence
  Synthetic polypeptide
SCTRTRRSS

SEQ ID NO: 4805 - protein, 176 aa, Artificial Sequence
  Synthetic polypeptide
MAPGALRGGCEQRAPGGGARTAALGPWPWPSPGPAPSPGAAPPRSRKMSGALLWPLLPLLLLLLSARDGVRAAQPQAPGYLIAAPSVFRAGVEEVISVTIFNSPREVTVQAQLVAQGEPVVQSQGAILDKGTIKLKTCLSPFAMIVRPPQPRETVSPLNLFFFINYPVSGMSLSPV

SEQ ID NO: 4806 - protein, 129 aa, Artificial Sequence
  Synthetic polypeptide
MSGALLWPLLPLLLLLLSARDGVRAAQPQAPGYLIAAPSVFRAGVEEVISVTIFNSPREVTVQAQLVAQGEPVVQSQGAILDKGTIKLKTCLSPFAMIVRPPQPRETVSPLNLFFFINYPVSGMSLSPV

SEQ ID NO: 4807 - protein, 305 aa, Artificial Sequence
  Synthetic polypeptide
MHNPDGSASPTADPGSELQTLGQAARRPPPPRAGHDAPRRTRPSARKPLSCFSRRPMPTREPPKTRGSRGHLHTHPPGPGPPLQGLAPRGLKTSAPRPPCQPQPGPHKAKTKKIVFEDELLSQALLGAKKPIGAIPKGHKPRPHPVPDYELKYPPVSSERERSRYVAVFQDQYGEFLELQHEVGCAQAKLRQLEALLSSLPPPQSQKEAQVAARVWREFEMKRMDPGFLDKQARCHYLKGKLRHLKTQIQKFDDQGDSEGSVFSSCSSPYQGSLSPGLQMPLQFGLSSDSPSSRKAFQDFLLWVL

SEQ ID NO: 4808 - protein, 249 aa, Artificial Sequence
  Synthetic polypeptide
MPTREPPKTRGSRGHLHTHPPGPGPPLQGLAPRGLKTSAPRPPCQPQPGPHKAKTKKIVFEDELLSQALLGAKKPIGAIPKGHKPRPHPVPDYELKYPPVSSERERSRYVAVFQDQYGEFLELQHEVGCAQAKLRQLEALLSSLPPPQSQKEAQVAARVWREFEMKRMDPGFLDKQARCHYLKGKLRHLKTQIQKFDDQGDSEGSVFSSCSSPYQGSLSPGLQMPLQFGLSSDSPSSRKAFQDFLLWVL

SEQ ID NO: 4809 - protein, 15 aa, Artificial Sequence
  Synthetic polypeptide
RRRPKLQPGFGGSLR

SEQ ID NO: 4810 - protein, 321 aa, Artificial Sequence
  Synthetic polypeptide
MAMVTGGWGGPGGDTNGVDKAGGYPRAAEDDSASPPGAASDAEPGDEERPGLQVDCVVCGDKSSGKHYGVFTCEGCKSFFKRSIRRNLSYTCRSNRDCQIDQHHRNQCQYCRLKKCFRVGMRKEAVQRGRIPHSLPGAVAASSGSPPGSALAAVASGGDLFPGQPVSELIAQLLRAEPYPAAAGRFGAGGGAAGAVLGIDNVCELAARLLFSTVEWARHAPFFPELPVADQVALLRLSWSELFVLNAAQAALPLHTAPLLAAAGLHAAPMAAERAVAFMDQVRAFQEQVDKLGRLQVDSAEYGCLKAIALFTPARRGGRSL

SEQ ID NO: 4811 - protein, 290 aa, Artificial Sequence
  Synthetic polypeptide
MEVAEPSSPTEEEEEEEEHSAEPRPRTRSNPEGAEDRAVGAQASVGSRSEGEGEAASADDGSLNTSGAGPKSWQVPPPAPEVQIRTPRVNCPEKVIICLDLSEEMSLPKLESFNGSKTNALNVSQKMIEMFVRTKHKIDKSHEFALVVVNDDTAWLSGLTSDPRELCSCLYDLETASCSTFNLEGLFSLIQQKTELPVTENVQTIPPPYVVRTILVYSRPPCQPQFSLTEPMKKMFQCPYFFFDVVYIHNGTEEKEEEMSWKAWWHIPIIPSTQEAEAGESLEPGRQRLR

SEQ ID NO: 4812 - protein, 212 aa, Artificial Sequence
  Synthetic polypeptide
MMGASTLQEPALSPGRCPRQPLRSKFGHQGSTVQRKCSKTNALNVSQKMIEMFVRTKHKIDKSHEFALVVVNDDTAWLSGLTSDPRELCSCLYDLETASCSTFNLEGLFSLIQQKTELPVTENVQTIPPPYVVRTILVYSRPPCQPQFSLTEPMKKMFQCPYFFFDVVYIHNGTEEKEEEMSWKAWWHIPIIPSTQEAEAGESLEPGRQRLR

SEQ ID NO: 4813 - protein, 290 aa, Artificial Sequence
  Synthetic polypeptide
MEVAEPSSPTEEEEEEEEHSAEPRPRTRSNPEGAEDRAVGAQASVGSRSEGEGEAASADDGSLNTSGAGPKSWQVPPPAPEVQIRTPRVNCPEKVIICLDLSEEMSLPKLESFNGSKTNALNVSQKMIEMFVRTKHKIDKSHEFALVVVNDDTAWLSGLTSDPRELCSCLYDLETASCSTFNISGASPARQQKTELPVTENVQTIPPPYVVRTILVYSRPPCQPQFSLTEPMKKMFQCPYFFFDVVYIHNGTEEKEEEMSWKAWWHIPIIPSTQEAEAGESLEPGRQRLR

SEQ ID NO: 4814 - protein, 215 aa, Artificial Sequence
  Synthetic polypeptide
MEVAEPSSPTEEEEEEEEHSAEPRPRTRSNPEGAEDRAVGAQASVGSRSEGEGEAASADDGSLNTSGAGPKSWQVPPPAPEVQIRTPRVNCPEKVIICLDLSEEMSLPKLESFNGQQKTELPVTENVQTIPPPYVVRTILVYSRPPCQPQFSLTEPMKKMFQCPYFFFDVVYIHNGTEEKEEEMSWKAWWHIPIIPSTQEAEAGESLEPGRQRLR

SEQ ID NO: 4815 - protein, 60 aa, Artificial Sequence
  Synthetic polypeptide
PLQKMFQCPYFFFDVVYIHNGTEEKEEEMSWKAWWHIPIIPSTQEAEAGESLEPGRQRLR

SEQ ID NO: 4816 - protein, 283 aa, Artificial Sequence
  Synthetic polypeptide
MEVAEPSSPTEEEEEEEEHSAEPRPRTRSNPEGAEDRAVGAQASVGSRSEGEGEAASADDGSLNTSGAGPKSWQVPPPAPEVQIRTPRVNCPEKVIICLDLSEEMSLPKLESFNGSKTNALNVSQKMIEMFVRTKHKIDKSHEFALVVVNDDTAWLSGLTSDPRELCSCLYDLETASCSTFNLEGLFSLIQQKTELPVTENVQTIPPPYVVRTILVYSRPPCQPQFSLTEPMKKMFQCPYFFFDVVYIHNGTEEKEEEMSWKEMQKLSQARWLTPVIPSYLRG

SEQ ID NO: 4817 - protein, 205 aa, Artificial Sequence
  Synthetic polypeptide
MMGASTLQEPALSPGRCPRQPLRSKFGHQGSTVQRKCSKTNALNVSQKMIEMFVRTKHKIDKSHEFALVVVNDDTAWLSGLTSDPRELCSCLYDLETASCSTFNLEGLFSLIQQKTELPVTENVQTIPPPYVVRTILVYSRPPCQPQFSLTEPMKKMFQCPYFFFDVVYIHNGTEEKEEEMSWKEMQKLSQARWLTPVIPSYLRG

SEQ ID NO: 4818 - protein, 283 aa, Artificial Sequence
  Synthetic polypeptide
MEVAEPSSPTEEEEEEEEHSAEPRPRTRSNPEGAEDRAVGAQASVGSRSEGEGEAASADDGSLNTSGAGPKSWQVPPPAPEVQIRTPRVNCPEKVIICLDLSEEMSLPKLESFNGSKTNALNVSQKMIEMFVRTKHKIDKSHEFALVVVNDDTAWLSGLTSDPRELCSCLYDLETASCSTFNISGASPARQQKTELPVTENVQTIPPPYVVRTILVYSRPPCQPQFSLTEPMKKMFQCPYFFFDVVYIHNGTEEKEEEMSWKEMQKLSQARWLTPVIPSYLRG

SEQ ID NO: 4819 - protein, 208 aa, Artificial Sequence
  Synthetic polypeptide
MEVAEPSSPTEEEEEEEEHSAEPRPRTRSNPEGAEDRAVGAQASVGSRSEGEGEAASADDGSLNTSGAGPKSWQVPPPAPEVQIRTPRVNCPEKVIICLDLSEEMSLPKLESFNGQQKTELPVTENVQTIPPPYVVRTILVYSRPPCQPQFSLTEPMKKMFQCPYFFFDVVYIHNGTEEKEEEMSWKEMQKLSQARWLTPVIPSYLRG

SEQ ID NO: 4820 - protein, 53 aa, Artificial Sequence
  Synthetic polypeptide
PLQKMFQCPYFFFDVVYIHNGTEEKEEEMSWKEMQKLSQARWLTPVIPSYLRG

SEQ ID NO: 4821 - protein, 8 aa, Artificial Sequence
  Synthetic polypeptide
MSHPYSQS

SEQ ID NO: 4822 - protein, 125 aa, Artificial Sequence
  Synthetic polypeptide
MRAPGAGAASVVSLALLWLLGLPWTWSAAAALGVYVGSGGWRFLRIVCKTARRDLLSCSDAACLSQGPPLPLPLVRVTDHITPCSLVTIQHGLVFSHIHGRGLSSQRTVNPRGWGLVVWMLCPQS

SEQ ID NO: 4823 - protein, 210 aa, Artificial Sequence
  Synthetic polypeptide
MGPDRKEVPLSRGTQAVVVGKGRGAPGDDSSMGGRPSSPLDKQQRQHLRGQVDTLLRNFLPCYRGQLAASVLRQISRELGPQEPTGSQLLRSKKLPRVREHRGPLTQLRGHPPRWQPIFCVLRGDGRLEWFSHKEGQARWLRPVMPTLWETKASGSPEVRSSRPAWATWRNPVSIKNTKISLLWWRVPVIPATREAEVEESLELGRWRLR

SEQ ID NO: 4824 - protein, 179 aa, Artificial Sequence
  Synthetic polypeptide
MGGRPSSPLDKQQRQHLRGQVDTLLRNFLPCYRGQLAASVLRQISRELGPQEPTGSQLLRSKKLPRVREHRGPLTQLRGHPPRWQPIFCVLRGDGRLEWFSHKEGQARWLRPVMPTLWETKASGSPEVRSSRPAWATWRNPVSIKNTKISLLWWRVPVIPATREAEVEESLELGRWRLR

SEQ ID NO: 4825 - protein, 156 aa, Artificial Sequence
  Synthetic polypeptide
MGGRPSSPLDKQQRQHLRGQVDTLLRNFLPCYRGQLAASKLPRVREHRGPLTQLRGHPPRWQPIFCVLRGDGRLEWFSHKEGQARWLRPVMPTLWETKASGSPEVRSSRPAWATWRNPVSIKNTKISLLWWRVPVIPATREAEVEESLELGRWRLR

SEQ ID NO: 4826 - protein, 176 aa, Artificial Sequence
  Synthetic polypeptide
MGPDRKEVPLSRGTQAVVVGKGRGAPGDDSSMGGRPSSPLDKQQRQHLRGQVDTLLRNFLPCYRGQLAASVLRQISRELGPQEPTGSQLLRSKKLPRVREHRGPLTQLRGHPPRWQPIFCVLRGDGRLEWFSHKEEYENGGHCLGSTALTGYTLLTSQREYLRLLDALCPESLERK

SEQ ID NO: 4827 - protein, 145 aa, Artificial Sequence
  Synthetic polypeptide
MGGRPSSPLDKQQRQHLRGQVDTLLRNFLPCYRGQLAASVLRQISRELGPQEPTGSQLLRSKKLPRVREHRGPLTQLRGHPPRWQPIFCVLRGDGRLEWFSHKEEYENGGHCLGSTALTGYTLLTSQREYLRLLDALCPESLERK

SEQ ID NO: 4828 - protein, 122 aa, Artificial Sequence
  Synthetic polypeptide
MGGRPSSPLDKQQRQHLRGQVDTLLRNFLPCYRGQLAASKLPRVREHRGPLTQLRGHPPRWQPIFCVLRGDGRLEWFSHKEEYENGGHCLGSTALTGYTLLTSQREYLRLLDALCPESLERK

SEQ ID NO: 4829 - protein, 358 aa, Artificial Sequence
  Synthetic polypeptide
MGPDRKEVPLSRGTQAVVVGKGRGAPGDDSSMGGRPSSPLDKQQRQHLRGQVDTLLRNFLPCYRGQLAASVLRQISRELGPQEPTGSQLLRSKKLPRVREHRGPLTQLRGHPPRWQPIFCVLRGDGRLEWFSHKEEYENGGHCLGSTALTGYTLLTSQREYLRLLDALCPESLGDHTQEEPDSLLEVPVSFPLFLQHPFRRHLCFSAATREAQHAWRLALQGGIRLQGIVLQRSQAPAARAFLDAVRLYRQHQGHFGDDDVTLGSDAEVLTAVLMREQLPALRAQTLPGLRGAGRARAWAWTELLDAVHAAVLAGASAGLCAFQPEKDELLASLEKTIRPDVDQLLRQRARVAGRLRK

SEQ ID NO: 4830 - protein, 327 aa, Artificial Sequence
  Synthetic polypeptide
MGGRPSSPLDKQQRQHLRGQVDTLLRNFLPCYRGQLAASVLRQISRELGPQEPTGSQLLRSKKLPRVREHRGPLTQLRGHPPRWQPIFCVLRGDGRLEWFSHKEEYENGGHCLGSTALTGYTLLTSQREYLRLLDALCPESLGDHTQEEPDSLLEVPVSFPLFLQHPFRRHLCFSAATREAQHAWRLALQGGIRLQGIVLQRSQAPAARAFLDAVRLYRQHQGHFGDDDVTLGSDAEVLTAVLMREQLPALRAQTLPGLRGAGRARAWAWTELLDAVHAAVLAGASAGLCAFQPEKDELLASLEKTIRPDVDQLLRQRARVAGRLRK

SEQ ID NO: 4831 - protein, 84 aa, Artificial Sequence
  Synthetic polypeptide
MREQLPALRAQTLPGLRGAGRARAWAWTELLDAVHAAVLAGASAGLCAFQPEKDELLASLEKTIRPDVDQLLRQRARVAGRLRK

SEQ ID NO: 4832 - protein, 304 aa, Artificial Sequence
  Synthetic polypeptide
MGGRPSSPLDKQQRQHLRGQVDTLLRNFLPCYRGQLAASKLPRVREHRGPLTQLRGHPPRWQPIFCVLRGDGRLEWFSHKEEYENGGHCLGSTALTGYTLLTSQREYLRLLDALCPESLGDHTQEEPDSLLEVPVSFPLFLQHPFRRHLCFSAATREAQHAWRLALQGGIRLQGIVLQRSQAPAARAFLDAVRLYRQHQGHFGDDDVTLGSDAEVLTAVLMREQLPALRAQTLPGLRGAGRARAWAWTELLDAVHAAVLAGASAGLCAFQPEKDELLASLEKTIRPDVDQLLRQRARVAGRLRK

SEQ ID NO: 4833 - protein, 94 aa, Artificial Sequence
  Synthetic polypeptide
MAAAPRAGRRRGQPLLALLLLLLAPLPPGAPPGADAYFPEERWSPESPLQAPRVLIALLARNAAHALPTTLGALERLRHPRERTALCFLKWKMG

SEQ ID NO: 4834 - protein, 124 aa, Artificial Sequence
  Synthetic polypeptide
MAAAPRAGRRRGQPLLALLLLLLAPLPPGAPPGADAYFPEERWSPESPLQAPRVLIALLARNAAHALPTTLGALERLRHPRERTALWVATDHNMDNTSTVLREWLVAVKSLYHSVEWRPAEEPS

SEQ ID NO: 4835 - protein, 31 aa, Artificial Sequence
  Synthetic polypeptide
MDNTSTVLREWLVAVKSLYHSVEWRPAEEPS

SEQ ID NO: 4836 - protein, 331 aa, Artificial Sequence
  Synthetic polypeptide
MAAAPRAGRRRGQPLLALLLLLLAPLPPGAPPGADAYFPEERWSPESPLQAPRVLIALLARNAAHALPTTLGALERLRHPRERTALWVATDHNMDNTSTVLREWLVAVKSLYHSVEWRPAEEPRSYPDEEGPKHWSDSRYEHVMKLRQAALKSARDMWADYILFVDADNLILNPDTLSLLIAENKTVVAPMLDSRAAYSNFWCGMTSQGYYKRTPAYIPIRKRDRRGCFAVPMVHSTFLIDLRKAASRNLAFYPPHPDYTWSFDDIIVFAFSCKQAEVQMYVCNKEEYGFLPVPLRAHSTLQDEAESFMHVQLEVMVRHGGTCLYSSYSGG

SEQ ID NO: 4837 - protein, 1148 aa, Artificial Sequence
  Synthetic polypeptide
MSLLCVGVKKAKFDGAQEKFNTYVTLKVQNVKSTTIAVRGSQPSWEQDFMFEINRLDLGLTVEVWNKGLIWDTMVGTVWIPLRTIRQSNEEGPGEWLTLDSQVIMADSEICGTKDPTFHRILLDTRFELPLDIPEEEARYWAKKLEQLNAMRDQDEYSFQDEQDKPLPVPSNQCCNWNYFGWGEQHNDDPDSAVDDRDSDYRSETSNSIPPPYYTTSQPNASVHQYSVRPPPLGSRESYSDSMHSYEEFSEPQALSPTGSSRYASSGELSQGSSQLSEDFDPDEHSLQGSDMEDERDRDSYHSCHSSVSYHKDSPRWDQDEEELEEDLEDFLEEEELPEDEEELEEEEEEVPDDLGSYAQREDVAVAEPKDFKRISLPPAAPGKEDKAPVAPTEAPDMAKVAPKPATPDKVPAAEQIPEAEPPKDEESFRPREDEEGQEGQDSMSRAKANWLRAFNKVRMQLQEARGEGEMSKSLWFKGGPGGGLIIIDSMPDIRKRKPIPLVSDLAMSLVQSRKAGITSALASSTLNNEELKNHVYKKTLQALIYPISCTTPHNFEVWTATTPTYCYECEGLLWGIARQGMRCTECGVKCHEKCQDLLNADCLQRAAEKSSKHGAEDRTQNIIMVLKDRMKIRERNKPEIFELIQEIFAVTKTAHTQQMKAVKQSVLDGTSKWSAKISITVVCAQGLQAKDKTGSSDPYVTVQVGKTKKRTKTIYGNLNPVWEENFHFECHNSSDRIKVRVWDEDDDIKSRVKQRFKRESDDFLGQTIIEVRTLSGEMDVWYNLDKRTDKSAVSGAIRLHISVEIKGEEKVAPYHVQYTCLHENLFHFVTDVQNNGVVKIPDAKGDDAWKVYYDETAQEIVDEFAMRYGVESIYQAMTHFACLSSKYMCPGVPAVMSTLLANINAYYAHTTASTNVSASDRFAASNFGKERFVKLLDQLHNSLRIDLSMYRNNFPASSPERLQDLKSTVDLLTSITFFRMKVQELQSPPRASQVVKDCVKACLNSTYEYIFNNCHELYSREYQTDPAKKGEVLPEEQGPSIKNLDFWSKLITLIVSIIEEDKNSYTPCLNQFPQELNVGKISAEVMWNLFAQDMKYAMEEHDKHRLCKSADYMNLHFKVKWLYNEYVTELPAFKDRVPEYPARRRLQ

SEQ ID NO: 4838 - protein, 1148 aa, Artificial Sequence
  Synthetic polypeptide
MSLLCVSLKKAKFDGAQEKFNTYVTLKVQNVKSTTIAVRGSQPSWEQDFMFEINRLDLGLTVEVWNKGLIWDTMVGTVWIPLRTIRQSNEEGPGEWLTLDSQVIMADSEICGTKDPTFHRILLDTRFELPLDIPEEEARYWAKKLEQLNAMRDQDEYSFQDEQDKPLPVPSNQCCNWNYFGWGEQHNDDPDSAVDDRDSDYRSETSNSIPPPYYTTSQPNASVHQYSVRPPPLGSRESYSDSMHSYEEFSEPQALSPTGSSRYASSGELSQGSSQLSEDFDPDEHSLQGSDMEDERDRDSYHSCHSSVSYHKDSPRWDQDEEELEEDLEDFLEEEELPEDEEELEEEEEEVPDDLGSYAQREDVAVAEPKDFKRISLPPAAPGKEDKAPVAPTEAPDMAKVAPKPATPDKVPAAEQIPEAEPPKDEESFRPREDEEGQEGQDSMSRAKANWLRAFNKVRMQLQEARGEGEMSKSLWFKGGPGGGLIIIDSMPDIRKRKPIPLVSDLAMSLVQSRKAGITSALASSTLNNEELKNHVYKKTLQALIYPISCTTPHNFEVWTATTPTYCYECEGLLWGIARQGMRCTECGVKCHEKCQDLLNADCLQRAAEKSSKHGAEDRTQNIIMVLKDRMKIRERNKPEIFELIQEIFAVTKTAHTQQMKAVKQSVLDGTSKWSAKISITVVCAQGLQAKDKTGSSDPYVTVQVGKTKKRTKTIYGNLNPVWEENFHFECHNSSDRIKVRVWDEDDDIKSRVKQRFKRESDDFLGQTIIEVRTLSGEMDVWYNLDKRTDKSAVSGAIRLHISVEIKGEEKVAPYHVQYTCLHENLFHFVTDVQNNGVVKIPDAKGDDAWKVYYDETAQEIVDEFAMRYGVESIYQAMTHFACLSSKYMCPGVPAVMSTLLANINAYYAHTTASTNVSASDRFAASNFGKERFVKLLDQLHNSLRIDLSMYRNNFPASSPERLQDLKSTVDLLTSITFFRMKVQELQSPPRASQVVKDCVKACLNSTYEYIFNNCHELYSREYQTDPAKKGEVLPEEQGPSIKNLDFWSKLITLIVSIIEEDKNSYTPCLNQFPQELNVGKISAEVMWNLFAQDMKYAMEEHDKHRLCKSADYMNLHFKVKWLYNEYVTELPAFKDRVPEYPARRRLQ

SEQ ID NO: 4839 - protein, 1236 aa, Artificial Sequence
  Synthetic polypeptide
MGGGGTCTISVQVRVCTGGNLLGGRRRPLSPCNEEVWGEAPLPGARPFNAPPARSAPAPSGVPGLRLPAPHQRHSRPGRLRPTCELGDMSLLCVGVKKAKFDGAQEKFNTYVTLKVQNVKSTTIAVRGSQPSWEQDFMFEINRLDLGLTVEVWNKGLIWDTMVGTVWIPLRTIRQSNEEGPGEWLTLDSQVIMADSEICGTKDPTFHRILLDTRFELPLDIPEEEARYWAKKLEQLNAMRDQDEYSFQDEQDKPLPVPSNQCCNWNYFGWGEQHNDDPDSAVDDRDSDYRSETSNSIPPPYYTTSQPNASVHQYSVRPPPLGSRESYSDSMHSYEEFSEPQALSPTGSSRYASSGELSQGSSQLSEDFDPDEHSLQGSDMEDERDRDSYHSCHSSVSYHKDSPRWDQDEEELEEDLEDFLEEEELPEDEEELEEEEEEVPDDLGSYAQREDVAVAEPKDFKRISLPPAAPGKEDKAPVAPTEAPDMAKVAPKPATPDKVPAAEQIPEAEPPKDEESFRPREDEEGQEGQDSMSRAKANWLRAFNKVRMQLQEARGEGEMSKSLWFKGGPGGGLIIIDSMPDIRKRKPIPLVSDLAMSLVQSRKAGITSALASSTLNNEELKNHVYKKTLQALIYPISCTTPHNFEVWTATTPTYCYECEGLLWGIARQGMRCTECGVKCHEKCQDLLNADCLQRAAEKSSKHGAEDRTQNIIMVLKDRMKIRERNKPEIFELIQEIFAVTKTAHTQQMKAVKQSVLDGTSKWSAKISITVVCAQGLQAKDKTGSSDPYVTVQVGKTKKRTKTIYGNLNPVWEENFHFECHNSSDRIKVRVWDEDDDIKSRVKQRFKRESDDFLGQTIIEVRTLSGEMDVWYNLDKRTDKSAVSGAIRLHISVEIKGEEKVAPYHVQYTCLHENLFHFVTDVQNNGVVKIPDAKGDDAWKVYYDETAQEIVDEFAMRYGVESIYQAMTHFACLSSKYMCPGVPAVMSTLLANINAYYAHTTASTNVSASDRFAASNFGKERFVKLLDQLHNSLRIDLSMYRNNFPASSPERLQDLKSTVDLLTSITFFRMKVQELQSPPRASQVVKDCVKACLNSTYEYIFNNCHELYSREYQTDPAKKGEVLPEEQGPSIKNLDFWSKLITLIVSIIEEDKNSYTPCLNQFPQELNVGKISAEVMWNLFAQDMKYAMEEHDKHRLCKSADYMNLHFKVKWLYNEYVTELPAFKDRVPEYPARRRLQ

SEQ ID NO: 4840 - protein, 1146 aa, Artificial Sequence
  Synthetic polypeptide
MSLLCVGVKKAKFDGAQEKFNTYVTLKVQNVKSTTIAVRGSQPSWEQDFMFEINRLDLGLTVEVWNKGLIWDTMVGTVWIPLRTIRQSNEEGPGEWLTLDSQVIMADSEICGTKDPTFHRILLDTRFELPLDIPEEEARYWAKKLEQLNAMRDQDEYSFQDEQDKPLPVPSNQCCNWNYFGWGEQHNDDPDSAVDDRDSDYRSETSNSIPPPYYTTSQPNASVHQYSVRPPPLGSRESYSDSMHSYEEFSEPQALSPTGSSRYASSGELSQGSSQLSEDFDPDEHSLQGSDMEDERDRDSYHSCHSSVSYHKDSPRWDQDEEELEEDLEDFLEEEELPEDEEELEEEEEEVPDDLGSYAQREDVAVAEPKDFKRISLPPAAPGKEDKAPVAPTEAPDMAKVAPKPATPDKVPAAEQIPEAEPPKDEESFRPREDEEGQEGQDSMSRAKANWLRAFNKVRMQLQEARGEGEMSKSLWFKGGPGGGLIIIDSMPDIRKRKPIPLVSDLSLVQSRKAGITSALASSTLNNEELKNHVYKKTLQALIYPISCTTPHNFEVWTATTPTYCYECEGLLWGIARQGMRCTECGVKCHEKCQDLLNADCLQRAAEKSSKHGAEDRTQNIIMVLKDRMKIRERNKPEIFELIQEIFAVTKTAHTQQMKAVKQSVLDGTSKWSAKISITVVCAQGLQAKDKTGSSDPYVTVQVGKTKKRTKTIYGNLNPVWEENFHFECHNSSDRIKVRVWDEDDDIKSRVKQRFKRESDDFLGQTIIEVRTLSGEMDVWYNLDKRTDKSAVSGAIRLHISVEIKGEEKVAPYHVQYTCLHENLFHFVTDVQNNGVVKIPDAKGDDAWKVYYDETAQEIVDEFAMRYGVESIYQAMTHFACLSSKYMCPGVPAVMSTLLANINAYYAHTTASTNVSASDRFAASNFGKERFVKLLDQLHNSLRIDLSMYRNNFPASSPERLQDLKSTVDLLTSITFFRMKVQELQSPPRASQVVKDCVKACLNSTYEYIFNNCHELYSREYQTDPAKKGEVLPEEQGPSIKNLDFWSKLITLIVSIIEEDKNSYTPCLNQFPQELNVGKISAEVMWNLFAQDMKYAMEEHDKHRLCKSADYMNLHFKVKWLYNEYVTELPAFKDRVPEYPARRRLQ

SEQ ID NO: 4841 - protein, 930 aa, Artificial Sequence
  Synthetic polypeptide
MSLLCVGVKKAKFDGAQEKFNTYVTLKVQNVKSTTIAVRGSQPSWEQDFMFEINRLDLGLTVEVWNKGLIWDTMVGTVWIPLRTIRQSNEEGPGEWLTLDSQVIMADSEICGTKDPTFHRILLDTRFELPLDIPEEEARYWAKKLEQLNAMRDQDEYSFQDEQDKPLPVPSNQCCNWNYFGWGEQHNDDPDSAVDDRDSDYRSETSNSIPPPYYTTSQPNASVHQYSVRPPPLGSRESYSDSMHSYEEFSEPQALSPTGSSRYASSGELSQGSSQLSEDFDPDEHSLQGSDMEDERDRDSYHSCHSSVSYHKDSPRWDQDEEELEEDLEDFLEEEELPEDEEELEEEEEEVPDDLGSYAQREDVAVAEPKDFKRISLPPAAPGKEDKAPVAPTEAPDMAKVAPKPATPDKVPAAEQIPEAEPPKDEESFRPREDEEGQEGQDSMSRAKANWLRAFNKVRMQLQEARGEGEMSKSLWFKGGPGGGLIIIDSMPDIRKRKPIPLVSDLAMSLVQSRKAGITSALASSTLNNEELKNHVYKKTLQALIYPISCTTPHNFEVWTATTPTYCYECEGLLWGIARQGMRCTECGVKCHEKCQDLLNADCLQRAAEKSSKHGAEDRTQNIIMVLKDRMKIRERNKPEIFELIQEIFAVTKTAHTQQMKAVKQSVLDGTSKWSAKISITVVCAQGLQAKDKTGSSDPYVTVQVGKTKKRTKTIYGNLNPVWEENFHFECHNSSDRIKVRVWDEDDDIKSRVKQRFKRESDDFLGQTIIEVRTLSGEMDVWYNLDKRTDKSAVSGAIRLHISVEIKGEEKVAPYHVQYTCLHENLFHFVTDVQNNGVVKIPDAKGDDAWKVYYDETAQEIVDEFAMRYGVESIYQAMTHFACLSSKYMCPGVPAVMSTLLANINAYYAHTTASTNVSASDRFAASNFGN

SEQ ID NO: 4842 - protein, 930 aa, Artificial Sequence
  Synthetic polypeptide
MSLLCVSLKKAKFDGAQEKFNTYVTLKVQNVKSTTIAVRGSQPSWEQDFMFEINRLDLGLTVEVWNKGLIWDTMVGTVWIPLRTIRQSNEEGPGEWLTLDSQVIMADSEICGTKDPTFHRILLDTRFELPLDIPEEEARYWAKKLEQLNAMRDQDEYSFQDEQDKPLPVPSNQCCNWNYFGWGEQHNDDPDSAVDDRDSDYRSETSNSIPPPYYTTSQPNASVHQYSVRPPPLGSRESYSDSMHSYEEFSEPQALSPTGSSRYASSGELSQGSSQLSEDFDPDEHSLQGSDMEDERDRDSYHSCHSSVSYHKDSPRWDQDEEELEEDLEDFLEEEELPEDEEELEEEEEEVPDDLGSYAQREDVAVAEPKDFKRISLPPAAPGKEDKAPVAPTEAPDMAKVAPKPATPDKVPAAEQIPEAEPPKDEESFRPREDEEGQEGQDSMSRAKANWLRAFNKVRMQLQEARGEGEMSKSLWFKGGPGGGLIIIDSMPDIRKRKPIPLVSDLAMSLVQSRKAGITSALASSTLNNEELKNHVYKKTLQALIYPISCTTPHNFEVWTATTPTYCYECEGLLWGIARQGMRCTECGVKCHEKCQDLLNADCLQRAAEKSSKHGAEDRTQNIIMVLKDRMKIRERNKPEIFELIQEIFAVTKTAHTQQMKAVKQSVLDGTSKWSAKISITVVCAQGLQAKDKTGSSDPYVTVQVGKTKKRTKTIYGNLNPVWEENFHFECHNSSDRIKVRVWDEDDDIKSRVKQRFKRESDDFLGQTIIEVRTLSGEMDVWYNLDKRTDKSAVSGAIRLHISVEIKGEEKVAPYHVQYTCLHENLFHFVTDVQNNGVVKIPDAKGDDAWKVYYDETAQEIVDEFAMRYGVESIYQAMTHFACLSSKYMCPGVPAVMSTLLANINAYYAHTTASTNVSASDRFAASNFGN

SEQ ID NO: 4843 - protein, 1018 aa, Artificial Sequence
  Synthetic polypeptide
MGGGGTCTISVQVRVCTGGNLLGGRRRPLSPCNEEVWGEAPLPGARPFNAPPARSAPAPSGVPGLRLPAPHQRHSRPGRLRPTCELGDMSLLCVGVKKAKFDGAQEKFNTYVTLKVQNVKSTTIAVRGSQPSWEQDFMFEINRLDLGLTVEVWNKGLIWDTMVGTVWIPLRTIRQSNEEGPGEWLTLDSQVIMADSEICGTKDPTFHRILLDTRFELPLDIPEEEARYWAKKLEQLNAMRDQDEYSFQDEQDKPLPVPSNQCCNWNYFGWGEQHNDDPDSAVDDRDSDYRSETSNSIPPPYYTTSQPNASVHQYSVRPPPLGSRESYSDSMHSYEEFSEPQALSPTGSSRYASSGELSQGSSQLSEDFDPDEHSLQGSDMEDERDRDSYHSCHSSVSYHKDSPRWDQDEEELEEDLEDFLEEEELPEDEEELEEEEEEVPDDLGSYAQREDVAVAEPKDFKRISLPPAAPGKEDKAPVAPTEAPDMAKVAPKPATPDKVPAAEQIPEAEPPKDEESFRPREDEEGQEGQDSMSRAKANWLRAFNKVRMQLQEARGEGEMSKSLWFKGGPGGGLIIIDSMPDIRKRKPIPLVSDLAMSLVQSRKAGITSALASSTLNNEELKNHVYKKTLQALIYPISCTTPHNFEVWTATTPTYCYECEGLLWGIARQGMRCTECGVKCHEKCQDLLNADCLQRAAEKSSKHGAEDRTQNIIMVLKDRMKIRERNKPEIFELIQEIFAVTKTAHTQQMKAVKQSVLDGTSKWSAKISITVVCAQGLQAKDKTGSSDPYVTVQVGKTKKRTKTIYGNLNPVWEENFHFECHNSSDRIKVRVWDEDDDIKSRVKQRFKRESDDFLGQTIIEVRTLSGEMDVWYNLDKRTDKSAVSGAIRLHISVEIKGEEKVAPYHVQYTCLHENLFHFVTDVQNNGVVKIPDAKGDDAWKVYYDETAQEIVDEFAMRYGVESIYQAMTHFACLSSKYMCPGVPAVMSTLLANINAYYAHTTASTNVSASDRFAASNFGN

SEQ ID NO: 4844 - protein, 928 aa, Artificial Sequence
  Synthetic polypeptide
MSLLCVGVKKAKFDGAQEKFNTYVTLKVQNVKSTTIAVRGSQPSWEQDFMFEINRLDLGLTVEVWNKGLIWDTMVGTVWIPLRTIRQSNEEGPGEWLTLDSQVIMADSEICGTKDPTFHRILLDTRFELPLDIPEEEARYWAKKLEQLNAMRDQDEYSFQDEQDKPLPVPSNQCCNWNYFGWGEQHNDDPDSAVDDRDSDYRSETSNSIPPPYYTTSQPNASVHQYSVRPPPLGSRESYSDSMHSYEEFSEPQALSPTGSSRYASSGELSQGSSQLSEDFDPDEHSLQGSDMEDERDRDSYHSCHSSVSYHKDSPRWDQDEEELEEDLEDFLEEEELPEDEEELEEEEEEVPDDLGSYAQREDVAVAEPKDFKRISLPPAAPGKEDKAPVAPTEAPDMAKVAPKPATPDKVPAAEQIPEAEPPKDEESFRPREDEEGQEGQDSMSRAKANWLRAFNKVRMQLQEARGEGEMSKSLWFKGGPGGGLIIIDSMPDIRKRKPIPLVSDLSLVQSRKAGITSALASSTLNNEELKNHVYKKTLQALIYPISCTTPHNFEVWTATTPTYCYECEGLLWGIARQGMRCTECGVKCHEKCQDLLNADCLQRAAEKSSKHGAEDRTQNIIMVLKDRMKIRERNKPEIFELIQEIFAVTKTAHTQQMKAVKQSVLDGTSKWSAKISITVVCAQGLQAKDKTGSSDPYVTVQVGKTKKRTKTIYGNLNPVWEENFHFECHNSSDRIKVRVWDEDDDIKSRVKQRFKRESDDFLGQTIIEVRTLSGEMDVWYNLDKRTDKSAVSGAIRLHISVEIKGEEKVAPYHVQYTCLHENLFHFVTDVQNNGVVKIPDAKGDDAWKVYYDETAQEIVDEFAMRYGVESIYQAMTHFACLSSKYMCPGVPAVMSTLLANINAYYAHTTASTNVSASDRFAASNFGN

SEQ ID NO: 4845 - protein, 480 aa, Artificial Sequence
  Synthetic polypeptide
MSLLCVGVKKAKFDGAQEKFNTYVTLKVQNVKSTTIAVRGSQPSWEQDFMFEINRLDLGLTVEVWNKGLIWDTMVGTVWIPLRTIRQSNEEGPGEWLTLDSQVIMADSEICGTKDPTFHRILLDTRFELPLDIPEEEARYWAKKLEQLNAMRDQDEYSFQDEQDKPLPVPSNQCCNWNYFGWGEQHNDDPDSAVDDRDSDYRSETSNSIPPPYYTTSQPNASVHQYSVRPPPLGSRESYSDSMHSYEEFSEPQALSPTGSSRYASSGELSQGSSQLSEDFDPDEHSLQGSDMEDERDRDSYHSCHSSVSYHKDSPRWDQDEEELEEDLEDFLEEEELPEDEEELEEEEEEVPDDLGSYAQREDVAVAEPKDFKRISLPPAAPGKEDKAPVAPTEAPDMAKVAPKPATPDKVPAAEQIPEAEPPKDEESFRPREDEEGQEGQDSMSRAKANWLRAFNKVRMQLQEELSVVACVCGPSYSGG

SEQ ID NO: 4846 - protein, 480 aa, Artificial Sequence
  Synthetic polypeptide
MSLLCVSLKKAKFDGAQEKFNTYVTLKVQNVKSTTIAVRGSQPSWEQDFMFEINRLDLGLTVEVWNKGLIWDTMVGTVWIPLRTIRQSNEEGPGEWLTLDSQVIMADSEICGTKDPTFHRILLDTRFELPLDIPEEEARYWAKKLEQLNAMRDQDEYSFQDEQDKPLPVPSNQCCNWNYFGWGEQHNDDPDSAVDDRDSDYRSETSNSIPPPYYTTSQPNASVHQYSVRPPPLGSRESYSDSMHSYEEFSEPQALSPTGSSRYASSGELSQGSSQLSEDFDPDEHSLQGSDMEDERDRDSYHSCHSSVSYHKDSPRWDQDEEELEEDLEDFLEEEELPEDEEELEEEEEEVPDDLGSYAQREDVAVAEPKDFKRISLPPAAPGKEDKAPVAPTEAPDMAKVAPKPATPDKVPAAEQIPEAEPPKDEESFRPREDEEGQEGQDSMSRAKANWLRAFNKVRMQLQEELSVVACVCGPSYSGG

SEQ ID NO: 4847 - protein, 568 aa, Artificial Sequence
  Synthetic polypeptide
MGGGGTCTISVQVRVCTGGNLLGGRRRPLSPCNEEVWGEAPLPGARPFNAPPARSAPAPSGVPGLRLPAPHQRHSRPGRLRPTCELGDMSLLCVGVKKAKFDGAQEKFNTYVTLKVQNVKSTTIAVRGSQPSWEQDFMFEINRLDLGLTVEVWNKGLIWDTMVGTVWIPLRTIRQSNEEGPGEWLTLDSQVIMADSEICGTKDPTFHRILLDTRFELPLDIPEEEARYWAKKLEQLNAMRDQDEYSFQDEQDKPLPVPSNQCCNWNYFGWGEQHNDDPDSAVDDRDSDYRSETSNSIPPPYYTTSQPNASVHQYSVRPPPLGSRESYSDSMHSYEEFSEPQALSPTGSSRYASSGELSQGSSQLSEDFDPDEHSLQGSDMEDERDRDSYHSCHSSVSYHKDSPRWDQDEEELEEDLEDFLEEEELPEDEEELEEEEEEVPDDLGSYAQREDVAVAEPKDFKRISLPPAAPGKEDKAPVAPTEAPDMAKVAPKPATPDKVPAAEQIPEAEPPKDEESFRPREDEEGQEGQDSMSRAKANWLRAFNKVRMQLQEELSVVACVCGPSYSGG

SEQ ID NO: 4848 - protein, 54 aa, Artificial Sequence
  Synthetic polypeptide
MSLLCVGVKKAKFDGAQEKFNTYVTLKVQNVKSTTIAVRGSQPSWEQDFMLRIN

SEQ ID NO: 4849 - protein, 54 aa, Artificial Sequence
  Synthetic polypeptide
MSLLCVSLKKAKFDGAQEKFNTYVTLKVQNVKSTTIAVRGSQPSWEQDFMLRIN

SEQ ID NO: 4850 - protein, 142 aa, Artificial Sequence
  Synthetic polypeptide
MGGGGTCTISVQVRVCTGGNLLGGRRRPLSPCNEEVWGEAPLPGARPFNAPPARSAPAPSGVPGLRLPAPHQRHSRPGRLRPTCELGDMSLLCVGVKKAKFDGAQEKFNTYVTLKVQNVKSTTIAVRGSQPSWEQDFMLRIN

SEQ ID NO: 4851 - protein, 72 aa, Artificial Sequence
  Synthetic polypeptide
MSYFGEHFWGEKNHGFEVLYHSVKQGPISTKELADFIRERATIEETYSKAMAKLSKLASNGTPMGRAQRAAH

SEQ ID NO: 4852 - protein, 22 aa, Artificial Sequence
  Synthetic polypeptide
MAKLSKLASNGTPMGRAQRAAH

SEQ ID NO: 4853 - protein, 79 aa, Artificial Sequence
  Synthetic polypeptide
MMFSPSFLNLYSHPLQGEKNHGFEVLYHSVKQGPISTKELADFIRERATIEETYSKAMAKLSKLASNGTPMGRAQRAAH

SEQ ID NO: 4854 - protein, 438 aa, Artificial Sequence
  Synthetic polypeptide
MSYFGEHFWGEKNHGFEVLYHSVKQGPISTKELADFIRERATIEETYSKAMAKLSKLASNGTPMGTFAPLWEVFRVSSDKLALCHLELTRKLQDLIKDVLRYGEEQLKTHKKCKEEVVSTLDAVQVLSGVSQLLPKSRENYLNRCMDQERLRRESTSQKEMDKAETKTKKAAESLRRSVEKYNSARADFEQKMLDSALRFQAMEETHLRHMKALLGSYAHSVEDTHVQIGQVHEEFKQNIENVSVEMLLRKFAESKGTGREKPGPLDFEAYSAAALQEAMKRLRGAKAFRLPGLSRREREPEPPAAVDFLEPDSGTCPEVDEEGFTVRPDVTQNSTAEPSRFSSSDSDFDDEEPRKFYVHIKPAPARAPACSPEAAAAQLRATAGSLILPPGPGGTMKRHSSRDAAGKPQRPRSAPRTSSLGSKRKLRLKKKKKKKKK

SEQ ID NO: 4855 - protein, 388 aa, Artificial Sequence
  Synthetic polypeptide
MAKLSKLASNGTPMGTFAPLWEVFRVSSDKLALCHLELTRKLQDLIKDVLRYGEEQLKTHKKCKEEVVSTLDAVQVLSGVSQLLPKSRENYLNRCMDQERLRRESTSQKEMDKAETKTKKAAESLRRSVEKYNSARADFEQKMLDSALRFQAMEETHLRHMKALLGSYAHSVEDTHVQIGQVHEEFKQNIENVSVEMLLRKFAESKGTGREKPGPLDFEAYSAAALQEAMKRLRGAKAFRLPGLSRREREPEPPAAVDFLEPDSGTCPEVDEEGFTVRPDVTQNSTAEPSRFSSSDSDFDDEEPRKFYVHIKPAPARAPACSPEAAAAQLRATAGSLILPPGPGGTMKRHSSRDAAGKPQRPRSAPRTSSLGSKRKLRLKKKKKKKKK

SEQ ID NO: 4856 - protein, 445 aa, Artificial Sequence
  Synthetic polypeptide
MMFSPSFLNLYSHPLQGEKNHGFEVLYHSVKQGPISTKELADFIRERATIEETYSKAMAKLSKLASNGTPMGTFAPLWEVFRVSSDKLALCHLELTRKLQDLIKDVLRYGEEQLKTHKKCKEEVVSTLDAVQVLSGVSQLLPKSRENYLNRCMDQERLRRESTSQKEMDKAETKTKKAAESLRRSVEKYNSARADFEQKMLDSALRFQAMEETHLRHMKALLGSYAHSVEDTHVQIGQVHEEFKQNIENVSVEMLLRKFAESKGTGREKPGPLDFEAYSAAALQEAMKRLRGAKAFRLPGLSRREREPEPPAAVDFLEPDSGTCPEVDEEGFTVRPDVTQNSTAEPSRFSSSDSDFDDEEPRKFYVHIKPAPARAPACSPEAAAAQLRATAGSLILPPGPGGTMKRHSSRDAAGKPQRPRSAPRTSSLGSKRKLRLKKKKKKKKK

SEQ ID NO: 4857 - protein, 93 aa, Artificial Sequence
  Synthetic polypeptide
MPKKFQGENTKSAAARARRAEAKAAADAKKQKELEDAYWKDDDKHVMRKEQRKAPHGPAVSLPASSPSRFTPTPASKLFLLQQMAPASAPLHW

SEQ ID NO: 4858 - protein, 93 aa, Artificial Sequence
  Synthetic polypeptide
MPKKFQGENTKSAAARARRAEAKAAADAKKQKELEDAYWKDDDKHVMRKEQRKPPSCSCYNKWLLPRRLCTGSPAAKDAPVPQLSPLAGALRT

SEQ ID NO: 4859 - protein, 63 aa, Artificial Sequence
  Synthetic polypeptide
MPKKFQGENTKSAAARARRAEAKAAADAKKQKELEDAYWKDDDKHVMRKEQRKLSPLAGALRT

SEQ ID NO: 4860 - protein, 383 aa, Artificial Sequence
  Synthetic polypeptide
MDESSLLRRRGLQKELSLPRRGRGCRSGNRKSLVVGTPSPTLSRPLSPLSVPTAGSSPLDSPRNFSAASALNFPFARRADGRRWSLASLPSSGYGTNTPSSTLSSSSSSRERLHQLPFQPTPDELHFLSKHFRSSENVLDEEGGRSPRLRPRSRSLSPGRATGTFDNEIVMMNHVYRERFPKATAQMEGRLQEFLTAYAPGARLALADGVLGFIHHQIVELARDCLAKSGENLVTSRYFLEMQEKLERLLQDAHERSDSEEVSFIVQLVRKLLIIISRPARLLECLEFDPEEFYHLLEAAEGHAREGQGIKTDLPQYIIGQLGLAKDPLEEMVPLSHLEEEQPPAPESPESRALVGQSRRKPCESDFETIKLISNGAYGYLGG

SEQ ID NO: 4861 - protein, 69 aa, Artificial Sequence
  Synthetic polypeptide
MEQPRKAVVVTGFGPFGEHTVNASWIAVQELEKLGLGDSVDLHVYEIPVEYQTVQRLIPALWEKHSPQN

SEQ ID NO: 4862 - protein, 91 aa, Artificial Sequence
  Synthetic polypeptide
MQIFVKTLTGKTITLEVEPSDTIENVKAKIQDKEGIPPDQQRLIFAGKQLEDGRTLSDYNIQKAAAHSPGPWTLFELLTLPAKVRSFILQS

SEQ ID NO: 4863 - protein, 73 aa, Artificial Sequence
  Synthetic polypeptide
PSDTIENVKAKIQDKEGIPPDQQRLIFAGKQLEDGRTLSDYNIQKAAAHSPGPWTLFELLTLPAKVRSFILQS

SEQ ID NO: 4864 - protein, 66 aa, Artificial Sequence
  Synthetic polypeptide
VKAKIQDKEGIPPDQQRLIFAGKQLEDGRTLSDYNIQKAAAHSPGPWTLFELLTLPAKVRSFILQS

SEQ ID NO: 4865 - protein, 124 aa, Artificial Sequence
  Synthetic polypeptide
MQIFVKTLTGKTITLEVEPSDTIENVKAKIQDKEGIPPDQQRLIFAGKQLEDGRTLSDYNIQKESMKLEMLLQMEPQMTSTSTYYQGPLNQPAGPYPDVDTQTTSHEETSATEPLLCPYSAGSN

SEQ ID NO: 4866 - protein, 106 aa, Artificial Sequence
  Synthetic polypeptide
PSDTIENVKAKIQDKEGIPPDQQRLIFAGKQLEDGRTLSDYNIQKESMKLEMLLQMEPQMTSTSTYYQGPLNQPAGPYPDVDTQTTSHEETSATEPLLCPYSAGSN

SEQ ID NO: 4867 - protein, 99 aa, Artificial Sequence
  Synthetic polypeptide
VKAKIQDKEGIPPDQQRLIFAGKQLEDGRTLSDYNIQKESMKLEMLLQMEPQMTSTSTYYQGPLNQPAGPYPDVDTQTTSHEETSATEPLLCPYSAGSN

SEQ ID NO: 4868 - protein, 162 aa, Artificial Sequence
  Synthetic polypeptide
MPAGRRGPAAQSARRPPPLLPLLLLLCVLGAPRAGSGAHTAVISPQDPTLLIGSSLLATCSVHGDPPGATAEGLYWTLNGRRLPPELSRVLNASTLALALANLNGSRQRSGDNLVCHARDGSILAGSCLYVGRGGSCSELRWHHCTPAWGTERDFASKKEKE

SEQ ID NO: 4869 - protein, 821 aa, Artificial Sequence
  Synthetic polypeptide
MSVEAYGPSSQTLTFLDTEEAELLGADTQGSEFEFTDFTLPSQTQTPPGGPGGPGGGGAGGPGGAGAGAAAGQLDAQVGPEGILQNGAVDDSVAKTSQLLAELNFEEDEEDTYYTKDLPIHACSYCGIHDPACVVYCNTSKKWFCNGRGNTSGSHIVNHLVRAKCKEVTLHKDGPLGETVLECYNCGCRNVFLLGFIPAKADSVVVLLCRQPCASQSSLKDINWDSSQWQPLIQDRCFLSWLVKIPSEQEQLRARQITAQQINKLEELWKENPSATLEDLEKPGVDEEPQHVLLRYEDAYQYQNIFGPLVKLEADYDKKLKESQTQDNITVRWDLGLNKKRIAYFTLPKTDSDMRLMQGDEICLRYKGDLAPLWKGIGHVIKVPDNYGDEIAIELRSSVGAPVEVTHNFQVDFVWKSTSFDRMQSALKTFAVDETSVSGYIYHKLLGHEVEDVIIKCQLPKRFTAQGLPDLNHSQVYAVKTVLQRPLSLIQGPPGTGKTVTSATIVYHLARQGNGPVLVCAPSNIAVDQLTEKIHQTGLKVVRLCAKSREAIDSPVSFLALHNQIRNMDSMPELQKLQQLKDETGELSSADEKRYRALKRTAERELLMNADVICCTCVGAGDPRLAKMQFRSILIDESTQATEPECMVPVVLGAKQLILVGDHCQLGPVVMCKKAAKAGLSQSLFERLVVLGIRPIRLQVQYRMHPALSAFPSNIFYEGSLQNGVTAADRVKKGFDFQWPQPDKPMFFYVTQGQEEIASSGTSYLNRTEAANVEKITTKLLKAGAKPDQIGIITPYEGQRSYLVQYMQFSGSLHTKLYQPG

SEQ ID NO: 4870 - protein, 832 aa, Artificial Sequence
  Synthetic polypeptide
MSVEAYGPSSQTLTFLDTEEAELLGADTQGSEFEFTDFTLPSQTQTPPGGPGGPGGGGAGGPGGAGAGAAAGQLDAQVGPEGILQNGAVDDSVAKTSQLLAELNFEEDEEDTYYTKDLPIHACSYCGIHDPACVVYCNTSKKWFCNGRGNTSGSHIVNHLVRAKCKEVTLHKDGPLGETVLECYNCGCRNVFLLGFIPAKADSVVVLLCRQPCASQSSLKDINWDSSQWQPLIQDRCFLSWLVKIPSEQEQLRARQITAQQINKLEELWKENPSATLEDLEKPGVDEEPQHVLLRYEDAYQYQNIFGPLVKLEADYDKKLKESQTQDNITVRWDLGLNKKRIAYFTLPKTDSGNEDLVIIWLRDMRLMQGDEICLRYKGDLAPLWKGIGHVIKVPDNYGDEIAIELRSSVGAPVEVTHNFQVDFVWKSTSFDRMQSALKTFAVDETSVSGYIYHKLLGHEVEDVIIKCQLPKRFTAQGLPDLNHSQVYAVKTVLQRPLSLIQGPPGTGKTVTSATIVYHLARQGNGPVLVCAPSNIAVDQLTEKIHQTGLKVVRLCAKSREAIDSPVSFLALHNQIRNMDSMPELQKLQQLKDETGELSSADEKRYRALKRTAERELLMNADVICCTCVGAGDPRLAKMQFRSILIDESTQATEPECMVPVVLGAKQLILVGDHCQLGPVVMCKKAAKAGLSQSLFERLVVLGIRPIRLQVQYRMHPALSAFPSNIFYEGSLQNGVTAADRVKKGFDFQWPQPDKPMFFYVTQGQEEIASSGTSYLNRTEAANVEKITTKLLKAGAKPDQIGIITPYEGQRSYLVQYMQFSGSLHTKLYQPG

SEQ ID NO: 4871 - protein, 208 aa, Artificial Sequence
  Synthetic polypeptide
MAPPAPGPASGGSGEVDELFDVKNAFYIGSYQQCINEAQRVKLSSPERDVERDVFLYRAYLAQRKFGVVLDEIKPSSAPELQAVRMFADYLAHESRRDSIVAELDREMSRSVDVTNTTFLLMAASIYLHDQNPDAALRALHQGDSLECTAMTVQILLKLDRLDLARKELKRMQDLDEDATLTQLATAWVSLATLGLVPCTCKPSYSGG

SEQ ID NO: 4872 - protein, 231 aa, Artificial Sequence
  Synthetic polypeptide
MAPPAPGPASGGSGEVDELFDVKNAFYIGSYQQCINEAQRVKLSSPERDVERDVFLYRAYLAQRKFGVVLDEIKPSSAPELQAVRMFADYLAHESRRDSIVAELDREMSRSVDVTNTTFLLMAASIYLHDQNPDAALRALHQGDSLEWVSSPGRALHLEAQPMEAASPDGRTAMTVQILLKLDRLDLARKELKRMQDLDEDATLTQLATAWVSLATLGLVPCTCKPSYSGG

SEQ ID NO: 4873 - protein, 157 aa, Artificial Sequence
  Synthetic polypeptide
MAPPAPGPASGGSGEVDELFDVKNAFYIGSYQQCINEAQRVKLSSPERDVERDVFLYRAYLAQRKFGVVLDEIKPSSAPELQAVRMFADYLAHESRSTAMTVQILLKLDRLDLARKELKRMQDLDEDATLTQLATAWVSLATLGLVPCTCKPSYSGG

SEQ ID NO: 4874 - protein, 381 aa, Artificial Sequence
  Synthetic polypeptide
MAGFAELGLSSWLVEQCRQLGLKQPTPVQLGCIPAILEGRDCLGCAKTGSGKTAAFVLPILQKLSEDPYGIFCLVLTPTRELAYQIAEQFRVLGKPLGLKDCIIVGGMDMVAQALELSRKPHVVIATPGRLADHLRSSNTFSIKKIRFLVMDEADRLLEQGCTDFTVDLEAILAAVPARRQTLLFSATLTDTLRELQGLATNQPFFWEAQAPVSTVEQLDQRYLLVPEKVKDAYLVHLIQRFQDEHEDWSIIIFTNTCKTCQILCMMLRKFSFPTVALHSMMKQKERFAALAKFKSSIYRILIATDVASRGLDIPTVQVVINHNTPGLPKIYIHRVGRTARAATREAEARRSLEPGRLRQAENALLHPSLGKKSKTLSPKK

SEQ ID NO: 4875 - protein, 287 aa, Artificial Sequence
  Synthetic polypeptide
MDMVAQALELSRKPHVVIATPGRLADHLRSSNTFSIKKIRFLVMDEADRLLEQGCTDFTVDLEAILAAVPARRQTLLFSATLTDTLRELQGLATNQPFFWEAQAPVSTVEQLDQRYLLVPEKVKDAYLVHLIQRFQDEHEDWSIIIFTNTCKTCQILCMMLRKFSFPTVALHSMMKQKERFAALAKFKSSIYRILIATDVASRGADQPPLPPGAWTSLRYRWSSTTTPPGSPRSTSTESAGRPVQLLGRLRQEDHLNPGGCGKLRMHYCTPAWAKRAKLCLQKNKIK

SEQ ID NO: 4876 - protein, 8 aa, Artificial Sequence
  Synthetic polypeptide
MSGAQGHF

SEQ ID NO: 4877 - protein, 101 aa, Artificial Sequence
  Synthetic polypeptide
MSEKENNFPPLPKFIPVKPCFYQNFSDEIPVEHQVLVKRIYRLWMFYCATLGVNLIACLAWWIGGGSGTNFGLAFVWLLLFTPCGYVCWFRPVYKAFRYKN

SEQ ID NO: 4878 - protein, 45 aa, Artificial Sequence
  Synthetic polypeptide
MPVPRATARRNHPRPPQPDPGRDSGPPSLRQPRFLVIGLRWTRDP

SEQ ID NO: 4879 - protein, 3 aa, Artificial Sequence
  Synthetic polypeptide
MAL

SEQ ID NO: 4880 - protein, 108 aa, Artificial Sequence
  Synthetic polypeptide
MGPLQFRDVAIEFSLEEWHCLDAAQRNLYRDVMLENYRNLIFLGIVVSKPNLITCLEQGKKPLTMKRHEMIAKPPDGVSVFHPGWSAVARSRLTATSTSQARHGGSCL

SEQ ID NO: 4881 - protein, 74 aa, Artificial Sequence
  Synthetic polypeptide
MNDSCIFRPETDSDIMELTDRIRVTCALNRCVDKNLHFPLCLFAKILTNVQVTPAATPAIQVLNLQLHILNPSF

SEQ ID NO: 4882 - protein, 9 aa, Artificial Sequence
  Synthetic polypeptide
MLLSLATED

SEQ ID NO: 4883 - protein, 16 aa, Artificial Sequence
  Synthetic polypeptide
MQVPEFGSKLQNYLLS

SEQ ID NO: 4884 - protein, 9 aa, Artificial Sequence
  Synthetic polypeptide
MARRGGSRL

SEQ ID NO: 4885 - protein, 114 aa, Artificial Sequence
  Synthetic polypeptide
MGPLQFRDVAIEFSLEEWHCLDTAQRNLYRNVMLENYSNLVFLGITVSKPDLITCLEQGRKPLTMKRNEMIAKPSGWEAEAGRSPEVGSSRPAYPATWAAEAGESLEPGRRMLR

SEQ ID NO: 4886 - protein, 114 aa, Artificial Sequence
  Synthetic polypeptide
MGPLQFRDVAIEFSLEEWHCLDTAQRNLYRNVMLENYSNLVFLGITVSKPDLITCLEQGRKPLTMKRNEMIAKPSGWARWLMPVIPSLSKAEVGGSRCQKIETILANMVKPCLY

SEQ ID NO: 4887 - protein, 154 aa, Artificial Sequence
  Synthetic polypeptide
MGPLQFRDVAIEFSLEEWHCLDTAQRNLYRNVMLENYSNLVFLGITVSKPDLITCLEQGRKPLTMKRNEMIAKPSGPGMVVALFCNPRILGGQDRRIPGAQKFETSLGNIWRPLSIKKKINKSQASWCAAVVPATWEIELESKLCHYTPAWVTE

SEQ ID NO: 4888 - protein, 46 aa, Artificial Sequence
  Synthetic polypeptide
MYQPLGRLRHENCLNPGGGSCSELRSNHRAPACVTKRDSGSKKRKK

SEQ ID NO: 4889 - protein, 15 aa, Artificial Sequence
  Synthetic polypeptide
MFGSKLTRISLDCAV

SEQ ID NO: 4890 - protein, 127 aa, Artificial Sequence
  Synthetic polypeptide
MAQRNLYRDVMLENYRNLVFLGIVVSKPDLITHLEQGKKPSTMQRHEMVANPSGPGVVVALICNPRILGGQDRRIPGAQKFETSLGSIWRLSSIKKINNSQAWWCAAVVPATWEIEGESKLCHYTLA

SEQ ID NO: 4891 - protein, 149 aa, Artificial Sequence
  Synthetic polypeptide
MGPLQFRDVAIEFSLEEWHCLDMAQRNLYRDVMLENYRNLVFLGIVVSKPDLITHLEQGKKPSTMQRHEMVANPSGPGVVVALICNPRILGGQDRRIPGAQKFETSLGSIWRLSSIKKINNSQAWWCAAVVPATWEIEGESKLCHYTLA

SEQ ID NO: 4892 - protein, 195 aa, Artificial Sequence
  Synthetic polypeptide
MLAGKHVALTPLKAYSQDAGVICPENLHLRRNSREGGDQKEKKKGLQGPLQFRDVAIEFSLEEWHCLDMAQRNLYRDVMLENYRNLVFLGIVVSKPDLITHLEQGKKPSTMQRHEMVANPSGPGVVVALICNPRILGGQDRRIPGAQKFETSLGSIWRLSSIKKINNSQAWWCAAVVPATWEIEGESKLCHYTLA

SEQ ID NO: 4893 - protein, 61 aa, Artificial Sequence
  Synthetic polypeptide
MAQRNLYRDVMLENYRNLVFLGIVVSKPDLITHLEQGKKPSTMQRHEMVANPSGVVSHPLS

SEQ ID NO: 4894 - protein, 83 aa, Artificial Sequence
  Synthetic polypeptide
MGPLQFRDVAIEFSLEEWHCLDMAQRNLYRDVMLENYRNLVFLGIVVSKPDLITHLEQGKKPSTMQRHEMVANPSGVVSHPLS

SEQ ID NO: 4895 - protein, 129 aa, Artificial Sequence
  Synthetic polypeptide
MLAGKHVALTPLKAYSQDAGVICPENLHLRRNSREGGDQKEKKKGLQGPLQFRDVAIEFSLEEWHCLDMAQRNLYRDVMLENYRNLVFLGIVVSKPDLITHLEQGKKPSTMQRHEMVANPSGVVSHPLS

SEQ ID NO: 4896 - protein, 149 aa, Artificial Sequence
  Synthetic polypeptide
MGPLTFRDVAIEFSLKEWQCLDTAQRNLYRNVMLENYRNLVFLDLITCLEQGKEAWSMKRHEIMVAKPTGPGMVVAHICNPRDLERPRQRGSLEPKSLRPPWATYGDSFSTKNFFKMAWHFGVHLWSKIFGRLKKEDYLSLGISDYSQP

SEQ ID NO: 4897 - protein, 156 aa, Artificial Sequence
  Synthetic polypeptide
MGPLTFRDVAIEFSLKEWQCLDTAQRNLYRNVMLENYRNLVFLGITVSKPDLITCLEQGKEAWSMKRHEIMVAKPTGPGMVVAHICNPRDLERPRQRGSLEPKSLRPPWATYGDSFSTKNFFKMAWHFGVHLWSKIFGRLKKEDYLSLGISDYSQP

SEQ ID NO: 4898 - protein, 92 aa, Artificial Sequence
  Synthetic polypeptide
MKRHEIMVAKPTGPGMVVAHICNPRDLERPRQRGSLEPKSLRPPWATYGDSFSTKNFFKMAWHFGVHLWSKIFGRLKKEDYLSLGISDYSQP

SEQ ID NO: 4899 - protein, 124 aa, Artificial Sequence
  Synthetic polypeptide
MLENYRNLVFLGITVSKPDLITCLEQGKEAWSMKRHEIMVAKPTGPGMVVAHICNPRDLERPRQRGSLEPKSLRPPWATYGDSFSTKNFFKMAWHFGVHLWSKIFGRLKKEDYLSLGISDYSQP

SEQ ID NO: 4900 - protein, 105 aa, Artificial Sequence
  Synthetic polypeptide
MNVMLENYKNLVFLAGIAVSKQDPITSLEQEKEPWNMKICEMVDESPAMCSSFTRDLWPEQDIKDSFQQVILRRHGKCEHENLQPGVVSYTCNPSTVGSQGRWIA

SEQ ID NO: 4901 - protein, 133 aa, Artificial Sequence
  Synthetic polypeptide
METLTFRDVAIEFSLEEWECLNPAQQNLYMNVMLENYKNLVFLGIAVSKQDPITSLEQEKEPWNMKICEMVDESPAMCSSFTRDLWPEQDIKDSFQQVILRRHGKCEHENLQPGVVSYTCNPSTVGSQGRWIA

SEQ ID NO: 4902 - protein, 255 aa, Artificial Sequence
  Synthetic polypeptide
MNVMLENYKNLVFLAGIAVSKQDPITSLEQEKEPWNMKICEMVDESPAMCSSFTRDLWPEQDIKDSFQQVILRRHGKCEHENLQLRKGSANVVECKVYKKGYELNQCLTTTQSKIFPCDKYIKVFHKIFNSNRHKTRHTGEKPFKCKKCDESFCMLLHLHQHKRIHIRENSYQCEECDKVFKRFSTLTRHKRVHTGEKPFKCEECGKAFKHSSTLTTHKMIHTGEKPYRCEECGKAFYHSSHLTTHKARCGVLHL

SEQ ID NO: 4903 - protein, 120 aa, Artificial Sequence
  Synthetic polypeptide
MDDLKYGVYPLKEASGCPGAERNLLVYSYFEKETLTFRDVAIEFSLEEWECLNPAQQNLYMNVMLENYKNLVFLGVAVSKQDPVTCLEQEKEPWNMKRHEMVDEPPGVVAHVCNPSTLTG

SEQ ID NO: 4904 - protein, 160 aa, Artificial Sequence
  Synthetic polypeptide
MDDLKYGVYPLKEASGCPGAERNLLVYSYFEKSRSVAQAGMQWRSLSWLTVISASQVQVILVPQPPELLGLQETLTFRDVAIEFSLEEWECLNPAQQNLYMNVMLENYKNLVFLGVAVSKQDPVTCLEQEKEPWNMKRHEMVDEPPGVVAHVCNPSTLTG

SEQ ID NO: 4905 - protein, 166 aa, Artificial Sequence
  Synthetic polypeptide
MDDLKYGVYPLKEASGCPGAERNLLVYSYFEKETLTFRDVAIEFSLEEWECLNPAQQNLYMNVMLENYKNLVFLGVAVSKQDPVTCLEQEKEPWNMKRHEMVDEPPAMCSYFTKDLWPEQDIKDSFQQVILRRYGKCEHENLQLRKGSASVDEYKVWWLTSVIPAL

SEQ ID NO: 4906 - protein, 206 aa, Artificial Sequence
  Synthetic polypeptide
MDDLKYGVYPLKEASGCPGAERNLLVYSYFEKSRSVAQAGMQWRSLSWLTVISASQVQVILVPQPPELLGLQETLTFRDVAIEFSLEEWECLNPAQQNLYMNVMLENYKNLVFLGVAVSKQDPVTCLEQEKEPWNMKRHEMVDEPPAMCSYFTKDLWPEQDIKDSFQQVILRRYGKCEHENLQLRKGSASVDEYKVWWLTSVIPAL

SEQ ID NO: 4907 - protein, 163 aa, Artificial Sequence
  Synthetic polypeptide
MDDLKYGVYPLKEASGCPGAERNLLVYSYFEKETLTFRDVAIEFSLEEWECLNPAQQNLYMNVMLENYKNLVFLGVAVSKQDPVTCLEQEKEPWNMKRHEMVDEPPAMCSYFTKDLWPEQDIKDSFQQVILRRYGKCEHENLQLRKGSASVDEYKARSGGSHL

SEQ ID NO: 4908 - protein, 203 aa, Artificial Sequence
  Synthetic polypeptide
MDDLKYGVYPLKEASGCPGAERNLLVYSYFEKSRSVAQAGMQWRSLSWLTVISASQVQVILVPQPPELLGLQETLTFRDVAIEFSLEEWECLNPAQQNLYMNVMLENYKNLVFLGVAVSKQDPVTCLEQEKEPWNMKRHEMVDEPPAMCSYFTKDLWPEQDIKDSFQQVILRRYGKCEHENLQLRKGSASVDEYKARSGGSHL

SEQ ID NO: 4909 - protein, 531 aa, Artificial Sequence
  Synthetic polypeptide
MDDLKYGVYPLKEASGCPGAERNLLVYSYFEKETLTFRDVAIEFSLEEWECLNPAQQNLYMNVMLENYKNLVFLGVAVSKQDPVTCLEQEKEPWNMKRHEMVDEPPAMCSYFTKDLWPEQDIKDSFQQVILRRYGKCEHENLQLRKGSASVDEYKVHKEGYNELNQCLTTTQSKIFPCDKYVKVFHKFLNANRHKTRHTGKKPFKCKKCGKSFCMLLHLSQHKRIHIRENSYQCEECGKAFKWFSTLTRHKRIHTGEKPFKCEECGKAFKQSSTLTTHKIIHTGEKPYRCEECGKAFNRSSHLTTHKIIHTGEKPYKCEECGKAFNQSSTLSTHKFIHAGEKPYKCEECDKAFNRFSYLTKHKIIHTGEKSYKCEECGKGFNWSSTLTKHKRIHTGEKPYKCEVCGKAFNESSNLTTHKMIHTGEKPYKCEECGKAFNRSPQLTAHKIIHTGEKPYKCEECGKAFSQSSILTTHKRIHTGEKPYKCEECGKAFNRSSNLTKHKIIHTGEKSYKCEECGVVAHVCNPSTLTG

SEQ ID NO: 4910 - protein, 118 aa, Artificial Sequence
  Synthetic polypeptide
MDDLRYGVYPVKGASGYPGAERNLLEYSYFEKGPLTFRDVVIEFSQEEWQCLDTAQQDLYRKVMLENFRNLVFLGIDVSKPDLITCLEQGKDPWNMKRHSMVATPPVHSESQSPLHGI

SEQ ID NO: 4911 - protein, 136 aa, Artificial Sequence
  Synthetic polypeptide
MDDLRYGVYPVKGASGYPGAERNLLEYSYFEKGPLTFRDVVIEFSQEEWQCLDTAQQDLYRKVMLENFRNLVFLGIDVSKPDLITCLEQGKDPWNMKRHSMVATPPGWAQWLMPVIPTLWEAEASGSSEFGSLRPA

SEQ ID NO: 4912 - protein, 25 aa, Artificial Sequence
  Synthetic polypeptide
MPGPPESLDMFIFEQGKVGTGDPTD

SEQ ID NO: 4913 - protein, 113 aa, Artificial Sequence
  Synthetic polypeptide
MDVAIEFCLEEWQCLDIAQQNLYRNVMLENYRNLVFLGIAVSKPDLITCLEQEKEPWEPMRRHEMVAKPPVSFLRPSPETDADTHFLYSLPNCEQNKPFFFINYPLSGIPLYA

SEQ ID NO: 4914 - protein, 119 aa, Artificial Sequence
  Synthetic polypeptide
MGPLTFMDVAIEFCLEEWQCLDIAQQNLYRNVMLENYRNLVFLGIAVSKPDLITCLEQEKEPWEPMRRHEMVAKPPVSFLRPSPETDADTHFLYSLPNCEQNKPFFFINYPLSGIPLYA

SEQ ID NO: 4915 - protein, 54 aa, Artificial Sequence
  Synthetic polypeptide
MRRHEMVAKPPVSFLRPSPETDADTHFLYSLPNCEQNKPFFFINYPLSGIPLYA

SEQ ID NO: 4916 - protein, 118 aa, Artificial Sequence
  Synthetic polypeptide
MGSLTFRDVAIEFSLEEWQCLDTAQQNLYRNVMLENYRNLVFLGIAAFKPDLIIFLEEGKESWNMKRHEMVEESPVICSHFAQDLWPEQGIEDSFQKVILRRVKSTFELFTAFNDGGK

SEQ ID NO: 4917 - protein, 13 aa, Artificial Sequence
  Synthetic polypeptide
MRASLEPGRRRLL

SEQ ID NO: 4918 - protein, 126 aa, Artificial Sequence
  Synthetic polypeptide
MPGPLGSLEMGVLTFRDVALEFSLEEWQCLDTAQQNLYRNVMLENYRNLVFVGIAASKPDLITCLEQGKEPWNVKRHEMVTEPPVVVVHVCNPRILGGQGRKTEPKSLRTSWKTYGNLISVKHFKT

SEQ ID NO: 4919 - protein, 85 aa, Artificial Sequence
  Synthetic polypeptide
MLENYRNLVFVGIAASKPDLITCLEQGKEPWNVKRHEMVTEPPVVVVHVCNPRILGGQGRKTEPKSLRTSWKTYGNLISVKHFKT

SEQ ID NO: 4920 - protein, 50 aa, Artificial Sequence
  Synthetic polypeptide
MVKSSLQRILNSHCFAREKEGDKPSATIHASRTMPLLSLHSRGGSSRETL

SEQ ID NO: 4921 - protein, 7 aa, Artificial Sequence
  Synthetic polypeptide
MKPPAAN

SEQ ID NO: 4922 - protein, 37 aa, Artificial Sequence
  Synthetic polypeptide
YRPRSSPASPSSSRSWRSATASKKNSSFFRLNTTASS

SEQ ID NO: 4923 - protein, 249 aa, Artificial Sequence
  Synthetic polypeptide
MYPQGRHPTPLQSGQPFKFSILEICDRIKEEFQFLQAQYHSLKLECEKLASEKTEMQRHYVMYYEMSYGLNIEMHKQAEIVKRLSGICAQIIPFLTQEHQQQVLQAVERAKQVTVGELNSLIGQQLQPLSHHAPPVPLTPRPAGLVGGSATGLLALSGALAAQAQLAAAVKEDRAGVEAEGSRVERAPSRSASPSPPESLVEEERPSGPGGGGKQRADEKEPSGPYESDEDKSDYNLVVDEAGRGGSHL

SEQ ID NO: 4924 - protein, 127 aa, Artificial Sequence
  Synthetic polypeptide
MQRHYVMYYEMSYGLNIEMHKQAEIVKRLSGICAQIIPFLTQEHQQQVLQAVERAKQVTVGELNSLIGSASPSPPESLVEEERPSGPGGGGKQRADEKEPSGPYESDEDKSDYNLVVDEAGRGGSHL

SEQ ID NO: 4925 - protein, 263 aa, Artificial Sequence
  Synthetic polypeptide
MVQSRLTATSASQDSPASGLQTPLQSGQPFKFSILEICDRIKEEFQFLQAQYHSLKLECEKLASEKTEMQRHYVMYYEMSYGLNIEMHKQAEIVKRLSGICAQIIPFLTQEHQQQVLQAVERAKQVTVGELNSLIGQQQLQPLSHHAPPVPLTPRPAGLVGGSATGLLALSGALAAQAQLAAAVKEDRAGVEAEGSRVERAPSRSASPSPPESLVEEERPSGPGGGGKQRADEKEPSGPYESDEDKSDYNLVVDEAGRGGSHL

SEQ ID NO: 4926 - protein, 250 aa, Artificial Sequence
  Synthetic polypeptide
MYPQGRHPTPLQSGQPFKFSILEICDRIKEEFQFLQAQYHSLKLECEKLASEKTEMQRHYVMYYEMSYGLNIEMHKQAEIVKRLSGICAQIIPFLTQEHQQQVLQAVERAKQVTVGELNSLIGQQQLQPLSHHAPPVPLTPRPAGLVGGSATGLLALSGALAAQAQLAAAVKEDRAGVEAEGSRVERAPSRSASPSPPESLVEEERPSGPGGGGKQRADEKEPSGPYESDEDKSDYNLVVDEAGRGGSHL

SEQ ID NO: 4927 - protein, 232 aa, Artificial Sequence
  Synthetic polypeptide
MYPQGRHPTPLQSGQPFKFSILEICDRIKEEFQFLQAQYHSLKLECEKLASEKTEMQRHYVMYYEMSYGLNIEMHKQAEIVKRLSGICAQIIPFLTQEHQQQVLQAVERAKQVTVGELNSLIGQQLQPLSHHAPPVPLTPRPAGLVGGSATGLLALSGALAAQAQLAAAVKEDRAGVEAEGSRVERAPSRLLWRLRQKNGVNPGGGGCSEPRLRHCTPAWATERDSISKEKK

SEQ ID NO: 4928 - protein, 246 aa, Artificial Sequence
  Synthetic polypeptide
MVQSRLTATSASQDSPASGLQTPLQSGQPFKFSILEICDRIKEEFQFLQAQYHSLKLECEKLASEKTEMQRHYVMYYEMSYGLNIEMHKQAEIVKRLSGICAQIIPFLTQEHQQQVLQAVERAKQVTVGELNSLIGQQQLQPLSHHAPPVPLTPRPAGLVGGSATGLLALSGALAAQAQLAAAVKEDRAGVEAEGSRVERAPSRLLWRLRQKNGVNPGGGGCSEPRLRHCTPAWATERDSISKEKK

SEQ ID NO: 4929 - protein, 233 aa, Artificial Sequence
  Synthetic polypeptide
MYPQGRHPTPLQSGQPFKFSILEICDRIKEEFQFLQAQYHSLKLECEKLASEKTEMQRHYVMYYEMSYGLNIEMHKQAEIVKRLSGICAQIIPFLTQEHQQQVLQAVERAKQVTVGELNSLIGQQQLQPLSHHAPPVPLTPRPAGLVGGSATGLLALSGALAAQAQLAAAVKEDRAGVEAEGSRVERAPSRLLWRLRQKNGVNPGGGGCSEPRLRHCTPAWATERDSISKEKK

SEQ ID NO: 4930 - protein, 156 aa, Artificial Sequence
  Synthetic polypeptide
MYPQGRHPTPLQSGQPFKFSILEICDRIKEEFQFLQAQYHSLKLECEKLASEKTEMQRHYVMYYEMSYGLNIEMHKQRSQRAHLGPGRQISASWKENESHLLKTVSSSWSVQQRCRQWAGATRHPHQGGHIAEAGQPGQGGCGSDFCPRRELDGHS

SEQ ID NO: 4931 - protein, 101 aa, Artificial Sequence
  Synthetic polypeptide
MQRHYVMYYEMSYGLNIEMHKQRSQRAHLGPGRQISASWKENESHLLKTVSSSWSVQQRCRQWAGATRHPHQGGHIAEAGQPGQGGCGSDFCPRRELDGHS

SEQ ID NO: 4932 - protein, 169 aa, Artificial Sequence
  Synthetic polypeptide
MVQSRLTATSASQDSPASGLQTPLQSGQPFKFSILEICDRIKEEFQFLQAQYHSLKLECEKLASEKTEMQRHYVMYYEMSYGLNIEMHKQRSQRAHLGPGRQISASWKENESHLLKTVSSSWSVQQRCRQWAGATRHPHQGGHIAEAGQPGQGGCGSDFCPRRELDGHS

SEQ ID NO: 4933 - protein, 37 aa, Artificial Sequence; identical to SEQ ID NO: 4922
  Synthetic polypeptide

SEQ ID NO: 4934 - protein, 111 aa, Artificial Sequence
  Synthetic polypeptide
MAAEVLSRRCVLMRLLDFSYEQYQKALRQSAGAVVIILPRAMAAVPQDVVRQFMEIEPEMLAMETAVPVYFAVEDEALLSIYKQTQAASASQGSASAAEAAGSVHTKDQNH

SEQ ID NO: 4935 - protein, 185 aa, Artificial Sequence
  Synthetic polypeptide
MLEEAGEVLENMLKASCLPLGFIVFLPAVLLLVAPPLPAADAAHEFTVYRMQQYDLQGQPYGTRNAVLNTEARTMAAEVLSRRCVLMRLLDFSYEQYQKALRQSAGAVVIILPRAMAAVPQDVVRQFMEIEPEMLAMETAVPVYFAVEDEALLSIYKQTQAASASQGSASAAEAAGSVHTKDQNH

SEQ ID NO: 4936 - protein, 31 aa, Artificial Sequence
  Synthetic polypeptide
MLLGFRRGRRSHFAQGCLLPLPGLSPLQQLL

SEQ ID NO: 4937 - protein, 45 aa, Artificial Sequence
  Synthetic polypeptide
MAEEDQPLLFLLSLLNVKMMRTKTFRMIHFHLMNSKYTFSFLQFS

SEQ ID NO: 4938 - protein, 142 aa, Artificial Sequence
  Synthetic polypeptide
MSGGTPYIGSKISLISKAEIRYEGILYTIDTENSTVALAKVRSFGTEDRPTDRPIPPRDEVFEYIIFRGSDIKDLTVCEPPKPQCSLPQDPAIVQSSLGSSTSSFQSMGSYGPFGRMPTYSQFSPSSLVGQQFGAVGVGKGK

SEQ ID NO: 4939 - protein, 137 aa, Artificial Sequence
  Synthetic polypeptide
PYIGSKISLISKAEIRYEGILYTIDTENSTVALAKVRSFGTEDRPTDRPIPPRDEVFEYIIFRGSDIKDLTVCEPPKPQCSLPQDPAIVQSSLGSSTSSFQSMGSYGPFGRMPTYSQFSPSSLVGQQFGAVGVGKGK

SEQ ID NO: 4940 - protein, 142 aa, Artificial Sequence
  Synthetic polypeptide
MSGGTPYIGSKISLISKAEIRYEGILYTIDTENSTVALAKVRSFGTEDRPTDRPIPPRDEVFEYIIFRGSDIKDLTVCEPPKPQCSLPQDPAIVQSSLGSSTSSFQSMGSYGPFGRMPTYSQFSPSSLVGQQFGAVGVGAEG

SEQ ID NO: 4941 - protein, 137 aa, Artificial Sequence
  Synthetic polypeptide
PYIGSKISLISKAEIRYEGILYTIDTENSTVALAKVRSFGTEDRPTDRPIPPRDEVFEYIIFRGSDIKDLTVCEPPKPQCSLPQDPAIVQSSLGSSTSSFQSMGSYGPFGRMPTYSQFSPSSLVGQQFGAVGVGAEG

SEQ ID NO: 4942 - protein, 582 aa, Artificial Sequence
  Synthetic polypeptide
MALSRGLPRELAEAVAGGRVLVVGAGGIGCELLKNLVLTGFSHIDLIDLDTIDVSNLNRQFLFQKKHVGRSKAQVAKESVLQFYPKANIVAYHDSIMNPDYNVEFFRQFILVMNALDNRAARNHVNRMCLAADVPLIESGTAGYLGQVTTIKKGVTECYECHPKPTQRTFPGCTIRNTPSEPIHCIVWAKYLFNQLFGEEDADQEVSPDRADPEAAWEPTEAEARARASNEDGDIKRISTKEWAKSTGYDPVKLFTKLFKDDIRYLLTMDKLWRKRKPPVPLDWAEVQSQGEETNASDQQNEPQLGLKDQQVLDVKSYARLFSKSIETLRVHLAEKGDGAELIWDKDDPSAMDFVTSAANLRMHIFSMNMKSRFDIKSMAGNIIPAIATTNAVIAGLIVLEGLKILSGKIDQCRTIFLNKQPNPRKKLLVPCALDPPNPNCYVCASKPEVTVRLNVHKVTVLTLQDKIVKEKFAMVAPDVQIEDGKGTILISSEEGETEANNHKKLSEFGIRNGSRLQADDFLQDYTLLINILHSEDLGKDVEFEVVGDAPEKVGPKQAEDAAKSITNGSDDGAQPSTSTGL

SEQ ID NO: 4943 - protein, 486 aa, Artificial Sequence
  Synthetic polypeptide
MNPDYNVEFFRQFILVMNALDNRAARNHVNRMCLAADVPLIESGTAGYLGQVTTIKKGVTECYECHPKPTQRTFPGCTIRNTPSEPIHCIVWAKYLFNQLFGEEDADQEVSPDRADPEAAWEPTEAEARARASNEDGDIKRISTKEWAKSTGYDPVKLFTKLFKDDIRYLLTMDKLWRKRKPPVPLDWAEVQSQGEETNASDQQNEPQLGLKDQQVLDVKSYARLFSKSIETLRVHLAEKGDGAELIWDKDDPSAMDFVTSAANLRMHIFSMNMKSRFDIKSMAGNIIPAIATTNAVIAGLIVLEGLKILSGKIDQCRTIFLNKQPNPRKKLLVPCALDPPNPNCYVCASKPEVTVRLNVHKVTVLTLQDKIVKEKFAMVAPDVQIEDGKGTILISSEEGETEANNHKKLSEFGIRNGSRLQADDFLQDYTLLINILHSEDLGKDVEFEVVGDAPEKVGPKQAEDAAKSITNGSDDGAQPSTSTGL

SEQ ID NO: 4944 - protein, 108 aa, Artificial Sequence
  Synthetic polypeptide
MVAPDVQIEDGKGTILISSEEGETEANNHKKLSEFGIRNGSRLQADDFLQDYTLLINILHSEDLGKDVEFEVVGDAPEKVGPKQAEDAAKSITNGSDDGAQPSTSTGL

SEQ ID NO: 4945 - protein, 179 aa, Artificial Sequence
  Synthetic polypeptide
MGPGPPAAGAAPSPRPLSLVARLSYAVGHFLNDLCASMWFTYLLLYLHSVRAYSSRGAGLLLLLGQVADGLCTPLVGYEADRAASCCARYGPRKAWHLVGTVCVLLSFPFIFSPCLGCGAATPEWAALLYYGPFIVIFQFGWASTQISHLSLIPELVTNDHEKVELTALSPRRRTPNTQ

SEQ ID NO: 4946 - protein, 170 aa, Artificial Sequence
  Synthetic polypeptide
MGPGPPAAGAAPSPRPLSLVARLSYAVGHFLNDLCASMWFTYLLLYLHSVRAYSSRGAGLLLLLGQVADGLCTPLVGYEADRAASCCARYGTVCVLLSFPFIFSPCLGCGAATPEWAALLYYGPFIVIFQFGWASTQISHLSLIPELVTNDHEKVELTALSPRRRTPNTQ

SEQ ID NO: 4947 - protein, 30 aa, Artificial Sequence
  Synthetic polypeptide
LSLIPELVTNDHEKVELTALSPRRRTPNTQ

SEQ ID NO: 4948 - protein, 42 aa, Artificial Sequence
  Synthetic polypeptide
MQKVTLGLLVFLAGFPVLDANDLEDKNSPFYYGVSHYAQPAL

SEQ ID NO: 4949 - protein, 99 aa, Artificial Sequence
  Synthetic polypeptide
MGRGYSGALQARGGLEEPLERGLRGPSFTQSPLHGAAAAYLSAQRDASLPVPGQRSDMQKVTLGLLVFLAGFPVLDANDLEDKNSPFYYGVSHYAQPAL

SEQ ID NO: 4950 - protein, 169 aa, Artificial Sequence
  Synthetic polypeptide
MSPSGRLCLLTIVGLILPTRGQTLKDTTSSSSADSTIMDIQVPTRAPDAVYTELQPTSPTPTWPADETPQPQTQTQQLEGTDGPLVTDPETHKSTKAAHPTDDTTTLSERPSPSTDVQTDPQTLKPSGFHEDDPFFYDEHTLRKRGLLVAAVLFITGIIILTSHSGSRM

SEQ ID NO: 4951 - protein, 98 aa, Artificial Sequence
  Synthetic polypeptide
MQTLSNIPCFCLHGSLLPSTDLATLSAHPTDDTTTLSERPSPSTDVQTDPQTLKPSGFHEDDPFFYDEHTLRKRGLLVAAVLFITGIIILTSHSGSRM

SEQ ID NO: 4952 - protein, 6 aa, Artificial Sequence
  Synthetic polypeptide
RRRKWT

SEQ ID NO: 4953 - protein, 328 aa, Artificial Sequence
  Synthetic polypeptide
MKFQGPLACLLLALCLGSGEAGPLQSGEESTGTNIGEALGHGLGDALSEGVGKAIGKEAGGAAGSKVSEALGQGTREAVGTGVRQVPGFGVADALGNRVGEAAHALGNTGHEIGRQAEDVIRHGADAVRGSWQGVPGHNGAWETSGGHGIFGSQGGLGGQGQGNPGGLGTPWVHGYPGNSAGSFGMNPQGAPWGQGGNGGPPNFGTNTQGAVAQPGYGSVRASNQNEGCTNPPPSGSGGGSSNSGGSSTGSSSGNHGGSGGGNGHKPGCEKPGNEARGSGESGIQGFRGQGVSSNMREISKEGNRLLGGSGDNYRASQLTSPSLSFLQ

SEQ ID NO: 4954 - protein, 102 aa, Artificial Sequence
  Synthetic polypeptide
MLGITSCSDQQAKEGEGLEGSSTGSSSGNHGGSGGGNGHKPGCEKPGNEARGSGESGIQGFRGQGVSSNMREISKEGNRLLGGSGDNYRASQLTSPSLSFLQ

SEQ ID NO: 4955 - protein, 389 aa, Artificial Sequence
  Synthetic polypeptide
MKFQGPLACLLLALCLGSGEAGPLQSGEESTGTNIGEALGHGLGDALSEGVGKAIGKEAGGAAGSKVSEALGQGTREAVGTGVRQVPGFGVADALGNRVGEAAHALGNTGHEIGRQAEDVIRHGADAVRGSWQGVPGHNGAWETSGGHGIFGSQGGLGGQGQGNPGGLGTPWVHGYPGNSAGSFGMNPQGAPWGQGGNGGPPNFGTNTQGAVAQPGYGSVRASNQNEGCTNPPPSGSGGGSSNSGGGSGSQSGSSGSGSNGDNNNGSSSGGSSSGSSSGGSSGGSSGGSSGNSGGSRGDSGSESSWGSSTGSSSGNHGGSGGGNGHKPGCEKPGNEARGSGESGIQGFRGQGVSSNMREISKEGNRLLGGSGDNYRASQLTSPSLSFLQ

SEQ ID NO: 4956 - protein, 284 aa, Artificial Sequence
  Synthetic polypeptide
MWPNGSSLGPCFRPTNITLEERRLIASPWFAASFCVVGLASNLLALSVLAGARQGGSHTRSSFLTFLCGLVLTDFLGLLVTGTIVVSQHAALFEWHAVDPGCRLCRFMGVVMIFFGLSPLLLGAAMASERYLGITRPFSRPAVASQRRAWATVGLVWAAALALGLLPLLGVGRYTVQYPGSWCFLTLGAESGDVAFGLLFSMLGGLSVGLSFLLNTVSVATLCHVYHGQEAAQQRPRDSEVEMMAQLLGIMVVASVCWLPLLLCPPHAVTPRTQFPSPDWTVSL

SEQ ID NO: 4957 - protein, 6 aa, Artificial Sequence
  Synthetic polypeptide
RRRKWT

SEQ ID NO: 4958 - protein, 84 aa, Artificial Sequence
  Synthetic polypeptide
MLGITSCSDQQAKEGEGLEGSSTGSSSGNHGGSGGGNGHKPGCEKPGNEARGSGESGIQGFRGQGVSSNMRASQLTSPSLSFLQ

SEQ ID NO: 4959 - protein, 310 aa, Artificial Sequence
  Synthetic polypeptide
MKFQGPLACLLLALCLGSGEAGPLQSGEESTGTNIGEALGHGLGDALSEGVGKAIGKEAGGAAGSKVSEALGQGTREAVGTGVRQVPGFGVADALGNRVGEAAHALGNTGHEIGRQAEDVIRHGADAVRGSWQGVPGHNGAWETSGGHGIFGSQGGLGGQGQGNPGGLGTPWVHGYPGNSAGSFGMNPQGAPWGQGGNGGPPNFGTNTQGAVAQPGYGSVRASNQNEGCTNPPPSGSGGGSSNSGGSSTGSSSGNHGGSGGGNGHKPGCEKPGNEARGSGESGIQGFRGQGVSSNMRASQLTSPSLSFLQ

SEQ ID NO: 4960 - protein, 371 aa, Artificial Sequence
  Synthetic polypeptide
MKFQGPLACLLLALCLGSGEAGPLQSGEESTGTNIGEALGHGLGDALSEGVGKAIGKEAGGAAGSKVSEALGQGTREAVGTGVRQVPGFGVADALGNRVGEAAHALGNTGHEIGRQAEDVIRHGADAVRGSWQGVPGHNGAWETSGGHGIFGSQGGLGGQGQGNPGGLGTPWVHGYPGNSAGSFGMNPQGAPWGQGGNGGPPNFGTNTQGAVAQPGYGSVRASNQNEGCTNPPPSGSGGGSSNSGGGSGSQSGSSGSGSNGDNNNGSSSGGSSSGSSSGGSSGGSSGGSSGNSGGSRGDSGSESSWGSSTGSSSGNHGGSGGGNGHKPGCEKPGNEARGSGESGIQGFRGQGVSSNMRASQLTSPSLSFLQ

SEQ ID NO: 4961 - protein, 6 aa, Artificial Sequence
  Synthetic polypeptide
RRRKWT

SEQ ID NO: 4962 - protein, 55 aa, Artificial Sequence
  Synthetic polypeptide
MLGITSCSDQQAKEGEGLEGSSTGSSSGNHGGSGGGNGHKPGASQLTSPSLSFLQ

SEQ ID NO: 4963 - protein, 342 aa, Artificial Sequence
  Synthetic polypeptide
MKFQGPLACLLLALCLGSGEAGPLQSGEESTGTNIGEALGHGLGDALSEGVGKAIGKEAGGAAGSKVSEALGQGTREAVGTGVRQVPGFGVADALGNRVGEAAHALGNTGHEIGRQAEDVIRHGADAVRGSWQGVPGHNGAWETSGGHGIFGSQGGLGGQGQGNPGGLGTPWVHGYPGNSAGSFGMNPQGAPWGQGGNGGPPNFGTNTQGAVAQPGYGSVRASNQNEGCTNPPPSGSGGGSSNSGGGSGSQSGSSGSGSNGDNNNGSSSGGSSSGSSSGGSSGGSSGGSSGNSGGSRGDSGSESSWGSSTGSSSGNHGGSGGGNGHKPGASQLTSPSLSFLQ

SEQ ID NO: 4964 - protein, 281 aa, Artificial Sequence
  Synthetic polypeptide
MKFQGPLACLLLALCLGSGEAGPLQSGEESTGTNIGEALGHGLGDALSEGVGKAIGKEAGGAAGSKVSEALGQGTREAVGTGVRQVPGFGVADALGNRVGEAAHALGNTGHEIGRQAEDVIRHGADAVRGSWQGVPGHNGAWETSGGHGIFGSQGGLGGQGQGNPGGLGTPWVHGYPGNSAGSFGMNPQGAPWGQGGNGGPPNFGTNTQGAVAQPGYGSVRASNQNEGCTNPPPSGSGGGSSNSGGSSTGSSSGNHGGSGGGNGHKPGASQLTSPSLSFLQ

SEQ ID NO: 4965 - protein, 35 aa, Artificial Sequence
  Synthetic polypeptide
SSTGSSSGNHGGSGGGNGHKPGASQLTSPSLSFLQ

SEQ ID NO: 4966 - protein, 29 aa, Artificial Sequence
  Synthetic polypeptide
SGNHGGSGGGNGHKPGASQLTSPSLSFLQ

SEQ ID NO: 4967 - protein, 163 aa, Artificial Sequence
  Synthetic polypeptide
MELAQEARELGCWAVEEMGVPVAARAPESTLRRLCLGQGADIWAYILQHVHSQRTVKKIRGNLLWYGHQDSPQVRRKLELEAAVTRLRAEIQELDQSLELMERDTEAQDTAMEQARQHTQDTQRRALLLRAQAGAMRRQQHTLRDPMQRLQNQLRRLQDMESA

SEQ ID NO: 4968 - protein, 1155 aa, Artificial Sequence
  Synthetic polypeptide
MAAAAGGGSCPGPGSARGRFPGRPRGAGGGGGRGGRGNGAERVRVALRRGGGATGPGGAEPGEDTALLRLLGLRRGLRRLRRLWAGPRVQRGRGRGRGRGWGPSRGCVPEEESSDGESDEEEFQGFHSDEDVAPSSLRSALRSQRGRAPRGRGRKHKTTPLPPPRLADVAPTPPKTPARKRGEEGTERMVQALTELLRRAQAPQAPRSRACEPSTPRRSRGRPPGRPAGPCRRKQQAVVVAEAAVTIPKPEPPPPVVPVKHQTGSWKCKEGPGPGPGTPRRGGQSSRGGRGGRGRGRGGGLPFVIKFVSRAKKVKMGQLSLGLESGQGQGQHEESWQDVPQRRVGSGQGGSPCWKKQEQKLDDEEEEKKEEEEKDKEGEEKEERAVAEEMMPAAEKEEAKLPPPPLTPPAPSPPPPLPPPSTSPPPPLCPPPPPPVSPPPLPSPPPPPAQEEQEESPPPVVPATCSRKRGRPPLTPSQRAEREAARAGPEGTSPPTPTPSTATGGPPEDSPTVAPKSTTFLKNIRQFIMPVVSARSSRVIKTPRRFMDEDPPKPPKVEVSPVLRPPITTSPPVPQEPAPVPSPPRAPTPPSTPVPLPEKRRSILREPTFRWTSLTRELPPPPPAPPPPPAPSPPPAPATSSRRPLLLRAPQFTPSEAHLKIYESVLTPPPLGAPEAPEPEPPPADDSPAEPEPRAVGRTNHLSLPRFAPVVTTPVKAEVSPHGAPALSNGPQTQAQLLQPLQALQTQLLPQALPPPQPQLQPPPSPQQMPPLEKARIAGVGSLPLSGVEEKMFSLLKRAKVQLFKIDQQQQQKVAASMPLSPGGQMEEVAGAVKQISDRGPVRSEDESVEAKRERPSGPESPVQGPRIKHVCRHAAVALGQARAMVPEDVPRLSALPLRDRQDLATEDTSSASETESVPSRSRRGKVEAAGPGGESEPTGSGGTLAHTPRRSLPSHHGKKMRMARCGHCRGCLRVQDCGSCVNCLDKPKFGGPNTKKQCCVYRKCDKIEARKMERLAKKGRTIVKTLLPWDSDESPEASPGPPGPRRGAGAGGPREEVVAHPGPEEQDSLLQRKSARRCVKQRPSYDIFEDSDDSEPGGPPAPRRRTPRENAAQEAEAGGSSEPGSSRLRWAMGHATAFQSGQQSETLPQKTRKR

SEQ ID NO: 4969 - protein, 243 aa, Artificial Sequence
  Synthetic polypeptide
MLRMRVPALLVLLFCFRGRAGPSPHFLQQPEDLVVLLGEEARLPCALGAYWGLVQWTKSGLALGGQRDLPGWSRYWISGNAANGQHDLHIRPVELEDEASYECQATQAGLRSRPAQLHVLVPPEAPQVLGGPSVSLVAGVPANLTCRSRGDARPTPELLWFRDGVLLDGATFHQTLLKEGTPGSVESTLTLTPFSHDDGATFVCRARSQALPTGRDTAITLSLQSTWEAEAGESLVPGRQMLR

SEQ ID NO: 4970 - protein, 193 aa, Artificial Sequence
  Synthetic polypeptide
MLRMRVPALLVLLFCFRGRAGWSRYWISGNAANGQHDLHIRPVELEDEASYECQATQAGLRSRPAQLHVLVPPEAPQVLGGPSVSLVAGVPANLTCRSRGDARPTPELLWFRDGVLLDGATFHQTLLKEGTPGSVESTLTLTPFSHDDGATFVCRARSQALPTGRDTAITLSLQSTWEAEAGESLVPGRQMLR

SEQ ID NO: 4971 - protein, 507 aa, Artificial Sequence
  Synthetic polypeptide
MLASLEKDKTAPGSAQVAGLCGRLTLHRDLRTGRWEPDPQRSRRCLRDPQRVLEYCRQMYPELQIARVEQATQAIPMERWCGGSRSGSCAHPHHQVVPFRCLPGEFVSEALLVPEGCRFLHQERMDQCESSTRRHQEAQEACSSQGLILHGSGMLLPCGSDRFRGVEYVCCPPPGTPDPSGTAVGDPSTRSWPPGSRVEGAEDEEEEESFPQPVDDYFVEPPQAEEEEETVPPPSSHTLAVVGKVTPTPRPTDGVDIYFGMPGEISEHEGFLRAKMDLEERRMRQINEVMREWAMADNQSKNLPKADRQALNEHFQSILQTLEEQVSGERQRLVETHATRVIALINDQRRAALEGFLAALQADPPQAERVLLALRRYLRAEQKEQRHTLRHYQHVAAVDPEKAQQMRFQVHTHLQVIEERVNQSLGLLDQNPHLAQELRPQIQELLHSEHLGPSELEAPAPGGSSEDKGGLQPPDSKDDTPMTLPKVPAAQEADVEGSLEPRKLRLQ

SEQ ID NO: 4972 - protein, 547 aa, Artificial Sequence
  Synthetic polypeptide
MGPASPAARGLSRRPGQPPLPLLLPLLLLLLRAQPAIGSLAGGSPGAAEAPGSAQVAGLCGRLTLHRDLRTGRWEPDPQRSRRCLRDPQRVLEYCRQMYPELQIARVEQATQAIPMERWCGGSRSGSCAHPHHQVVPFRCLPGEFVSEALLVPEGCRFLHQERMDQCESSTRRHQEAQEACSSQGLILHGSGMLLPCGSDRFRGVEYVCCPPPGTPDPSGTAVGDPSTRSWPPGSRVEGAEDEEEEESFPQPVDDYFVEPPQAEEEEETVPPPSSHTLAVVGKVTPTPRPTDGVDIYFGMPGEISEHEGFLRAKMDLEERRMRQINEVMREWAMADNQSKNLPKADRQALNEHFQSILQTLEEQVSGERQRLVETHATRVIALINDQRRAALEGFLAALQADPPQAERVLLALRRYLRAEQKEQRHTLRHYQHVAAVDPEKAQQMRFQVHTHLQVIEERVNQSLGLLDQNPHLAQELRPQIQELLHSEHLGPSELEAPAPGGSSEDKGGLQPPDSKDADTPMTLPKVPAAQEADVEGSLEPRKLRLQ

SEQ ID NO: 4973 - protein, 540 aa, Artificial Sequence
  Synthetic polypeptide
MEAVCGAWGRGLVLGVSVLGSKEPGDPHANAPRALTVLSTSIQAPGSAQVAGLCGRLTLHRDLRTGRWEPDPQRSRRCLRDPQRVLEYCRQMYPELQIARVEQATQAIPMERWCGGSRSGSCAHPHHQVVPFRCLPGEFVSEALLVPEGCRFLHQERMDQCESSTRRHQEAQEACSSQGLILHGSGMLLPCGSDRFRGVEYVCCPPPGTPDPSGTAVGDPSTRSWPPGSRVEGAEDEEEEESFPQPVDDYFVEPPQAEEEEETVPPPSSHTLAVVGKVTPTPRPTDGVDIYFGMPGEISEHEGFLRAKMDLEERRMRQINEVMREWAMADNQSKNLPKADRQALNEHFQSILQTLEEQVSGERQRLVETHATRVIALINDQRRAALEGFLAALQADPPQAERVLLALRRYLRAEQKEQRHTLRHYQHVAAVDPEKAQQMRFQVHTHLQVIEERVNQSLGLLDQNPHLAQELRPQIQELLHSEHLGPSELEAPAPGGSSEDKGGLQPPDSKDDTPMTLPKVPAAQEADVEGSLEPRKLRLQ

SEQ ID NO: 4974 - protein, 20 aa, Artificial Sequence
  Synthetic polypeptide
VNGPWQTTSPRTCLKPTDRP

SEQ ID NO: 4975 - protein, 10 aa, Artificial Sequence
  Synthetic polypeptide
MEAGRGGSHL

SEQ ID NO: 4976 - protein, 162 aa, Artificial Sequence
  Synthetic polypeptide
MWVCLRGILDSQAFWHETLRRWECLLAEMKVSRGERSHCPTQTVKKLLEEQRRRQQQQPDAGGVQGQFLPPPEQPLTPSVNEAVTGHPPFPAHSETVGSGPSSLGFPDWDPNTHAAYTDSPYSCPASAAENFLPPDFYPPSDPGQPCPFPQGMEAGRGGSHL

SEQ ID NO: 4977 - protein, 81 aa, Artificial Sequence
  Synthetic polypeptide
MAHGSVTFRDVAIDFSQEEWEFLDPAQRDLYRDVMWENYSNFISLGPSISKPDVITLLDEERKEPGMVVREGTRRYCPGTT

SEQ ID NO: 4978 - protein, 82 aa, Artificial Sequence
  Synthetic polypeptide
MAHGSVTFRDVAIDFSQEEWEFLDPAQRDLYRDVMWENYSNFISLAGPSISKPDVITLLDEERKEPGMVVREGTRRYCPGTT

SEQ ID NO: 4979 - protein, 85 aa, Artificial Sequence
  Synthetic polypeptide
MNMEGLVMFQDLSIDFSQEEWECLDAAQKDLYRDVMMENYSSLVSLGLSIPKPDVISLLEQGKEPWMVSRDVLGGWCRAHNCKGG

SEQ ID NO: 4980 - protein, 89 aa, Artificial Sequence
  Synthetic polypeptide
MENLTKHSIECSSFRDPPQALPETQLCVSSSYSLWSSDCKAISMPRQGLSWRAMEEDRPAGCRFCSRACTMLAHACNPSTLGGRDGQIT

SEQ ID NO: 4981 - protein, 235 aa, Artificial Sequence
  Synthetic polypeptide
MPTRRWAPGTQCITKCEHTRPKPGELAFRKGDVVTILEACENKSWYRVKHHTSGQEGLLAAGALREREALSADPKLSLMPWFHGKISGQEAVQQLQPPEDGLFLVRESARHPGDYVLCVSFGRDVIHYRVLHRDGHLTIDEAVFFCNLMDMVEHYSKDKGAICTKLVRPKRKHGTKSAEEELARAGWLLNLQHLTLGAQIGEGEFGVVQLKTCKSSEPQFPPLEQGVMAAVMRSK

(The sequence listing continues in the following parts.)
